United States Patent Application Publication US 2018/0126003 A1 - sequence listing, part 78

SEQ ID NO: 142216 - DNA, 3459 bp, Artificial Sequence
  derived and/or modified sequence
atgagcaccctgctggacatcaagagctctgtgctgcggcaggtgcaggtgtgccccagcttcagaagaagaacagagcaggaccccggcagcgccagcgctgacccccaggagcccgccactggagcctggaagccaggagatggagtggagttctttgcccacatgaggctgatgctgaagaagggggagggccggcagggcctgccctgcctggaggtgcccctgcggagcggcagccctgcccctcctgagcctgtggaccccagcctgggcctgcgggccctggcccctgaggaggtggagatgctgtatgaggaggccctgtacacagtgctgtaccgggccggcaccatgggccctgaccaggtggatgatgaggaggccctgctgagctacctgcagcaggtgtttggcaccagcctggaggagcacacagaggccatcgagcgggtgaggaaggccaaggcccccacctacgccctgaaggtgtctgtgatgagggccaagaacctgctggccaaggaccccaacggcttcagtgacccctactgcatgctgggcatcctgcctgccagtgatgccacccgggagccccgggcccagaaggagcagagatttggcttcaggaagggcagcaagaggggcggccccctgcctgccaagtgcatccaggtgacagaggtgaagagcagcaccctgaaccctgtgtggaaggagcacttcctgtttgaaattgaagatgtgtccacagaccagctgcacctggacatctgggaccatgatgatgatgtgtccctggtggaggcctgcaggaagctgaatgaagtcatcggcctgaagggcatgggccgctacttcaagcagatcgtgaagagcgcccgggccaatggaacagctggccccacagaggaccacacagatgacttcctgggctgcctgaacatccctgtgcgggaggtgcctgtggccggcgtggaccgctggttcaagctggagcccaggagcagcgccagccgggtgcagggccactgccacctggtgctgaagctgatcaccacccagagggacacagccatgagccagaggggccgcagcggcttcctgagccacctgctgctgctgagccacctgctgcggctggagcacagcgctgaggagcccaacagcagctcctggagaggagagctgagcaccccagctgccaccatcctgtgcctgcacggggcccagagcaacctgagccccctgcagctggccgtgctgcactggcaggtgagcagccgccaccaccagacctgcaccctggactacagctacctgctgggcctgctggaggacatgcaggcccactgggaggaggcccccagcctgccccaggagcaggaggagagcctggccgacagcctgagcgccttcagcgagtttggcctgcagctgctgcggcagctgcgggactacttccctgccaccaacagcacagctgtgcaccggctggagctgctgctgaagtgcctgggcaagctgcagctgttccagcccagctttgagatctgcccctttgaaagtgagctgaacatggacattgctgctgccctgaagaggggcaaccgggagtggtatgaccgcatcctgaatgacaagagcccccgggagcagcccggcccccagaggctgcccggcctggtggtgctggctgatgctgtgtatgatgacctgcagttctgctacagcgtgtatgccagcctcttccacagcatcctgaatgtggatgtgttcaccctgaccttccggcagctggagcggctggtggccgaggaggcctgggtgctgacagaggagctgagccccaagatgaccctggaggtggccagcggcctgtttgagctgtacctgaccctggccgacctgcagcgcttctgggacagcatccctggccgggacagccgcagcctggccctggccggcatccacgcccccttcctgcctgctgtgaagctgtggttccaggtgctgcgggaccaggccaagtggaggctgcagggcgctgtggacatggacaccctggagcctgtggatgccagcagccgccacagcagcagcgctgccacagctggcctgtgcctgagccacatccaggagctgtgggtgcggctggcctggccagaccctgcccaggcccagggcctgggcacccagctgggccaggatgtgtgtgaggccaccctcttctacacagagctgctgaggaagaaggtggacacccagcctggagctgctggggaggccgtgtctgaggccctgtgtgtggtgctgaacaacgtggagctggtgaggaaggccgccggccaggccctgaagggcctggcctggccagagggcgccaccggccctgagggcgtgctgccccggcccctgctgagctgcacccaggccctggatgatgacctgcagcgggaggcccacacagtgacagcccacctgaccagcaagatggtgggggacatcagaaaatatgtgcagcacatcagcctgagcccagacagcatccagaatgatgaagctgtggcccccctgatgaagtacctggatgagaagctggccctgctgaatgccagcctggtgaagggcaacctgagccgggtgctggaggccctgtgggagctgctgctgcaggccatcctgcaggccctgggcgccaacagagatgtgtctgctgacttctacagccgcttccacttcaccctggaggccctggtgtccttcttccacgccgagggccagggcctgcccctggagagcctgagagatggcagctacaagaggctgaaggaggagctgcggctgcacaagtgcagcacccgggagtgcatcgagcagttctacctggacaagctgaagcagaggaccctggagcagaaccgcttcggccgcctgtctgtgcgctgccactatgaagctgctgagcagaggctggccgtggaggtgctgcatgctgctgacctgctgcccctggatgccaacggcctgagtgaccccttcgtcatcgtggagctgggccccccccacctgttccccctggtgcgcagccagaggacccaggtgaagaccaggaccctgcaccctgtgtatgatgagctgttctacttctctgtgcctgctgaggcctgcagaagaagagctgcctgtgtgctcttcaccgtgatggaccatgactggctgagcaccaatgactttgctggggaggccgccctgggcctgggcggcgtgactggagtggcccggccccaggtgggcggcggggcccgggccggccagcctgtgaccctgcacctgtgccggccccgggcccaggtgcgcagcgccctgcggcggctggagggccgcaccagcaaggaggcccaggagtttgtgaagaagctgaaggagctggagaagtgcatggaggccgacccctag

SEQ ID NO: 142217 - DNA, 3564 bp, Artificial Sequence
  derived and/or modified sequence
atgcggccccggggcgccgccttcgccgccggcccccccggcgacctgcacctcgggacagccataggcttcgccggagcgatttggcgtagccgatctcctgccatgtccaccttgctcgatattaagagcagcgtgctgaggcaggtccaagtgtgcccttcatttcgacggagaactgagcaggacccggggagtgcatccgccgacccccaggaacccgcgactggtgcatggaaaccaggggacggcgtcgagttcttcgcccacatgagactgatgctgaagaagggggaaggtaggcaggggctcccctgtttggaagtgccactgaggagtggctctcccgcgcctcccgagcccgtggacccatcgcttggcctccgtgccctggcgcccgaagaagtggagatgctctacgaggaagctctttataccgtcctatatagggcaggcaccatgggacccgaccaggtagacgatgaagaggccctcctctcttatctccagcaggtcttcggtacatcgttggaagagcacactgaggcaattgaacgcgtacgcaaggccaaggccccaacttatgccttaaaggtctcagtgatgagagctaagaacctcctcgccaaagatcccaacggtttctccgatccatattgtatgctgggtatcctgccggccagcgatgccacaagagagcccagggctcagaaagagcagaggttcggattcaggaagggatcaaaacgagggggcccccttccagccaagtgtatacaagtgactgaagtgaaatcttccacacttaaccctgtctggaaagagcactttctctttgaaatcgaagacgtgagcactgatcagctacatctcgacatctgggatcacgatgacgacgtgagtctcgtggaggcatgcaggaagttaaatgaggtgatcggcctcaagggcatgggcagatacttcaaacagattgtaaagtccgccagagccaacggcacagcaggacctaccgaagatcacactgacgactttcttgggtgtctgaatatacctgtccgggaggtccccgtggcgggagtggacagatggttcaaactggagcctcgatcgtccgcaagtagagtgcagggccattgtcacctagttctgaagctgatcacaacgcagcgagataccgctatgagccagcggggccgcagcggttttctatctcatcttcttctactgagccacctgctgcgactcgaacactcagcagaagaacccaatagcagctcctggcggggcgagctgtctaccccagctgccacaattctgtgcttgcacggcgctcagtcaaacctctcccccctccagctggcggtgttacattggcaggttagcagccgacatcaccaaacatgcactcttgactattcttacctgctaggactgttagaggacatgcaagcccactgggaggaagccccgtcactgcctcaggagcaggaggaatcgctggcagactcgctgtcagccttcagcgaattcggactgcagctgcttagacagctgcgcgactatttcccagcaacaaacagcaccgccgtgcatagactcgagctgctgcttaagtgtttgggcaagcttcagctctttcagccaagtttcgagatctgtccctttgagtccgagctaaacatggatatcgcagcggcgctcaagcgcggcaaccgcgaatggtatgatcgtatcttgaatgacaaaagtccccgcgaacagcctggcccgcagcgattgcccgggcttgttgtcctggcagacgctgtgtacgacgatcttcagttttgctactccgtgtatgctagcctttttcactccatccttaatgttgatgtcttcactcttacatttcgtcaattggaacgcctggtggctgaagaagcctgggtgcttactgaggagttgagtcccaagatgacccttgaggttgcttccggcctgttcgagctgtacctaacactagcagacctacagcgcttctgggactcgattcccggcagggacagtagatctctcgcccttgctgggattcacgcccccttcctcccagcagttaagctgtggttccaggtgctccgcgatcaagctaagtggcggctgcagggggcagtggatatggacaccctggaaccggtcgatgcgagtagcagacattcgtctagtgcggccaccgcaggactttgcctttcacatatccaagaactgtgggttaggctggcttggcccgacccagctcaagcccagggcctggggacccaacttgggcaagacgtctgtgaagccacactgttctacaccgagctattgagaaaaaaggtcgacactcaacctggtgccgccggcgaagcagtctccgaggctctgtgtgttgtactgaacaatgtggaactggttcgcaaggcagctgggcaggccctcaagggcttggcgtggccggagggcgcaacaggaccagagggcgttctccctaggccactcctgagttgtacgcaggctctcgatgatgatctgcaacgcgaggcccataccgttacagctcacttgacctctaagatggttggagacatcagaaaatacgtgcagcacatttccctttcacctgattcaatacagaatgacgaggcagtcgcgcccctcatgaaatacctggacgagaaactggctctgttgaacgcctccctcgtgaaaggaaatctctcaagagtgctcgaggcgctgtgggaactcctcctgcaggcgatcctgcaggctctcggcgcaaatcgagacgtctccgctgacttctactctagattccacttcactttggaagctctggtcagctttttccacgccgagggccagggactgccacttgagtccttgcgagacggatcctacaaacggttaaaagaggagttaagactgcacaagtgcagcacgagggagtgtatcgagcagttttatctcgacaagctgaagcagagaaccctcgagcagaataggtttggcagactctccgtccggtgccactatgaggccgccgagcaacgtctggcagtggaggtacttcacgctgccgatttactgcctctggacgcaaatgggctgtccgatcctttcgtgatagttgagcttggcccaccacatctattcccactggtgcgctcgcagcggactcaggtcaaaacacgaacactgcatcccgtgtacgatgaactgttctacttcagcgtgcctgccgaagcatgtcgccgtagggccgcgtgtgtgctgtttacagtcatggaccacgactggctttcgacgaatgactttgcaggcgaagcggccctcggactgggtggcgtgaccggcgttgctcgacctcaggtaggcggtggtgcgcgtgctggccagcccgtgacacttcatttgtgcagaccgcgcgcccaggtcagaagtgcgctccgtaggctcgagggccggacgtcaaaggaggcccaggaattcgtgaaaaagctgaaggaactcgaaaagtgtatggaggctgacccttag

SEQ ID NO: 142218 - DNA, 3459 bp, Artificial Sequence
  derived and/or modified sequence
atgagcaccctgctggacatcaagagcagcgtgctgcggcaggtgcaggtctgcccaagttttagaagaaggacagagcaggacccagggagcgccagcgccgatccacaggagcccgccactggagcctggaagcctggtgacggcgtggagttcttcgcccacatgcgacttatgttgaagaagggcgaaggcaggcaaggcctgccttgcctggaggtcccactgagaagcggaagcccggccccaccagagcctgtcgatccaagcctggggctgagagccctcgcccctgaggaagtggaaatgctttatgaagaggccctgtacacagtgctataccgggcggggacgatgggcccggaccaggtggacgacgaggaagccctgctgagttacctgcagcaggtcttcggtacaagtcttgaggagcacacagaggctattgagagagtccgtaaagctaaagcccccacctacgcactgaaggtatcagttatgagagccaaaaacttgctcgcaaaagatcccaatggattttccgacccctactgtatgttaggcatccttccggcctctgacgctactcgggagccacgcgcccagaaggagcagcggttcggttttcggaagggaagtaagcgagggggcccactgcctgcaaagtgtatacaagttaccgaggtgaaatcttcaacacttaaccctgtctggaaggaacactttttattcgaaatcgaggatgtgtcgacagaccagcttcacctcgatatatgggaccacgatgatgacgtttcgctggtggaggcctgtcgaaagctgaatgaagttattggcctgaaaggcatgggacgctacttcaagcaaattgtgaaatctgcacgtgccaatggaacagctggcccaacagaagatcacacagatgacttcctgggctgcctgaacatcccagtccgggaagttcctgttgccggagtcgacaggtggttcaagttggaacctagatcttccgcttcgagggtgcagggccattgtcatctggtgctgaagttgatcacaactcagagagacacggccatgtctcagagaggaagaagtggatttctgtcccaccttcttcttttgagtcatttactgagattggaacatagcgccgaggagccaaatagtagttcctggcgaggcgaactttctacccccgcagctactatcctctgtttgcatggcgcccagagtaatctgtcccccctacagctcgccgtgttgcattggcaggttagctcccgccaccaccagacatgcaccttagattactcttatctcctgggactgctggaggatatgcaagcacactgggaagaagcgccgtctcttcctcaagaacaagaagagagccttgccgacagtctgtccgcctttagtgagttcgggctgcagctcctaaggcagcttagggattacttcccagcgaccaatagtaccgccgtccatagattggagctgctgctgaagtgtctagggaagctgcaactctttcagccgagcttcgagatctgcccgtttgaatcagagttgaatatggacattgcagccgctctgaaacggggcaacagggaatggtatgacaggattctgaacgacaagtcacctagagaacagcccggtccccagaggctgcccggcctcgtggtgctggccgacgcagtgtatgacgatctgcaattctgctacagtgtgtatgcaagcctgtttcacagtattttgaacgtcgacgtgttcactctgacatttaggcaactcgaacgtctggtcgcagaggaggcgtgggttctgactgaagagttgagccccaaaatgacgctagaagtagcatcaggattgttcgaactctacctcacactggctgacttgcagagattctgggacagtatcccaggtcgcgattcccggtccttagctctggccgggattcacgcaccctttcttcccgcagtgaagctgtggttccaggtgctgagagatcaggccaaatggcggttgcagggggcagtcgacatggataccctggagcctgtggacgcatcttctcggcattcaagctctgccgcaacggctgggctatgtctgtcacacattcaggagctttgggtaagactggcttggccagatcccgctcaagcccaggggctgggtactcagctgggtcaagacgtgtgcgaagccacccttttttacacagagctcctgcgtaagaaagtcgacactcagcctggcgccgcaggtgaagcagtgagtgaggcactctgtgtggttctgaataacgtagaactcgtgaggaaagccgcgggacaggccttaaaggggcttgcctggccagagggggcaacaggccctgagggcgtcctgccccgccccctgctcagctgcacgcaagcactcgacgatgacctacagagagaggcccacacagtgaccgcccatctcacatcaaagatggttggggatattagaaagtatgtccaacacatatcactgtcaccagactccatccagaacgacgaagcggtcgctcctctgatgaagtatctagacgagaagctggccctgcttaatgcttcccttgtgaaaggcaacctgtcccgagtgctggaagccctgtgggaattgttgctgcaagctatcctgcaggccctgggggctaacagggacgtgtccgcagacttctactctaggttccattttaccctggaggctcttgtaagctttttccatgctgaggggcaaggactccccctggagtctttaagagatggctcttataaaaggctgaaagaggagctccgattacacaaatgctcgactagggaatgtattgagcaattttacctcgacaaactcaaacagagaacactggaacagaataggtttggtcgcctgtccgtgcgatgccactatgaagccgcagagcagcgacttgccgtggaagtgctacacgcagctgatctgcttccactagacgcgaacggcctgtctgaccccttcgtcattgtggagctcggccctcctcatctgttcccactagtaaggtctcaaaggacacaagtaaagactcgaaccctgcacccagtgtacgacgaattgttctacttttctgttccagcagaggcatgcagaagaagagcagcctgtgtgctctttaccgtgatggatcacgattggctcagtacaaatgacttcgcaggggaagctgctttaggattggggggcgtcacaggggtcgcaaggccgcaggtagggggaggagccagagccggccagccggtgacactccacttgtgtcgaccacgagcccaggtgcgaagcgccctccgtagactggagggtcgtacatctaaggaggcgcaagaatttgtcaagaaactcaaagaattagagaaatgtatggaggcagacccgtag

SEQ ID NO: 142219 - DNA, 3564 bp, Artificial Sequence
  derived and/or modified sequence
atgcggcctcgtggagcagctttcgctgcaggccctccaggggacctgcatctggggacggccatcggcttcgctggagcgatctggagaagccgctctcccgcaatgagcactctgctcgacattaaatccagtgttctccgacaagtgcaggtgtgtccgagtttccggaggaggaccgagcaggatcctggttcagcctccgctgatcctcaggagcctgccacgggagcgtggaagccaggcgacggtgtggagttctttgcgcatatgcgcctgatgctcaaaaagggagaaggtagacagggactcccatgtctggaagttccactccgatcgggctcacccgcacctccggaaccagtggacccaagtcttgggcttcgtgccctggctccagaagaagtggaaatgctgtacgaggaggctctttacaccgtcctctacagagccggaaccatgggccctgatcaagtggacgatgaagaagctctgttgagctacctccagcaggtctttggaacatccctagaagagcacactgaagccattgagcgggtgagaaaagcgaaggcccctacctatgcattgaaggtctctgtgatgcgggcaaagaacctcttggccaaggaccccaatggcttctccgatccctactgtatgctcggaattctgcccgcttcagatgcgacgagggaaccaagagcacagaaagagcagagattcggttttagaaagggatcaaaaagggggggacccctgccagcaaagtgcatccaggtcactgaagtgaaaagctctaccctcaatccggtttggaaggaacatttcttgttcgagattgaggacgtgtcaacagatcagctgcatttggacatctgggatcatgatgatgatgtgtccctcgtggaggcgtgtagaaagctgaacgaggtgatcgggctgaaaggcatgggtagatacttcaaacagatcgtgaagagtgcaagggcaaacggaaccgctggcccaacagaggatcatactgatgactttctcgggtgcctcaatattccagttcgagaggtgcctgtggcaggagtggacagatggtttaagctggaaccgagatcatctgcctcccgagtgcagggacactgtcacttggtgctcaagcttattacaacccagcgggacaccgccatgtcccaacggggtaggtccgggttcctaagccacctgctcctcctgtctcatctgctaaggctcgaacattctgccgaggaaccaaacagctcttcatggcggggagagctgagtacccccgcagccacgatactttgcctgcatggagcacagtcaaatctcagccccctgcagctggccgtgctacactggcaggtcagttcaagacatcatcagacttgcactctagattattcatatttactgggcctcctggaagacatgcaagcacactgggaagaagctccctccctcccacaagagcaggaagagagccttgccgattccttgtcagccttcagtgagttcggcctccagctcctcaggcagctgcgtgactactttcccgctactaacagtaccgcagtccaccgcttagagctactgcttaaatgcttaggcaaattgcagctcttccagccttcctttgaaatctgtccattcgagagcgaattgaatatggacatagcggctgcgctcaaaagaggaaatcgcgagtggtacgatagaattcttaatgacaaatcacctcgcgagcagcccggaccacaacgactgccgggtctcgtggtattggccgacgcggtgtatgatgacctgcagttctgctattctgtgtacgcaagtttgttccactctattctgaatgtggacgtgtttactctcaccttccgtcaactggaaagacttgtcgcggaggaggcatgggtactgaccgaggaactttcacccaagatgactctcgaagtggcatccggcctctttgaactgtatcttacactggctgatctgcagcgtttctgggactccatcccaggaagggactcgcggtccttggcgctagcaggcatccacgcaccttttttgccagccgttaaactatggttccaggtccttagggatcaggccaagtggcggctacagggagctgtcgatatggatactctcgagcccgtggacgcctccagccggcattcatccagcgccgcaacagcgggactgtgcttgagccatatccaagaactgtgggtcaggctcgcctggcccgaccccgctcaagctcaggggctgggtactcaattgggccaagacgtttgtgaagcaacccttttttacaccgagctgcttcggaagaaagtggacactcagcccggagctgcgggagaagccgtctctgaggccctatgcgtcgtactgaataacgtcgaactggtgcgaaaagccgcagggcaggccctgaagggccttgcgtggccagaaggtgccactggtccagaaggggtcctgcctcggccacttctgtcatgtacccaggcgttggacgatgatctccagagagaggcccatacagtgacagcccatctcaccagtaaaatggtgggcgacattagaaaatacgtacagcacatcagtctgtcacccgacagtatccagaacgatgaggcggtagccccactaatgaagtacctagacgaaaagctggcgttgctcaatgcgagcctggtgaaagggaatttatctcgcgtcctcgaagctctgtgggagctcttactgcaggcaatactccaggccctgggagcaaatagagacgtatcggccgatttttactcccggttccatttcactctcgaggctctggtcagctttttccatgccgaagggcagggactcccgctcgagagcttaagagacggctcatataagcgattaaaggaggagctgagactccacaaatgttctacacgcgagtgtattgagcagttttatctggacaaactgaagcaaagaacacttgaacagaaccggttcgggcgactgtcagtaaggtgtcattacgaggccgcagaacagagattggctgtggaagtgctacatgccgcagatttgctgcctctcgatgctaatggtctctctgatccctttgtcatcgtggaattaggccctccacacctttttcccctcgtgcgatctcagagaacgcaggtgaaaacacgcaccctacacccagtttacgatgaattgttctactttagcgtgccagctgaagcatgcaggcgccgagctgcatgtgtcctgtttactgtaatggaccacgattggctaagtaccaatgatttcgccggtgaggccgctctgggcctggggggagtaaccggcgttgctcggccacaagttggcggaggcgctagagccggtcaacccgtgacgctgcacttatgtcgcccacgggctcaggttagaagcgccctgcgcaggttggagggacggaccagcaaggaggcccaggaattcgtcaaaaagctgaaagaattggaaaagtgtatggaggcagatccctag

SEQ ID NO: 142220 - DNA, 3459 bp, Artificial Sequence
  derived and/or modified sequence
atgtcgactctgctagacatcaaatccagcgtactgcgacaggtgcaggtgtgtccgtcttttcggagaaggactgaacaggaccccggaagcgcctctgccgatccccaggagccggcaaccggagcatggaagcctggagatggggtggagttcttcgcccatatgagactcatgttgaaaaaaggggaagggaggcaaggactgccctgcctggaggtgccacttcggtctggttctccagcgcctccagaacccgtggatccttccttaggcctgcgggcattggcccctgaggaagttgagatgctctacgaagaggctttgtacactgtactctacagggctggcaccatgggcccagaccaggtcgatgatgaagaggccctcctcagctatttgcagcaagtgttcgggacctccttggaagaacacaccgaggcgattgagcgcgtacggaaggcaaaggcacctacatacgctctgaaggtgagtgtgatgcgcgcaaagaacttgctggcgaaagaccccaacggcttttccgacccatattgcatgctgggaattctgcctgcaagtgatgccacgcgagaaccgagggctcaaaaggagcaaaggtttgggtttaggaaaggcagtaagcgtggcggtcctcttcctgcaaagtgtattcaggtcaccgaagttaaatcaagcaccctgaatccggtttggaaagagcactttctgttcgagatcgaggacgtttctaccgaccagctgcacctggatatctgggaccacgacgatgatgtaagtctggttgaagcatgtcgcaagttaaatgaggtcatcgggctcaagggcatggggcgatactttaagcagatcgtcaaatccgcgagagctaacggaactgctggacccactgaggaccatactgatgatttcctgggctgtctgaacatccccgtcagggaggtgccagtggcaggcgtcgaccgctggttcaagctcgagccacgctccagcgcaagccgtgttcaggggcattgccatctggttctgaaactgatcactacacagagggataccgcaatgtcccaaagggggaggtcggggttcctaagccatcttctgctcctgtctcatttgctgcgactagagcactccgccgaggagcccaactcttctagctggaggggcgagctgtccacccctgccgcaactattctgtgcctgcacggagctcagagtaatctgtctcctcttcaactggccgtgcttcactggcaggtgtcgtcccgacaccatcagacgtgcacgcttgactattcttaccttctcggactcctggaggatatgcaagcacactgggaggaggctccatctctgccgcaggagcaggaggagagccttgccgactctctgtcagcctttagcgaattcggtctacaactgctgaggcagctgagagattatttccccgcaacgaacagcactgcagtgcataggctcgagttgctcctgaagtgcttaggaaaactacagctgttccagccatctttcgagatctgcccgtttgagagtgagttgaacatggacattgcggcagccctcaagaggggtaatcgcgagtggtatgataggatcctgaatgacaaatcccctagagagcagccaggccctcaaagactgcccggactcgtggtgctcgccgacgctgtctacgatgacctgcagttctgctactccgtctacgcgtcgctgttccattctatactgaatgtggacgtgttcaccctgactttcaggcaactggagcgactagtggctgaagaggcctgggtgcttactgaggaattgtctccgaaaatgacactggaagtggcgagcggcctgtttgagctgtatctaactctggctgacctccaacgcttctgggattccattcctgggagagattctcgctctctcgcccttgccggaattcatgcaccgttccttccagcagtgaagctgtggtttcaagtgttgagagatcaggccaagtggcggttgcagggcgcagtggatatggatacccttgagcccgtggacgcctcttcccgacattctagctctgctgccaccgccggactttgccttagccacatccaggagctgtgggtgcgcctcgcctggccagatccagcacaggcacagggcctggggacacagctagggcaggacgtttgcgaggcgacactgttctataccgaactcctgcgcaagaaagtggatactcagcccggagctgctggcgaggccgtgagcgaagcgctgtgcgtggtcctcaataacgtggagctggtgcgtaaggctgccggtcaggcgcttaagggactggcctggccggagggggcaactggacctgagggggtcctcccgagaccattgctttcttgcacccaagctctagatgatgacctacagcgagaggctcacactgttactgcccacttgacaagtaaaatggttggagatatccgtaagtatgttcagcacatatcactgagccctgattcgatccagaacgatgaggccgtagcccctctcatgaagtacttggatgagaagttggcactcctcaatgcaagcctggtaaaaggcaatctttctcgagtactcgaggcgctgtgggagttgcttctgcaggccatattgcaggccttgggagccaatagggacgtgtctgccgatttctacagtcggttccattttacactcgaggcgttggtgagttttttccatgccgagggacaaggccttcccttggagtctttgagagacggtagctataagcgcctcaaggaggagctgaggctccataagtgctccaccagggagtgcatagagcagttctatctggataagctgaagcagagaacccttgagcagaatagatttggcagactatcagttagatgccattacgaagctgctgagcagagactcgcagtggaggtcctacatgcagccgacctattgcctctagatgctaacggcctgagtgaccctttcgtgattgtagagctgggaccccctcatctattcccacttgtccgatctcagaggacccaggtgaagacacggactttgcatcctgtgtatgatgagctgttctattttagtgtgcctgctgaagcctgcagaaggcgtgccgcatgtgtcttgtttaccgtaatggaccatgactggctgtctactaatgacttcgctggcgaggccgcattgggactcggtggagtaaccggggtagctcggcctcaagtgggaggaggagcaagagccggtcaacccgtaacacttcatctgtgccgacctagagcccaagtccgatcggcccttcggaggctggaagggcgaacgtcgaaagaggcacaggaatttgttaaaaaattaaaggagttggagaagtgcatggaggccgatccctag

SEQ ID NO: 142221 - DNA, 4531 bp, Artificial Sequence
  derived and/or modified sequence
ttcgactggaatgagaccccggggagcagcgtttgcagcgggcccgccaggtgacctgcacctgggcaccgccatcggcttcgcaggggccatctggaggagtcggtcacccgccatgtcgaccttgctggacattaagagcagcgtgctcaggcaggtgcaggtgtgcccgtccttccgccgcaggactgagcaggacccagggagtgccagcgccgacccgcaggagcctgccacgggggcctggaaacccggggatggcgtggagttctttgcccacatgcgcctcatgctgaagaagggggaaggcagacagggcttgccgtgcctcgaggtccccctgcgcagtggctcgccagcacccccggagcctgtggatcccagcctcggcctgagagccctggccccagaggaggtggagatgctctacgaggaggccctgtacacggtgctttaccgcgcgggtaccatgggccctgaccaggtggacgacgaggaggccctgctcagctatctccagcaggtgtttggcaccagccttgaggagcacactgaggccatcgagcgagtgaggaaggccaaggcccccacgtatgccctgaaagtctctgtcatgcgtgccaagaaccttctggccaaggaccccaacggcttcagcgacccatactgcatgctgggcatcctgcctgcctcggacgccacgcgggagccccgtgcacagaaggagcagcgcttcggcttccgcaagggcagcaagcgcggtggacccctgcctgccaagtgcatccaggtcaccgaggtgaagagcagcaccctgaaccccgtctggaaggagcacttcctcttcgagattgaggatgtgagcacggaccagctgcacctggacatctgggatcatgacgacgatgtatccctggtagaagcgtgcaggaagctgaatgaagtcatcggcctgaagggcatgggcaggtacttcaaacagatcgtcaagtcagcccgcgcaaacgggacagcaggacccaccgaggaccacaccgatgacttcctggggtgcctcaacatacctgtccgggaggtgcctgtggctggcgtcgaccgctggttcaagctggagccacgctccagtgcctcgcgtgtgcagggacactgccacctggttctcaagctgatcactacgcagagggatacggccatgagccagcgcgggcgatccggcttcctgtcccacctgctgctgctcagccatctgctgcggttggagcactcagcagaggagcccaactccagcagctggcgaggagagctcagcacaccagccgccaccatcctctgcctgcacggagcccagagcaacctgtcacccttgcagctggccgtgctgcactggcaggtcagcagccgccaccatcaaacctgcacgctggactacagctacctgctggggctgctggaggacatgcaggcacactgggaagaggctccttcactgccccaggagcaggaggagagcctggctgatagcctttccgccttctctgagttcgggctgcagctgctgcgccagctccgagactacttccctgccaccaacagcaccgctgtccaccgcctggagctgctgctgaagtgtctgggcaagctgcagctcttccaaccctcctttgagatctgccccttcgagtcggagctgaacatggacattgctgcggccctgaagagaggcaaccgtgagtggtacgacaggatcctgaatgacaagagtccccgagagcagccaggaccacagcgcctgcctgggctggttgtgctggctgacgccgtctatgatgaccttcagttctgctacagtgtgtacgccagcctcttccacagcatcctcaatgtggacgtcttcaccctgaccttccggcagctggagcgtctggtggctgaggaggcgtgggtgctgacggaggagctgagccccaagatgaccctggaggtggcctcggggctctttgagctctacctgaccctggctgacctccagcgcttctgggatagcatccctggccgggacagccgctctctggccctggctggcatccacgcccccttcctgcctgctgtgaagctctggttccaagtgctgagggaccaggccaagtggaggcttcagggagccgtggacatggacacgctggagcccgtggacgcctcctccaggcacagcagctccgcagccactgctggtctctgcctcagccacatccaggagttgtgggtgcgcctggcgtggcctgaccctgcccaggctcaggggctgggcacccagcttggccaggacgtgtgtgaggccaccctcttctatacggagctgcttcggaagaaggtggacactcagccaggggcggccggtgaagcagtgagcgaggcgctctgcgtggtcctcaacaatgtggagctcgtgcgcaaggctgctgggcaggccttgaagggcctggcatggccagagggggccacggggcccgagggggtgctcccccgccctctgctcagctgcacacaggccctggacgatgatctgcaacgggaggcccacacggtgacagcgcacctgacctctaagatggtgggcgacatccgcaagtatgtacagcacatcagtctctcgcctgactccatccagaacgatgaggccgtggccccgctcatgaagtacctggatgagaagctggccctgctgaacgcctcgctggtgaaggggaacctgagcagggtgctggaggccctgtgggagctactcctccaggccattctgcaggcgctgggtgcaaaccgtgacgtctctgctgatttctacagccgcttccatttcacgctggaggccctggtcagttttttccacgcagagggtcagggtttgcccctggagagcctgagggatggaagctacaagaggctgaaggaggagctgcggctgcacaaatgttccacccgcgagtgcatcgagcagttctacctggacaagctcaaacagaggaccctggagcagaaccggtttggacgcctgagcgtccgttgccattacgaggcggctgagcagcggctggccgtggaggtgctgcacgccgcggacctgctccccctggacgccaacggcttaagtgacccctttgtgatcgtggagctgggcccaccgcatctctttccactggtccgcagccagaggacccaggtgaagacccggacgctgcaccctgtatacgacgaactcttctacttttccgtgcctgccgaggcgtgccgccgccgcgcggcctgtgtgttgttcaccgtcatggaccacgactggctgtccaccaacgacttcgctggggaggcggccctcggcctaggtggcgtcactggtgtcgcccggccccaggtgggcgggggtgcaagggctgggcagcctgtcaccctgcacctgtgccggcccagagcccaggtgagatctgcgctgaggaggctggaaggccgcaccagcaaggaggcgcaggagttcgtgaagaaactcaaggagctggagaagtgcatggaggcggacccctgagtccatcagctgccagccccggccctggcccccaccccaagttccctgaagcatcctccagctcactgtggccagctttgtgcaaccagggcccacggcgcccctcctgtgctgtgacgtgtgtgtcgtggctggccccgcggcgcctaccgccctggccgtgtctgtctggtgtgtgctgtgaacccctgcacccaaccccacatctgggtggccaacttggcaggacttggccagcagctgcccaggacacagtgcaggccagagcgggcttgaccacctggtgggcctccctgcccgcttccttgggctccccggccctgggtgggcggtgggcagctggtctccagggactcagtgagtggctgtgctctctgcacaacgggcaatgtgcagacgcatttttggtaatcacagctggggagtgaaaagggtgccactggcaccactgggtggatggtccagagcctccacccacagaggggatgcaaagggcaggtgagtcaagaaccgcataggtctccagtccccacggggctcccaggccggggaaaggttcccctgaggtcactctgaggccagggacgtcacccaaggctggtggtcagtgtgaagggctccgtgccaactggtcagctgtccttcacgcacatatccgtggccacctgagacctgctccacgacccttccaggcagagccgagagttcgccccaacccttccccaggcccagtgtgaaaaacagactcacaaggggcttcttggcctgcagcttcatttgcgagagcgccgaggcaggacacagagcacagctgtgctggaagtgtggggagaacccggacagctcagtcctgccagcagccgcaaagagccgaggctgccaggcccatttatgtccctcatgtctctagattttctcgtcacccagcctcaaaaatatatgtgtctgcaaccctca

SEQ ID NO: 142222 - DNA, 3886 bp, Artificial Sequence
  derived and/or modified sequence
agtcgtcggcgcgcgcggctgggagcggtagctgtgcctcggcgtccccgagctggtgccgagcgcagcgccccaggagcccccccatccccgcgccggcccacggtcacccgccatgtcgaccttgctggacattaagagcagcgtgctcaggcaggtgcaggtgtgcccgtccttccgccgcaggactgagcaggacccagggagtgccagcgccgacccgcaggagcctgccacgggggcctggaaacccggggatggcgtggagttctttgcccacatgcgcctcatgctgaagaagggggaaggcagacagggcttgccgtgcctcgaggtccccctgcgcagtggctcgccagcacccccggagcctgtggatcccagcctcggcctgagagccctggccccagaggaggtggagatgctctacgaggaggccctgtacacggtgctttaccgcgcgggtaccatgggccctgaccaggtggacgacgaggaggccctgctcagctatctccagcaggtgtttggcaccagccttgaggagcacactgaggccatcgagcgagtgaggaaggccaaggcccccacgtatgccctgaaagtctctgtcatgcgtgccaagaaccttctggccaaggaccccaacggcttcagcgacccatactgcatgctgggcatcctgcctgcctcggacgccacgcgggagccccgtgcacagaaggagcagcgcttcggcttccgcaagggcagcaagcgcggtggacccctgcctgccaagtgcatccaggtcaccgaggtgaagagcagcaccctgaaccccgtctggaaggagcacttcctcttcgagattgaggatgtgagcacggaccagctgcacctggacatctgggatcatgacgacgatgtatccctggtagaagcgtgcaggaagctgaatgaagtcatcggcctgaagggcatgggcaggtacttcaaacagatcgtcaagtcagcccgcgcaaacgggacagcaggacccaccgaggaccacaccgatgacttcctggggtgcctcaacatacctgtccgggaggtgcctgtggctggcgtcgaccgctggttcaagctggagccacgctccagtgcctcgcgtgtgcagggacactgccacctggttctcaagctgatcactacgcagagggatacggccatgagccagcgcgggcgatccggcttcctgtcccacctgctgctgctcagccatctgctgcggttggagcactcagcagaggagcccaactccagcagctggcgaggagagctcagcacaccagccgccaccatcctctgcctgcacggagcccagagcaacctgtcacccttgcagctggccgtgctgcactggcaggtcagcagccgccaccatcaaacctgcacgctggactacagctacctgctggggctgctggaggacatgcaggcacactgggaagaggctccttcactgccccaggagcaggaggagagcctggctgatagcctttccgccttctctgagttcgggctgcagctgctgcgccagctccgagactacttccctgccaccaacagcaccgctgtccaccgcctggagctgctgctgaagtgtctgggcaagctgcagctcttccaaccctcctttgagatctgccccttcgagtcggagctgaacatggacattgctgcggccctgaagagaggcaaccgtgagtggtacgacaggatcctgaatgacaagagtccccgagagcagccaggaccacagcgcctgcctgggctggttgtgctggctgacgccgtctatgatgaccttcagttctgctacagtgtgtacgccagcctcttccacagcatcctcaatgtggacgtcttcaccctgaccttccggcagctggagcgtctggtggctgaggaggcgtgggtgctgacggaggagctgagccccaagatgaccctggaggtggcctcggggctctttgagctctacctgaccctggctgacctccagcgcttctgggatagcatccctggccgggacagccgctctctggccctggctggcatccacgcccccttcctgcctgctgtgaagctctggttccaagtgctgagggaccaggccaagtggaggcttcagggagccgtggacatggacacgctggagcccgtggacgcctcctccaggcacagcagctccgcagccactgctggtctctgcctcagccacatccaggagttgtgggtgcgcctggcgtggcctgaccctgcccaggctcaggggctgggcacccagcttggccaggacgtgtgtgaggccaccctcttctatacggagctgcttcggaagaaggtggacactcagccaggggcggccggtgaagcagtgagcgaggcgctctgcgtggtcctcaacaatgtggagctcgtgcgcaaggctgctgggcaggccttgaagggcctggcatggccagagggggccacggggcccgagggggtgctcccccgccctctgctcagctgcacacaggccctggacgatgatctgcaacgggaggcccacacggtgacagcgcacctgacctctaagatggtgggcgacatccgcaagtatgtacagcacatcagtctctcgcctgactccatccagaacgatgaggccgtggccccgctcatgaagtacctggatgagaagctggccctgctgaacgcctcgctggtgaaggggaacctgagcagggtgctggaggccctgtgggagctactcctccaggccattctgcaggcgctgggtgcaaaccgtgacgtctctgctgatttctacagccgcttccatttcacgctggaggccctggtcagttttttccacgcagagggtcagggtttgcccctggagagcctgagggatggaagctacaagaggctgaaggaggagctgcggctgcacaaatgttccacccgcgagtgcatcgagcagttctacctggacaagctcaaacagaggaccctggagcagaaccggtttggacgcctgagcgtccgttgccattacgaggcggctgagcagcggctggccgtggaggtgctgcacgccgcggacctgctccccctggacgccaacggcttaagtgacccctttgtgatcgtggagctgggcccaccgcatctctttccactggtccgcagccagaggacccaggtgaagacccggacgctgcaccctgtatacgacgaactcttctacttttccgtgcctgccgaggcgtgccgccgccgcgcggcctgtgtgttgttcaccgtcatggaccacgactggctgtccaccaacgacttcgctggggaggcggccctcggcctaggtggcgtcactggtgtcgcccggccccaggtgggcgggggtgcaagggctgggcagcctgtcaccctgcacctgtgccggcccagagcccaggtgagatctgcgctgaggaggctggaaggccgcaccagcaaggaggcgcaggagttcgtgaagaaactcaaggagctggagaagtgcatggaggcggacccctgagtccatcagctgccagccccggccctggcccccaccccaagttccctgaagcatcctccagctcactgtggccagctttgtgcaaccagggcccacggcgcccctcctgtgctgtgacgtgtgtgtcgtggctggccccgcggcgcctaccgccctggccgtgtctgtctggtgtgtgctgtgaacccctgcacccaaccccacatctgggtggccaacttggcaggacttggccagcagctgcccaggacacagtgcaggccagagcgggcttgaccacctggtgggcctccctgcccgcttccttgggct

SEQ ID NO: 142223 - DNA, 3564 bp, Artificial Sequence
  derived and/or modified sequence
atgagacccagaggcgccgccttcgccgccggcccccccggcgacctgcacctgggcaccgccatcggcttcgccggcgccatctggagaagcagaagccccgccatgagcaccctgctggacatcaagagcagcgtgctgagacaggtgcaggtgtgccccagcttcagaagaagaaccgagcaggaccccggcagcgccagcgccgacccccaggagcccgccaccggcgcctggaagcccggcgacggcgtggagttcttcgcccacatgagactgatgctgaagaagggcgagggcagacagggcctgccctgcctggaggtgcccctgagaagcggcagccccgccccccccgagcccgtggaccccagcctgggcctgagagccctggcccccgaggaggtggagatgctgtacgaggaggccctgtacaccgtgctgtacagagccggcaccatgggccccgaccaggtggacgacgaggaggccctgctgagctacctgcagcaggtgttcggcaccagcctggaggagcacaccgaggccatcgagagagtgagaaaggccaaggcccccacctacgccctgaaggtgagcgtgatgagagccaagaacctgctggccaaggaccccaacggcttcagcgacccctactgcatgctgggcatcctgcccgccagcgacgccaccagagagcccagagcccagaaggagcagagattcggcttcagaaagggcagcaagagaggcggccccctgcccgccaagtgcatccaggtgaccgaggtgaagagcagcaccctgaaccccgtgtggaaggagcacttcctgttcgagatcgaggacgtgagcaccgaccagctgcacctggacatctgggaccacgacgacgacgtgagcctggtggaggcctgcagaaagctgaacgaggtgatcggcctgaagggcatgggcagatacttcaagcagatcgtgaagagcgccagagccaacggcaccgccggccccaccgaggaccacaccgacgacttcctgggctgcctgaacatccccgtgagagaggtgcccgtggccggcgtggacagatggttcaagctggagcccagaagcagcgccagcagagtgcagggccactgccacctggtgctgaagctgatcaccacccagagagacaccgccatgagccagagaggcagaagcggcttcctgagccacctgctgctgctgagccacctgctgagactggagcacagcgccgaggagcccaacagcagcagctggagaggcgagctgagcacccccgccgccaccatcctgtgcctgcacggcgcccagagcaacctgagccccctgcagctggccgtgctgcactggcaggtgagcagcagacaccaccagacctgcaccctggactacagctacctgctgggcctgctggaggacatgcaggcccactgggaggaggcccccagcctgccccaggagcaggaggagagcctggccgacagcctgagcgccttcagcgagttcggcctgcagctgctgagacagctgagagactacttccccgccaccaacagcaccgccgtgcacagactggagctgctgctgaagtgcctgggcaagctgcagctgttccagcccagcttcgagatctgccccttcgagagcgagctgaacatggacatcgccgccgccctgaagagaggcaacagagagtggtacgacagaatcctgaacgacaagagccccagagagcagcccggcccccagagactgcccggcctggtggtgctggccgacgccgtgtacgacgacctgcagttctgctacagcgtgtacgccagcctgttccacagcatcctgaacgtggacgtgttcaccctgaccttcagacagctggagagactggtggccgaggaggcctgggtgctgaccgaggagctgagccccaagatgaccctggaggtggccagcggcctgttcgagctgtacctgaccctggccgacctgcagagattctgggacagcatccccggcagagacagcagaagcctggccctggccggcatccacgcccccttcctgcccgccgtgaagctgtggttccaggtgctgagagaccaggccaagtggagactgcagggcgccgtggacatggacaccctggagcccgtggacgccagcagcagacacagcagcagcgccgccaccgccggcctgtgcctgagccacatccaggagctgtgggtgagactggcctggcccgaccccgcccaggcccagggcctgggcacccagctgggccaggacgtgtgcgaggccaccctgttctacaccgagctgctgagaaagaaggtggacacccagcccggcgccgccggcgaggccgtgagcgaggccctgtgcgtggtgctgaacaacgtggagctggtgagaaaggccgccggccaggccctgaagggcctggcctggcccgagggcgccaccggccccgagggcgtgctgcccagacccctgctgagctgcacccaggccctggacgacgacctgcagagagaggcccacaccgtgaccgcccacctgaccagcaagatggtgggcgacatcagaaagtacgtgcagcacatcagcctgagccccgacagcatccagaacgacgaggccgtggcccccctgatgaagtacctggacgagaagctggccctgctgaacgccagcctggtgaagggcaacctgagcagagtgctggaggccctgtgggagctgctgctgcaggccatcctgcaggccctgggcgccaacagagacgtgagcgccgacttctacagcagattccacttcaccctggaggccctggtgagcttcttccacgccgagggccagggcctgcccctggagagcctgagagacggcagctacaagagactgaaggaggagctgagactgcacaagtgcagcaccagagagtgcatcgagcagttctacctggacaagctgaagcagagaaccctggagcagaacagattcggcagactgagcgtgagatgccactacgaggccgccgagcagagactggccgtggaggtgctgcacgccgccgacctgctgcccctggacgccaacggcctgagcgaccccttcgtgatcgtggagctgggccccccccacctgttccccctggtgagaagccagagaacccaggtgaagaccagaaccctgcaccccgtgtacgacgagctgttctacttcagcgtgcccgccgaggcctgcagaagaagagccgcctgcgtgctgttcaccgtgatggaccacgactggctgagcaccaacgacttcgccggcgaggccgccctgggcctgggcggcgtgaccggcgtggccagaccccaggtgggcggcggcgccagagccggccagcccgtgaccctgcacctgtgcagacccagagcccaggtgagaagcgccctgagaagactggagggcagaaccagcaaggaggcccaggagttcgtgaagaagctgaaggagctggagaagtgcatggaggccgacccctag

SEQ ID NO: 142224 - DNA, 3459 bp, Artificial Sequence
  derived and/or modified sequence
atgagcaccctgctggacatcaagagcagcgtgctgagacaggtgcaggtgtgccccagcttcagaagaagaaccgagcaggaccccggcagcgccagcgccgacccccaggagcccgccaccggcgcctggaagcccggcgacggcgtggagttcttcgcccacatgagactgatgctgaagaagggcgagggcagacagggcctgccctgcctggaggtgcccctgagaagcggcagccccgccccccccgagcccgtggaccccagcctgggcctgagagccctggcccccgaggaggtggagatgctgtacgaggaggccctgtacaccgtgctgtacagagccggcaccatgggccccgaccaggtggacgacgaggaggccctgctgagctacctgcagcaggtgttcggcaccagcctggaggagcacaccgaggccatcgagagagtgagaaaggccaaggcccccacctacgccctgaaggtgagcgtgatgagagccaagaacctgctggccaaggaccccaacggcttcagcgacccctactgcatgctgggcatcctgcccgccagcgacgccaccagagagcccagagcccagaaggagcagagattcggcttcagaaagggcagcaagagaggcggccccctgcccgccaagtgcatccaggtgaccgaggtgaagagcagcaccctgaaccccgtgtggaaggagcacttcctgttcgagatcgaggacgtgagcaccgaccagctgcacctggacatctgggaccacgacgacgacgtgagcctggtggaggcctgcagaaagctgaacgaggtgatcggcctgaagggcatgggcagatacttcaagcagatcgtgaagagcgccagagccaacggcaccgccggccccaccgaggaccacaccgacgacttcctgggctgcctgaacatccccgtgagagaggtgcccgtggccggcgtggacagatggttcaagctggagcccagaagcagcgccagcagagtgcagggccactgccacctggtgctgaagctgatcaccacccagagagacaccgccatgagccagagaggcagaagcggcttcctgagccacctgctgctgctgagccacctgctgagactggagcacagcgccgaggagcccaacagcagcagctggagaggcgagctgagcacccccgccgccaccatcctgtgcctgcacggcgcccagagcaacctgagccccctgcagctggccgtgctgcactggcaggtgagcagcagacaccaccagacctgcaccctggactacagctacctgctgggcctgctggaggacatgcaggcccactgggaggaggcccccagcctgccccaggagcaggaggagagcctggccgacagcctgagcgccttcagcgagttcggcctgcagctgctgagacagctgagagactacttccccgccaccaacagcaccgccgtgcacagactggagctgctgctgaagtgcctgggcaagctgcagctgttccagcccagcttcgagatctgccccttcgagagcgagctgaacatggacatcgccgccgccctgaagagaggcaacagagagtggtacgacagaatcctgaacgacaagagccccagagagcagcccggcccccagagactgcccggcctggtggtgctggccgacgccgtgtacgacgacctgcagttctgctacagcgtgtacgccagcctgttccacagcatcctgaacgtggacgtgttcaccctgaccttcagacagctggagagactggtggccgaggaggcctgggtgctgaccgaggagctgagccccaagatgaccctggaggtggccagcggcctgttcgagctgtacctgaccctggccgacctgcagagattctgggacagcatccccggcagagacagcagaagcctggccctggccggcatccacgcccccttcctgcccgccgtgaagctgtggttccaggtgctgagagaccaggccaagtggagactgcagggcgccgtggacatggacaccctggagcccgtggacgccagcagcagacacagcagcagcgccgccaccgccggcctgtgcctgagccacatccaggagctgtgggtgagactggcctggcccgaccccgcccaggcccagggcctgggcacccagctgggccaggacgtgtgcgaggccaccctgttctacaccgagctgctgagaaagaaggtggacacccagcccggcgccgccggcgaggccgtgagcgaggccctgtgcgtggtgctgaacaacgtggagctggtgagaaaggccgccggccaggccctgaagggcctggcctggcccgagggcgccaccggccccgagggcgtgctgcccagacccctgctgagctgcacccaggccctggacgacgacctgcagagagaggcccacaccgtgaccgcccacctgaccagcaagatggtgggcgacatcagaaagtacgtgcagcacatcagcctgagccccgacagcatccagaacgacgaggccgtggcccccctgatgaagtacctggacgagaagctggccctgctgaacgccagcctggtgaagggcaacctgagcagagtgctggaggccctgtgggagctgctgctgcaggccatcctgcaggccctgggcgccaacagagacgtgagcgccgacttctacagcagattccacttcaccctggaggccctggtgagcttcttccacgccgagggccagggcctgcccctggagagcctgagagacggcagctacaagagactgaaggaggagctgagactgcacaagtgcagcaccagagagtgcatcgagcagttctacctggacaagctgaagcagagaaccctggagcagaacagattcggcagactgagcgtgagatgccactacgaggccgccgagcagagactggccgtggaggtgctgcacgccgccgacctgctgcccctggacgccaacggcctgagcgaccccttcgtgatcgtggagctgggccccccccacctgttccccctggtgagaagccagagaacccaggtgaagaccagaaccctgcaccccgtgtacgacgagctgttctacttcagcgtgcccgccgaggcctgcagaagaagagccgcctgcgtgctgttcaccgtgatggaccacgactggctgagcaccaacgacttcgccggcgaggccgccctgggcctgggcggcgtgaccggcgtggccagaccccaggtgggcggcggcgccagagccggccagcccgtgaccctgcacctgtgcagacccagagcccaggtgagaagcgccctgagaagactggagggcagaaccagcaaggaggcccaggagttcgtgaagaagctgaaggagctggagaagtgcatggaggccgacccctag

SEQ ID NO: 142225 - protein, 572 aa, Artificial Sequence
  derived and/or modified sequence
MAELVQGQSAPVGMKAEGFVDALHRVRQIAAKIDSIPHLNNSTPLVDPSVYGYGVQKRPLDDGVGNQLGALVHQRTVITEEFKVPDKMVGFIIGRGGEQISRIQAESGCKIQIASESSGIPERPCVLTGTPESIEQAKRLLGQIVDRCRNGPGFHNDIDSNSTIQEILIPASKVGLVIGRGGETIKQLQERTGVKMVMIQDGPLPTGADKPLRITGDAFKVQQAREMVLEIIREKDQADFRGVRGDFNSRMGGGSIEVSVPRFAVGIVIGRNGEMIKKIQNDAGVRIQFKPDDGISPERAAQVMGPPDRCQHAAHIISELILTAQERDGFGGLAAARGRGRGRGDWSVGAPGGVQEITYTVPADKCGLVIGKGGENIKSINQQSGAHVELQRNPPPNSDPNLRRFTIRGVPQQIEVARQLIDEKVGGTNLGAPGAFGQSPFSQPPAPPHQNTFPPRSSGCFPNMAAKVNGNPHSTPVSGPPAFLTQGWGSTYQAWQQPTQQVPSQQSQPQSSQPNYSKAWEDYYKKQSHAASAAPQASSPPDYTMAWAEYYRQQVAFYGQTLGQAQAHSQEQ

SEQ ID NO: 142226 - protein, 261 aa, Artificial Sequence
  derived and/or modified sequence
MPPIGNQLGALVHQRTVITEEFKVPDKMVGFIIGRGGEQISRIQAESGCKIQIASESSGIPERPCVLTGTPESIEQAKRLLGQIVDRCRNGPGFHNDIDSNSTIQEILIPASKVGLVIGRGGETIKQLQERTGVKMVMIQDGPLPTGADKPLRITGDAFKVQQAREMVLEIIREKDQADFRGVRGDFNSRMGGGSIEVSVPRFAVGIVIGRNGEMIKKIQNDAGVRIQFKPDDGISPEYYRQQVAFYGQTLGQAQAHSQEQ

SEQ ID NO: 142227 - DNA, 1719 bp, Artificial Sequence
  derived and/or modified sequence
atggcggagctcgtgcagggtcaatccgcgcctgtcggaatgaaagccgaaggctttgtagatgctctccaccgggtgagacagatcgctgccaaaatcgactcaatccctcaccttaataatagcacgcccctggtggaccctagcgtgtatggatatggggtgcagaaacgaccactagacgatggggtgggcaaccagctgggggcactggttcaccagagaacagtaattaccgaggaatttaaagtgcccgacaagatggtcggtttcataatcgggcggggtggggagcaaattagcaggatccaggcggagtctggttgcaagatacagattgccagcgagtcatctggaatcccggagcgcccctgcgtgctgaccggcacccccgaaagcatcgagcaagcaaaacgcctcctgggacagattgtggaccgctgccgaaatggtcctggctttcataacgatatcgactctaactccacaattcaagagatcctgatcccagctagtaaggtgggcctggtgattggtcggggcggcgagaccatcaaacaactacaggaacgcacaggtgttaaaatggtgatgatacaggatgggcccctgcccacaggggccgacaagcctttaagaattactggggacgcatttaaagtccaacaggccagagaaatggtgctggaaatcatacgagaaaaggaccaggccgattttcgcggcgttagaggggatttcaactccagaatgggtggcgggtccatcgaggtgtcagtaccacgatttgctgtaggcattgttatcggtcggaatggggagatgattaaaaagatacagaatgacgctggcgttcggatccagttcaagcccgacgacgggatttcccccgagcgcgcggcccaggtcatgggccctcccgatcggtgtcagcatgctgcacatatcatcagtgagttgatattgaccgcccaggaaagagacggatttggcggactggcagctgcacgcggcagaggtaggggtcgaggagattggagcgttggagctccgggcggcgtgcaggagatcacctacactgtccccgccgacaagtgtggcctggtgataggcaaaggcggcgagaacataaagagcataaaccaacaaagtggtgcacacgtggagctgcagaggaatccaccaccaaacagtgaccctaacctccgtcggttcacgatccgcggcgtgccacagcaaatcgaggtggctcgacagctgatagacgaaaaggttgggggaacaaacctaggcgcccctggggcttttggacagtctcccttctctcagccacccgctccccctcaccagaacactttcccccctcggtcatctggatgctttcccaacatggccgccaaagtgaacggcaacccccatagcactcctgtatcgggacctcccgccttcctcactcaggggtgggggtccacttaccaggcctggcagcagcccacgcaacaagtgccttcccagcagtcccagccccagtccagccaaccgaattacagcaaagcatgggaggactattataagaaacagtctcatgccgcctcagccgctccacaggcctcatcgccacccgactataccatggcctgggctgaatactacaggcaacaggtcgcgttttacggacagaccctgggccaagcccaggcacatagccaggagcagtag

SEQ ID NO: 142228 - DNA, 1719 bp, Artificial Sequence
  derived and/or modified sequence
atggccgagctggtgcagggccagagcgcccctgtgggcatgaaggccgagggctttgtggatgccctgcaccgggtgcggcagattgctgccaagattgacagcatcccccacctgaacaacagcacccccctggtggaccccagcgtgtatggctatggagtgcagaagaggcccctggatgatggagtgggcaaccagctgggcgccctggtgcaccagaggacagtcatcacagaggagttcaaggtgcctgacaagatggtgggcttcatcatcggccggggcggggagcagatcagccgcatccaggccgagagcggctgcaagatccagatcgccagcgagagcagcggcatccctgagcggccctgtgtgctgaccggcaccccagagagcattgagcaggccaagaggctgctgggccagatcgtggaccgctgcagaaatggacctggcttccacaatgacatcgacagcaacagcaccatccaggagatcctgatcccagccagcaaggtgggcctggtgattggccggggcggggagaccatcaagcagctgcaggagaggactggagtgaagatggtgatgatccaggacggccccctgcccaccggggctgacaagcccctgcgcatcactggagatgccttcaaggtgcagcaggcccgggagatggtgctggagatcatccgggagaaggaccaggccgacttccggggcgtgcggggggacttcaacagcaggatgggcggcggcagcattgaggtgtctgtgcccaggtttgctgtgggcatcgtgattggaagaaatggagagatgatcaagaagatccagaatgatgctggggtgcgcatccagttcaagccagatgatggcatcagccctgagcgggccgcccaggtgatgggccccccagaccgctgccagcacgccgcccacatcatcagcgagctgatcctgacagcccaggagagagatggctttggaggcctggccgccgcccggggccggggccggggccgcggggactggagcgtgggcgcccctggaggagtgcaggagatcacctacacagtgcctgctgacaagtgtggcctggtgattggaaaaggaggagagaacatcaagagcatcaaccagcagagcggggcccacgtggagctgcagaggaaccccccacccaacagcgaccccaacctgcggcgcttcaccatccggggcgtgccccagcagatcgaggtggcccggcagctgattgatgagaaggtgggcggcaccaacctgggcgcccctggggccttcggccagagccccttcagccagcccccagccccaccccaccagaacaccttcccccccaggagcagcggctgcttccccaacatggccgccaaggtgaatggaaacccccacagcacccctgtgtctggccccccagccttcctgacccagggctggggcagcacctaccaggcctggcagcagcccacccagcaggtgcccagccagcagagccagccccagagcagccagcccaactacagcaaggcctgggaggactactacaagaagcagagccacgccgccagcgctgccccccaggccagcagccccccagactacaccatggcctgggccgagtactaccggcagcaggtggccttctacggccagaccctgggccaggcccaggcccacagccaggagcagtag

SEQ ID NO: 142229 - DNA, 1719 bp, Artificial Sequence
  derived and/or modified sequence
atggccgagctggtgcagggccagagcgcccccgtgggcatgaaggcagagggatttgtggacgccttgcaccgggtaaggcagatcgcggcgaagattgatagtataccccatctcaacaattccaccccactggtagacccttctgtttacggatacggggttcaaaagcgccctcttgatgatggtgtagggaaccagctaggagccttagtgcaccagagaaccgtgattaccgaagagttcaaagttcccgataagatggtcgggttcattattgggcgaggcggcgagcaaatcagtcggattcaagctgaatccggttgcaaaattcaaattgccagtgagtccagtgggatcccggaacgcccgtgcgttcttactggaacccccgaaagtatagaacaggctaaacgattgctcggccaaattgtggatcggtgccgaaacggacccgggtttcataacgacattgactccaattcaacaatacaggagattttgattccggccagtaaagtgggactagtcatcgggcggggtggtgagacaatcaagcagctacaggagcgaactggggttaaaatggtgatgatccaggatggccctctccccaccggtgctgacaagcccctcagaatcacaggggatgcttttaaggtgcaacaggcccgggaaatggtattggagattattcgcgaaaaggaccaggcagacttccggggtgtccggggagactttaactcccgaatgggcggaggaagtatcgaggtatctgtgccgcgtttcgcagtgggaatcgtgatcgggaggaacggcgaaatgatcaagaagatccagaatgacgccggcgtcagaatccaattcaaaccagatgatggtatttccccagaaagagccgctcaggtcatggggcctccagaccgttgtcagcacgcagctcatatcataagtgaactcattctaacagcccaggaaagagatggcttcggaggactggctgctgcgcggggccgaggtcgtgggaggggtgactggtcggtgggagctcccggtggcgttcaggaaattacttatacagtgccagccgataagtgtggactggtcattgggaaaggaggcgaaaacatcaaatccataaatcagcagagtggcgcccacgtggagctgcagaggaatccccctcctaatagtgatccaaacctgcgtcggtttaccatccgtggagtacctcagcaaattgaggttgctcggcagctcatagacgagaaagtgggcggtaccaacctgggagcgccaggcgctttcggccagtcgccatttagtcagcctccggctccacctcatcagaacaccttcccaccccgctccagcggctgcttcccgaacatggccgcaaaggttaacggaaatccacattcaacgcctgtctctgggccacccgccttcctgacacaggggtggggcagcacctaccaggcctggcagcagccaacccagcaggtcccatcccagcaaagtcagcctcagtcatctcagcctaactacagtaaagcttgggaagattactataagaagcagtcccatgccgctagcgcagcaccacaggccagcagtcctccagactacacgatggcctgggctgagtactatcgacagcaggttgcattttatgggcaaacactgggacaggcccaggcccactcgcaggaacagtag

SEQ ID NO: 142230 - DNA, 1719 bp, Artificial Sequence
  derived and/or modified sequence
atggccgaactagtccagggacaatcagcacccgttggtatgaaggcagagggattcgtggatgccctgcacagggtaagacagatagccgcaaagattgattccatcccccatctcaataacagtaccccccttgtcgatccctccgtctatggatacggagtgcagaaaaggcccctggacgacggcgttggtaatcagctgggtgctctagtgcatcagcggaccgtgatcaccgaagagtttaaggttccagacaaaatggtaggattcatcatcggtcggggtggggaacagatctctcgaattcaagccgaatccggatgcaaaatacaaatcgctagcgagtctagcgggataccagaaaggccatgcgtgctaacaggaactccagagtctatcgagcaggccaagcggttgctggggcaaattgttgatagatgccgcaacggaccaggctttcacaacgacatagactctaattctaccatccaggaaatcttgatccccgcttccaaggtggggctcgtaataggcagaggaggggagacaattaaacagcttcaggagagaactggcgtcaagatggtcatgattcaggacggcccactccctactggtgcagacaagcctctgcgcataaccggagacgcgtttaaagtgcagcaggccagagagatggtactcgagatcatccgggaaaaggaccaagccgacttccgcggagtgagaggcgatttcaattcgcgtatggggggtggatccatcgaagttagtgtgcctaggtttgccgttggtatcgtcatcggacgaaacggcgaaatgatcaagaaaattcagaatgatgccggagtgaggattcagtttaagcctgatgacgggatctctccagagagggcagcgcaggtgatgggcccacccgaccggtgccagcacgccgcacatattatttctgaactgattctgaccgcacaggaaagggacggatttgggggtctagccgctgcgagaggtcggggtcgcggacgaggagactggtcggtgggtgctccaggaggagtgcaggaaattacttatactgtccctgctgataaatgcgggctagtgatcggaaagggtggggagaatatcaagtctattaaccagcagagtggagcgcatgtcgagcttcagcgaaatccccctcccaattcagaccctaatctgcgtcggttcactattcgcggtgtcccccagcagatcgaagtggctcggcaactcattgatgagaaagtgggaggtactaacctcggtgcacccggtgccttcggacagagcccttttagccaacccccagcgccaccccaccagaacacattcccacctaggagtagcgggtgcttcccaaatatggctgctaaagtcaatggcaacccccactcaactccggtatctggcccacccgcttttctgacgcagggctggggatcaacctaccaggcctggcaacaacccactcaacaggtcccgtcacagcagagtcaaccccagtccagccaacctaattacagcaaagcctgggaggactattacaagaagcagtcccatgccgctagcgccgcaccacaggcttcctctcctccggactacactatggcctgggccgaatactaccggcaacaggtcgctttttatggccagaccttggggcaggcccaggcccacagccaggaacaatag

SEQ ID NO: 142231 - DNA, 3124 bp, Artificial Sequence
  derived and/or modified sequence
cgggaggccggaccggggagccgagcggcggcgtcggcggcgtcggcggcggcggcgacggcggcgggggcggtaatggcggagctggtgcaggggcagagcgctcctgtggggatgaaggccgagggcttcgtggatgccctgcaccgggtccggcagattgctgctaaaattgattcaattcctcacttgaataattccacacctctagtggacccctcagtatatggatacggagtacaaaaacggcccttggatgatggagtaggtaaccagttaggggccttggtacatcaaaggacggtaataacggaagaattcaaagtgcctgacaaaatggttggatttattatcggcaggggaggtgagcagatttcacggattcaagcagaatctggttgcaaaattcagattgcttcagagagttctgggattccagagaggccctgtgtacttaccggaaccccagaaagtattgaacaagccaaacggctcctgggacagattgtggaccgctgtcgaaatggacctggctttcataatgacatagacagcaacagcacaatccaggagattctcattcccgcatctaaagtgggtctggtcatcggcagaggaggggaaacaatcaagcagttgcaggagcggacaggggtgaagatggtcatgatccaggatggcccattgcccacgggagcagacaagcctcttcgtatcactggagatgcatttaaagtacagcaagcaagagaaatggtactagagattatccgagaaaaagaccaagctgactttcggggtgtacgcggcgatttcaactctcgaatgggaggaggcagtatagaggtatctgtgcctaggtttgctgtggggattgtaataggaagaaacggggaaatgatcaaaaagatccagaatgatgctggtgtgaggattcagtttaaaccagatgatgggattagtccagaaagagctgcccaggtcatgggccctccggatcggtgtcagcatgcagcgcatatcatcagcgagctgattcttacagcccaggaaagagacggctttggaggcctggcagcagccagaggaagaggtcgtggccgtggcgactggagcgtgggagcccctggtggcgtccaggagataacatacacggtgccagccgataagtgtggcctcgtcataggcaaagggggtgagaacatcaaaagcatcaaccagcagtcaggggcgcacgtggagcttcagaggaacccccctcccaacagcgaccccaacctgcggagattcaccatcaggggggttccccagcagatcgaggtggccaggcagctcatagatgagaaagttggcgggaccaatctcggagcacctggagccttcggacagagtccattcagccagccacctgccccacctcatcaaaatacctttcctccaaggagctccgggtgcttcccaaacatggctgccaaggtgaatgggaacccccacagcacccctgtgagtggtcctccggcctttctgacccagggctggggcagcacctaccaggcgtggcagcagcccacacagcaggtcccaagccagcagagccagccgcagagcagccagcccaactacagcaaggcctgggaagactattacaaaaaacagagtcacgccgccagcgctgctcctcaggccagctccccaccggactacacaatggcctgggcagaatattacagacagcaggtcgctttctacggacagacgttagggcaggcgcaggcccacagccaggagcagtaggacagcgtcctcgtggccaactctcccctcaaaatcattgtcaaagaaaacctatttgtaacagaggtttttacatttgcaaaccttttgatgaagaactgttgttttgttctgtgaaacactatatttagattaacggaatttttctaaaaatcaggaaaattagttactaaaaattgctgatcatttttgtttcattatttttgttatttcaaatgtataagctctgggattctttttggagcaatacctacaaagtcaggcaccagaatgtgcctcagagctgtgacatttcaacatgatggttttggtttggtttggttttgtgtcctttttatttgcagttttttctgttgcaacagaaagtggcttggaagtcttaggtggtatgtaacaaattctttttaaaaattttaaagcagtatttaagtattcttaaatgtgtaaattcatttaatgttttacttctaatttcttgtatcttggctgtctggttttattgcatttttaaaaaaactgaactattatgtattgtaatgaatgatgtgaattctgaactgagacagataattgtattgctgtccaacaggggttgggaggggcattttgtagggtttgtataatttctagagttcgaaaggggtaatataaaaatgtgctcgtgtgtttagcctacgtttttctcatgcctccattaccagttgcaattgtgtatctaagacctccaagcttgtttttaaaacaaaacaaaaaacctttctctattatctcagaaatataaatactgttatttttaatattaagaaattcaatataacttttaacacacactgtggaacattaaaccgtataaaaatgtagttataactatttttaattccaaggtgttgtttgcttttttcttttaaatattttcttaatattttgtcagattaactagatgaataaataaatctagtattaaccgcattatgaattaaataattttgatttaatgaaagggataatatgatttccagtgtttactgtagtgtatcttgtacagataacatgtatttttaaaggaaaaaaaacggaattgaagctattttttcttgcatttctaattgacctgagggacattccgtttgaaatgtactgaagttacagtttctggttttttctccttatttttcttataatgcttgaaatgtctaactattaaaaaagacaattggaaaatgttatgcatggggtttttaagaaaacaaagtgttctttttatttgactgacaattcattttacactctatataataaaatctccacaaggcatcttgtgggcaaagtc

SEQ ID NO: 142232 - DNA, 1719 bp, Artificial Sequence
  derived and/or modified sequence
atggccgagctggtgcagggccagagcgcccccgtgggcatgaaggccgagggcttcgtggacgccctgcacagagtgagacagatcgccgccaagatcgacagcatcccccacctgaacaacagcacccccctggtggaccccagcgtgtacggctacggcgtgcagaagagacccctggacgacggcgtgggcaaccagctgggcgccctggtgcaccagagaaccgtgatcaccgaggagttcaaggtgcccgacaagatggtgggcttcatcatcggcagaggcggcgagcagatcagcagaatccaggccgagagcggctgcaagatccagatcgccagcgagagcagcggcatccccgagagaccctgcgtgctgaccggcacccccgagagcatcgagcaggccaagagactgctgggccagatcgtggacagatgcagaaacggccccggcttccacaacgacatcgacagcaacagcaccatccaggagatcctgatccccgccagcaaggtgggcctggtgatcggcagaggcggcgagaccatcaagcagctgcaggagagaaccggcgtgaagatggtgatgatccaggacggccccctgcccaccggcgccgacaagcccctgagaatcaccggcgacgccttcaaggtgcagcaggccagagagatggtgctggagatcatcagagagaaggaccaggccgacttcagaggcgtgagaggcgacttcaacagcagaatgggcggcggcagcatcgaggtgagcgtgcccagattcgccgtgggcatcgtgatcggcagaaacggcgagatgatcaagaagatccagaacgacgccggcgtgagaatccagttcaagcccgacgacggcatcagccccgagagagccgcccaggtgatgggcccccccgacagatgccagcacgccgcccacatcatcagcgagctgatcctgaccgcccaggagagagacggcttcggcggcctggccgccgccagaggcagaggcagaggcagaggcgactggagcgtgggcgcccccggcggcgtgcaggagatcacctacaccgtgcccgccgacaagtgcggcctggtgatcggcaagggcggcgagaacatcaagagcatcaaccagcagagcggcgcccacgtggagctgcagagaaaccccccccccaacagcgaccccaacctgagaagattcaccatcagaggcgtgccccagcagatcgaggtggccagacagctgatcgacgagaaggtgggcggcaccaacctgggcgcccccggcgccttcggccagagccccttcagccagccccccgcccccccccaccagaacaccttcccccccagaagcagcggctgcttccccaacatggccgccaaggtgaacggcaacccccacagcacccccgtgagcggcccccccgccttcctgacccagggctggggcagcacctaccaggcctggcagcagcccacccagcaggtgcccagccagcagagccagccccagagcagccagcccaactacagcaaggcctgggaggactactacaagaagcagagccacgccgccagcgccgccccccaggccagcagcccccccgactacaccatggcctgggccgagtactacagacagcaggtggccttctacggccagaccctgggccaggcccaggcccacagccaggagcagtag

SEQ ID NO: 142233 - protein, 367 aa, Artificial Sequence
  derived and/or modified sequence
MGTVLSLSPASSAKGRRPGGLPEEKKKAPPAGDEALGGYGAPPVGKGGKGESRLKRPSVLISALTWKRLVAASAKKKKGSKKVTPKPASTGPDPLVQQRNRENLLRKGRDPPDGGGTAKPLAVPVPTVPAAAATCEPPSGGSAAAQPPGSGGGKPPPPPPPAPQVAPPVPGGSPRRVIVQASTGELLRCLGDFVCRRCYRLKELSPGELVGWFRGVDRSLLLQGWQDQAFITPANLVFVYLLCRESLRGDELASAAELQAAFLTCLYLAYSYMGNEISYPLKPFLVEPDKERFWQRCLRLIQRLSPQMLRLNADPHFFTQVFQDLKNEGEAAASGGGPPSGGAPAASSAARDSCAAGTKHWTMNLDR

SEQ ID NO: 142234 - DNA, 1104 bp, Artificial Sequence
  derived and/or modified sequence
atgggcactgtgctttccctgtcacctgcctcctcagcaaagggcagacgccccggagggctgcctgaggaaaaaaagaaggccccacccgcgggggacgaggcccttggaggttatggtgcaccacccgtgggaaagggcggcaagggcgaatcaaggctcaaacgccccagcgtgctgataagtgctttaacctggaagaggctcgtcgccgcgtccgcaaagaagaagaaaggatccaagaaagtcacccctaagccagctagtaccggccctgatccactggtgcaacagcgcaatcgcgagaatcttctgaggaagggcagagacccccctgacggaggggggactgcaaagccattagccgtgcccgtgccgacagtgccagctgccgccgccacctgcgaacctccctctggtgggtccgcggccgcccagccacccggaagcggcggtgggaaaccccctccgccaccacccccggcacctcaagtcgccccgcctgtgccaggcgggagtccaaggcgggtgatcgtacaggctagcacaggtgaactgctcagatgtcttggcgatttcgtctgccgaagatgctaccggcttaaagagctgtccccaggggagttggtcggctggtttaggggagtcgatcggagtctgctgctccagggatggcaagaccaggcatttatcactccggcaaacctcgtctttgtgtatcttctgtgtcgggaatctttgagaggggacgagttggcctcagcagcagagttgcaggctgctttcctgacttgcttatatctcgcctacagttacatgggcaacgagattagctatccactcaagccgtttctggtggaacctgataaagagaggttctggcaaaggtgcttacgcctcattcaacggctgagcccacagatgttgcgcctgaatgcagacccccacttctttacccaggtattccaagacctaaaaaatgagggggaggctgctgcctctggcggaggacctccctcaggcggtgctcctgcggcaagcagcgcagctcgcgactcttgcgccgcgggaaccaaacactggacgatgaacctcgacagatag

SEQ ID NO: 142235 - DNA, 1104 bp, Artificial Sequence
  derived and/or modified sequence
atgggcaccgtgctgagcctgagccctgccagcagcgccaagggccggcggcctgggggcctgcctgaggagaagaagaaggcccctcctgctggagatgaggccctgggcggctatggagcccctcctgtgggcaagggcggcaaaggagagagccggctgaagaggcccagcgtgctgatcagcgccctgacctggaagaggctggtggccgccagcgccaagaagaagaagggcagcaagaaggtgacccccaagccagccagcacaggccctgaccccctggtgcagcagaggaaccgggagaacctgctgaggaagggccgggaccccccagatggcggcggcacagccaagcccctggccgtgcctgtgcccaccgtgcctgctgctgctgccacctgtgagcccccatctgggggcagcgctgctgcccagcccccaggcagcggcggcggcaagcccccacctcctcctcctccagccccccaggtggcccctcctgtgcctgggggcagccccaggagggtcatcgtgcaggccagcactggagagctgctgcgctgcctgggggactttgtgtgccgccgctgctaccgcctgaaggagctgagccctggagagctggtgggctggttccggggcgtggacaggagcctgctgctgcagggctggcaggaccaggccttcatcaccccagccaacctggtgtttgtgtacctgctgtgccgggagagcctgcggggagatgagctggccagcgctgctgagctgcaggccgccttcctgacctgcctgtacctggcctacagctacatgggaaatgagatctcctaccccctgaagcccttcctggtggagccagacaaggagcgcttctggcagcgctgcctgcggctcatccagaggctgagcccccagatgctgcggctgaatgctgacccccacttcttcacccaggtgttccaggacctgaagaatgaaggagaggccgccgccagcggcggcggcccccccagcggcggggccccagctgccagcagcgctgcccgggacagctgtgccgccggcaccaagcactggaccatgaacctggacagatag

SEQ ID NO: 142236 - DNA, 1104 bp, Artificial Sequence
  derived and/or modified sequence
atgggcaccgtgctgagcctgagccccgccagcagcgccaagggcagaaggcccggaggactccctgaggaaaaaaagaaggctccaccagcaggagacgaagccctgggaggctacggcgctccgcctgtgggcaagggcggtaagggagagtctaggctgaagagaccctctgtcctgattagcgcacttacctggaagaggttggtggcagcctccgcaaagaagaagaagggaagcaaaaaagttactccaaaaccagctagcactggccccgatccacttgttcagcagaggaacagggagaatctgctgcggaaaggacgagatccaccagacgggggaggtactgcaaagcctctggccgtccctgtccctaccgttccagctgccgcagctacctgcgagcccccatcaggaggatccgctgcagcacagcctcctggttcgggaggtggtaagccaccccccccgcctcctcccgccccgcaggtggccccaccagtgcctggaggttcccccagacgtgtaattgttcaagcatcgactggagagctgctccgctgtcttggcgattttgtctgtcgtagatgctacagactgaaagaactgagccccggcgagttggtggggtggttccgcggtgtagatcgctctttgctcctgcagggctggcaagaccaagccttcattactcctgctaatcttgtattcgtctaccttctctgtagagaaagcctgcggggcgacgagctagcgtcggccgccgagctgcaggcagcttttctcacatgtctgtatcttgcttattcgtacatgggcaacgagatctcttaccccttaaaaccctttctcgtggagccagacaaagagagattttggcagcgatgtctcagactgatccagcggttaagcccacagatgctccggcttaatgctgaccctcattttttcacacaggtgttccaggatttgaagaacgaaggtgaagccgcagcctcggggggtggccctcccagtggtggcgctccagcagcgtctagcgcagcacgagacagttgtgcagccggaactaaacactggacgatgaatctcgatcggtag

SEQ ID NO: 142237 - DNA, 1104 bp, Artificial Sequence
  derived and/or modified sequence
atgggaacggtcctgagcctctcgccagcttcttccgccaaaggccgtcgacccggtgggctcccggaggagaaaaagaaagcccctcccgctggagacgaagccctggggggatatggagcaccccctgtcggaaagggaggcaaaggcgagagccggttgaagcgcccaagcgtactgatcagcgcgcttacatggaagagattagtggccgcaagtgctaagaaaaaaaagggcagcaagaaagtgaccccgaagcctgccagtacaggtccagatccattggtgcagcaacgcaatagagagaatctgctgcgcaaggggagggaccccccagacggcggtggcaccgctaagccacttgctgtcccagtgccaacggtccccgctgcagcagccacctgtgagccccctagcggagggagcgcagccgcacagccccctggatctggagggggtaaaccccctcctccaccacctcctgcaccgcaagtggctccccctgtgccgggagggagccctagaagggtgattgttcaggcttcgacaggagagctgctgaggtgcctgggtgacttcgtgtgcagaaggtgctaccgcctaaaagaactctctccaggtgagctggtgggatggttcaggggggtggatcgcagcctcctgcttcagggctggcaggaccaggctttcatcactcccgctaaccttgtgtttgtgtatctgttatgcagggaaagcctccgaggagatgaactcgcctccgctgccgagctccaggctgcatttttgacgtgtctgtatttagcctattcctatatgggcaatgagatctcatatcctctgaagccctttcttgtggaacctgacaaggagcgtttttggcagcgatgccttaggcttattcaacgcctctcgccacaaatgctccgtctgaatgccgacccccacttctttacacaggtttttcaggatctcaaaaacgaaggagaagctgccgctagcggtgggggacctccttcagggggagcaccagcagcttcatctgccgcacgtgattcctgcgccgctggtaccaaacattggaccatgaatcttgataggtag

SEQ ID NO: 142238 - DNA, 2500 bp, Artificial Sequence
  derived and/or modified sequence
agctcaggattagagcagcggagccgcctagcagccaccttcccccgccagtccgcgcgcccgggccggggctaggccccccaccgccgggtcccccggggctgcagtagcagcggcgccgcccgcggctcccgctggggcctgggcgccggccccgctctgcaggatgggcacagtgctgtctctttcgcctgcctcctcggccaagggccggaggcccggcgggctgcccgaggagaagaagaaggcgccgcccgcgggggacgaggcgctggggggctacggggcgccgccagtgggcaagggcggcaaaggcgagagccgactcaagcggccgtccgtgctcatctcggcgctcacctggaagcgcctggtggccgcgtccgccaagaagaagaaaggcagcaagaaggtgacacccaagccggcatccacgggccccgaccccctggtccagcaacgcaaccgcgagaaccttctccgcaagggccgggatccccccgacggcggcggcaccgccaagcccctggcggtgccagtgcccaccgtgcccgcggctgccgccacctgcgagccaccgtcggggggcagcgcggccgctcagccgccgggctcgggcgggggaaagcctccgccgccgcctcccccagccccgcaggtggcgccgccggtgcctggcggctcgccgcggcgggtcatcgtgcaggcgtccaccggcgagctgctgcgctgtctgggcgacttcgtgtgccgacgctgctatcgcctcaaggagctgagcccgggcgagctggtgggctggttccgcggtgtggaccgctcgctgctgctgcagggctggcaagaccaggccttcattacgcctgcaaacctggtgttcgtgtacctgctgtgccgcgagtcgctgcgtggggacgagctggcgtcggccgccgagctgcaggccgccttcctcacctgcctctacctcgcctactcctacatgggcaacgagatctcctacccactcaagcccttcctcgtggagcccgacaaggagcgcttctggcagcgctgcctgcgcctcatccagcggctcagcccgcagatgctgcggctcaacgccgacccccacttcttcacgcaggtctttcaagacctcaagaacgagggcgaggccgccgccagcggcgggggcccaccgagcgggggcgcgcccgccgcctcctcggccgccagggacagctgcgcggccggaaccaagcactggactatgaacctggaccgctagggatacccaggggccgcgcccatcccccgccccagcccctgacacacactcggaccccccgggaccacaaagccaccgccgctgttaccgccgctcagcgccccggctgggcggaggaggagacgcccatgcccctcaggggaaagtggagaccgggacaccagaggccgcggtgtttggatttgctgggcgtggagtggggacggaagatgagcgcgggaaaggcactccaacctcactcttcccgtctgtctgcgcccccatttctccatttctgccggggtctcccccttcccttcagcccattccccctcggttttatccatttccttgcctcctttttgtgtcttcatttttcctcctgtctgcattcctctctctctctctccctctctctcctgttcctctctttcttcctccctctccctgcctttccattttccgttccttgggtttgtgtgtctgcatctccatcttaccccttgcctgactgtaccccgtagacccctgtttctcctcctgcacctgtgtccccatctgcccttcttgttgctcctgtcatgtgtcaccatcttccctcctgtctgccttcttcctccacttgtgtcagcttgcatttttttattcctgactgagtcaccacacccctctcccctgatcaaagggaatattagtttttaatttggatcgactgaggtgccaggagaaactgcagtcccaggtatccagacagccaccaggatggtccctcgccccacccccaccgcctctccccaccttttccaacgtgttgcatgctgggagctggggggtgtgggggaaggggctgccggcttctttcaggaggctgaggtttggaggcaaaatcaacctgggagaccaccccggccgcggcgcctcagtggacaggtgggaggaaaagaaaacttcttaccttggaggagggacatcccgcttccttatccttagcttttttgttgctcctccccactgccccttttaatttatttggttgtttgcggagggaggggggaggggggtaggctgggccgggaactgtccgaggtgctgagctggggcgggaccggaatcctcccggtagggtaccagggactgagttgggcctggggccgtgtccaaggtgccaatgatgcgggccgacagagcgggccgcactgtctgtctgtccgtctgtcccggaaagaactataaagcgctggaagcgcctgc

SEQ ID NO: 142239 - DNA, 1104 bp, Artificial Sequence
  derived and/or modified sequence
atgggcaccgtgctgagcctgagccccgccagcagcgccaagggcagaagacccggcggcctgcccgaggagaagaagaaggccccccccgccggcgacgaggccctgggcggctacggcgccccccccgtgggcaagggcggcaagggcgagagcagactgaagagacccagcgtgctgatcagcgccctgacctggaagagactggtggccgccagcgccaagaagaagaagggcagcaagaaggtgacccccaagcccgccagcaccggccccgaccccctggtgcagcagagaaacagagagaacctgctgagaaagggcagagacccccccgacggcggcggcaccgccaagcccctggccgtgcccgtgcccaccgtgcccgccgccgccgccacctgcgagccccccagcggcggcagcgccgccgcccagccccccggcagcggcggcggcaagcccccccccccccccccccccgccccccaggtggccccccccgtgcccggcggcagccccagaagagtgatcgtgcaggccagcaccggcgagctgctgagatgcctgggcgacttcgtgtgcagaagatgctacagactgaaggagctgagccccggcgagctggtgggctggttcagaggcgtggacagaagcctgctgctgcagggctggcaggaccaggccttcatcacccccgccaacctggtgttcgtgtacctgctgtgcagagagagcctgagaggcgacgagctggccagcgccgccgagctgcaggccgccttcctgacctgcctgtacctggcctacagctacatgggcaacgagatcagctaccccctgaagcccttcctggtggagcccgacaaggagagattctggcagagatgcctgagactgatccagagactgagcccccagatgctgagactgaacgccgacccccacttcttcacccaggtgttccaggacctgaagaacgagggcgaggccgccgccagcggcggcggcccccccagcggcggcgcccccgccgccagcagcgccgccagagacagctgcgccgccggcaccaagcactggaccatgaacctggacagatag

SEQ ID NO: 142240 - protein, 1153 aa, Artificial Sequence
  derived and/or modified sequence
MALKMVKGSIDRMFDKNLQDLVRGIRNHKEDEAKYISQCIDEIKQELKQDNIAVKANAVCKLTYLQMLGYDISWAAFNIIEVMSASKFTFKRIGYLAASQSFHEGTDVIMLTTNQIRKDLSSPSQYDTGVALTGLSCFVTPDLARDLANDIMTLMSHTKPYIRKKAVLIMYKVFLKYPESLRPAFPRLKEKLEDPDPGVQSAAVNVICELARRNPKNYLSLAPLFFKLMTSSTNNWVLIKIIKLFGALTPLEPRLGKKLIEPLTNLIHSTSAMSLLYECVNTVIAVLISLSSGMPNHSASIQLCVQKLRILIEDSDQNLKYLGLLAMSKILKTHPKSVQSHKDLILQCLDDKDESIRLRALDLLYGMVSKKNLMEIVKKLMTHVDKAEGTTYRDELLTKIIDICSQSNYQYITNFEWYISILVELTRLEGTRHGHLIAAQMLDVAIRVKAIRKFAVSQMSALLDSAHLLASSTQRNGICEVLYAAAWICGEFSEHLQEPHHTLEAMLRPRVTTLPGHIQAVYVQNVVKLYASILQQKEQAGEAEGAQAVTQLMVDRLPQFVQSADLEVQERASCILQLVKHIQKLQAKDVPVAEEVSALFAGELNPVAPKAQKKVPVPEGLDLDAWINEPLSDSESEDERPRAVFHEEEQRRPKHRPSEADEEELARRREARKQEQANNPFYIKSSPSPQKRYQDTPGVEHIPVVQIDLSVPLKVPGLPMSDQYVKLEEERRHRQKLEKDKRRKKRKEKEKKGKRRHSSLPTESDEDIAPAQQVDIVTEEMPENALPSDEDDKDPNDPYRALDIDLDKPLADSEKLPIQKHRNTETSKSPEKDVPMVEKKSKKPKKKEKKHKEKERDKEKKKEKEKKKSPKPKKKKHRKEKEERTKGKKKSKKQPPGSEEAAGEPVQNGAPEEEQLPPESSYSLLAENSYVKMTCDIRGSLQEDSQVTVAIVLENRSSSILKGMELSVLDSLNARMARPQGSSVHDGVPVPFQLPPGVSNEAQYVFTIQSIVMAQKLKGTLSFIAKNDEGATHEKLDFRLHFSCSSYLITTPCYSDAFAKLLESGDLSMSSIKVDGIRMSFQNLLAKICFHHHFSVVERVDSCASMYSRSIQGHHVCLLVKKGENSVSVDGKCSDSTLLSNLLEEMKATLAKC

SEQ ID NO: 142241 - protein, 984 aa, Artificial Sequence
  derived and/or modified sequence
MALKMVKGSIDRMFDKNLQDLVRGIRNHKEDEAKYISQCIDEIKQELKQDNIAVKANAVCKLTYLQMLGYDISWAAFNIIEVMSASKFTFKRIGYLAASQSFHEGTDVIMLTTNQILLISLSSGMPNHSASIQLCVQKLRILIEDSDQNLKYLGLLAMSKILKTHPKSVQSHKDLILQCLDDKDESIRLRALDLLYGMVSKKNLMEIVKKLMTHVDKAEGTTYRDELLTKIIDICSQSNYQYITNFEWYISILVELTRLEGTRHGHLIAAQMLDVAIRVKAIRKFAVSQMSALLDSAHLLASSTQRNGICEVLYAAAWICGEFSEHLQEPHHTLEAMLRPRVTTLPGHIQAVYVQNVVKLYASILQQKEQAGEAEGAQAVTQLMVDRLPQFVQSADLEVQERASCILQLVKHIQKLQAKDVPVAEEVSALFAGELNPVAPKAQKKVPVPEGLDLDAWINEPLSDSESEDERPRAVFHEEEQRRPKHRPSEADEEELARRREARKQEQANNPFYIKSSPSPQKRYQDTPGVEHIPVVQIDLSVPLKVPGLPMSDQYVKLEEERRHRQKLEKDKRRKKRKEKEKKGKRRHSSLPTESDEDIAPAQQVDIVTEEMPENALPSDEDDKDPNDPYRALDIDLDKPLADSEKLPIQKHRNTETSKSPEKDVPMVEKKSKKPKKKEKKHKEKERDKEKKKEKEKKKSPKPKKKKHRKEKEERTKGKKKSKKQPPGSEEAAGEPVQNGAPEEEQLPPESSYSLLAENSYVKMTCDIRGSLQEDSQVTVAIVLENRSSSILKGMELSVLDSLNARMARPQGSSVHDGVPVPFQLPPGVSNEAQYVFTIQSIVMAQKLKGTLSFIAKNDEGATHEKLDFRLHFSCSSYLITTPCYSDAFAKLLESGDLSMSSIKVDGIRMSFQNLLAKICFHHHFSVVERVDSCASMYSRSIQGHHVCLLVKKGENSVSVDGKCSDSTLLSNLLEEMKATLAKC

SEQ ID NO: 142242 - DNA, 3462 bp, Artificial Sequence
  derived and/or modified sequence
atggccctgaagatggtgaagggcagcatcgacagaatgttcgacaagaacctgcaggacctggtgagaggcatcagaaaccacaaggaggacgaggccaagtacatcagccagtgcatcgacgagatcaagcaggagctgaagcaggacaacatcgccgtgaaggccaacgccgtgtgcaagctgacctacctgcagatgctgggctacgacatcagctgggccgccttcaacatcatcgaggtgatgagcgccagcaagttcaccttcaagagaatcggctacctggccgccagccagagcttccacgagggcaccgacgtgatcatgctgaccaccaaccagatcagaaaggacctgagcagccccagccagtacgacaccggcgtggccctgaccggcctgagctgcttcgtgacccccgacctggccagagacctggccaacgacatcatgaccctgatgagccacaccaagccctacatcagaaagaaggccgtgctgatcatgtacaaggtgttcctgaagtaccccgagagcctgagacccgccttccccagactgaaggagaagctggaggaccccgaccccggcgtgcagagcgccgccgtgaacgtgatctgcgagctggccagaagaaaccccaagaactacctgagcctggcccccctgttcttcaagctgatgaccagcagcaccaacaactgggtgctgatcaagatcatcaagctgttcggcgccctgacccccctggagcccagactgggcaagaagctgatcgagcccctgaccaacctgatccacagcaccagcgccatgagcctgctgtacgagtgcgtgaacaccgtgatcgccgtgctgatcagcctgagcagcggcatgcccaaccacagcgccagcatccagctgtgcgtgcagaagctgagaatcctgatcgaggacagcgaccagaacctgaagtacctgggcctgctggccatgagcaagatcctgaagacccaccccaagagcgtgcagagccacaaggacctgatcctgcagtgcctggacgacaaggacgagagcatcagactgagagccctggacctgctgtacggcatggtgagcaagaagaacctgatggagatcgtgaagaagctgatgacccacgtggacaaggccgagggcaccacctacagagacgagctgctgaccaagatcatcgacatctgcagccagagcaactaccagtacatcaccaacttcgagtggtacatcagcatcctggtggagctgaccagactggagggcaccagacacggccacctgatcgccgcccagatgctggacgtggccatcagagtgaaggccatcagaaagttcgccgtgagccagatgagcgccctgctggacagcgcccacctgctggccagcagcacccagagaaacggcatctgcgaggtgctgtacgccgccgcctggatctgcggcgagttcagcgagcacctgcaggagccccaccacaccctggaggccatgctgagacccagagtgaccaccctgcccggccacatccaggccgtgtacgtgcagaacgtggtgaagctgtacgccagcatcctgcagcagaaggagcaggccggcgaggccgagggcgcccaggccgtgacccagctgatggtggacagactgccccagttcgtgcagagcgccgacctggaggtgcaggagagagccagctgcatcctgcagctggtgaagcacatccagaagctgcaggccaaggacgtgcccgtggccgaggaggtgagcgccctgttcgccggcgagctgaaccccgtggcccccaaggcccagaagaaggtgcccgtgcccgagggcctggacctggacgcctggatcaacgagcccctgagcgacagcgagagcgaggacgagagacccagagccgtgttccacgaggaggagcagagaagacccaagcacagacccagcgaggccgacgaggaggagctggccagaagaagagaggccagaaagcaggagcaggccaacaaccccttctacatcaagagcagccccagcccccagaagagataccaggacacccccggcgtggagcacatccccgtggtgcagatcgacctgagcgtgcccctgaaggtgcccggcctgcccatgagcgaccagtacgtgaagctggaggaggagagaagacacagacagaagctggagaaggacaagagaagaaagaagagaaaggagaaggagaagaagggcaagagaagacacagcagcctgcccaccgagagcgacgaggacatcgcccccgcccagcaggtggacatcgtgaccgaggagatgcccgagaacgccctgcccagcgacgaggacgacaaggaccccaacgacccctacagagccctggacatcgacctggacaagcccctggccgacagcgagaagctgcccatccagaagcacagaaacaccgagaccagcaagagccccgagaaggacgtgcccatggtggagaagaagagcaagaagcccaagaagaaggagaagaagcacaaggagaaggagagagacaaggagaagaagaaggagaaggagaagaagaagagccccaagcccaagaagaagaagcacagaaaggagaaggaggagagaaccaagggcaagaagaagagcaagaagcagccccccggcagcgaggaggccgccggcgagcccgtgcagaacggcgcccccgaggaggagcagctgccccccgagagcagctacagcctgctggccgagaacagctacgtgaagatgacctgcgacatcagaggcagcctgcaggaggacagccaggtgaccgtggccatcgtgctggagaacagaagcagcagcatcctgaagggcatggagctgagcgtgctggacagcctgaacgccagaatggccagaccccagggcagcagcgtgcacgacggcgtgcccgtgcccttccagctgccccccggcgtgagcaacgaggcccagtacgtgttcaccatccagagcatcgtgatggcccagaagctgaagggcaccctgagcttcatcgccaagaacgacgagggcgccacccacgagaagctggacttcagactgcacttcagctgcagcagctacctgatcaccaccccctgctacagcgacgccttcgccaagctgctggagagcggcgacctgagcatgagcagcatcaaggtggacggcatcagaatgagcttccagaacctgctggccaagatctgcttccaccaccacttcagcgtggtggagagagtggacagctgcgccagcatgtacagcagaagcatccagggccaccacgtgtgcctgctggtgaagaagggcgagaacagcgtgagcgtggacggcaagtgcagcgacagcaccctgctgagcaacctgctggaggagatgaaggccaccctggccaagtgctag

SEQ ID NO: 142243 - DNA, 2955 bp, Artificial Sequence
  derived and/or modified sequence
atggccctgaagatggtgaagggcagcatcgacagaatgttcgacaagaacctgcaggacctggtgagaggcatcagaaaccacaaggaggacgaggccaagtacatcagccagtgcatcgacgagatcaagcaggagctgaagcaggacaacatcgccgtgaaggccaacgccgtgtgcaagctgacctacctgcagatgctgggctacgacatcagctgggccgccttcaacatcatcgaggtgatgagcgccagcaagttcaccttcaagagaatcggctacctggccgccagccagagcttccacgagggcaccgacgtgatcatgctgaccaccaaccagatcctgctgatcagcctgagcagcggcatgcccaaccacagcgccagcatccagctgtgcgtgcagaagctgagaatcctgatcgaggacagcgaccagaacctgaagtacctgggcctgctggccatgagcaagatcctgaagacccaccccaagagcgtgcagagccacaaggacctgatcctgcagtgcctggacgacaaggacgagagcatcagactgagagccctggacctgctgtacggcatggtgagcaagaagaacctgatggagatcgtgaagaagctgatgacccacgtggacaaggccgagggcaccacctacagagacgagctgctgaccaagatcatcgacatctgcagccagagcaactaccagtacatcaccaacttcgagtggtacatcagcatcctggtggagctgaccagactggagggcaccagacacggccacctgatcgccgcccagatgctggacgtggccatcagagtgaaggccatcagaaagttcgccgtgagccagatgagcgccctgctggacagcgcccacctgctggccagcagcacccagagaaacggcatctgcgaggtgctgtacgccgccgcctggatctgcggcgagttcagcgagcacctgcaggagccccaccacaccctggaggccatgctgagacccagagtgaccaccctgcccggccacatccaggccgtgtacgtgcagaacgtggtgaagctgtacgccagcatcctgcagcagaaggagcaggccggcgaggccgagggcgcccaggccgtgacccagctgatggtggacagactgccccagttcgtgcagagcgccgacctggaggtgcaggagagagccagctgcatcctgcagctggtgaagcacatccagaagctgcaggccaaggacgtgcccgtggccgaggaggtgagcgccctgttcgccggcgagctgaaccccgtggcccccaaggcccagaagaaggtgcccgtgcccgagggcctggacctggacgcctggatcaacgagcccctgagcgacagcgagagcgaggacgagagacccagagccgtgttccacgaggaggagcagagaagacccaagcacagacccagcgaggccgacgaggaggagctggccagaagaagagaggccagaaagcaggagcaggccaacaaccccttctacatcaagagcagccccagcccccagaagagataccaggacacccccggcgtggagcacatccccgtggtgcagatcgacctgagcgtgcccctgaaggtgcccggcctgcccatgagcgaccagtacgtgaagctggaggaggagagaagacacagacagaagctggagaaggacaagagaagaaagaagagaaaggagaaggagaagaagggcaagagaagacacagcagcctgcccaccgagagcgacgaggacatcgcccccgcccagcaggtggacatcgtgaccgaggagatgcccgagaacgccctgcccagcgacgaggacgacaaggaccccaacgacccctacagagccctggacatcgacctggacaagcccctggccgacagcgagaagctgcccatccagaagcacagaaacaccgagaccagcaagagccccgagaaggacgtgcccatggtggagaagaagagcaagaagcccaagaagaaggagaagaagcacaaggagaaggagagagacaaggagaagaagaaggagaaggagaagaagaagagccccaagcccaagaagaagaagcacagaaaggagaaggaggagagaaccaagggcaagaagaagagcaagaagcagccccccggcagcgaggaggccgccggcgagcccgtgcagaacggcgcccccgaggaggagcagctgccccccgagagcagctacagcctgctggccgagaacagctacgtgaagatgacctgcgacatcagaggcagcctgcaggaggacagccaggtgaccgtggccatcgtgctggagaacagaagcagcagcatcctgaagggcatggagctgagcgtgctggacagcctgaacgccagaatggccagaccccagggcagcagcgtgcacgacggcgtgcccgtgcccttccagctgccccccggcgtgagcaacgaggcccagtacgtgttcaccatccagagcatcgtgatggcccagaagctgaagggcaccctgagcttcatcgccaagaacgacgagggcgccacccacgagaagctggacttcagactgcacttcagctgcagcagctacctgatcaccaccccctgctacagcgacgccttcgccaagctgctggagagcggcgacctgagcatgagcagcatcaaggtggacggcatcagaatgagcttccagaacctgctggccaagatctgcttccaccaccacttcagcgtggtggagagagtggacagctgcgccagcatgtacagcagaagcatccagggccaccacgtgtgcctgctggtgaagaagggcgagaacagcgtgagcgtggacggcaagtgcagcgacagcaccctgctgagcaacctgctggaggagatgaaggccaccctggccaagtgctag

SEQ ID NO: 142244 - DNA, 3462 bp, Artificial Sequence
  derived and/or modified sequence
atggctttgaaaatggtcaaaggctccatcgatagaatgttcgataagaacttgcaggacttggtccgcggcatcaggaatcataaagaagacgaggccaagtacattagtcagtgcatcgatgagatcaaacaggaattaaagcaggacaatatcgcagtgaaagcaaatgcagtgtgcaagctaacatatttgcagatgttgggttacgatattagttgggctgcatttaatattattgaagttatgtccgcgtctaagtttactttcaagcgcattggctacttggcagcttcccaaagcttccatgaaggtaccgatgtgatcatgctgacaactaaccaaataaggaaggacctatcgtcaccatcgcagtacgacacgggtgtggctctcaccggcctgtcctgctttgttacaccagacctggctcgtgatttagctaacgatattatgacgctgatgagccatactaagccatacattcggaaaaaggccgttttaatcatgtataaggtctttttaaaataccctgagtccctcaggcccgccttccctcgcctgaaggaaaaacttgaggaccccgatccaggcgtgcagtcagccgcagtcaatgtgatttgcgaactggcccgcaggaatcccaagaattacctgtcactggcacccttgttttttaaactgatgacgtcatcaacgaataactgggtgctgatcaagatcattaagcttttcggggcactaacgcccctggaaccgcgcttagggaaaaaactgatcgagcctctcacaaacctcatccactccacatcagccatgtccctgctatatgaatgtgtgaataccgttatagctgtgctgatctctctcagctccgggatgccaaatcattccgccagcattcagttgtgtgtccagaaattacggattttaatcgaagactccgatcaaaatctgaaatatctcggtctgttggcaatgagtaaaatactaaaaactcaccctaaatctgtgcaatcacacaaggatttaatactgcaatgcctggacgataaagacgagagtatcagattgagagccctggatttgctgtatgggatggtgtcgaagaaaaacctgatggagatagttaaaaaactgatgacccatgttgataaggctgagggcaccacctatagggatgagttactcacaaagatcatcgacatttgctcacagtcaaattatcagtatattaccaacttcgaatggtacatctcaattctggtggagctcacccgcttagagggcacaaggcacggacacttaatcgcagcccagatgttggacgtggcgattagggtgaaggccattcgtaagttcgccgtgtcccagatgagtgccctcctcgatagcgcacacctccttgctagttctacccagagaaacggcatctgcgaggtgctgtatgctgccgcctggatttgcggagagttcagcgagcacctgcaggaacctcaccacactcttgaggccatgctacgcccccgggtgacaacactccccggacacattcaggcagtgtacgtgcagaacgtggtaaagctgtacgcttctattttgcagcagaaggagcaagccggggaggcagaaggtgctcaggctgtaactcagcttatggtggatcgccttccgcagttcgtgcagagtgccgacctcgaagtacaggagcgggctagctgcattcttcagcttgtaaaacacatccagaagctgcaggctaaggacgtgcccgtggccgaggaggtgagcgcactgttcgctggagaattaaatcccgtggctccaaaagcacagaagaaagtgccagtcccagagggcctagatctggatgcgtggatcaatgagcccctgtctgattcggaatccgaggatgagaggcctcgagcggtattccatgaagaagagcagcggaggccgaaacaccggccaagcgaggcagatgaggaagaactggctagacggcgggaagcccggaaacaagaacaggccaacaatcccttctatatcaagtcatctccctccccccagaagagatatcaggatacaccaggcgttgagcacatccccgtggtccagatagacctatcagtgccccttaaggtcccaggcctgccaatgagcgaccagtatgttaagcttgaagaggagagaagacatcggcagaagctggaaaaagacaaacggagaaagaaaagaaaggagaaagaaaaaaagggcaaaaggagacattcttccctgcccacagagtctgacgaggacatcgccccagctcagcaggttgacatagttactgaggaaatgccagagaacgcactacccagtgacgaggatgacaaagatcctaacgatccttaccgcgcccttgatatagatctcgataaaccactcgcagatagcgagaaacttcccattcaaaagcacaggaacaccgagacaagcaagtcccctgaaaaggatgttcctatggttgaaaaaaaatcaaaaaaacctaagaaaaaagagaaaaagcataaagagaaggaacgcgataaggagaagaagaaggagaaagaaaaaaagaaatccccgaagcctaagaaaaaaaaacatcgcaaagaaaaagaagagagaactaaaggaaaaaaaaagtcgaaaaaacagccgcctgggagcgaagaggccgctggcgagccggttcaaaacggtgctcctgaggaagagcagctgcctcctgaatcttcatactcattgctggcagagaacagctatgtgaaaatgacgtgtgatataagaggatctctgcaagaggactctcaggttaccgtggctatagtgctcgaaaatcgctcttcaagcattctgaagggaatggagctgtcagtgctggattcactgaacgctcggatggctaggcctcaggggagtagcgtacacgatggagtcccagtgccttttcagctccctcctggagtatccaatgaggctcagtatgtctttactatccagtctattgtgatggctcagaaattgaagggtactctgagctttattgccaaaaatgatgagggggctacccatgagaagctggactttcgcctccattttagttgttcctcgtacctgatcacaaccccgtgctactctgacgcatttgctaagttactggagtccggcgacctctcgatgtcttcgatcaaagtcgacgggatcaggatgtctttccagaacttattagctaagatttgcttccaccaccactttagtgtggtggagagagtggactcgtgtgccagcatgtattcccggtcaatccaaggccatcacgtctgtctgctcgtgaagaaaggcgagaattccgtaagtgtcgacggaaagtgctccgattcaactctgctatcaaacttactggaagaaatgaaggcaaccttggctaaatgttag

SEQ ID NO: 142245 - DNA, 2955 bp, Artificial Sequence
  derived and/or modified sequence
atggcactgaagatggtcaagggcagtatcgatcggatgtttgacaagaacctgcaagacctggtgcgtggtatcagaaatcacaaggaagatgaggctaagtatatttcccagtgcattgacgagatcaagcaagagctgaaacaagataatattgccgtcaaggctaatgccgtctgtaagcttacatacttgcagatgctcgggtatgatatttcttgggcagcctttaatattatcgaagttatgtcggcatcgaagttcacttttaagaggataggttatctggctgcaagccagtcatttcatgagggaactgacgttatcatgctgactacgaatcagattctgcttatttcactgtcatctggcatgcccaatcattcagcctcaattcagctttgcgtccagaaactgcgtattttgatcgaggattcggaccagaatttgaagtatctgggactgctggccatgtcaaaaattctgaaaactcacccaaaatccgtccagagccacaaagacctcattcttcagtgtctcgatgacaaagatgaatccataaggcttcgggccctggatttgctctatggcatggtgagcaagaagaacctgatggagatagtgaagaaactgatgacacatgtggacaaggcagaaggtaccacatatagagatgaactgctcaccaaaattatcgatatctgttcgcaatctaattaccagtatatcacaaacttcgagtggtatatttcgattttggtggaactcacacggttggagggaacgcgccatggccatctgattgctgctcaaatgcttgatgtcgcaatccgcgtgaaggcgatcaggaagtttgccgtttctcagatgtcagctctcctcgatagtgcacatcttttggcttcttccacccagaggaacgggatctgcgaagtcctgtatgccgccgcttggatctgtggtgagttttcagagcatctgcaggaaccccaccatacccttgaggcaatgcttaggcccagagtgacaacccttcctggacacatccaggcagtttatgtgcagaatgtcgtaaaattatacgcaagcattctacagcaaaaggagcaagctggtgaggctgagggtgcacaggctgtgactcaattaatggtggatcggctgccacaattcgtacaatccgctgatctcgaggtccaggaaagagctagctgcattctccaactcgttaaacacatccaaaaattgcaagctaaagatgtgcccgtggccgaggaagtctcagctctatttgcaggggagctaaatcctgtagcccctaaagcccagaagaaagtgcccgtacccgagggactggacttggacgcttggattaacgagccattgtcagacagcgaatcagaggacgaacggccccgagcggtgttccacgaagaagaacagcgccgccctaagcaccggccttcagaggctgatgaggaagagctggccaggagaagagaagctagaaagcaggagcaggcaaacaaccctttttacattaaatcctcaccctccccacagaagagatatcaggatacgcctggggtcgagcatattccggtagtgcagattgacctgtccgttcctttaaaggttcccggactgcccatgtctgaccagtacgtcaagttagaggaggagaggaggcacaggcagaagctggaaaaggacaaaagaaggaaaaagagaaaagagaaagagaagaaggggaagcgtcggcatagttccctgccaactgagtccgacgaggacattgctcctgcgcagcaggtcgacatcgtcaccgaagaaatgcctgaaaatgctctccctagcgatgaggacgataaagacccgaacgacccctaccgagccctcgatatcgatctagacaagccattggctgacagcgaaaaattgccgattcagaaacaccgtaataccgagacatctaagtctccagaaaaggatgtgccaatggtcgagaaaaagtccaaaaagccaaaaaagaaggaaaaaaaacataaggagaaggaaagggataaggagaagaagaaagagaaggagaaaaaaaaaagcccaaagcccaaaaaaaagaaacacaggaaagaaaaggaggaacgaaccaaaggaaagaagaaatccaagaaacagccccctggcagcgaagaagcagcaggagagcccgtccagaatggcgcccccgaggaagagcagctgccaccagagagctcgtactctttgctagccgagaactcctacgtgaagatgacatgtgacataaggggctcactgcaagaagattctcaagtcacagtggcaatcgtgctagaaaatcgttcatcttccattctaaaagggatggagctgagtgtactagacagcttgaacgcccgtatggcccggccacagggtagcagcgtgcatgacggcgtgcccgttccctttcagctgccccccggagtgagcaacgaggcccagtacgtgtttacgatacagtcgattgttatggcacagaaattgaaaggcactctgtcgttcattgcgaagaacgatgaaggggccactcatgagaaactggactttcgcctgcacttttcatgttcgtcctatctaattaccaccccttgctatagtgacgcctttgccaaactgctcgagagcggagacctctcgatgtcgagcatcaaggtcgacggcataagaatgtctttccagaacctgctggccaagatctgcttccatcaccatttttcagtcgttgagagagttgatagttgcgcaagcatgtattcccgaagcatacagggacatcatgtgtgtctcttggtcaagaaaggggaaaacagtgtttccgtggacgggaaatgctccgacagtactttactgagtaacctgctggaagaaatgaaggccactctggcgaaatgctag

SEQ ID NO: 142246 - DNA, 4863 bp, Artificial Sequence
  derived and/or modified sequence
ttgtccgccatttgcaaggggcccggagcgggatcgcggcacctgccgagcgggtcgccgcctctgccgcggtccttggaccccgccgccgccctggcctgggagcttgccccgccgcagcggccggcagcgcggcgctccgcgggcggcaggcacgggccccgggccccctcacggcgcccagccgcgggcctcccgaggcaaaagcccgtgggccgccgcgatggccctcaagatggtgaagggcagcatcgaccgcatgttcgacaagaatctgcaggacttggtccgcggcatccgtaaccacaaggaggacgaggcaaaatacatatctcagtgcattgatgagatcaagcaggagctgaagcaggacaacatagcggtgaaggcgaacgcggtctgcaagctgacgtatttacagatgttgggatacgacatcagctgggccgccttcaacatcatagaagtgatgagtgcctccaagttcaccttcaagcgaattggctacctcgctgcttcccagagctttcacgaaggcaccgacgtcatcatgctgaccaccaatcagatccgtaaggacttgagcagccccagccagtacgacacaggtgttgcactgacgggtctgtcctgcttcgtcaccccagaccttgccagagacctggcaaatgacatcatgacactgatgtcacacaccaagccctacatcaggaagaaggctgtgctgatcatgtacaaggtgttcctgaagtaccccgagtcgctgcgccctgcctttccccggctgaaggagaagctggaggaccccgaccccggggttcagtcggctgccgtcaatgtcatctgcgagctggccagacgcaaccctaagaactacctgtccctggccccgctctttttcaagctgatgacgtcctccaccaacaactgggtcctcatcaagatcatcaagctgttcggtgctcttactcctttggaaccgcggctgggcaagaagctgatcgagcccctcaccaatctcatccacagcacgtctgccatgtctctcctctatgaatgtgtgaacaccgtgattgcagtgctcatctcgctgtcctccggcatgcccaaccacagcgccagcatccagctttgtgttcagaaattaaggatattgatcgaggactccgatcagaacttgaagtacctggggctgctggcaatgtccaagatcctgaagacccaccccaagtccgtgcagtcccacaaggacctcatcctgcagtgcctggacgacaaggacgagtccatccggctgcgggccctggacctgctctatgggatggtgtccaagaagaacctgatggagatcgtgaagaagctgatgacccacgtagacaaggcagagggtaccacctaccgtgacgagctgctcaccaagatcattgacatctgcagccagtccaactaccagtacatcaccaacttcgagtggtacatcagcatcctggtggagctgacccggctggagggcacacggcacggccacctcatcgccgcccaaatgctggacgtggccatccgcgtgaaggccatccgcaagttcgccgtgtcccagatgtctgcgctgcttgacagtgcacacctgctggccagcagcacccagcggaacgggatctgtgaggtgctgtacgctgccgcctggatctgcggggagttctcagagcatctgcaggaaccacaccacactttggaggccatgctgcggcccagagtcaccacgctgccaggccacatccaggccgtgtatgtgcagaacgtggtcaagctctacgcctccatcctgcagcagaaggagcaggccggggaggcagagggcgctcaggccgtcacccagctcatggtggaccggctgccccagtttgtgcagagcgcagacctggaggtgcaggagcgggcgtcctgcatcctgcagctggtcaagcacatccagaagcttcaggccaaggacgtgcctgtggcagaggaggtcagcgctctctttgctggggagctgaacccagtggcccccaaggcccagaagaaggttccagtccccgaaggcctggacctggacgcctggatcaatgagccactctcggacagcgagtcagaggacgagaggcccagggccgtcttccacgaggaggagcagcggcgtcccaagcaccggccgtcggaggcggacgaggaagagctggctcggcgccgagaggcccggaagcaggagcaggccaacaaccccttctacatcaagagctcgccatcgccacagaagcggtaccaggacaccccgggcgtggagcacattcccgtggtgcagattgacctctccgtccccttgaaggttccagggctgcctatgtcagatcagtatgtgaagctggaggaggagcggcggcaccggcagaagctggagaaggacaagaggaggaaaaagaggaaggagaaggagaagaagggcaagcgccgccacagctcgctgcccacggagagcgacgaggacatcgcccctgcccagcaggtggacatcgtcacagaggagatgcctgagaatgctctgcccagcgacgaggatgacaaagaccccaacgacccctacagggctctggatattgacctggataagcccttagccgacagcgagaaactgcctattcagaaacacagaaacaccgagacctcaaaatcccctgagaaggacgttcccatggtagaaaagaagagcaagaaacccaagaagaaagagaaaaaacacaaagagaaagagagagacaaggagaagaagaaggagaaggagaagaagaaatctcccaagcctaagaagaagaagcacaggaaggagaaggaggagcggaccaaaggcaagaagaagtccaagaagcagcctccaggcagcgaggaggcagcgggggagccggtgcagaatggcgcgccagaggaggagcagctcccgcctgagtccagctactccctcctcgctgaaaattcctatgttaaaatgacctgtgacatccggggcagtctgcaggaggacagccaggtcactgtggccatcgtgctggagaacaggagcagcagcatcctcaagggcatggagctcagcgtgctggactcactcaatgccaggatggcccggccgcagggctcctccgtccacgatggcgtccccgtgcctttccagctgcccccaggcgtctccaacgaagcccagtatgtgttcaccatccagagcatcgtcatggcgcagaagctcaaggggaccctgtccttcattgccaagaatgacgagggtgcgacccacgagaagctggacttcaggctgcacttcagctgcagctcctacttgatcaccactccctgctacagtgacgcctttgctaagttgctggagtctggggacttgagcatgagctcaatcaaagtcgatggcattcggatgtccttccagaatcttctggcgaagatctgttttcaccaccatttttccgttgtggagcgagtggactcctgcgcctccatgtacagccgctccatccagggccaccatgtctgcctcctggtgaaaaagggtgagaactctgtctcagtcgacgggaagtgcagtgactccacgctactgagcaacttgttagaagagatgaaggcgacgctggccaagtgttgagagctgcctgcgagccccgcaccaccccgcggagcacgtacccagggaccgcagccctgacgtgtctcgcctctcctcagtcgtgtgtactgtacccaagcctgagtgttaatttaactctatgttgtccgccgtgtagacatccgaggtcatttgttgcgttgaattatctgaccatccttttttactgtgactcttcccattctctttggcaagaagtccccttctcgcccccaaaccagcaagggactcccccacctgggtctgtgccctgccccgcgctgggggccgagtccttgaatgtggcttcaggggctcctgtcctgggccagggcctgatgggcaccacgtgaggggcacttggtggacagggcggggctgacgtggcctcctctggggtcgcctgcttttgacccaaaggtcctgacggttgcgtccgggggaggggaaggaagggccgctgtcgccaaggttttctctcccagaacccacagtgggaaagcggtcttgccaggcgttgtccattgtcagtgtgctcgtgggctggtgactgggtcttgggatcccaggccacgcgccagccaggctgtgggcagggcggggccagggacgccaaagagaggttgcagtcagaaccgtggacggggtgggttgaggcctctctgccacccgtcttcctggtcagcagaagtgcatctcggcttgggtttggggtggtccgcatcccctgcttgccactatgcgcaccaaggtttccccacatccttcccagcacccttaggaaggcccaggcagggcctggaagcagcggacctgggctgttctgtgttgaaggagtgtgcccagtgcccttgggcaggacctgtgagagccacctcacaggcagagcccccaccaggcagggcaaggagactccgctcactccccacggccagcgtgggcacaggactgacccttcttcagagataatgacattttatcttctccttttgatgaaaactgtcactttagcatgtaatccattacagaatcccatgcagtgattccaggatttgaaattgtatgatgtgttacataagaatttatttgctatcgacattcccgtataaagagagagacatatcacgctgctgtcatgattttgtgtcaagatgatccaataaagttgtaaaacaggc

SEQ ID NO: 142247 - DNA, 4338 bp, Artificial Sequence
  derived and/or modified sequence
ggggcccggagcgggatcgcggcacctgccgagcgggtcgccgcctctgccgcggtccttggaccccgccgccgccctggcctgggagcttgccccgccgcagcggccggcagcgcggcgctccgcgggcggcaggcacgggccccgggccccctcacggcgcccagccgcgggcctcccgaggcaaaagcccgtgggccgccgcgatggccctcaagatggtgaagggcagcatcgaccgcatgttcgacaagaatctgcaggacttggtccgcggcatccgtaaccacaaggaggacgaggcaaaatacatatctcagtgcattgatgagatcaagcaggagctgaagcaggacaacatagcggtgaaggcgaacgcggtctgcaagctgacgtatttacagatgttgggatacgacatcagctgggccgccttcaacatcatagaagtgatgagtgcctccaagttcaccttcaagcgaattggctacctcgctgcttcccagagctttcacgaaggcaccgacgtcatcatgctgaccaccaatcagatcctgctcatctcgctgtcctccggcatgcccaaccacagcgccagcatccagctttgtgttcagaaattaaggatattgatcgaggactccgatcagaacttgaagtacctggggctgctggcaatgtccaagatcctgaagacccaccccaagtccgtgcagtcccacaaggacctcatcctgcagtgcctggacgacaaggacgagtccatccggctgcgggccctggacctgctctatgggatggtgtccaagaagaacctgatggagatcgtgaagaagctgatgacccacgtagacaaggcagagggtaccacctaccgtgacgagctgctcaccaagatcattgacatctgcagccagtccaactaccagtacatcaccaacttcgagtggtacatcagcatcctggtggagctgacccggctggagggcacacggcacggccacctcatcgccgcccaaatgctggacgtggccatccgcgtgaaggccatccgcaagttcgccgtgtcccagatgtctgcgctgcttgacagtgcacacctgctggccagcagcacccagcggaacgggatctgtgaggtgctgtacgctgccgcctggatctgcggggagttctcagagcatctgcaggaaccacaccacactttggaggccatgctgcggcccagagtcaccacgctgccaggccacatccaggccgtgtatgtgcagaacgtggtcaagctctacgcctccatcctgcagcagaaggagcaggccggggaggcagagggcgctcaggccgtcacccagctcatggtggaccggctgccccagtttgtgcagagcgcagacctggaggtgcaggagcgggcgtcctgcatcctgcagctggtcaagcacatccagaagcttcaggccaaggacgtgcctgtggcagaggaggtcagcgctctctttgctggggagctgaacccagtggcccccaaggcccagaagaaggttccagtccccgaaggcctggacctggacgcctggatcaatgagccactctcggacagcgagtcagaggacgagaggcccagggccgtcttccacgaggaggagcagcggcgtcccaagcaccggccgtcggaggcggacgaggaagagctggctcggcgccgagaggcccggaagcaggagcaggccaacaaccccttctacatcaagagctcgccatcgccacagaagcggtaccaggacaccccgggcgtggagcacattcccgtggtgcagattgacctctccgtccccttgaaggttccagggctgcctatgtcagatcagtatgtgaagctggaggaggagcggcggcaccggcagaagctggagaaggacaagaggaggaaaaagaggaaggagaaggagaagaagggcaagcgccgccacagctcgctgcccacggagagcgacgaggacatcgcccctgcccagcaggtggacatcgtcacagaggagatgcctgagaatgctctgcccagcgacgaggatgacaaagaccccaacgacccctacagggctctggatattgacctggataagcccttagccgacagcgagaaactgcctattcagaaacacagaaacaccgagacctcaaaatcccctgagaaggacgttcccatggtagaaaagaagagcaagaaacccaagaagaaagagaaaaaacacaaagagaaagagagagacaaggagaagaagaaggagaaggagaagaagaaatctcccaagcctaagaagaagaagcacaggaaggagaaggaggagcggaccaaaggcaagaagaagtccaagaagcagcctccaggcagcgaggaggcagcgggggagccggtgcagaatggcgcgccagaggaggagcagctcccgcctgagtccagctactccctcctcgctgaaaattcctatgttaaaatgacctgtgacatccggggcagtctgcaggaggacagccaggtcactgtggccatcgtgctggagaacaggagcagcagcatcctcaagggcatggagctcagcgtgctggactcactcaatgccaggatggcccggccgcagggctcctccgtccacgatggcgtccccgtgcctttccagctgcccccaggcgtctccaacgaagcccagtatgtgttcaccatccagagcatcgtcatggcgcagaagctcaaggggaccctgtccttcattgccaagaatgacgagggtgcgacccacgagaagctggacttcaggctgcacttcagctgcagctcctacttgatcaccactccctgctacagtgacgcctttgctaagttgctggagtctggggacttgagcatgagctcaatcaaagtcgatggcattcggatgtccttccagaatcttctggcgaagatctgttttcaccaccatttttccgttgtggagcgagtggactcctgcgcctccatgtacagccgctccatccagggccaccatgtctgcctcctggtgaaaaagggtgagaactctgtctcagtcgacgggaagtgcagtgactccacgctactgagcaacttgttagaagagatgaaggcgacgctggccaagtgttgagagctgcctgcgagccccgcaccaccccgcggagcacgtacccagggaccgcagccctgacgtgtctcgcctctcctcagtcgtgtgtactgtacccaagcctgagtgttaatttaactctatgttgtccgccgtgtagacatccgaggtcatttgttgcgttgaattatctgaccatccttttttactgtgactcttcccattctctttggcaagaagtccccttctcgcccccaaaccagcaagggactcccccacctgggtctgtgccctgccccgcgctgggggccgagtccttgaatgtggcttcaggggctcctgtcctgggccagggcctgatgggcaccacgtgaggggcacttggtggacagggcggggctgacgtggcctcctctggggtcgcctgcttttgacccaaaggtcctgacggttgcgtccgggggaggggaaggaagggccgctgtcgccaaggttttctctcccagaacccacagtgggaaagcggtcttgccaggcgttgtccattgtcagtgtgctcgtgggctggtgactgggtcttgggatcccaggccacgcgccagccaggctgtgggcagggcggggccagggacgccaaagagaggttgcagtcagaaccgtggacggggtgggttgaggcctctctgccacccgtcttcctggtcagcagaagtgcatctcggcttgggtttggggtggtccgcatcccctgcttgccactatgcgcaccaaggtttccccacatccttcccagcacccttaggaaggcccaggcagggcctggaagcagcggacctgggctgttctgtgttgaaggagtgtgcccagtgcccttgggcaggacctgtgagagccacctcacaggcagagcccccaccaggcagggcaaggagactccgctcactccccacggccagcgtgggcacaggactgacccttcttcagagataatgacattttatcttctccttttgatgaaaactgtcactttagcatgtaatccattacagaatcccatgcagtgattccaggatttgaaattgtatgatgtgttacataagaatttatttgctatcgacattcccgtataaagagagagacatatcacgctgctgtcatgattttgtgtcaagatgatccaataaagttgtaaaacagg

SEQ ID NO: 142248 - DNA, 3462 bp, Artificial Sequence
  derived and/or modified sequence
atggccctgaagatggtgaagggcagcattgacaggatgtttgacaagaacctgcaggacctggtgcggggcatccggaaccacaaggaggatgaggccaagtacatcagccagtgcattgatgagatcaagcaggagctgaagcaggacaacattgctgtgaaggccaatgctgtgtgcaagctgacctacctgcagatgctgggctatgacatctcctgggccgccttcaacatcatcgaggtgatgtctgccagcaagttcaccttcaagagaattggctacctggccgccagccagagcttccacgagggcacagatgtgatcatgctgaccaccaaccagatcaggaaggacctgagcagccccagccagtatgacaccggggtggccctgaccggcctgagctgctttgtgaccccagacctggcccgggacctggccaatgacatcatgaccctgatgagccacaccaagccctacatcaggaagaaggctgtgctgatcatgtacaaggtgttcctgaagtacccagagagcctgcggcctgccttcccccggctgaaggagaagctggaggaccctgaccccggggtgcagagcgctgctgtgaatgtcatctgtgagctggcccggaggaaccccaagaactacctgagcctggcccccctcttcttcaagctgatgaccagcagcaccaacaactgggtgctgatcaagatcatcaagctgtttggagccctgacccccctggagccccggctgggcaagaagctgattgagcccctgaccaacctgatccacagcaccagcgccatgagcctgctgtatgaatgtgtgaacacagtgattgctgtgctgatcagcctgagcagcggcatgcccaaccacagcgccagcatccagctgtgtgtgcagaagctgcgcatcctgattgaagattctgaccagaacctgaagtacctgggcctgctggccatgagcaagatcctgaagacccaccccaagtctgtgcagagccacaaggacctgatcctgcagtgcctggatgacaaggatgagagcatccggctgcgggccctggacctgctgtatggcatggtgtccaagaagaacctgatggagatcgtgaagaagctgatgacccacgtggacaaggccgagggcaccacctacagagatgagctgctgaccaagatcatcgacatctgcagccagagcaactaccagtacatcaccaactttgagtggtacatcagcatcctggtggagctgacccggctggagggcaccaggcatggccacctgattgctgcccagatgctggatgtggccatccgggtgaaggccatcaggaagtttgctgtgtcccagatgtctgccctgctggacagcgcccacctgctggccagcagcacccagagaaatggcatctgtgaggtgctgtatgctgctgcctggatctgtggggagttcagcgagcacctgcaggagccccaccacaccctggaggccatgctgcggccccgggtgaccaccctgcccggccacatccaggccgtgtatgtgcagaatgtggtgaagctgtatgccagcatcctgcagcagaaggagcaggccggggaggccgagggcgcccaggccgtgacccagctgatggtggaccggctgccccagtttgtgcagagcgctgacctggaggtgcaggagcgggccagctgcatcctgcagctggtgaagcacatccagaagctgcaggccaaggatgtgcctgtggccgaggaggtgtctgccctgtttgctggggagctgaaccctgtggcccccaaggcccagaagaaggtgcctgtgcctgagggcctggacctggatgcctggatcaatgagcccctgagtgacagcgagagtgaagatgagcggcccagggctgtgttccacgaggaggagcagaggcggcccaagcaccggcccagcgaggctgatgaggaggagctggcccggcggcgggaggccaggaagcaggagcaggccaacaaccccttctacatcaagagcagccccagcccccagaagcgctaccaggacaccccaggagtggagcacatccctgtggtgcagattgacctgtctgtgcccctgaaggtgcccggcctgcccatgtctgaccagtatgtgaagctggaggaggagaggaggcaccggcagaagctggagaaggacaagaggaggaagaagaggaaggagaaggagaagaagggcaagagaagacacagcagcctgcccacagaaagtgatgaggacatcgccccagcccagcaggtggacatcgtgacagaggagatgccagaaaatgccctgcccagtgatgaagatgacaaggaccccaatgacccctaccgggccctggacatcgacctggacaagcccctggccgacagcgagaagctgcccatccagaagcacaggaacacagagaccagcaagagccctgagaaggatgtgcccatggtggagaagaagagcaagaagcccaagaagaaggagaagaagcacaaggagaaggagcgggacaaggagaagaagaaggagaaggagaagaagaagagccccaagcccaagaagaagaagcacaggaaggagaaggaggagaggaccaagggcaagaagaagagcaagaagcagcccccaggcagcgaggaggccgccggggagcctgtgcagaatggagcccctgaggaggagcagctgcccccagagagcagctacagcctgctggctgaaaattcctatgtgaagatgacctgtgacatccggggcagcctgcaggaggacagccaggtgacagtggccatcgtgctggagaacagaagcagcagcatcctgaagggcatggagctgtctgtgctggacagcctgaatgccaggatggcccggccccagggcagctctgtgcatgatggagtgcctgtgcccttccagctgcccccaggagtgtccaatgaggcccagtatgtgttcaccatccagagcatcgtgatggcccagaagctgaagggcaccctgtccttcatcgccaagaatgatgagggcgccacccatgagaagctggacttccggctgcacttcagctgcagcagctacctgatcaccaccccctgctacagtgatgcctttgccaagctgctggagagcggggacctgtccatgagcagcatcaaggtggatggcatccgcatgtccttccagaacctgctggccaagatctgcttccaccaccacttctctgtggtggagcgggtggacagctgtgcctccatgtacagccgcagcatccagggccaccacgtgtgcctgctggtgaagaagggggagaacagcgtgtctgtggatggcaagtgcagcgacagcaccctgctgagcaacctgctggaggagatgaaggccaccctggccaagtgctag

SEQ ID NO: 142249 - DNA, 2955 bp, Artificial Sequence
  derived and/or modified sequence
atggccctgaagatggtgaagggcagcattgacaggatgtttgacaagaacctgcaggacctggtgcggggcatccggaaccacaaggaggatgaggccaagtacatcagccagtgcattgatgagatcaagcaggagctgaagcaggacaacattgctgtgaaggccaatgctgtgtgcaagctgacctacctgcagatgctgggctatgacatctcctgggccgccttcaacatcatcgaggtgatgtctgccagcaagttcaccttcaagagaattggctacctggccgccagccagagcttccacgagggcacagatgtgatcatgctgaccaccaaccagatcctgctgatcagcctgagcagcggcatgcccaaccacagcgccagcatccagctgtgtgtgcagaagctgcgcatcctgattgaggacagcgaccagaacctgaagtacctgggcctgctggccatgagcaagatcctgaagacccaccccaagtctgtgcagagccacaaggacctgatcctgcagtgcctggatgacaaggatgagagcatccggctgcgggccctggacctgctgtatggcatggtgtccaagaagaacctgatggagatcgtgaagaagctgatgacccacgtggacaaggccgagggcaccacctacagagatgagctgctgaccaagatcatcgacatctgcagccagagcaactaccagtacatcaccaactttgagtggtacatcagcatcctggtggagctgacccggctggagggcaccaggcatggccacctgattgctgcccagatgctggatgtggccatccgggtgaaggccatcaggaagtttgctgtgtcccagatgtctgccctgctggacagcgcccacctgctggccagcagcacccagagaaatggcatctgtgaggtgctgtatgctgctgcctggatctgtggggagttcagcgagcacctgcaggagccccaccacaccctggaggccatgctgcggccccgggtgaccaccctgcccggccacatccaggccgtgtatgtgcagaatgtggtgaagctgtatgccagcatcctgcagcagaaggagcaggccggggaggccgagggcgcccaggccgtgacccagctgatggtggaccggctgccccagtttgtgcagagcgctgacctggaggtgcaggagcgggccagctgcatcctgcagctggtgaagcacatccagaagctgcaggccaaggatgtgcctgtggccgaggaggtgtctgccctgtttgctggggagctgaaccctgtggcccccaaggcccagaagaaggtgcctgtgcctgagggcctggacctggatgcctggatcaatgagcccctgagtgacagcgagagtgaagatgagcggcccagggctgtgttccacgaggaggagcagaggcggcccaagcaccggcccagcgaggctgatgaggaggagctggccaggagaagagaggccaggaagcaggagcaggccaacaaccccttctacatcaagagcagccccagcccccagaagcgctaccaggacaccccaggagtggagcacatccctgtggtgcagattgacctgtctgtgcccctgaaggtgcccggcctgcccatgtctgaccagtatgtgaagctggaggaggagcggcggcaccggcagaagctggagaaggacaagaggaggaagaagaggaaggagaaggagaagaagggcaagaggaggcacagcagcctgcccacagaaagtgatgaagatattgccccagcccagcaggtggacatcgtgacagaggagatgccagaaaatgccctgcccagtgatgaagatgacaaggaccccaatgacccctaccgggccctggacatcgacctggacaagcccctggccgacagcgagaagctgcccatccagaagcacaggaacacagagaccagcaagagccctgagaaggatgtgcccatggtggagaagaagagcaagaagcccaagaagaaggagaagaagcacaaggagaaggagcgggacaaggagaagaagaaggagaaggagaagaagaagagccccaagcccaagaagaagaagcacaggaaggagaaggaggagaggaccaagggcaagaagaagagcaagaagcagcccccaggcagcgaggaggccgccggggagcctgtgcagaatggagcccctgaggaggagcagctgcccccagagagcagctacagcctgctggccgagaacagctatgtgaagatgacctgtgacatccggggcagcctgcaggaggacagccaggtgacagtggccatcgtgctggagaacagaagcagcagcatcctgaagggcatggagctgtctgtgctggacagcctgaatgccaggatggcccggccccagggcagctctgtgcatgatggagtgcctgtgcccttccagctgcccccaggagtgtccaatgaggcccagtatgtgttcaccatccagagcatcgtgatggcccagaagctgaagggcaccctgtccttcatcgccaagaatgatgaaggagccacccatgagaagctggacttccggctgcacttcagctgcagcagctacctgatcaccaccccctgctacagtgatgcctttgccaagctgctggagagcggggacctgtccatgagcagcatcaaggtggatggcatccgcatgtccttccagaacctgctggccaagatctgcttccaccaccacttctctgtggtggagcgggtggacagctgtgcctccatgtacagccgcagcatccagggccaccacgtgtgcctgctggtgaagaagggagaaaattctgtgtctgtggatggaaaatgtagtgacagcaccctgctgagcaacctgctggaggagatgaaggccaccctggccaagtgctag

SEQ ID NO: 142250 - DNA, 3462 bp, Artificial Sequence
  derived and/or modified sequence
atggccctgaagatggtgaagggcagcatcgaccggatgttcgacaagaacttacaggacttggtccgaggaattcggaatcacaaggaagatgaggccaagtatatctcacagtgcatagacgagatcaagcaggagcttaaacaagacaacattgccgttaaagccaatgcggtgtgcaaactgacctatctgcaaatgctggggtatgacatttcctgggcggcctttaatatcatagaagtgatgtctgccagtaagttcacattcaaacgtattggctatttggctgcatctcaatccttccacgaaggaaccgatgtgatcatgcttacaacaaatcagatacggaaggacctctccagcccaagtcagtatgacacaggggtcgctctaactgggctttcctgctttgtgactcccgacctggcaagggatctcgctaatgacataatgactttgatgagtcatactaaaccttatatacgcaagaaagcggtgctcataatgtataaggtgttcctgaagtaccccgagtcacttagaccagcattccccagactgaaggaaaagctcgaagaccccgacccaggcgtgcagagcgcagcagtcaacgtgatctgcgagttagctcggaggaatcccaagaattacctctccctggcccctcttttcttcaagctgatgacttcctctactaataattgggttctgatcaagatcattaagttgttcggagctttgacacctttagagccacgtttaggcaagaagcttatcgaaccgctgacaaacctcatccactcaacaagcgccatgtccctgctgtatgaatgcgtaaacacagtgatcgctgttctgatctccctgtcctccgggatgcctaaccattcagccagtatccagctgtgcgtgcagaagcttcgaatactgattgaggactcagatcagaatctgaaatacctggggttgttggctatgtctaaaatcctaaaaacccatcccaaaagcgtacaaagccacaaggacttgatactccagtgccttgatgacaaggacgagtcaatccggcttagggccttagatctcctgtacggcatggtgtccaagaaaaatctcatggaaatcgtgaagaagttaatgacacacgtcgataaagctgaggggacgacttaccgtgacgagctgctcactaagataattgatatatgctcccagagtaactatcagtatattacaaatttcgagtggtacatctccatcctcgtggaactgactagactggaaggcacgcgacatggtcatcttatagctgcccagatgctcgacgtggccattcgcgtgaaggcgatcagaaagtttgccgtgtcccagatgtctgccctgttggattctgcccaccttctcgcttcttcaacccagagaaacgggatctgcgaggttctatatgctgctgcatggatatgcggcgagttctcagaacatctgcaagagccacaccatactctggaggctatgctccggccgagagtcactacactgcctggccatatacaggcagtctatgtgcagaatgtcgtaaagctgtatgcctccatcttacagcagaaggagcaggcgggtgaagcagagggagcccaggctgttacccagctgatggtagaccggctcccacagttcgtgcagtccgctgacttggaagtccaagagcgggcgagctgcattctgcagctggtgaagcatattcagaagctgcaggccaaagatgtccctgtcgccgaagaagtgtcagcgctcttcgcaggcgagctgaatccagtggcacccaaagctcagaagaaggtgccagtgcccgagggtttagatctcgacgcttggattaacgaaccactttcagatagcgagagcgaggatgagaggccacgcgcagtgttccacgaagaggaacagaggaggccgaagcatagaccatctgaggccgacgaagaggagctggcgaggcgtagggaagcccgtaagcaagagcaagcgaacaaccctttctacataaagtcttcgcccagccctcagaagcgttatcaagacacacctggggtggagcacattccagtcgtccagatagatctatccgtacccttaaaagtgccaggacttcctatgtccgaccagtacgttaagttagaggaggaacgtcgacatcgccagaaactggagaaggataaacggcgcaagaaaaggaaagagaaggaaaagaagggcaagcggagacattctagtctgccaacagagtccgatgaggacatcgctcctgcccagcaggttgatatcgtgaccgaggagatgccggagaacgccttgccttccgacgaggacgataaggaccccaatgatccatatagagcactagacatcgatctcgacaaaccgcttgcggactcagagaagctgccaattcaaaagcatcgcaatactgaaacatccaagtctcctgagaaagacgtgcccatggtagagaagaaatcaaagaagcccaagaaaaaggaaaagaaacataaagagaaggaaagggataaagaaaagaagaaagagaaagagaagaagaaatccccaaagcccaagaagaaaaaacaccgtaaagagaaggaagaacgtacaaagggtaagaagaagtcgaagaaacagccaccaggctccgaagaagcagctggcgaacccgtgcaaaacggagcccccgaagaagagcagctacctcctgagtctagttatagcctcctggcggagaacagctatgtcaagatgacttgcgacatccgtgggagccttcaggaggattcacaagtaactgtagctatcgttctcgagaaccgatcaagctctatcctgaagggcatggagctgagtgtgttggatagtctcaatgctaggatggctaggccacagggatccagcgtccacgatggtgttcccgtgccttttcagttaccacctggggtgtctaacgaggcacagtacgttttcaccatacagtccattgtgatggctcaaaagttgaagggtacactgagcttcattgccaagaacgacgagggggccacgcatgaaaaactggactttcggctccacttctcttgctcatcttacctcataacaaccccctgctattccgacgccttcgctaagttattagaatccggtgacctctctatgagtagcattaaagtggatgggattcgaatgtcttttcaaaacctgctggccaagatctgtttccaccatcatttctcagttgtggagcgagtcgacagctgtgcatcgatgtattcacggtcaattcagggccaccatgtgtgcttacttgtaaagaaaggagaaaactccgtgagcgtcgatggtaaatgttccgatagcactctcttgtccaatctcctggaggaaatgaaggccaccctggcaaagtgttag

SEQ ID NO: 142251 - DNA, 2955 bp, Artificial Sequence
  derived and/or modified sequence
atggccctgaagatggtgaagggcagcatcgaccggatgttcgacaagaatctacaggacttggttcgcgggatacgaaaccataaggaggatgaagctaaatacattagtcaatgtatcgacgagataaaacaggagctgaagcaggacaatatcgccgtcaaagcaaacgccgtgtgcaaactcacctacctgcaaatgctagggtacgatatcagttgggccgcctttaacattatcgaggtgatgtccgcatcaaaatttacatttaaaaggatagggtatcttgctgcatcacagtccttccatgaaggtacagacgtgatcatgcttacaacaaatcagattctcctgatcagcttaagctccggcatgccgaaccacagcgccagtattcagctctgcgtgcagaagctccgaattttaatcgaggacagcgatcagaacctgaagtatctcggcttactcgcgatgagcaagatcttgaaaacacatccaaaatcagtccaatcccacaaagatttaatcctgcagtgtttagatgacaaggacgagtctattcgccttagggccctggatttattatatgggatggtgagcaaaaagaacctgatggagatcgtcaaaaaactgatgactcatgtcgacaaggcagagggtaccacatatagagacgagcttcttaccaagataattgacatctgctctcaatccaactaccagtatattacaaactttgaatggtatatcagcattctcgtcgaattaacgagactcgaggggactcggcacgggcaccttattgccgcacagatgttggatgttgccatcagggtgaaggctatccggaaattcgctgtttcacaaatgtctgcactgctagatagcgctcatcttctggcttccagtacacagcgcaatggcatttgcgaggtgctttacgccgccgcctggatctgtggggagttcagcgagcaccttcaggagccacaccacaccttagaagcaatgctcaggcctcgagtgacaaccttgcccggccacatccaggccgtatacgtccaaaacgtggtgaaactgtatgcatctatccttcagcagaaagagcaggccggcgaggccgaaggggcccaagcagtgacacagctgatggttgatcggctccctcagtttgtgcaatctgccgatctggaagtgcaagaaagagcatcgtgcatcttacaacttgtgaagcacattcaaaaactgcaagcgaaagatgttcccgtagctgaggaagtgtccgccctgtttgctggcgagcttaatccagttgcccccaaagcacagaagaaggtccccgtaccggagggtttagacctggacgcgtggattaatgagcctttaagcgacagcgagtctgaggacgagcggcctcgggcagtgtttcacgaagaggagcagcgccgcccgaagcaccggcccagcgaggctgacgaggaagaattggctcggcgtcgtgaagccagaaagcaagaacaggctaataatcctttctatatcaaatccagccctagtccacaaaagcggtatcaggatactccgggcgtggaacatattccagtcgttcagatcgacctgagtgtgccattaaaggtgcccggcctcccaatgagcgatcagtacgtaaagttagaagaagaacgacgtcacagacagaagttggaaaaagacaaacgtaggaaaaagcgaaaggagaaagagaagaagggcaaacggagacatagctcccttcccacagagtccgacgaggacatcgccccagctcagcaggttgatatcgttaccgaggagatgcccgagaacgctctgccctccgacgaggacgataaggatcctaatgacccataccgggccctcgatatcgatctggataaaccactcgccgacagtgaaaagcttcccatccaaaaacatcggaataccgagacgtcaaagtctcctgaaaaggacgtgcctatggttgagaaaaaaagcaaaaaaccaaaaaaaaaggaaaaaaagcacaaggagaaggaacgggacaaagagaagaagaaagaaaaagaaaagaaaaaatcccccaaaccaaaaaaaaaaaagcacagaaaggagaaggaagagcgaactaaaggaaagaagaagtccaaaaaacagccccccgggagcgaggaagcagccggtgagcctgttcaaaacggcgctcctgaggaagagcagttaccccctgaaagttcctatagcctgctcgccgagaacagttacgttaagatgacctgtgatattagggggagcctgcaggaggattctcaagtcactgtggccattgtgctcgagaatcgaagtagcagcatattaaaaggtatggagttatcagtgcttgactccctcaacgctaggatggctagaccgcaggggagctcagtgcatgatggcgtacccgtgccctttcaacttccccccggtgtgtccaatgaagctcaatacgtattcacaatacagagtatagtgatggctcaaaaactgaaagggaccttaagcttcatcgcgaagaatgacgagggggctacccacgaaaaactcgatttcagactgcatttttcttgtagcagttatctcatcactaccccgtgttactctgacgcctttgcgaaacttctcgagtccggagatctgtcaatgtctagtattaaagtcgatggaattcgaatgagctttcagaacctgttagcaaagatctgcttccatcatcacttttccgttgtggaacgagttgactcgtgcgcaagcatgtattcccgtagcatacagggacaccatgtgtgcctgttagtgaaaaaaggtgaaaatagcgtgtccgtggatggcaagtgcagtgactctactctcttgagtaacctattggaggaaatgaaggcgacgttggcaaaatgctag

SEQ ID NO: 142252 - DNA, 3462 bp, Artificial Sequence
  derived and/or modified sequence
atggctctcaagatggtgaaggggtctattgaccgcatgtttgataagaacctccaggatctggtgcgtggcatccgcaatcataaagaagatgaggccaaatatatctcacagtgtatagacgagattaaacaggagctgaagcaggataatattgcagtgaaggccaacgcagtgtgcaagctgacttatctacaaatgttaggatatgacattagctgggccgctttcaatatcattgaagtgatgtctgcatccaagtttacctttaaacgaattggatacctggctgctagccagagcttccacgagggcacagacgttataatgctgacgacgaatcagataagaaaagatctctcctccccatcccagtacgacaccggcgtcgctttaacaggactgtcatgcttcgtcacgcctgatctggcccgtgacctcgccaacgacataatgaccctgatgagccacactaaaccgtacataaggaagaaggctgttctcattatgtacaaagtgtttctgaaatatcccgaaagcctgagacctgcttttcctaggctgaaagagaagctcgaggaccccgatcctggcgtacagagcgcagccgtgaacgttatctgcgaactggcaagacggaacccaaaaaattacctgtccctcgcccctcttttttttaaactgatgaccagctccaccaacaattgggttctgattaagataattaaattgtttggggcactgaccccgctcgagccgcgattggggaaaaagctgatcgaaccacttaccaatcttattcattctacgagtgccatgtcattgctttacgagtgtgtaaatactgttatagccgttttgattagcctgagttctggcatgcctaaccatagtgcatccattcaactatgcgttcaaaaattgagaatactgatcgaggactctgatcagaacctgaaatacctgggcctgctagccatgagcaagatactgaagactcaccccaaatctgttcagtctcacaaagatttgatccttcagtgtttggacgataaggatgagagcatccggctcagggccctagatctgctttacggtatggttagtaaaaaaaatcttatggagatagtcaaaaaacttatgactcatgtggacaaggccgaaggaacaacctaccgagatgaattactaacaaaaattatcgacatctgttcacagtcgaattaccagtatattactaacttcgagtggtacatttccatactggtggaattaactcggctcgaagggaccaggcatggacacctgatagcggcacagatgttggacgtggccatccgggtgaaagcgatacgcaaatttgccgtcagccaaatgtcggcgctgctagattccgctcatctgctcgcctcctccacccagagaaatggcatttgtgaggtcctttacgccgcagcctggatctgcggggagtttagcgagcacttgcaggagccacaccatacattggaagccatgcttagacccagggtgactacgcttcccggtcacattcaggccgtatacgtgcagaatgtggttaaactttatgctagtatcttgcagcagaaggagcaggctggtgaggccgagggagcacaggctgttacacaattaatggtggatagactgccccagttcgtccaatctgctgatttagaagtacaggaaagagcctcctgcattttgcaactggtcaagcatatccagaaactgcaggctaaggacgtgccagtggcggaggaggtcagtgctctgttcgcgggagaactgaatcctgtagcaccgaaggctcaaaagaaggtccctgtgccggaaggtctagacttagatgcatggattaacgaacctctcagcgactcagagtcagaagacgagaggcctagagccgtattccatgaggaagagcagcgaaggccgaaacatcgcccaagtgaggccgatgaggaggaactcgctaggaggagagaagcacggaagcaggagcaggctaataaccccttttatattaagagctccccctctccccaaaagcggtaccaggatacacccggtgtcgaacacatacccgtcgtgcagatcgacctttccgtgccgctgaaagtgcctggactgcctatgtcagaccagtatgtgaaactggaggaagagagaaggcaccgtcagaaacttgagaaggataagcgaagaaagaaacgcaaggagaaggagaagaaggggaagcggaggcactccagtttacccacagagagcgatgaggatatcgcgccagcccaacaggtagatatagtgacagaggagatgcctgagaacgctctcccttctgatgaagacgacaaggatccaaatgacccctatcgcgctttggacattgacctcgacaagccgctggctgactctgaaaaactacccatacaaaagcaccgaaacactgaaaccagcaagtcacctgaaaaggatgtgccaatggtggagaaaaagtctaaaaagcccaagaagaaggaaaagaagcacaaggagaaagagcgtgataaagaaaaaaaaaaggagaaggaaaaaaagaaaagtcctaaacctaaaaaaaagaaacaccggaaggagaaggaggagcgaaccaaggggaagaagaaatctaaaaagcagccacccggatcagaggaggccgcaggcgaacctgtgcagaatggcgctcctgaagaggaacagctgccaccagaaagttcctatagcttattggctgagaactcctacgttaagatgacctgtgatatcagggggagtctccaggaggattcacaggtgaccgtcgccatagtcctggagaatcgcagtagctctattttaaaggggatggaattaagcgtgctggattctcttaatgcacgcatggctcgccctcagggttctagtgtgcacgatggagtgccagtgcctttccaactgccacctggggtaagcaatgaggcccagtacgtattcacaattcaatccatagtgatggctcagaagctgaaaggcactctctccttcattgccaagaacgacgagggagctacccacgaaaaactcgactttcgcctgcacttcagctgctctagttatctgattaccaccccctgttacagtgacgctttcgccaagctacttgaatcaggggatctgtcaatgtcctccattaaggtggacggaatcaggatgtccttccagaatcttctggccaagatctgtttccatcatcatttttccgtagtagaaagagtggattcctgcgcttcaatgtatagccgatctattcaagggcaccacgtttgtttgttagtcaaaaagggggagaattccgtctctgtagacgggaagtgctctgactccaccctgctgtccaacctgctggaggaaatgaaggctactctcgctaagtgttag

SEQ ID NO: 142253 - DNA, 2955 bp, Artificial Sequence
  derived and/or modified sequence
atggccctgaagatggttaagggtagtatcgataggatgtttgataagaacctgcaagatctggtaagaggtatacgcaaccataaagaggacgaagcgaaatatatatcccagtgcattgacgagataaagcaggagctgaagcaagataacatcgccgtgaaggctaatgccgtgtgtaagctcacatacctgcagatgctgggatacgacatcagctgggccgcttttaatatcatcgaggtgatgtcggcttcaaaattcacctttaagcggatcggatatttggctgcctctcaaagtttccatgagggaacagacgtgatcatgctgacgactaaccagatcctcttgattagcctgtcgagtgggatgcctaaccattcagcaagcatacaattgtgcgtgcaaaaactgaggatcctgatagaggactcagaccagaatcttaagtacctgggcttgctagccatgtctaaaatcctgaaaactcacccaaaatctgtgcagagtcataaagacttaattctgcagtgtctcgatgataaagacgagtcgataagattgcgcgcactggatctgctgtacggtatggtttccaaaaagaacctgatggagatcgtcaagaagctcatgacacacgtggacaaggccgagggaaccacttaccgggacgagcttttgacaaagattatagacatttgctcgcagtctaactaccagtatatcaccaatttcgaatggtacattagcattctcgttgagctaacgcgcttagaggggacccggcacggtcatttaattgcagcgcagatgctcgacgtagcaatacgggttaaggccattcgcaagttcgcagtgtcccagatgtcagccttacttgactccgcgcacttactcgcctcgtcaactcaacggaacggcatctgtgaggttctgtacgctgcagcctggatttgcggggaatttagcgaacatctccaagaaccccaccatacactggaggcaatgttaagacccagggtcacaacactgcccggacacatccaggccgtgtatgtgcagaatgtggtgaagttatatgctagtatcctgcaacagaaagagcaggccggagaggcggagggggctcaagcggttactcagctcatggtcgaccgcctgccccaatttgtgcagtcagcagatctggaagtacaggagcgggcttcctgcattctccagctggtgaaacacatccaaaagctgcaggcaaaggatgtgcctgtggctgaggaagtgagtgctcttttcgctggggaactgaaccccgtggcccctaaagcacaaaagaaagtccccgtcccggagggtctagacctggacgcctggataaatgagcccctgagcgactccgaatctgaagatgaacggccaagagcggtatttcacgaagaagagcagcgccgtccgaagcacaggccttccgaggccgatgaggaagagttggcccgaagacgggaggcccgaaaacaagagcaggctaataaccctttctatattaaatcatcaccttccccacagaaacggtaccaagacacccccggagtggagcacattcccgtcgtgcagatcgatctcagcgtgcccctcaaggtgccagggctgcctatgtctgatcagtatgtcaagttggaggaggagagacggcacagacaaaagctcgaaaaagacaagcgaaggaaaaagagaaaggagaaggaaaagaagggaaaaaggcggcattcaagcctgcctaccgaatcagatgaggacatcgctccggcacagcaggtggatattgtgaccgaagaaatgccagaaaatgccttgccttctgatgaggacgacaaggatcccaatgatccttatagggcactggatatcgatctggacaagccactagcagattccgaaaaattgcctattcagaagcaccggaataccgagacatcaaaatcccccgagaaggacgtgcccatggttgagaaaaagtctaagaagccgaagaagaaagaaaaaaagcacaaagaaaaagaacgcgacaaagagaagaagaaagaaaaagaaaagaagaagtcacccaaacccaaaaagaagaagcatcggaaagagaaagaggagagaaccaaaggtaagaaaaaatctaaaaagcagccaccaggcagtgaggaagccgctggggagccagtgcaaaacggggctccagaggaagaacaattgcccccagagagctcctattcattactggccgaaaatagctatgtgaaaatgacgtgcgatatcaggggttccttgcaagaggattctcaggtgacggtggctatcgtattagaaaatcgatctagctccattttaaagggtatggagttatcagtgctggattcgctcaatgcacgaatggcccgaccccagggttcatccgttcacgatggagtgccggtgcccttccaattaccgcctggcgttagtaatgaagctcaatacgtctttactatacagtctatcgtgatggctcagaaactgaaaggtacactttcttttattgcaaaaaacgacgaaggagcaacacacgaaaagttagacttcaggcttcatttttcttgttcctcctacctcattacaactccctgctatagcgatgcttttgccaagctcctggaaagcggtgatttgtctatgagttccatcaaggtggacggcattaggatgtcctttcagaatttactggccaaaatttgttttcatcaccatttcagtgtagtggagcgggtggattcctgcgcctccatgtattcacgatcaatacagggacaccatgtctgcctcttagttaagaagggcgaaaattctgtttcagtcgatggaaagtgcagcgatagcaccctgttgtcaaatctgcttgaagaaatgaaagctactttggcaaagtgttag

SEQ ID NO: 142254 - protein, 569 aa, Artificial Sequence
  derived and/or modified sequence
MDPAEAVLQEKALKFMNSSEREDCNNGEPPRKIIPEKNSLRQTYNSCARLCLNQETVCLASTAMKTENCVAKTKLANGTSSMIVPKQRKLSASYEKEKELCVKYFEQWSESDQVEFVEHLISQMCHYQHGHINSYLKPMLQRDFITALPARGLDHIAENILSYLDAKSLCAAELVCKEWYRVTSDGMLWKKLIERMVRTDSLWRGLAERRGWGQYLFKNKPPDGNAPPNSFYRALYPKIIQDIETIESNWRCGRHSLQRIHCRSETSKGVYCLQYDDQKIVSGLRDNTIKIWDKNTLECKRILTGHTGSVLCLQYDERVIITGSSDSTVRVWDVNTGEMLNTLIHHCEAVLHLRFNNGMMVTCSKDRSIAVWDMASPTDITLRRVLVGHRAAVNVVDFDDKYIVSASGDRTIKVWNTSTCEFVRTLNGHKRGIACLQYRDRLVVSGSSDNTIRLWDIECGACLRVLEGHEELVRCIRFDNKRIVSGAYDGKIKVWDLVAALDPRAPAGTLCLRTLVEHSGRVFRLQFDEFQIVSSSHDDTILIWDFLNDPAAQAEPPRSPSRTYTYISR

SEQ ID NO: 142255 - protein, 41 aa, Artificial Sequence
  derived and/or modified sequence
MDPAEAVLQEKALKFMTYNSCARLCLNQETVCLASTAMKTE

SEQ ID NO: 142256 - DNA, 1710 bp, Artificial Sequence
  derived and/or modified sequence
atggacccagcggaggccgtgctgcaggaaaaggcccttaagttcatgaattcttcggaacgcgaggactgcaacaatggcgaacctccacgaaagattatcccagagaagaattcattaaggcagacttataacagttgcgctaggctttgtctgaatcaggagacagtctgtttggctagcaccgcaatgaaaaccgaaaactgtgttgccaagactaagctagcaaatggaaccagctcgatgattgttcctaagcagaggaagctgagtgccagctatgagaaggagaaggaattatgtgtgaagtactttgagcagtggtcggagagcgaccaggtcgaatttgtcgaacatctgatctctcagatgtgtcactatcagcatggtcacattaatagctatctgaaacctatgctgcagagagatttcattacagcgctaccggctagggggctcgatcacatcgccgaaaacatcctgagttatctggacgccaaatctttgtgtgcagccgagctggtttgtaaggagtggtatagagtcacgagcgacggaatgctgtggaaaaaacttatcgagcgcatggtgcgaactgacagcctgtggagggggttggcagagagacgcggatgggggcagtatttgttcaaaaacaagcctcctgacggcaatgccccccccaatagcttctaccgcgcactatatcctaaaattatccaggacatcgaaacaattgagtcgaactggcgttgcggcagacattccctccagagaatacattgcagatcggagacatctaaaggggtgtactgtctccagtacgacgatcagaagatcgtgtctggcctgagggacaataccataaagatctgggacaagaatacacttgagtgcaagcgcattctgacaggccataccggctccgtgctatgcctccagtatgacgagcgtgtgattatcactggctctagtgatagcacagtgagagtatgggacgtgaatactggtgagatgctgaatacgttgatccaccactgcgaggccgtcctgcacctgcgtttcaataacggaatgatggtgacctgctccaaggaccgaagtatcgcggtgtgggacatggcgtcgcctaccgatattaccttacgacgagtcctcgttggccacagggccgccgtaaatgtggtcgactttgacgataaatacatcgtcagcgcatccggagacaggactataaaggtgtggaacacctccacatgcgagtttgtccgcacactgaatggccacaagagggggattgcctgcctgcagtaccgcgaccgccttgtggtctccggaagctctgataatacaattcgcttgtgggacatcgaatgtggggcatgtctcagagtgctagaggggcacgaggagttggtgcgctgcatccgctttgataacaagcgaattgtctccggagcctacgacggaaaaattaaggtgtgggacctcgttgcagccctggaccccagagcccctgcaggaacgctttgtttgcgaactctggtggaacactcagggcgcgtctttcgcctccagtttgacgagtttcagatagtcagctccagtcacgatgacaccatcctcatatgggattttctgaacgatccggctgctcaagctgagccaccaaggtcaccctctcgaacttacacatatatctctagatag

SEQ ID NO: 142257 - DNA, 126 bp, Artificial Sequence
  derived and/or modified sequence
atggatccagccgaggccgtgttgcaagaaaaagccctcaaattcatgacgtacaatagctgcgctcgtctgtgtctgaaccaggagactgtgtgcttagccagcacagcaatgaaaacggagtag

SEQ ID NO: 142258 - DNA, 1710 bp, Artificial Sequence
  derived and/or modified sequence
atggaccctgctgaggccgtgctgcaggagaaggccctgaagttcatgaacagcagcgagcgggaggactgcaacaacggggagccccccaggaagatcatccctgagaagaacagcctgcggcagacctacaacagctgtgcccggctgtgcctgaaccaggagaccgtgtgcctggccagcacagccatgaagacagagaactgtgtggccaagaccaagctggccaacggcaccagctccatgattgtgcccaagcagaggaagctgagcgccagctatgagaaggagaaggagctgtgtgtgaagtactttgagcagtggagcgagagtgaccaggtggagtttgtggagcacctgatcagccagatgtgccactaccagcacggccacatcaacagctacctgaagcccatgctgcagagggacttcatcacagccctgcctgcccggggcctggaccacatcgccgagaacatcctgagctacctggatgccaagagcctgtgtgccgctgagctggtgtgcaaggagtggtacagagtgaccagtgatggcatgctgtggaagaagctgattgaaagaatggtgaggacagacagcctgtggaggggcctggccgagcggcggggctggggccagtacctgttcaagaacaagcccccagatggaaatgccccacccaacagcttctaccgggccctgtaccccaagatcatccaggacatcgagaccatcgagagcaactggaggtgtggccgccacagcctgcagaggatccactgccgctctgagaccagcaagggcgtgtactgcctgcagtatgatgaccagaagatcgtgtctggcctgcgggacaacaccatcaagatctgggacaagaacaccctggagtgcaagaggatcctgaccggccacactggatctgtgctgtgcctgcagtatgatgagagggtcatcatcaccggcagcagtgacagcacagtgcgggtgtgggatgtgaacacaggagagatgctgaacaccctcatccaccactgtgaggccgtgctgcacctgcgcttcaacaacggcatgatggtgacctgcagcaaggacaggagcattgctgtgtgggacatggccagccccacagacatcaccctgcggcgggtgctggtgggccacagagctgctgtgaatgtggtggactttgatgacaagtacatcgtgtctgccagcggggacaggaccatcaaggtgtggaacaccagcacctgtgaatttgtgaggaccctgaatggccacaagaggggcatcgcctgcctgcagtacagagaccggctggtggtgtctggcagcagtgacaacaccatccggctgtgggacattgaatgtggggcctgcctgcgggtgctggagggccacgaggagctggtgcgctgcatccgctttgacaacaagagaattgtgtctggggcctatgatggcaagatcaaggtgtgggacctggtggccgccctggacccccgggccccagctggcaccctgtgcctgcggaccctggtggagcacagcggccgggtcttccggctgcagtttgatgagttccagatcgtgagcagcagccatgatgacaccatcctgatctgggacttcctgaatgaccctgctgcccaggccgagccccccaggagccccagcaggacctacacctacatcagcaggtag

SEQ ID NO: 142259 - DNA, 126 bp, Artificial Sequence
  derived and/or modified sequence
atggaccctgctgaggccgtgctgcaggagaaggccctgaagttcatgacctacaacagctgtgcccggctgtgcctgaaccaggagaccgtgtgcctggccagcacagccatgaagacagaatag

SEQ ID NO: 142260 - DNA, 1710 bp, Artificial Sequence
  derived and/or modified sequence
atggaccccgccgaggccgtgctgcaggagaaggccctgaagttcatgaactcctccgagcgagaggattgcaacaacggcgagcctccgagaaagattatccccgagaaaaactcactgagacagacatataattcatgcgcccgcctctgcctgaatcaggaaacagtgtgtctcgcctctaccgccatgaaaacagaaaactgtgtagccaagacgaagctggcaaacggcaccagctcaatgattgtaccaaagcaacggaagctatcggcatcttacgaaaaagagaaagagctctgcgtaaagtacttcgaacaatggtcagaatccgaccaggtggagttcgtggaacacctgattagccagatgtgtcattaccaacatggccacatcaactcctatctgaagcccatgctgcagcgcgatttcatcactgcactgcctgcaagaggccttgaccatatcgctgagaatattctatcctacctggacgctaagagcttgtgcgcagccgaactggtgtgtaaggagtggtatagggtgaccagcgatgggatgctgtggaagaagctgattgaacgtatggtccgcacagattcgttgtggagaggcctggccgaaagaagaggctggggacagtacctgttcaagaacaagccccccgacggcaatgcccccccgaacagtttttaccgtgcgttgtatcccaagataattcaagacattgaaacaattgagtctaactggagatgtggcagacactccctccagcgcatccattgccgatcagagacctcaaagggcgtgtactgcctgcagtacgacgaccagaagatcgtgtccggactccgcgacaacacaataaagatatgggacaagaacactctagaatgtaagcgcattctaacaggccacactggaagtgtgctctgtctgcaatatgacgagagagttattataacaggctctagtgacagtacagtcagagtgtgggacgttaataccggtgagatgcttaacaccctgatacaccactgcgaagctgtcctgcatctcagattcaacaacggcatgatggtgacatgttccaaagacaggtctatcgccgtgtgggatatggcgagcccgactgacattaccctgcgaagggttctggtgggacacagagcagccgtgaatgtagtggactttgatgataaatacatcgtcagtgcctctggggatcgaactattaaggtgtggaacactagcacttgcgagttcgtgcggaccctgaatggtcacaagagggggattgcatgtctgcagtatcgggatagattagtggtttccggaagctccgacaatactatcaggctgtgggacatcgagtgtggcgcatgtcttagggttctggagggccatgaggaactcgtaaggtgtatacgctttgacaacaagaggatcgtctccggagcatacgatgggaagattaaagtgtgggatttagtggccgccctagacccccgagcacccgctggaactttatgcctgcgcacactcgtagagcactcaggacgcgtttttcgcctccagttcgatgagttccagattgtaagctctagtcacgatgacacaattctcatctgggacttcctcaacgaccccgccgctcaggccgaacctccacgaagtccctctagaacatacacatacatctcgcggtag

SEQ ID NO: 142261 - DNA, 126 bp, Artificial Sequence
  derived and/or modified sequence
atggaccccgccgaggccgtgctgcaggagaaggccctgaagttcatgacttacaactcatgcgcccgactgtgcctgaaccaggagaccgtgtgtttagcttccaccgccatgaaaaccgaatag

SEQ ID NO: 142262 - DNA, 1710 bp, Artificial Sequence
  derived and/or modified sequence
atggaccccgctgaggcagtcctccaggaaaaagccctcaaatttatgaactcttcagagcgggaggattgtaataacggagagcctccgaggaaaattatccctgagaagaactccctcagacagacttacaattcttgcgccagactgtgccttaaccaggaaactgtgtgcctcgcgagtacagccatgaaaacagagaactgcgtggccaagaccaaactagccaatggaacgagctctatgattgttccaaagcaacggaaactttcagcctcctatgagaaggagaaggagctgtgcgtcaagtacttcgaacaatggtccgaatcagatcaggttgagtttgttgagcatttgatcagccagatgtgccactatcagcacggccatatcaacagctacctaaaacccatgttacaaagagacttcatcaccgcactcccggcaagggggctcgaccatattgcagaaaacatactctcttacctagacgccaaatctctctgtgcagccgaactcgtgtgcaaggaatggtacagggtgacatcagacggaatgctgtggaagaagctcattgagaggatggtccggacagattccctgtggagaggcctcgccgagagacggggatgggggcagtatctgttcaagaacaagcccccagacgggaatgcgcctcccaatagcttttacagagcactctaccccaagatcattcaggacatcgagaccatcgagtccaactggcgatgtggaaggcattcccttcagaggatccactgcagaagcgaaacttccaagggtgtgtattgtctccaatacgacgaccagaagattgtgagcggcctgcgggacaatactattaaaatttgggataagaatacactagagtgcaagaggatattgacaggtcacacagggtccgtgctgtgcctccagtatgacgagcgagtgatcattacaggcagctccgattcaacagtcagagtgtgggacgttaacaccggcgagatgttaaacaccctcatccatcactgtgaggctgtcctccacctgcgctttaataacggaatgatggtcacatgtagcaaggacagatccatagcagtgtgggacatggccagcccgactgatattacgctccggagagtgctggtgggacatcgggcagctgttaatgttgtggatttcgatgacaagtatattgtgtccgcaagtggtgacaggactattaaagtgtggaacacgtccacatgtgaattcgtcaggaccctgaatggccacaaaagaggcattgcgtgcttgcagtaccgggatcggctggtagtgtctggttcttctgacaatactatccgactatgggacatcgagtgcggggcttgcctgcgcgtgttggaaggacatgaggagctggttaggtgtatcaggttcgataataaaagaatcgtttcaggagcttatgatggcaaaattaaagtatgggacctggtggccgctctggatcccagagcacccgcaggcacactgtgtctgagaacactggtggagcactctgggagagtttttaggctgcaattcgacgagtttcagattgtgtcttctagccatgacgatacaatcctgatttgggactttctgaatgatccggcagctcaggcggaacctcctcgttcgccgtcacggacctacacctacatatccagatag

SEQ ID NO: 142263 - DNA, 126 bp, Artificial Sequence
  derived and/or modified sequence
atggatcccgctgaagccgttctgcaggaaaaggccttgaagtttatgacctataatagttgtgcccgactttgcctgaaccaagagactgtttgtcttgcttcaaccgcaatgaagacagagtag

SEQ ID NO: 142264 - DNA, 5982 bp, Artificial Sequence
  derived and/or modified sequence
ggcgctgcgttggctgcggcctggcaccaaaggggcggccccggcggagagcggacccagtggcctcggcgattatggacccggccgaggcggtgctgcaagagaaggcactcaagtttatgaattcctcagagagagaagactgtaataatggcgaaccccctaggaagataataccagagaagaattcacttagacagacatacaacagctgtgccagactctgcttaaaccaagaaacagtatgtttagcaagcactgctatgaagactgagaattgtgtggccaaaacaaaacttgccaatggcacttccagtatgattgtgcccaagcaacggaaactctcagcaagctatgaaaaggaaaaggaactgtgtgtcaaatactttgagcagtggtcagagtcagatcaagtggaatttgtggaacatcttatatcccaaatgtgtcattaccaacatgggcacataaactcgtatcttaaacctatgttgcagagagatttcataactgctctgccagctcggggattggatcatattgctgagaacattctgtcatacctggatgccaaatcactatgtgctgctgaacttgtgtgcaaggaatggtaccgagtgacctctgatggcatgctgtggaagaagcttatcgagagaatggtcaggacagattctctgtggagaggcctggcagaacgaagaggatggggacagtatttattcaaaaacaaacctcctgacgggaatgctcctcccaactctttttatagagcactttatcctaaaattatacaagacattgagacaatagaatctaattggagatgtggaagacatagtttacagagaattcactgccgaagtgaaacaagcaaaggagtttactgtttacagtatgatgatcagaaaatagtaagcggccttcgagacaacacaatcaagatctgggataaaaacacattggaatgcaagcgaattctcacaggccatacaggttcagtcctctgtctccagtatgatgagagagtgatcataacaggatcatcggattccacggtcagagtgtgggatgtaaatacaggtgaaatgctaaacacgttgattcaccattgtgaagcagttctgcacttgcgtttcaataatggcatgatggtgacctgctccaaagatcgttccattgctgtatgggatatggcctccccaactgacattaccctccggagggtgctggtcggacaccgagctgctgtcaatgttgtagactttgatgacaagtacattgtttctgcatctggggatagaactataaaggtatggaacacaagtacttgtgaatttgtaaggaccttaaatggacacaaacgaggcattgcctgtttgcagtacagggacaggctggtagtgagtggctcatctgacaacactatcagattatgggacatagaatgtggtgcatgtttacgagtgttagaaggccatgaggaattggtgcgttgtattcgatttgataacaagaggatagtcagtggggcctatgatggaaaaattaaagtgtgggatcttgtggctgctttggacccccgtgctcctgcagggacactctgtctacggacccttgtggagcattccggaagagtttttcgactacagtttgatgaattccagattgtcagtagttcacatgatgacacaatcctcatctgggacttcctaaatgatccagctgcccaagctgaacccccccgttccccttctcgaacatacacctacatctccagataaataaccatacactgacctcatacttgcccaggacccattaaagttgcggtatttaacgtatctgccaataccaggatgagcaacaacagtaacaatcaaactactgcccagtttccctggactagccgaggagcagggctttgagactcctgttgggacacagttggtctgcagtcggcccaggacggtctactcagcacaactgactgcttcagtgctgctatcagaagatgtcttctatcttttgtgaatgattggaacttttaaacctcccctcctctcctcctttcacctctgcacctagttttttcccattggttccagacaaaggtgacttataaatatatttagtgttttgccagaatctctcttgctttgccattaagcagaagaactagtttccctgtatagcctgctgggagagacccacttctagggtatgggggatgcagcttcaagcccagtgcccagtgtctccctgttaactgcaggaatgccaagcacctggccagagcagcccagccccaatatgcttaggaggagacagagttccctctgtatagcctctgggacaagaaaaagaaaacacaagaatgtatacactggaagatttgggcctcctgcctgccttctctttgtttctgttcctcttcccatctactcccctacgccccttcaaccttttttctctgtctgcttcacctgagaagaaagtgtacgaagagagtgtcctcctctcacatgagccagatcagccagaaaatgcaacacttggaagagttaaatgctgttcagtgaagatttcagccccaggcctttgctgcaagtgaccctgtggcaacagtggattctcagacatgatactctcatcatatttgcaactcttctctctctttcttccccacacccaagaggaggattggtggtagggggcaggcagagggggtggggagaagtttcctgggctccatcaatggctgcatcttttctggactcagcagtctccttgattccatgtagagtgtggaaaggagttgctgattgcatttcctctcattaacaattgggtgtgtaataaaaagcattgtacttcatcttaaatcactggtaaggctcagcctacagaaagatttgaaatggccagagccaatcgcttggtgcattctgcgtaatggtttccatctccgatttcctcatcagggcctgtgaatacccaggtgcctgtatctttgccaagaccgtgatcaaggtagcttaagagagatggtcaggagaaaacactgtttttgttttttttgttgttttgttttgttttggccagttaaatatcatctctcaaatattgatctcaccgtgtcaaccttgcactgcacaaccttccttctgcttctcccacacccagtatttgcagaagggcaaagctgcttaagagagaggatcagggtgaagtttggcacacagggtttattaatggggcaaaaactgccttttcttcctcctcctgaccttattttgctcttcactctccccagccaataaagcgtctgtggcgattggtgaacagcataaacagctggacctcagcaagggtcaggcaaacccagtcactcggaaggcagctgtgtgagctgccaagctagtgggcttcaggtgcaagggtacctgtgccacaccaacctgggagcacacagaatactattaatgtgcacccagctggtctccccaggcaagaaggtatcctcttcccaaggtgtacccactgaatgttgttactacatattgagagtcattttatgcatatgcattctacctttcctgctttatgagtatttttaagcttttagttcaaggttatattcagaaaatatttcccagtataatgatacatcgtagcctaagaaatattttctcaatgtaattcccttcccagctacccaaatgctacagagaaatgttttctacttggccactatcagggttcgtcatctattgtgttgactattaatggctttttgattgggtaaggattttgctatagatgaaggtagagggctgtcagccctgaaaaacacacaggtcagacatttaaaaggcatgggtttcgagctgtctcaaaatattgcccaatagccataattttaccagcctttctgtcatatgctgctattacaaagtggaagctgttgaatgtttattggtgcccagggttttgctctccaatctaggttcagttgaaggaatattgtttctaagactgttttgagacatgtccagtacatcacaaaggagatcggggcgacccctgcagatgtggagccattagcccagttgaggatattctccaagttgtcctctctcctgctgatggaaatgggaatgaagttaagtggtctgaaaaacttgaatcgttcacatttctcagctctgggggtcatttaccagtttgttgtagaagaaataatcaggtaagttaaaagttcatttccagagaaggtaaaccccacttaccatctctgcatgatttcagtgggaattgattatcactaatccccaactgggctagaataaatgtaaagtttgacctttttaaaacgaaaagagagacaaagtctcagcacattccaaggagtggtagaaacagagctgaaggtgtccccattgtagattagtctcttctcactaaaatttactttccaacgtagggcctaaaggaaacctttcttaaagacaggctgaaaccccttcaaaggcagatgaggaggtacagacacgtgaccttttggtgcacactggagctacttggacaagaccagcatgccttgctgcacgtgtgtgtatttcactgctgagaacatcctttaacttggtgtgcaatttgaaaggatgtgaatcatggatggaaggccatttgtacatgtcccttggcaaaattctttctggtgtctcctaacttcagagacagggactctttttggatctctattgacaagtaataaaagtctggccctcataacttgtttccgaactagaaaagtctgtgagacccctacatcattctggtttttttgcttgagtaagaacaatccttttttatttttcttctgtacagtctaaagctacagagaaaaaaaaatgcactcttcccttgccggctcctggtaccattggtctgaacagctgtagttggtctactccttacttagcacttgattgtgtggggaaacaaaggtgggaggggtggggaatactggaaataatcagggcaatttttttctttcccataattggactagataccttggtactgttgaccttctcagcatctcccttttgccttagatggcaacaccctccagtctgtagcagagcagtccaacccagattagtgcagcccggaggcttagggtgcagcctccctggtcttcctccacacagttgttcaccaacagaccagacctcctttaaccacagtgtcaacatagtatcggaaagagagccatttcttaggggaataaaacagtttcgcttctttagctcatctgtggtgtcagaatccttggagctgaagagagaaatcaaaagagcatgatgatggctgcctggtttcaggtggaacttaatgcattgatctttagaagctccttctgttggaagttgagtacctgtgatctaaaatgtcctggaggcagatgacatctaaaatatgtgctttccaaccagcacagctggcgctcttagctcctgattggttgtgtgttttattaaggatcagtgcagttaagtcgtattttaaagtgttacctcccctcctaacccttccccttcttggacactgaaggaaaaggccaactagggtgttagccctctgggcaccaaggaaactaacagctttctcaaagcggtgaccactcaggccagcccagacaaatctgagggatggccagtgcactccaatgatgggacaggcctaacaacacatgtaagcttccccgagagctttcagctggttcacctctttgttctctagactcttaagtactgactgctttgacttttgtgattatgttatggtgatgtgtagtcagtgtaccaatatgttcacaacctaggatcatgataatggagtgtgttttgggttttttttaactgttcagaaaaaaagtaaattacaaatataagattaaagtgaattttctaa

SEQ ID NO: 142265 - DNA, 140 bp, Artificial Sequence
  derived and/or modified sequence
cagtggcctcggcgattatggacccggccgaggcggtgctgcaagagaaggcactcaagtttatgacatacaacagctgtgccagactctgcttaaaccaagaaacagtatgtttagcaagcactgctatgaagactgag

SEQ ID NO: 142266 - DNA, 1710 bp, Artificial Sequence
  derived and/or modified sequence
atggaccccgccgaggccgtgctgcaggagaaggccctgaagttcatgaacagcagcgagagagaggactgcaacaacggcgagccccccagaaagatcatccccgagaagaacagcctgagacagacctacaacagctgcgccagactgtgcctgaaccaggagaccgtgtgcctggccagcaccgccatgaagaccgagaactgcgtggccaagaccaagctggccaacggcaccagcagcatgatcgtgcccaagcagagaaagctgagcgccagctacgagaaggagaaggagctgtgcgtgaagtacttcgagcagtggagcgagagcgaccaggtggagttcgtggagcacctgatcagccagatgtgccactaccagcacggccacatcaacagctacctgaagcccatgctgcagagagacttcatcaccgccctgcccgccagaggcctggaccacatcgccgagaacatcctgagctacctggacgccaagagcctgtgcgccgccgagctggtgtgcaaggagtggtacagagtgaccagcgacggcatgctgtggaagaagctgatcgagagaatggtgagaaccgacagcctgtggagaggcctggccgagagaagaggctggggccagtacctgttcaagaacaagccccccgacggcaacgccccccccaacagcttctacagagccctgtaccccaagatcatccaggacatcgagaccatcgagagcaactggagatgcggcagacacagcctgcagagaatccactgcagaagcgagaccagcaagggcgtgtactgcctgcagtacgacgaccagaagatcgtgagcggcctgagagacaacaccatcaagatctgggacaagaacaccctggagtgcaagagaatcctgaccggccacaccggcagcgtgctgtgcctgcagtacgacgagagagtgatcatcaccggcagcagcgacagcaccgtgagagtgtgggacgtgaacaccggcgagatgctgaacaccctgatccaccactgcgaggccgtgctgcacctgagattcaacaacggcatgatggtgacctgcagcaaggacagaagcatcgccgtgtgggacatggccagccccaccgacatcaccctgagaagagtgctggtgggccacagagccgccgtgaacgtggtggacttcgacgacaagtacatcgtgagcgccagcggcgacagaaccatcaaggtgtggaacaccagcacctgcgagttcgtgagaaccctgaacggccacaagagaggcatcgcctgcctgcagtacagagacagactggtggtgagcggcagcagcgacaacaccatcagactgtgggacatcgagtgcggcgcctgcctgagagtgctggagggccacgaggagctggtgagatgcatcagattcgacaacaagagaatcgtgagcggcgcctacgacggcaagatcaaggtgtgggacctggtggccgccctggaccccagagcccccgccggcaccctgtgcctgagaaccctggtggagcacagcggcagagtgttcagactgcagttcgacgagttccagatcgtgagcagcagccacgacgacaccatcctgatctgggacttcctgaacgaccccgccgcccaggccgagccccccagaagccccagcagaacctacacctacatcagcagatag

SEQ ID NO: 142267 - DNA, 126 bp, Artificial Sequence
  derived and/or modified sequence
atggaccccgccgaggccgtgctgcaggagaaggccctgaagttcatgacctacaacagctgcgccagactgtgcctgaaccaggagaccgtgtgcctggccagcaccgccatgaagaccgagtag

SEQ ID NO: 142268 - protein, 863 aa, Artificial Sequence
  derived and/or modified sequence
MQRRGALFGMPGGSGGRKMAAGDIGELLVPHMPTIRVPRSGDRVYKNECAFSYDSPNSEGGLYVCMNTFLAFGREHVERHFRKTGQSVYMHLKRHVREKVRGASGGALPKRRNSKIFLDLDTDDDLNSDDYEYEDEAKLVIFPDHYEIALPNIEELPALVTIACDAVLSSKSPYRKQDPDTWENELPVSKYANNLTQLDNGVRIPPSGWKCARCDLRENLWLNLTDGSVLCGKWFFDSSGGNGHALEHYRDMGYPLAVKLGTITPDGADVYSFQEEEPVLDPHLAKHLAHFGIDMLHMHGTENGLQDNDIKLRVSEWEVIQESGTKLKPMYGPGYTGLKNLGNSCYLSSVMQAIFSIPEFQRAYVGNLPRIFDYSPLDPTQDFNTQMTKLGHGLLSGQYSKPPVKSELIEQVMKEEHKPQQNGISPRMFKAFVSKSHPEFSSNRQQDAQEFFLHLVNLVERNRIGSENPSDVFRFLVEERIQCCQTRKVRYTERVDYLMQLPVAMEAATNKDELIAYELTRREAEANRRPLPELVRAKIPFSACLQAFSEPENVDDFWSSALQAKSAGVKTSRFASFPEYLVVQIKKFTFGLDWVPKKFDVSIDMPDLLDINHLRARGLQPGEEELPDISPPIVIPDDSKDRLMNQLIDPSDIDESSVMQLAEMGFPLEACRKAVYFTGNMGAEVAFNWIIVHMEEPDFAEPLTMPGYGGAASAGASVFGASGLDNQPPEEIVAIITSMGFQRNQAIQALRATNNNLERALDWIFSHPEFEEDSDFVIEMENNANANIISEAKPEGPRVKDGSGTYELFAFISHMGTSTMSGHYICHIKKEGRWVIYNDHKVCASERPPKDLGYMYFYRRIPS

SEQ ID NO: 142269 - DNA, 2592 bp, Artificial Sequence
  derived and/or modified sequence
atgcagagaagaggcgccctgttcggcatgcccggcggcagcggcggcagaaagatggccgccggcgacatcggcgagctgctggtgccccacatgcccaccatcagagtgcccagaagcggcgacagagtgtacaagaacgagtgcgccttcagctacgacagccccaacagcgagggcggcctgtacgtgtgcatgaacaccttcctggccttcggcagagagcacgtggagagacacttcagaaagaccggccagagcgtgtacatgcacctgaagagacacgtgagagagaaggtgagaggcgccagcggcggcgccctgcccaagagaagaaacagcaagatcttcctggacctggacaccgacgacgacctgaacagcgacgactacgagtacgaggacgaggccaagctggtgatcttccccgaccactacgagatcgccctgcccaacatcgaggagctgcccgccctggtgaccatcgcctgcgacgccgtgctgagcagcaagagcccctacagaaagcaggaccccgacacctgggagaacgagctgcccgtgagcaagtacgccaacaacctgacccagctggacaacggcgtgagaatcccccccagcggctggaagtgcgccagatgcgacctgagagagaacctgtggctgaacctgaccgacggcagcgtgctgtgcggcaagtggttcttcgacagcagcggcggcaacggccacgccctggagcactacagagacatgggctaccccctggccgtgaagctgggcaccatcacccccgacggcgccgacgtgtacagcttccaggaggaggagcccgtgctggacccccacctggccaagcacctggcccacttcggcatcgacatgctgcacatgcacggcaccgagaacggcctgcaggacaacgacatcaagctgagagtgagcgagtgggaggtgatccaggagagcggcaccaagctgaagcccatgtacggccccggctacaccggcctgaagaacctgggcaacagctgctacctgagcagcgtgatgcaggccatcttcagcatccccgagttccagagagcctacgtgggcaacctgcccagaatcttcgactacagccccctggaccccacccaggacttcaacacccagatgaccaagctgggccacggcctgctgagcggccagtacagcaagccccccgtgaagagcgagctgatcgagcaggtgatgaaggaggagcacaagccccagcagaacggcatcagccccagaatgttcaaggccttcgtgagcaagagccaccccgagttcagcagcaacagacagcaggacgcccaggagttcttcctgcacctggtgaacctggtggagagaaacagaatcggcagcgagaaccccagcgacgtgttcagattcctggtggaggagagaatccagtgctgccagaccagaaaggtgagatacaccgagagagtggactacctgatgcagctgcccgtggccatggaggccgccaccaacaaggacgagctgatcgcctacgagctgaccagaagagaggccgaggccaacagaagacccctgcccgagctggtgagagccaagatccccttcagcgcctgcctgcaggccttcagcgagcccgagaacgtggacgacttctggagcagcgccctgcaggccaagagcgccggcgtgaagaccagcagattcgccagcttccccgagtacctggtggtgcagatcaagaagttcaccttcggcctggactgggtgcccaagaagttcgacgtgagcatcgacatgcccgacctgctggacatcaaccacctgagagccagaggcctgcagcccggcgaggaggagctgcccgacatcagcccccccatcgtgatccccgacgacagcaaggacagactgatgaaccagctgatcgaccccagcgacatcgacgagagcagcgtgatgcagctggccgagatgggcttccccctggaggcctgcagaaaggccgtgtacttcaccggcaacatgggcgccgaggtggccttcaactggatcatcgtgcacatggaggagcccgacttcgccgagcccctgaccatgcccggctacggcggcgccgccagcgccggcgccagcgtgttcggcgccagcggcctggacaaccagccccccgaggagatcgtggccatcatcaccagcatgggcttccagagaaaccaggccatccaggccctgagagccaccaacaacaacctggagagagccctggactggatcttcagccaccccgagttcgaggaggacagcgacttcgtgatcgagatggagaacaacgccaacgccaacatcatcagcgaggccaagcccgagggccccagagtgaaggacggcagcggcacctacgagctgttcgccttcatcagccacatgggcaccagcaccatgagcggccactacatctgccacatcaagaaggagggcagatgggtgatctacaacgaccacaaggtgtgcgccagcgagagaccccccaaggacctgggctacatgtacttctacagaagaatccccagctag

SEQ ID NO: 142270 - DNA, 2592 bp, Artificial Sequence
  derived and/or modified sequence
atgcagaggcgtggagcactgttcggaatgcctgggggcagcgggggccgcaaaatggcggcgggggatatcggggaacttttagtgccacacatgccaaccattcgtgtacccagatccggtgatcgggtgtataagaatgagtgcgctttttcctatgattcgcccaactctgaaggaggcctgtacgtgtgcatgaacaccttcctggcctttggacgtgagcacgtcgaaaggcacttccggaagacgggccaaagtgtctatatgcacctcaagaggcacgtacgtgaaaaggtgcggggtgcaagcgggggcgccctgccaaagcggcgaaattcgaagatcttcctggatctggatactgacgatgatcttaactccgacgactacgagtatgaggatgaggccaaactggtcatattcccagatcactacgagatcgcacttcctaacatcgaggaactgcctgcacttgttacgatcgcttgtgatgccgtactgagctctaagagtccctacaggaagcaggatcctgatacatgggaaaacgagttgccagtctccaaatacgccaataacttaacccagctggataacggagtgagaatccctcctagcggctggaagtgcgcgcgctgtgacctgcgcgagaacctctggcttaatttaactgacgggtccgtgctttgcggcaagtggttcttcgactcttccgggggaaatggacacgcactcgaacactatcgagatatggggtatcctctggctgtgaagttgggaactattacgccagacggggcggacgtgtacagtttccaggaggaagagccagtattggacccccacttggctaagcatctcgcacactttggcatcgacatgcttcacatgcacggtaccgagaatgggctccaggacaacgacatcaagttacgcgtgagtgaatgggaagtaatccaggagagcggcaccaaactgaagccaatgtacggacccggctatactgggttgaaaaacctcgggaattcctgttacctctccagtgtcatgcaagcaatattttctatccccgaattccagagagcctacgtgggcaacctacctagaatctttgactactcccccctggacccaactcaagacttcaacactcagatgactaaacttggccatggcttgctcagtggacagtattcgaaacccccagtcaaaagcgagctgattgagcaggtgatgaaagaggagcacaaacctcagcaaaatggaatcagtcctcggatgttcaaggcttttgtgtcaaaatctcatcccgaatttagttccaacagacagcaggatgcccaggaattcttcttacatctggtgaaccttgtggagaggaataggatcggaagcgagaatccaagtgacgttttcaggttcttggtggaggaacggatacaatgctgtcagacccggaaagtgcgctacacagaacgggtagactatcttatgcagttgcctgttgctatggaagctgccacgaataaggacgagttgattgcttacgagctgacgcggcgggaggccgaggctaacagacgcccactgcctgagctggttagggctaagattccatttagtgcctgtctgcaggctttcagtgaacccgaaaacgtggatgacttttggtcttccgctctccaggccaaatccgcaggcgtgaagacgagtagatttgcctctttccctgaatacctcgtcgtgcagatcaaaaaattcacattcggcctggattgggtcccgaagaagttcgatgtgagtatcgacatgcctgaccttctggacatcaaccatttgcgcgccaggggattacagccaggagaggaagaactccccgatatttctccccccattgtaatacctgatgatagtaaagaccgacttatgaaccagctcattgaccccagcgacattgacgaatcaagcgttatgcagctggccgagatgggcttccccctggaagcatgtaggaaggcagtgtactttaccgggaacatgggtgcggaggtggcatttaactggattatcgtgcatatggaggagcccgatttcgcggagcccctcacgatgcctgggtatggcggcgcggccagcgccggcgcatctgtcttcggcgcgagtggcttggataatcaaccaccagaagaaattgtggccatcattactagcatgggctttcagcggaaccaagccattcaggctctccgggccactaataataatctggaaagggccctggactggatcttctctcaccctgagtttgaagaggacagcgacttcgtgattgaaatggaaaacaatgcaaatgcaaacatcatctccgaggcaaaacctgaaggacctcgcgtaaaagatggatcagggacctatgaactctttgcatttatttctcatatgggcactagcacaatgtcaggccattacatatgccatatcaagaaagagggaaggtgggttatttacaatgaccacaaggtttgtgccagcgaaagaccccccaaggatctgggctatatgtacttctatcgcagaattccctcctag

SEQ ID NO: 142271 - DNA, 2592 bp, Artificial Sequence
  derived and/or modified sequence
atgcagaggagaggagccctgtttggcatgcctgggggcagcggcggcaggaagatggctgctggggacatcggggagctgctggtgccccacatgcccaccatccgggtgcccaggtctggggacagagtgtacaagaatgaatgtgccttctcctatgacagccccaacagcgagggcggcctgtatgtgtgcatgaacaccttcctggccttcggccgggagcacgtggagcggcacttcaggaagacaggccagagcgtgtacatgcacctgaagagacatgtgcgggagaaggtgcggggggccagcggcggggccctgcccaagagaagaaacagcaagatcttcctggacctggacacagatgatgacctgaacagtgatgattatgaatatgaagatgaggccaagctggtgatcttcccagaccactatgagatcgccctgcccaacatcgaggagctgcctgccctggtgaccatcgcctgtgatgctgtgctgagcagcaagagcccctacaggaagcaggaccctgacacctgggagaatgagctgcctgtgtccaaatatgccaacaacctgacccagctggacaacggggtgcgcatccccccatctggctggaagtgtgcccgctgtgacctgcgggagaacctgtggctgaacctgacagatggctctgtgctgtgtgggaagtggttctttgacagcagcggcggcaatggccacgccctggagcactacagagacatgggctaccccctggccgtgaagctgggcaccatcaccccagatggagcagatgtgtacagcttccaggaggaggagcctgtgctggacccccacctggccaagcacctggcccactttggaattgacatgctgcacatgcatggaacagaaaatggcctgcaggacaatgacatcaagctgcgggtgtctgagtgggaggtgatccaggagagcggcaccaagctgaagcccatgtatggccctggctacacaggcctgaagaacctgggcaacagctgctacctgagctctgtgatgcaggccatcttcagcatccctgagttccagagggcctacgtgggcaacctgccccgcatctttgactacagccccctggaccccacccaggacttcaacacccagatgaccaagctgggccacggcctgctgagcggccagtacagcaagccccctgtgaagtctgagctgattgagcaggtgatgaaggaggagcacaagccccagcagaatggcatcagccccaggatgttcaaggcctttgtgtccaagagccaccctgagttcagcagcaaccggcagcaggatgcccaggagttcttcctgcacctggtgaacctggtggagaggaaccgcatcggcagcgagaaccccagtgatgtgttccgcttcctggtggaggagcgcatccagtgctgccagaccaggaaggtgcgctacacagagcgggtggactacctgatgcagctgcctgtggccatggaggccgccaccaacaaggatgagctgattgcctatgagctgacccggcgggaggccgaggccaacagaagacccctgcctgagctggtgcgggccaagatccccttcagcgcctgcctgcaggccttcagcgagccagaaaatgtggatgacttctggagcagcgccctgcaggccaagtctgctggggtgaagaccagcagatttgccagcttccctgagtacctggtggtgcagatcaagaagttcaccttcggcctggactgggtgcccaagaagtttgatgtgtccattgacatgccagacctgctggacatcaaccacctgcgggcccggggcctgcagcctggagaggaggagctgcctgacatcagcccccccatcgtcatcccagatgacagcaaggaccggctgatgaaccagctgattgaccccagcgacattgatgagagctctgtgatgcagctggccgagatgggcttccccctggaggcctgcaggaaggctgtgtacttcaccggcaacatgggcgctgaggtggccttcaactggatcatcgtgcacatggaggagccagactttgctgagcccctgaccatgcctggctacggcggggccgccagcgctggggcctctgtgtttggagccagcggcctggacaaccagcccccagaggagatcgtggccatcatcacctccatgggcttccagaggaaccaggccatccaggccctgcgggccaccaacaacaacctggagcgggccctggactggatcttcagccaccctgagtttgaggaggacagcgactttgtgattgagatggagaacaatgccaatgccaacatcatcagcgaggccaagccagagggcccccgggtgaaggatggcagcggcacctatgagctgtttgccttcatcagccacatgggcaccagcaccatgagcggccactacatctgccacatcaagaaggagggccgctgggtgatctacaatgaccacaaggtgtgtgccagcgagcggccccccaaggacctgggctacatgtacttctaccgccgcatccccagctag

SEQ ID NO: 142272 - DNA, 2592 bp, Artificial Sequence
  derived and/or modified sequence
atgcagcggcggggcgccctgttcggcatgcccggcggcagcggcggaagaaaaatggccgccggggacataggcgagttgcttgtcccacatatgccaactatccgcgtcccacgctcaggggaccgggtgtacaaaaacgaatgtgcattcagctatgactctcctaattcagaaggggggctgtacgtgtgtatgaacactttcctcgcctttggccgtgaacatgtcgagcgccatttcaggaaaacaggacagagtgtgtatatgcacctaaaacgccacgtgagggaaaaagttagaggtgcctcaggtggcgccctgcccaagaggcgcaattctaaaatcttcttggatctggacacggacgatgatctgaactcagacgactatgagtatgaggatgaagccaagcttgtgatcttcccagatcattacgaaatcgcactgccgaatatcgaggagctccccgccctcgtgaccatcgcctgtgacgcagtcttgtcgagcaagtctccttatagaaaacaagaccccgacacttgggaaaatgaattaccggtttccaagtacgccaataacctgactcagctagacaatggtgttaggataccccccagcggctggaagtgcgcccgctgcgacctgagggaaaacctttggttgaacctgaccgacggatctgtgctctgcgggaagtggttcttcgactctagcgggggaaatggacacgcactggaacactaccgagatatgggctaccctctcgccgtgaagctgggaaccatcacaccggacggagccgacgtctactccttccaggaagaagagcccgttttggatccacatctcgccaagcatctggcccacttcggcatcgatatgctgcacatgcacggaacagaaaacggactgcaggacaatgatatcaagttgagggtttccgagtgggaagtgatccaagagagtggtactaaactcaaacctatgtatgggccgggctataccgggcttaagaatctcggcaacagttgttacctgtcgtccgtgatgcaggctatattctctattccagagttccaaagggcctacgtggggaatctgccaagaatttttgattacagtccactcgatcctacccaggacttcaacacccagatgaccaagcttgggcatgggttgttgtctgggcagtattctaagccgccggttaagtctgagcttattgagcaggttatgaaagaggaacacaaacctcagcagaacggtatctctcccagaatgttcaaggcctttgtttcaaagtctcaccccgagttctcgagcaaccgtcagcaagatgctcaggaattttttttgcacctggtcaacctggtggagcgcaacagaattggctctgagaatcccagcgacgtatttaggtttcttgtcgaagaacgtatccagtgttgccagacaagaaaagttcggtacacggaaagggttgactatctaatgcagttacctgttgctatggaagccgcaacaaacaaagacgagctgatagcctacgaactgactaggcgggaggctgaagccaatagaagaccacttcccgagttggtgcgggccaagattccattcagcgcctgtctgcaggccttctctgagccagagaacgtagacgatttttggtcttctgctcttcaggccaagtcggccggggtcaagacatctcgcttcgcctcctttcccgaatacctcgtggtgcagatcaaaaagttcaccttcggactcgactgggtcccaaagaagtttgacgttagcattgatatgccagacttgctagacatcaatcacctgagggcccgtggacttcaaccaggggaagaggagctgccagatatcagtcccccgatcgtgatccccgacgattctaaagatcggcttatgaatcaattgatcgacccttctgacattgacgagagctcagttatgcagctggccgagatgggcttccctctcgaagcctgtagaaaagctgtgtacttcaccggcaatatgggggcggaggtggcatttaattggatcattgtgcatatggaggaacctgacttcgccgaacccttaaccatgcccgggtatggcggtgctgccagcgccggagcaagcgtcttcggtgcatctgggttggacaatcaacctcccgaagagatcgtagcaatcatcacctcaatgggattccaacgaaaccaagctatccaggctttgagagcgactaacaataacctggagcgagctctggactggattttctcacacccagagttcgaagaggattcagactttgtaattgagatggagaataatgcaaacgccaacatcatctcagaggccaagcccgaaggtcccagagtcaaggatggctctggaacttatgaattattcgcctttatatctcacatggggacctcaactatgtccgggcactacatttgccatatcaagaaagaggggaggtgggttatttacaacgatcacaaggtttgtgcctctgagcgtcccccgaaagatttaggatatatgtatttctaccgccgtatccccagctag

SEQ ID NO: 142273 - DNA, 2592 bp, Artificial Sequence
  derived and/or modified sequence
atgcaaaggagaggcgcacttttcgggatgcccggaggctccggcggtcgaaagatggcagctggagatattggcgaacttctggtgcctcacatgcccactatccgggtcccaagaagcggggatcgcgtctataagaacgagtgtgctttctcatatgactcccccaattccgaggggggactgtatgtgtgtatgaatactttcttagcttttggaagagagcacgtggagcgtcacttcagaaagactggacagtccgtgtacatgcatttgaagcgccatgtgcgggaaaaagtgcgtggcgcatcaggcggtgcactgcccaagagaaggaactcaaaaatctttctggacctcgatacagacgatgacctgaacagtgacgactacgaatatgaagatgaggccaagctcgtgatattcccagaccattacgagatagctctgccaaatatcgaagaactgccagctctcgtgaccattgcttgcgatgcagtgctcagttcaaaatctccatatcgaaaacaagacccagacacctgggaaaacgaacttccagtatcaaagtatgctaacaacctgacccagctggacaacggggttagaattcctcctagtgggtggaaatgcgcgaggtgtgacctgagagaaaatctttggttaaacctgaccgatggttccgtgctgtgtggcaagtggtttttcgattccagtggtggcaatggccatgctctggaacactacagggatatgggataccctcttgcagtgaagctgggtacgatcacacccgatggggctgacgtgtattctttccaagaggaagagcctgtactggatcctcacttggccaaacatctggctcatttcggcatagatatgctgcacatgcatggtactgaaaacggtttgcaagacaacgatataaagctcagagtgtccgagtgggaagtcatacaagagagcgggaccaagctcaagccgatgtacggccctggctacacaggccttaagaaccttgggaacagctgctacctgtcctcggtgatgcaagcaattttttccatacccgagtttcagcgagcttacgtcgggaatctgcctcgcatcttcgactacagtcccctggatcccacccaagatttcaacacccaaatgacaaagctgggacatggattactgtcaggccagtactccaaaccacccgtgaaatcagagctgattgaacaggtgatgaaggaagagcataagcctcagcagaacggcataagccctagaatgtttaaagctttcgtcagtaaaagccatcccgaattcagcagcaatcgacaacaagatgctcaggagttcttcctccacctggtcaacctggtggaacgtaatagaataggctctgaaaatcccagcgacgttttcagatttctggtggaggagagaatccagtgttgtcagaccaggaaagtgaggtacacagaacgcgttgattatttaatgcaactgcccgtagcaatggaagcagccacaaacaaggacgagctgatcgcctatgaactgacccgaagagaagcagaagccaataggcggcctttaccggagctcgtgcgcgcaaaaatcccttttagtgcttgcctgcaggccttttctgaaccagagaacgtggacgatttttggagcagcgctcttcaagcaaagagtgcgggagtgaagacatcccgcttcgctagcttccctgaatatcttgtggtgcaaattaagaagttcacatttggtctggattgggtgcccaagaagtttgatgtcagtatcgatatgcctgacctcctcgacatcaatcatctccgagctagggggctccaaccgggagaagaagagctgcctgatataagtccacccatcgtaatacctgacgattcaaaggatcgcttaatgaaccagcttatcgaccctagcgatatcgatgagtcaagcgttatgcagcttgccgagatgggattccccttggaagcctgccgtaaggctgtgtacttcaccggcaacatgggggctgaagtggctttcaattggatcattgtgcacatggaagaacctgatttcgctgagccattaactatgcccggttatggtggcgcagccagtgcaggggcttcagtgttcggagcaagcggactcgacaaccagccacccgaagaaattgtggccatcatcacttcaatgggattccagcgaaatcaggccattcaagctctaagagctacaaacaacaacttagaacgagccctggactggatcttctcccaccccgaattcgaagaggactccgattttgtgatcgagatggagaataacgcaaatgcaaacattatctcagaagctaagcctgaagggccacgggttaaggacggttcgggaacttatgaattgtttgcctttatcagtcatatgggtacatctaccatgagcggccattacatctgccacattaagaaagagggcagatgggtaatttataacgatcacaaggtctgcgcctcggagagacccccaaaagatctgggctatatgtatttctacaggcgtatccctagttag

SEQ ID NO: 142274 - DNA, 8323 bp, Artificial Sequence
  derived and/or modified sequence
ggcctcctcggagttgcccctctgcaagccaacaattcgggatagaaaacacctccgtggtgttttcccggggccctcccgcgccgcgttcggccgccagcccgctcgagctcccgcgccaacgcctcaggggttcgccctccgccccccgccgccgcgcccggcccacgcgcagggcccctctccagcgccccctccccggcacgctgcggctggcgctccccagccccgcctgacgctgcagctgggccggagactcgccattggattaaaaatagcgtcgccagtccgccccaagcccgcggtgcccgctcccgccccgcagcccgctctccccgcccgccccggctcggccggctgccgttgcccgcgcagcccgcccgtcagcccgctcgctggcgccgccgccgccggcagaccccgcgctccggctccggctcggctcgctcggctccggtgcgcgccgaggccatgcagcgccggggcgccctgttcggcatgccgggcggcagcggaggcaggaagatggctgcaggagacatcggcgagctgctagtgccccacatgcccacgatccgcgtgcccaggtccggcgacagggtctacaagaacgagtgcgccttctcctacgactctcccaattctgaaggtggactctatgtatgcatgaatacatttttggcctttggaagggaacatgttgaaagacattttcgaaaaactggacagagtgtatacatgcacctgaaaagacatgtgcgagagaaggtaagaggggcgtctggtggagcgttaccaaaaaggaggaattccaagatttttttagatctagatactgatgacgatttaaatagcgacgattatgaatatgaagatgaagccaaacttgttatattcccagatcactatgaaatagcactaccaaatattgaggagttaccagccctggtaacaattgcttgtgatgcagttctcagctcaaaatctccatacagaaagcaggacccagacacgtgggaaaatgaattgccagtatctaaatatgccaacaacctcacccagctggacaatggagtcaggattcctccaagtggttggaagtgtgccagatgcgacctgcgagaaaacctctggttgaatctgactgacggctctgtcctgtgtggaaagtggttctttgacagctctgggggcaacgggcatgcgctggagcattacagagacatgggctacccactagccgtgaaactgggaaccatcactcctgacggggcagatgtttattcttttcaagaagaagaacctgttttggatcctcatttggccaagcacttagcgcattttggaattgatatgcttcatatgcatgggacagagaatgggctccaggacaatgacatcaagctgagggtcagtgagtgggaagtgatccaggagtcgggcacgaaactgaagccaatgtatggtcctggctacacgggtctgaagaacctgggcaacagctgctatctcagctctgtcatgcaggccatcttcagcatcccagaattccagagagcgtatgtaggaaaccttcccagaatatttgactactcgcctttagatccaacacaagatttcaacacacagatgactaagttaggacatggccttctctcaggccagtattcaaagcctccggtgaaatctgaactcattgaacaggtgatgaaggaggagcacaagccacagcagaacgggatctctccgcgcatgtttaaggcctttgtaagcaagagccacccggaattctcctctaacaggcagcaagatgcccaggaattcttcttgcacctggtgaatctagtagagaggaaccgcatcggctcagaaaacccaagcgatgtttttcgttttttggtggaagaacgcattcagtgctgtcagacccggaaagtccgctacacggagagggtggattacctgatgcagttacctgtggccatggaggcggcaaccaacaaggatgaactgatcgcttatgaactaacgagaagggaagcagaagcaaacagaagaccccttcctgagttggtacgtgccaagataccatttagtgcctgccttcaggccttctctgaaccagaaaatgttgatgatttctggagcagtgccctacaagcaaagtctgcgggtgtgaaaacatctcgctttgcttcattccctgaatacttggtagtgcagataaagaagttcacttttggtcttgactgggttcccaaaaaatttgatgtttctattgatatgccagacctacttgatatcaaccatctccgagccagggggttacagccaggagaggaagaacttccagacatcagcccccccatagtcattcctgatgactcaaaagatcgcctgatgaaccaattgatagacccatcagacatcgatgagtcatcagtgatgcagctggccgagatgggtttcccgctggaagcatgtcgcaaggctgtgtacttcactggaaatatgggcgccgaggtggccttcaactggatcattgttcacatggaagagccagattttgctgagccgctgaccatgcctggttatggaggggcagcttctgctggagcctctgtttttggtgcttctggactggataaccaacctccagaggaaatcgtagctatcatcacctccatgggatttcagcgaaatcaggctattcaggcactacgagcaacgaataataacctggaaagagcactggattggatctttagccaccctgagtttgaagaagacagtgattttgtgattgagatggagaataatgccaatgcaaacattatttctgaggccaagcccgaaggacctagagtcaaggatggatctggaacatatgagctatttgcattcatcagtcacatgggaacatccacaatgagtggtcattacatttgccatatcaaaaaggaaggaagatgggtgatttacaatgaccacaaagtttgtgcctcagaaaggccccctaaagacctgggctacatgtacttttaccgcaggataccaagctaaacctcaaatataaaaattggcgaaaagaagccatacgcctttttaatttgccaaaaaaaaaaagaagaagaagaagttgaaacaactagacatgaaggaatatatggggtatttatcgtttatttaaagagcacgatcagttgacaccttctgaaatagaactgagaagaaatttctattagtgatgatacactattatattgtagatagtttttataaatgttcaaaaagatgatgatatttaaaaacaaaaaaagtattcatattgctggtggaggatctgccatcagcacatcaaaaatggggatgtgcccccagccctctattttgctttgggggtcagtgatagtggcctctggagaaaccaaataatgtggccagtggtgtggccttacccacaacaaatgaaaagcccacttgtgtttcatatagaaaatcagcagttgggtggggctttatttgtgacataatttttttcatgacatacaataatttctgatgtatccatgtagatattatgctctgtccataatagagcctctgcaatgaaagatatttttaatttgtcacattaaaattcataatacgattgtgtgaatgtgtgtgagactgactgagagtgtgagacttttactagaaaagtgagtccactagaaaatctgtgacaagttggtttttaaagtctgaacagttgatattaagcatatctgaaaaaagcaagtaaatattttaacaaaactatgactcaggaaccttcgagaagattagttccccacttagatttttaaggagtaaaaagggctgagttatgcctttaagtgctgtcaagaattcacttgggtttgggacatttgctggtgtaatgctagatgcccacagcagcataatattgtactttgtcaaaggtaggtaaattctctgtttctcagcagccctttccccaaaaggtatggtgtttatttttagtaaaaatagctaatctctttttaccatctcacatgataactctttggagtcatgtcaagtgccccaaatttgtctgtgattttcccatctctgagctctttatctgcctccgtttccttgtttttctggggccagagtctcatctctgcctttttttggtgtatcaccttctgacttgccttcattgcttgtctgatgtgaccaacagtgtgatcttggacacactaaggattttagatgcaaagaaactttatacaacattatgaaagactatcctttccattttggttatttcagcattttagttgcaacctgggattagattagagtttccaacgtgatgaaaagtggaatgatagcattctataatttccataattttcctactggtccgtaccaaattctagagtctctggagttgctatttcagagtatttggtcaaacgaaaaagaatttattgctgtctgtttaacatgtatttgtttggttgaaaggatctttttagaaactgtaggaaaataaacagaaccaaccaggtgaaacaaagcacagacattgggttaggatgtagtgagttgtgaacaatcaggattctgggtgtgatgggggtccctgtctcataggtgatcctttggtgccatgtgaccgagagacatggtgtctaaggcccatggcctggagacctgggtgctgctcctagctgactgtggaccttgggcaagtccttcatccgtcctgtgcctcactgtcctcatctgaacaatggtatgatgacacctgccctctctttcaatcatgctttgaggatacagtgagattggttacagtgaaccttcaatgagtagaatgtggtatgccatggtgggttgtagtagatggtgctccctgccttttctcctctgttttcctcaatttgggaacaaatgagattggcagaaggagggagctcacggtgcagtacttttctaccaaagtgtgcccactggtgtcacctcctaatgttaacttggatttcctaaagcagtcccactctgttatgagagtcactgactcccgtggacatccccacagtaagcagccttacaaaatccagtccccttagggcagagtgagtgtcatagaataatgactccaaacccacgtcaaaaatggcttgttttcagcgatgttataaaacaaaggcctgttttttggaattgggggtgactgggtggtttggattgaaatgtggacaaagatagcatgtgtattttgaataaaataaaaattttgtaataaaacttttaaaaatcagtgatgtaaaatcaatatttaagactataggctataaattgtttgatttcattaactagcccttttgatgcctagacatgttgtaaaaaaattgtgctatggctgccttttcttctgccccacaacacaaagggctatttctacaaggcaaagttttgtatatgtgctattctttacttcagattgagagttgggaaaaactggagtaaataatgggtttcttacttgcttaaaagcatatttatatgtgtatctcaatatatacaaggcaggttcccctataaaagtctggaatgtactgcttaattttacacttgtgtagacacgattatttgtgactgaaaagtggaataacgtgtggattttgtcaactcattatcagtctgttagcagtcctctatgtgaggcatggtggtctaattgtgaaattctccctgtatatgggtgtctgtgtgaaagacagcactttcttcctgtaaatatcttttgatatccatttatgtagaattccaatgaatatgtctttggaaaaggtaatgtatcaaagtttttattttgccaattgatctaaatgcccatataactaatcagaaatccagtttggttcagattgggattttcttttaaagaaaaaaaaagtatgcagaaaagactattggaagaatcatgtgttagtgacactttacatcaacgttgcttcaatattttggaattgaccaggctgctttctcctacctgcaagagaatgtgcctgacatttcccagtgcttactttgggctataggaagtccagcggggatagctcgagcctcttgctccctgagtcatttattccctttacctgaacagagccttacctgcaattcatagtgagagcacctgggtctgtatcctgactccactctaagtgaggtgggactgaatcactgtacctctctgggccttttcatttgaaacaagtgggttagactagattagctccaaagtcctctcttgccctaacattttatttttattttcctgtggttaccactagggtctgacacgtaaaatgtgagggatcacttagaggtttggatgttatatttttgcattgttacagcttatactccccagttgaggacctgtgtcattcttagtggccccacgacccctctgtttgtattcctgctccacttatctatacttttttgggtaatcatcccactttttttttttcttgagatggagtctcgctgtgttgccaaggctggagtacagtggtgcaatctcagctcactgcagcctcctcccgggttcaagtgattctcctgcctcagcttcccaagtagctgggattactggcgcacgccactacgcccagctaatttttgtatttttagtagagacagggttttgccatgttggccaggctggtcttgaactcttgacctcaacctgcctcagcctcccaaagtgctgggattacacgcatgagctaccgcgtccagccccactttttttctactcttgaaaaaaacaactttctagtccatgaggtactttggctccatccccctcaaaaacaaaacaaaaaatccatttaaagtgtcctcctagaaaagcctcagaactgccttcaactacatctgtcacctttatagaatattttgaaattctggaagaggatgggaaacaaaattctaatttagctagagctgtgatccccaaataagtgctgacaaaattgtctaccacagaaaggccgtccttgtcatcttgtaggcatcactgctgctaaatcacatcagtacatgccttctgtggggagatggcagggggcaggggcaggaccaggggatgggattagataaagtgtgataatgtcctttagataaaagaaatcctacgctatagaacaaggttctgtactcttgagttggtgtctgagatcacctgcacagtgttacagagattttccactccataaatcactctaaaagagtttgcataagactcggtagacctgtgctattcaatgtggcagtcaacagccatatgtggcgatgactactcaaagtttggcttgttcaaatcgagactgtgttgtacacatacaatacacaccagattttgaaggcttggtaccaaaaaggaatttaaaatatttcaccaatatttcatattgataacatgctgaaatgacactattttggatgtactaagtaaaatattaacaatttaatatatttatataattgaaattaaaattcttttcacccatttttatttttttaaaaatgtggcccctaaagaacttcaaattagacatgtggataacgttatacttctattggacagccccactctagacttacatggtgtggggtaggcagtgaaatccgtaaataggaaacgcaattctgcaaagtatctaaatagacagaaacaacacaaatatttttgctggagtcaggagcactgtgaggcacagaacatctcccagaaagcagattttttttttctgccgaaaaaccaatatatatatgtatgatcccaattaaaagacaaaagcaaatgagccccaaactgcctgtcttcagctttgcctgggagctgctacctttgctcttctagcatcttctaggtaccaaggatattagccacttgagggtgttgggcatatttgtttcattgtaggcaaaatcctcttgtggtttcccctccccaggtattgttgagtctgttcaaagctgggtgtgttgaaacactgcacaaatcctgccactcttgatgtgccgcttgtctcagccttggcagaggctgagtctgttcctgtgcccacctgtccagcaggttttgatgttggctcctgaaagagtttgtatttattttattttgcactagtcacagttgttgttaaactgtatcaaatgttttgggagattatttgcctgagatggaaagagagatggatgatttattgcttcaattgttttaaattaaaagctattctcacaa

SEQ ID NO: 142275 - protein, 505 aa, Artificial Sequence
  derived and/or modified sequence
MSSVQQQPPPPRRVTNVGSLLLTPQENESLFTFLGKKCVTMSSAVVQLYAADRNCMWSKKCSGVACLVKDNPQRSYFLRIFDIKDGKLLWEQELYNNFVYNSPRGYFHTFAGDTCQVALNFANEEEAKKFRKAVTDLLGRRQRKSEKRRDPPNGPNLPMATVDIKNPEITTNRFYGPQVNNISHTKEKKKGKAKKKRLTKADIGTPSNFQHIGHVGWDPNTGFDLNNLDPELKNLFDMCGISEAQLKDRETSKVIYDFIEKTGGVEAVKNELRRQAPPPPPPSRGGPPPPPPPPHNSGPPPPPARGRGAPPPPPSRAPTAAPPPPPPSRPSVAVPPPPPNRMYPPPPPALPSSAPSGPPPPPPSVLGVGPVAPPPPPPPPPPPGPPPPPGLPSDGDHQVPTTAGNKAALLDQIREGAQLKKVEQNSRPVSCSGRDALLDQIRQGIQLKSVADGQESTPPTPAPTSGIVGALMEVMQKRSKAIHSSDEDEDEDDEEDFEDDDEWED

SEQ ID NO: 142276 - protein, 57 aa, Artificial Sequence
  derived and/or modified sequence
MSSVQQQPPPPRRVTNVGSLLLTPQENESLFTFLGKKCVTMSSAVVQLYAADRNLSC

SEQ ID NO: 142277 - DNA, 174 bp, Artificial Sequence
  derived and/or modified sequence
atgagcagcgtgcagcagcagccccccccccccagaagagtgaccaacgtgggcagcctgctgctgaccccccaggagaacgagagcctgttcaccttcctgggcaagaagtgcgtgaccatgagcagcgccgtggtgcagctgtacgccgccgacagaaacctgagctgctag

SEQ ID NO: 142278 - DNA, 174 bp, Artificial Sequence
  derived and/or modified sequence
atgtcatccgtgcagcaacagccgccaccacccaggcgagtgaccaatgtgggttctctcttgctcacaccacaggagaatgaatccttgttcaccttcctgggaaagaagtgcgttacaatgagctctgcggtcgtacagctgtatgctgcggatcgcaacctcagctgctag

SEQ ID NO: 142279 - DNA, 174 bp, Artificial Sequence
  derived and/or modified sequence
atgagctctgtgcagcagcagcccccaccaccccggcgggtgaccaacgtgggcagcctgctgctgaccccccaggagaatgaaagcctcttcaccttcctgggcaagaagtgtgtgaccatgagcagcgctgtggtgcagctgtatgctgctgacaggaacctgagctgctag

SEQ ID NO: 142280 - DNA, 174 bp, Artificial Sequence
  derived and/or modified sequence
atgagcagcgtgcagcagcagcccccccccccccggcgggtgaccaatgtcggcagccttctcctgaccccccaggagaacgagtccctgttcactttcctgggaaaaaaatgcgtcaccatgtcgtccgccgtcgtgcagctttatgccgcagaccgcaacctttcgtgttag

SEQ ID NO: 142281 - DNA, 174 bp, Artificial Sequence
  derived and/or modified sequence
atgagttcggtacagcagcagccaccgccaccccgacgagtgaccaatgtcggatctttactgcttaccccgcaggagaatgagtcgctatttactttcctgggaaagaagtgcgtgacaatgtcatctgctgtggttcagctctatgcggcagaccgtaacctgtcttgttag

SEQ ID NO: 142282 - DNA, 4435 bp, Artificial Sequence
  derived and/or modified sequence
atgttggattgtgcggccgccgccgccgctgcgggagggttgggggaggagttgggagtttagcgcagtcgccggagtgcgaggacaacgaccatccggccctagcctggccgggcgggtgccgggagcttccctttctcagcgcggcgcgaaggtggctcgccgtcagcgcctgcttccctcgacctcgtcctcctccccgctccggaggagctgcgagatgtggcgcctctgactccacttctccccgcccctgtcaccgagagggggaacgagctctcgcccactcgccggaggagacggccctggactcccaaccccgccggcgaaaccatgagctccgtccagcagcagccgccgccgccgcggagggtcaccaacgtggggtccctgttgctcaccccgcaggagaacgagtccctcttcactttcctcggcaagaaatgtgtgactatgtcttcagcagtggtgcagttatatgcagcagatcggaactgtatgtggtcaaagaagtgcagtggtgttgcttgtcttgttaaggacaatccacagagatcttattttttaagaatatttgacattaaggatgggaaactattgtgggaacaagagctatacaataactttgtatataatagtcctagaggatattttcatacctttgctggagatacttgtcaagttgctcttaattttgccaatgaagaagaagcaaaaaaatttcgaaaagcagttacagaccttttgggccgtcgacaaaggaaatctgagaaaagacgagatcccccaaatggtcctaatctacccatggctacagttgatataaaaaatccagaaatcacaacaaatagattttatggtccacaagtcaacaacatctcccataccaaagaaaagaagaagggaaaagctaaaaagaagagattaaccaaggcagatataggaacaccaagcaatttccagcacattggacatgttggttgggatccaaatacaggctttgatctgaataatttggatccagaattgaagaatcttttcgatatgtgtggaatctcagaggcacaacttaaagacagagaaacatcaaaagttatatatgactttattgaaaaaacaggaggtgttgaagctgttaaaaatgaactgcggaggcaagcaccaccacctccaccaccatcaaggggagggccacctcctcctcctccccctccacacaactcaggtcctcctcctcctcctgctaggggaagaggcgctcctcccccaccaccttcaagagctcccacagctgcacctccaccaccgcctccttccaggccaagtgtagcagtccctccaccaccgccaaataggatgtaccctcctccacctccagcccttccctcctcagcaccttcagggcctccaccaccacctccatctgtgttgggggtagggccagtggcaccacccccaccgcctccacctccacctcctcctgggccaccgcccccgcctggcctgccttctgatggggaccatcaggttccaactactgcaggaaacaaagcagctcttttagatcaaattagagagggtgctcagctaaaaaaagtggagcagaacagtcggccagtgtcctgctctggacgagatgcactgttagaccagatacgacagggtatccaactaaaatctgtggctgatggccaagagtctacaccaccaacacctgcacccacttcaggaattgtgggtgcattaatggaagtgatgcagaaaaggagcaaagccattcattcttcagatgaagatgaagatgaagatgatgaagaagattttgaggatgatgatgagtgggaagactgatctatatattatatatatatatatatttttaaggtgaaatactaaacactactttctgtctgtggattctgtaaaattatcatgtaaatgttctaccaatttgctgtatatttttgttgccttttttgcttttttttaatctgtgcaatacctcatttaatctgtaaaggtttgtcgtaatcctctacaaagctactccctgttattgtgtgcaagtttacaccaggatgctcacttgatttgtgaatatttttcattccatcaacaagggagtttaaatactatatgtgagactgacaaaaaccttaatgtaatttacttataatgccagaaggaaaacactattttcataccctactttttctgtacctaaattttcttaaaaaaaaatctagtatagcactacattcttttttaagtgatgcagaccttagtttctttagcccctttattttgaatacaatgctacatatgaatgttgaagctgatacattgcacagttctgtagacatcactacaccgatgtagtttctcaaattttagcaatatgctctacataaaatcactacagagatactagtggggaagacgattaacacacctcttacagtaatactgcctgttattggtatagcagtggtatttgcagactgggatcataaggagcccttaaatacttgttattgactggggttatttttatgctgtagcaaatgtgacaggctctttttagcaaaatttttgaaaatttttttggtattactctgaaacaaaatttaagttggagtttcagggatttagggagtagttttcattctacatgaactgaggtaatattatggtaactccaatatttggttaaaaaaactatacaaatcagaatagtactaaaatactgtagaattttagcatttttattttgcactttgtgtggattgaggtgttcagaaataccaaccataaaaatgtaatctagttggcaaaggtgtgcgctaaaacacggaaccgaacatgcattgatttggataacttttgagggtttttgtcaaatagcatgtgaagagttacatttttcttaaaagattggtggtcccaatgtcagagttcttggaacagataactgaatgatagattttttttttttaaagataaaactttacaacctgcacatttgttatgcatactaaatggtgtgttaaaattagggtttctttgcctctctacactacactaatctgcctaaaggtggttgtttcatatttataatgctaattatcatacctacctactttaaattttaggtagaaaattatctgatttaaatacaaacatatttttctcacattgagtaatatgcataatgtagttccaaatgtatttcattactatagtcacaatatccaactaaaaattacgctatctagaattgtaccaaccaaaatctcgtattggcagatcttgacaggctggacctgcaagatgtggcttgaattttaaccatttattacataatctctagtgatcatgcatctagttatcataagaaataatttaaaaggttttgttgctgaaagcagtaagtggtgcagtaaaatacttaagttattcaaagaatgttatctttcttgcaagagtaatttaagcacatgggaaagattctagactttttgtttcttgcaacaacagtgccctctgctgctagaaacctttttctacttactatcatttttattgtggcttgagctcagtcaatctggtgcagatgaggctggacaactactaaccaataaaatcaggagtttgtacaaaagttaaatggaacattataattattttaagtaatgttaattgaaaaaattttttctttttgacaatataaaaaacattttaaatttcctagaaatgtcttcagggtaatgccaatttaagatctctcttaacttgtggccaagaaattctagattttccagctgactttggtataatatatatttatcaggaacttctctcagcagagagtacccattcttcgagttcaaagcacaattttaaacatgtaaaatggatatataatttgccaaaggtaattaatttattctttttttcttaaagaagaaaaagacattggttgttgttacaaaaagtctaaattactgttggttgaaacacagcagctgtggagttcagtccaggcatgaagactaaatctgctttaccaagtaaggtgtaaggttgcatgtttcagtcctctaccatcctgcactgtgagcagcactatacctgtgcgttgtctgaaagccttccgtatattctccagctaaatggtcgtctggtagcctttgcatttaacaaactagcatgaggctttttatatctaaatgctacgtgatagacaatttcagctagccacatattgtatgtatgagattcataaagactttcaatcatttcattttcagacaactgaaattttgtttagtatgtgaattctttttttgaaatgtatagtgaataggatgttgcactggtggcaattcatcatggagcataataaaattaatttgacccaaatagaataaaataa

SEQ ID NO: 142283 - DNA, 4325 bp, Artificial Sequence
  derived and/or modified sequence
agtcgccggagtgcgaggacaacgaccatccggccctagcctggccgggcgggtgccgggagcttccctttctcagcgcggcgcgaaggtggctcgccgtcagcgcctgcttccctcgacctcgtcctcctccccgctccggaggagctgcgagatgtggcgcctctgactccacttctccccgcccctgtcaccgagagggggaacgagctctcgcccactcgccggaggagacggccctggactcccaaccccgccggcgaaaccatgagctccgtccagcagcagccgccgccgccgcggagggtcaccaacgtggggtccctgttgctcaccccgcaggagaacgagtccctcttcactttcctcggcaagaaatgtgtgactatgtcttcagcagtggtgcagttatatgcagcagatcggaacttgtcttgttaaggacaatccacagagatcttattttttaagaatatttgacattaaggatgggaaactattgtgggaacaagagctatacaataactttgtatataatagtcctagaggatattttcatacctttgctggagatacttgtcaagttgctcttaattttgccaatgaagaagaagcaaaaaaatttcgaaaagcagttacagaccttttgggccgtcgacaaaggaaatctgagaaaagacgagatcccccaaatggtcctaatctacccatggctacagttgatataaaaaatccagaaatcacaacaaatagattttatggtccacaagtcaacaacatctcccataccaaagaaaagaagaagggaaaagctaaaaagaagagattaaccaaggcagatataggaacaccaagcaatttccagcacattggacatgttggttgggatccaaatacaggctttgatctgaataatttggatccagaattgaagaatcttttcgatatgtgtggaatctcagaggcacaacttaaagacagagaaacatcaaaagttatatatgactttattgaaaaaacaggaggtgttgaagctgttaaaaatgaactgcggaggcaagcaccaccacctccaccaccatcaaggggagggccacctcctcctcctccccctccacacaactcaggtcctcctcctcctcctgctaggggaagaggcgctcctcccccaccaccttcaagagctcccacagctgcacctccaccaccgcctccttccaggccaagtgtagcagtccctccaccaccgccaaataggatgtaccctcctccacctccagcccttccctcctcagcaccttcagggcctccaccaccacctccatctgtgttgggggtagggccagtggcaccacccccaccgcctccacctccacctcctcctgggccaccgcccccgcctggcctgccttctgatggggaccatcaggttccaactactgcaggaaacaaagcagctcttttagatcaaattagagagggtgctcagctaaaaaaagtggagcagaacagtcggccagtgtcctgctctggacgagatgcactgttagaccagatacgacagggtatccaactaaaatctgtggctgatggccaagagtctacaccaccaacacctgcacccacttcaggaattgtgggtgcattaatggaagtgatgcagaaaaggagcaaagccattcattcttcagatgaagatgaagatgaagatgatgaagaagattttgaggatgatgatgagtgggaagactgatctatatattatatatatatatatatttttaaggtgaaatactaaacactactttctgtctgtggattctgtaaaattatcatgtaaatgttctaccaatttgctgtatatttttgttgccttttttgcttttttttaatctgtgcaatacctcatttaatctgtaaaggtttgtcgtaatcctctacaaagctactccctgttattgtgtgcaagtttacaccaggatgctcacttgatttgtgaatatttttcattccatcaacaagggagtttaaatactatatgtgagactgacaaaaaccttaatgtaatttacttataatgccagaaggaaaacactattttcataccctactttttctgtacctaaattttcttaaaaaaaaatctagtatagcactacattcttttttaagtgatgcagaccttagtttctttagcccctttattttgaatacaatgctacatatgaatgttgaagctgatacattgcacagttctgtagacatcactacaccgatgtagtttctcaaattttagcaatatgctctacataaaatcactacagagatactagtggggaagacgattaacacacctcttacagtaatactgcctgttattggtatagcagtggtatttgcagactgggatcataaggagcccttaaatacttgttattgactggggttatttttatgctgtagcaaatgtgacaggctctttttagcaaaatttttgaaaatttttttggtattactctgaaacaaaatttaagttggagtttcagggatttagggagtagttttcattctacatgaactgaggtaatattatggtaactccaatatttggttaaaaaaactatacaaatcagaatagtactaaaatactgtagaattttagcatttttattttgcactttgtgtggattgaggtgttcagaaataccaaccataaaaatgtaatctagttggcaaaggtgtgcgctaaaacacggaaccgaacatgcattgatttggataacttttgagggtttttgtcaaatagcatgtgaagagttacatttttcttaaaagattggtggtcccaatgtcagagttcttggaacagataactgaatgatagattttttttttttaaagataaaactttacaacctgcacatttgttatgcatactaaatggtgtgttaaaattagggtttctttgcctctctacactacactaatctgcctaaaggtggttgtttcatatttataatgctaattatcatacctacctactttaaattttaggtagaaaattatctgatttaaatacaaacatatttttctcacattgagtaatatgcataatgtagttccaaatgtatttcattactatagtcacaatatccaactaaaaattacgctatctagaattgtaccaaccaaaatctcgtattggcagatcttgacaggctggacctgcaagatgtggcttgaattttaaccatttattacataatctctagtgatcatgcatctagttatcataagaaataatttaaaaggttttgttgctgaaagcagtaagtggtgcagtaaaatacttaagttattcaaagaatgttatctttcttgcaagagtaatttaagcacatgggaaagattctagactttttgtttcttgcaacaacagtgccctctgctgctagaaacctttttctacttactatcatttttattgtggcttgagctcagtcaatctggtgcagatgaggctggacaactactaaccaataaaatcaggagtttgtacaaaagttaaatggaacattataattattttaagtaatgttaattgaaaaaattttttctttttgacaatataaaaaacattttaaatttcctagaaatgtcttcagggtaatgccaatttaagatctctcttaacttgtggccaagaaattctagattttccagctgactttggtataatatatatttatcaggaacttctctcagcagagagtacccattcttcgagttcaaagcacaattttaaacatgtaaaatggatatataatttgccaaaggtaattaatttattctttttttcttaaagaagaaaaagacattggttgttgttacaaaaagtctaaattactgttggttgaaacacagcagctgtggagttcagtccaggcatgaagactaaatctgctttaccaagtaaggtgtaaggttgcatgtttcagtcctctaccatcctgcactgtgagcagcactatacctgtgcgttgtctgaaagccttccgtatattctccagctaaatggtcgtctggtagcctttgcatttaacaaactagcatgaggctttttatatctaaatgctacgtgatagacaatttcagctagccacatattgtatgtatgagattcataaagactttcaatcatttcattttcagacaactgaaattttgtttagtatgtgaattctttttttgaaatgtatagtgaataggatgttgcactggtggcaattcatcatggagcataataaaattaatttgacccaaat

SEQ ID NO: 142284 - DNA, 1518 bp, Artificial Sequence
  derived and/or modified sequence
atgagtagtgtacaacaacagccgccccccccccggcgcgtgacaaatgtgggtagtttactgcttacaccccaggagaacgagtcactgttcacctttttggggaagaaatgcgttacaatgagctcagcagtagtgcagctctatgccgccgatcgtaactgtatgtggagcaagaagtgtagcggagtggcctgtctggttaaagataatccccaacgaagctactttctgagaattttcgatataaaggatggaaaactgttgtgggaacaggagctgtataacaactttgtctataacagtcccaggggttactttcatacctttgcgggcgatacttgtcaggtggctcttaattttgcgaatgaagaagaagcgaagaagttccggaaggcagtgactgaccttctcggcagacgtcaacggaagagcgagaagcgaagggatcccccaaatggccccaatttgccgatggcaacagtggatataaaaaaccccgaaattacaacgaatcgattctacggcccacaggtaaacaatatatcacacacaaaggaaaagaaaaaaggaaaagccaaaaagaagcggctcactaaggcagacatcggaacccctagcaatttccagcacattggccatgtcgggtgggaccccaatacaggttttgatctgaacaatcttgacccggagctgaaaaatttatttgatatgtgtggcattagcgaagctcagctcaaggaccgagagacatcgaaagtgatctacgatttcatcgaaaagaccggcggggttgaagctgtgaaaaacgaactccggaggcaggccccccctcccccgcccccctcccgagggggtccccctcctccgccacctcccccacacaactcaggccctccaccacccccggccagaggtcggggagcgcccccaccacctccctctagggctccaacagccgcccctcctcctccaccaccctctcggccctcggtcgctgtgcctccgcctccaccaaatcgcatgtatccgcccccccctcccgctttgccctctagtgcaccaagcgggcctccacctccaccaccgtccgtactgggcgtggggccagttgccccccctccaccaccccctccgcctcccccaccaggaccacctcctccaccaggtctcccctcagacggtgatcaccaagtgcctaccacggccgggaacaaggctgctttgctggaccagatccgggagggagctcaactcaaaaaagtcgagcagaacagtaggcccgtctcttgctccgggcgagacgccctgctggatcagattagacaagggatccagttgaagtccgtggcagatggccaggagtccacccctccaacaccagcaccaacatcaggaattgtcggtgctctaatggaagtaatgcagaagagatcgaaggccatccactcatctgatgaagatgaagacgaggacgatgaagaagatttcgaggacgacgatgaatgggaagactag

SEQ ID NO: 142285 - DNA, 1518 bp, Artificial Sequence
  derived and/or modified sequence
atgagctctgtgcagcagcagcccccaccaccccggcgggtgaccaacgtgggcagcctgctgctgaccccccaggagaatgaaagcctcttcaccttcctgggcaagaagtgtgtgaccatgagcagcgctgtggtgcagctgtatgctgctgacaggaactgcatgtggagcaagaagtgcagcggcgtggcctgcctggtgaaggacaacccccagaggagctacttcctgcgcatctttgacatcaaggatggcaagctgctgtgggagcaggagctgtacaacaactttgtgtacaacagcccccggggctacttccacacctttgctggggacacctgccaggtggccctgaactttgccaatgaggaggaggccaagaagttcaggaaggctgtgacagacctgctgggccggcggcagaggaagtctgagaagaggcgggaccccccaaatggccccaacctgcccatggccaccgtggacatcaagaaccctgagatcaccaccaaccgcttctacggcccccaggtgaacaacatcagccacaccaaggagaagaagaagggcaaggccaagaagaagaggctgaccaaggctgacatcggcacccccagcaacttccagcacatcggccacgtgggctgggaccccaacacaggctttgacctgaacaacctggaccctgagctgaagaacctgtttgacatgtgtggcatcagcgaggcccagctgaaggaccgggagaccagcaaggtgatctatgacttcatcgagaagacaggaggagtggaggccgtgaagaatgagctgcggcggcaggcccctcctcctcctccacccagcagaggaggccccccacctcctcctcctccaccccacaacagcggccccccacctcctccagcccggggccgcggggcccctcctcctccacccagccgggcccccacagctgcccctcctcctcctccacccagccggcccagcgtggccgtgcccccacctccacccaacaggatgtacccacctcctcctccagccctgcccagcagcgcccccagcggccccccacctcctccacccagcgtgctgggcgtgggccctgtggcccctcctcctcctcctcctcctcctcctcctcctggccccccacctcctcctggcctgcccagtgatggagaccaccaggtgcccaccacagctggcaacaaggccgccctgctggaccagatccgggagggcgcccagctgaagaaggtggagcagaacagcaggcctgtgtcctgcagcggcagagatgccctgctggaccagatccggcagggcatccagctgaagtctgtggctgatggccaggagagcaccccacccaccccagcccccaccagcggcatcgtgggcgccctgatggaggtgatgcagaagaggagcaaggccatccacagcagtgatgaagatgaagatgaagatgatgaagaagattttgaagatgatgatgagtgggaggactag

SEQ ID NO: 142286 - DNA, 1518 bp, Artificial Sequence
  derived and/or modified sequence
atgagcagcgtgcagcagcagcccccccccccccggcgggtgaccaatgtgggctcccttctcctcacgccccaagagaacgaatctctgtttaccttcttagggaagaagtgcgttaccatgtcgtctgccgtggtccagctctatgccgcagatcgcaactgcatgtggtctaagaaatgcagtggagttgcatgtttggtgaaggataacccacagaggagttactttctgcgtatcttcgatatcaaagacggtaaactgctttgggagcaggaactgtataacaacttcgtgtataattccccgcgcggctacttccacaccttcgcgggcgacacatgtcaggtggcgctgaatttcgctaatgaagaggaggctaaaaaatttaggaaggcagttacagatcttctgggcaggagacagcgcaagtccgagaagcgacgagatcctccgaatgggcccaatctacctatggctacagtagacatcaaaaaccccgagattactaccaaccggttttacgggcctcaggtgaataacataagccatacaaaagagaaaaaaaagggcaaggcgaagaagaagcgcttaacgaaggctgatattggcaccccaagcaactttcaacatataggtcatgtcggctgggaccccaacaccggtttcgatttaaataatctcgatccggaactcaagaacctcttcgacatgtgtgggatctctgaggcccagctgaaggatagggaaacaagtaaagtgatttacgacttcatagaaaagaccgggggggtggaggcggtaaagaacgaactgcggaggcaggcgcctcccccccctccgccttctagaggtggaccaccaccgcctcctccccctccccacaacagcggccctcctccaccacccgccaggggcagaggagccccacctccacccccgagccgggcccccaccgccgcacccccgcctccccctccgtccagaccttcagtggcggtgcctccccctcctcccaatagaatgtacccaccacctccacccgcactaccctcttccgccccatctggacctcctccacctccacccagtgtgctcggcgtgggtccagtagctccgccaccacccccaccgccgcctccaccaccaggcccacctccaccccctgggctcccctcagacggggaccaccaggtgcccacaaccgccggaaacaaagcggcactcctcgaccagattcgtgaaggcgcacagctgaagaaggtcgagcagaatagtcgacctgtgagttgtagtgggagagatgcccttttagatcaaattagacaaggaatccaactgaagagcgtcgccgacggccaggaatcaaccccccctactcccgcaccgacatcgggtatcgtcggagcactcatggaggtcatgcagaagagaagtaaggcaatacatagtagcgacgaggacgaagatgaggacgatgaggaagactttgaggacgatgatgagtgggaagactag

SEQ ID NO: 142287 - DNA, 1518 bp, Artificial Sequence
  derived and/or modified sequence
atgagcagcgtgcaacagcagccacccccaccgaggcgagtgacgaacgtgggcagcctgctcctgacgccgcaagagaacgagagtcttttcacatttctcggaaaaaaatgcgtgactatgtctagcgctgtcgtgcagttgtatgcagctgacagaaattgtatgtggtccaaaaagtgctctggcgtcgcttgtctagtaaaagataatccccagcgcagttacttcctgcggatctttgacatcaaagatgggaaactgctgtgggagcaggagctctataataattttgtatataacagcccccgaggctactttcatacatttgctggcgatacttgtcaggtcgccctgaattttgcgaacgaagaagaggctaagaaatttcgcaaggctgttactgatctcctgggcaggagacaaagaaagagcgagaaacggagagatcctcccaatggacctaatcttcctatggctacagtagatatcaagaatcccgagatcaccacgaatcggttctatggaccccaagtcaacaatatatcccacactaaggaaaagaaaaagggcaaggccaagaagaaacggctcacaaaggcagatataggcacaccttccaatttccaacatatcggacatgtgggttgggatcctaacactgggtttgatctcaacaatctggacccggaattaaaaaaccttttcgatatgtgcggtatcagcgaggcacagttaaaagatagggagaccagtaaggtcatctacgactttatagaaaaaactggaggagtcgaggctgtcaaaaatgagctgcgcagacaggcccctccacccccaccgccttctcgtggcggaccgccacccccaccaccgccaccccataacagcggtccgcctcctccccctgcaagaggcaggggtgccccaccgccacctccttcgcgggcaccgaccgccgctcctccacctccccctccatcaagaccatcggtagccgtcccaccacctcctccgaatcgtatgtacccccctccacctcctgccttgcctagctccgctccttccggccctccccctcctccgccttccgtcctgggagtcggaccagttgcaccaccgcctccgccacccccacctccccctcccggaccacctcccccacccggactgcctagcgatggagatcaccaggtccccaccaccgcagggaacaaggcggctctcctcgatcaaatcagggaaggggcacagctcaagaaggtcgaacagaactcaaggccggtctcctgttccggacgagatgccttgctggatcagattcgccagggcatccagctgaaaagtgttgccgacggacaggagtccaccccccctacccccgcacccactagcggcatcgtgggcgcactgatggaggttatgcagaaaagaagcaaggccattcactcatcagacgaagatgaggacgaggacgatgaggaggactttgaggatgatgatgaatgggaggactag

SEQ ID NO: 142288 - DNA, 1518 bp, Artificial Sequence
  derived and/or modified sequence
atgagcagcgtgcagcagcagccccccccccccagaagagtgaccaacgtgggcagcctgctgctgaccccccaggagaacgagagcctgttcaccttcctgggcaagaagtgcgtgaccatgagcagcgccgtggtgcagctgtacgccgccgacagaaactgcatgtggagcaagaagtgcagcggcgtggcctgcctggtgaaggacaacccccagagaagctacttcctgagaatcttcgacatcaaggacggcaagctgctgtgggagcaggagctgtacaacaacttcgtgtacaacagccccagaggctacttccacaccttcgccggcgacacctgccaggtggccctgaacttcgccaacgaggaggaggccaagaagttcagaaaggccgtgaccgacctgctgggcagaagacagagaaagagcgagaagagaagagacccccccaacggccccaacctgcccatggccaccgtggacatcaagaaccccgagatcaccaccaacagattctacggcccccaggtgaacaacatcagccacaccaaggagaagaagaagggcaaggccaagaagaagagactgaccaaggccgacatcggcacccccagcaacttccagcacatcggccacgtgggctgggaccccaacaccggcttcgacctgaacaacctggaccccgagctgaagaacctgttcgacatgtgcggcatcagcgaggcccagctgaaggacagagagaccagcaaggtgatctacgacttcatcgagaagaccggcggcgtggaggccgtgaagaacgagctgagaagacaggccccccccccccccccccccagcagaggcggccccccccccccccccccccccccccacaacagcggccccccccccccccccgccagaggcagaggcgcccccccccccccccccagcagagcccccaccgccgccccccccccccccccccccagcagacccagcgtggccgtgcccccccccccccccaacagaatgtaccccccccccccccccgccctgcccagcagcgcccccagcggcccccccccccccccccccagcgtgctgggcgtgggccccgtggcccccccccccccccccccccccccccccccccccggccccccccccccccccggcctgcccagcgacggcgaccaccaggtgcccaccaccgccggcaacaaggccgccctgctggaccagatcagagagggcgcccagctgaagaaggtggagcagaacagcagacccgtgagctgcagcggcagagacgccctgctggaccagatcagacagggcatccagctgaagagcgtggccgacggccaggagagcaccccccccacccccgcccccaccagcggcatcgtgggcgccctgatggaggtgatgcagaagagaagcaaggccatccacagcagcgacgaggacgaggacgaggacgacgaggaggacttcgaggacgacgacgagtgggaggactag

SEQ ID NO: 142289 - protein, 772 aa, Artificial Sequence
  derived and/or modified sequence
MGDEDDDESCAVELRITEANLTGHEEKVSVENFELLKVLGTGAYGKVFLVRKAGGHDAGKLYAMKVLRKAALVQRAKTQEHTRTERSVLELVRQAPFLVTLHYAFQTDAKLHLILDYVSGGEMFTHLYQRQYFKEAEVRVYGGEIVLALEHLHKLGIIYRDLKLENVLLDSEGHIVLTDFGLSKEFLTEEKERTFSFCGTIEYMAPEIIRSKTGHGKAVDWWSLGILLFELLTGASPFTLEGERNTQAEVSRRILKCSPPFPPRIGPVAQDLLQRLLCKDPKKRLGAGPQGAQEVRNHPFFQGLDWVALAARKIPAPFRPQIRSELDVGNFAEEFTRLEPVYSPPGSPPPGDPRIFQGYSFVAPSILFDHNNAVMTDGLEAPGAGDRPGRAAVARSAMMQDSPFFQQYELDLREPALGQGSFSVCRRCRQRQSGQEFAVKILSRRLEANTQREVAALRLCQSHPNVVNLHEVHHDQLHTYLVLELLRGGELLEHIRKKRHFSESEASQILRSLVSAVSFMHEEAGVVHRDLKPENILYADDTPGAPVKIIDFGFARLRPQSPGVPMQTPCFTLQYAAPELLAQQGYDESCDLWSLGVILYMMLSGQVPFQGASGQGGQSQAAEIMCKIREGRFSLDGEAWQGVSEEAKELVRGLLTVDPAKRLKLEGLRGSSWLQDGSARSSPPLRTPDVLESSGPAVRSGLNATFMAFNRGKREGFFLKSVENAPLAKRRKQKLRSATASRRGSPAPANPGRAPVASKGAPRRANGPLPPS

SEQ ID NO: 142290 - DNA, 2319 bp, Artificial Sequence
  derived and/or modified sequence
atgggcgacgaggacgacgacgagagctgcgccgtggagctgagaatcaccgaggccaacctgaccggccacgaggagaaggtgagcgtggagaacttcgagctgctgaaggtgctgggcaccggcgcctacggcaaggtgttcctggtgagaaaggccggcggccacgacgccggcaagctgtacgccatgaaggtgctgagaaaggccgccctggtgcagagagccaagacccaggagcacaccagaaccgagagaagcgtgctggagctggtgagacaggcccccttcctggtgaccctgcactacgccttccagaccgacgccaagctgcacctgatcctggactacgtgagcggcggcgagatgttcacccacctgtaccagagacagtacttcaaggaggccgaggtgagagtgtacggcggcgagatcgtgctggccctggagcacctgcacaagctgggcatcatctacagagacctgaagctggagaacgtgctgctggacagcgagggccacatcgtgctgaccgacttcggcctgagcaaggagttcctgaccgaggagaaggagagaaccttcagcttctgcggcaccatcgagtacatggcccccgagatcatcagaagcaagaccggccacggcaaggccgtggactggtggagcctgggcatcctgctgttcgagctgctgaccggcgccagccccttcaccctggagggcgagagaaacacccaggccgaggtgagcagaagaatcctgaagtgcagcccccccttcccccccagaatcggccccgtggcccaggacctgctgcagagactgctgtgcaaggaccccaagaagagactgggcgccggcccccagggcgcccaggaggtgagaaaccaccccttcttccagggcctggactgggtggccctggccgccagaaagatccccgcccccttcagaccccagatcagaagcgagctggacgtgggcaacttcgccgaggagttcaccagactggagcccgtgtacagcccccccggcagccccccccccggcgaccccagaatcttccagggctacagcttcgtggcccccagcatcctgttcgaccacaacaacgccgtgatgaccgacggcctggaggcccccggcgccggcgacagacccggcagagccgccgtggccagaagcgccatgatgcaggacagccccttcttccagcagtacgagctggacctgagagagcccgccctgggccagggcagcttcagcgtgtgcagaagatgcagacagagacagagcggccaggagttcgccgtgaagatcctgagcagaagactggaggccaacacccagagagaggtggccgccctgagactgtgccagagccaccccaacgtggtgaacctgcacgaggtgcaccacgaccagctgcacacctacctggtgctggagctgctgagaggcggcgagctgctggagcacatcagaaagaagagacacttcagcgagagcgaggccagccagatcctgagaagcctggtgagcgccgtgagcttcatgcacgaggaggccggcgtggtgcacagagacctgaagcccgagaacatcctgtacgccgacgacacccccggcgcccccgtgaagatcatcgacttcggcttcgccagactgagaccccagagccccggcgtgcccatgcagaccccctgcttcaccctgcagtacgccgcccccgagctgctggcccagcagggctacgacgagagctgcgacctgtggagcctgggcgtgatcctgtacatgatgctgagcggccaggtgcccttccagggcgccagcggccagggcggccagagccaggccgccgagatcatgtgcaagatcagagagggcagattcagcctggacggcgaggcctggcagggcgtgagcgaggaggccaaggagctggtgagaggcctgctgaccgtggaccccgccaagagactgaagctggagggcctgagaggcagcagctggctgcaggacggcagcgccagaagcagcccccccctgagaacccccgacgtgctggagagcagcggccccgccgtgagaagcggcctgaacgccaccttcatggccttcaacagaggcaagagagagggcttcttcctgaagagcgtggagaacgcccccctggccaagagaagaaagcagaagctgagaagcgccaccgccagcagaagaggcagccccgcccccgccaaccccggcagagcccccgtggccagcaagggcgcccccagaagagccaacggccccctgccccccagctag

SEQ ID NO: 142291 - DNA, 2319 bp, Artificial Sequence
  derived and/or modified sequence
atgggagatgaagacgacgatgagtcatgtgcagtcgagctgagaatcactgaggccaacctgacggggcatgaggagaaagtgtcagtagagaacttcgagttactgaaggttctgggcacaggcgcctacggtaaagtgtttttggtgcgcaaagcgggcggacatgacgccggaaagctctatgccatgaaggtattacgcaaagctgcgctcgtgcaaagggccaagacacaggaacacacccgcactgaacggagcgtgttggagctggtgcgtcaggctcctttcctggttaccctacactacgccttccagacggatgcaaagctccacctaattctggattacgttagtggtggcgagatgtttacgcacctctatcaacgccagtacttcaaggaggcagaggtacgagtgtatggtggcgagattgttttggctctggaacatctgcacaagcttggcatcatttaccgtgatctgaagctcgagaacgtgttattggattccgagggtcatattgtgttgaccgacttcggcctgagcaaggagtttttgaccgaggagaaagaacggaccttcagcttctgcggcacaatagagtacatggcccccgaaatcatccgctctaaaaccgggcacgggaaagccgtggattggtggagcctgggaattctcctcttcgaacttcttaccggagctagcccattcacactggagggggagaggaacacccaggctgaggtttcgcgtcgaatcctcaaatgctctccacccttccctcccagaatcggacctgtagcccaagacctgctgcagcggctgttgtgcaaagacccaaagaagcgcctgggcgccgggcctcagggtgcacaggaggtgcgcaatcaccccttttttcaaggcttggattgggtagcccttgctgcacggaaaattcctgcaccctttaggcctcagattcggtctgagctcgatgtgggaaactttgccgaagagtttacccgcctggaacctgtctacagcccccctggatctcccccacctggcgacccgaggatattccagggatactccttcgtggctcctagtatcctgtttgatcacaataacgcagtgatgaccgatggactagaggcccccggagctggtgaccggcccggcagagcggccgttgctcgcagtgccatgatgcaagactcaccattcttccagcaatacgagctggatctgcgggagcctgctttggggcaggggagcttttccgtgtgtcgtcggtgccgacaacgccagtccggtcaggagttcgcggtgaagattctgtctaggcgactggaggcaaatacgcagagggaagtcgctgcactacggctatgtcagtctcaccccaatgtggtcaacctgcacgaggttcaccatgaccagttacacacctacctggtactggagctgctcagagggggtgagctgctcgaacacattcggaaaaaacggcacttctctgagagtgaagcttcccagatcttgcgatcgcttgtctctgctgtctctttcatgcacgaagaggccggcgtcgtccaccgagatctgaaacctgaaaatatcctgtacgcggacgatacccctggggcgcctgtcaaaattatcgacttcggattcgcccgcctcaggccacaatcccctggcgttcccatgcagaccccgtgctttactctgcaatatgcagcgccagaattgctagcccagcagggctacgatgaatcgtgcgacctctggtcactcggagtgattctctacatgatgctttccggccaggtccccttccaaggggcctccggacagggaggtcaatcccaggccgccgaaattatgtgtaaaatccgagaaggcaggttttctctggatggcgaggcctggcaaggtgttagtgaggaagctaaggaacttgtgcgcggtctgctaacggtggaccccgccaaaaggctaaaactcgaaggtctcaggggatcctcttggcttcaagatggatcagcacggtccagcccccccctgcgtacacccgacgtactggaaagttccggcccggcggtgaggtctgggttgaacgccaccttcatggcctttaaccgggggaaaagagagggtttcttcctgaagtcagtcgaaaacgcgccccttgcaaagcgccggaaacagaagttacgcagtgcaaccgccagccggcggggaagcccagcgccggccaaccccggaagagcccccgtggcgagtaaaggcgcgcctcgaagggctaacggacccttgcctccgtcttag

SEQ ID NO: 142292 - DNA, 2319 bp, Artificial Sequence
  derived and/or modified sequence
atgggagatgaagatgatgatgagagctgtgctgtggagctgcgcatcacagaggccaacctgaccggccacgaggagaaggtgtctgtggagaactttgagctgctgaaggtgctgggcactggagcctacggcaaggtgttcctggtgaggaaggccggcggccatgatgctgggaagctgtatgccatgaaggtgctgaggaaggccgccctggtgcagagggccaagacccaggagcacaccaggacagagaggtctgtgctggagctggtgcggcaggcccccttcctggtgaccctgcactacgccttccagacagatgccaagctgcacctgatcctggactatgtgtctggaggagagatgttcacccacctgtaccagaggcagtacttcaaggaggccgaggtgcgggtgtatggaggagaaattgtgctggccctggagcacctgcacaagctgggcatcatctacagagacctgaagctggagaatgtgctgctggacagcgagggccacatcgtgctgacagactttggcctgagcaaggagttcctgacagaggagaaggagaggaccttctccttctgtggcaccatcgagtacatggcccctgagatcatccgcagcaagacaggccacggcaaggctgtggactggtggagcctgggcatcctgctgtttgagctgctgactggagccagccccttcaccctggagggggagaggaacacccaggccgaggtgagccgccgcatcctgaagtgcagcccccccttccccccaagaattggccctgtggcccaggacctgctgcagaggctgctgtgcaaggaccccaagaagaggctgggcgccggcccccagggcgcccaggaggtgaggaaccaccccttcttccagggcctggactgggtggccctggccgccaggaagatcccagcccccttccggccccagatccgctctgagctggatgtgggcaactttgctgaggagttcacccggctggagcctgtgtacagccccccaggcagccccccacctggggacccccgcatcttccagggctacagctttgtggcccccagcatcctgtttgaccacaacaatgctgtgatgacagatggcctggaggcccctggggccggggaccggcccggccgggctgctgtggcccggagcgccatgatgcaggacagccccttcttccagcagtatgagctggacctgcgggagcccgccctgggccagggcagcttctctgtgtgccgccgctgccggcagaggcagagcggccaggagtttgctgtgaagatcctgagccggcggctggaggccaacacccagcgggaggtggccgccctgcggctgtgccagagccaccccaacgtggtgaacctgcacgaggtgcaccacgaccagctgcacacctacctggtgctggagctgctgcggggcggggagctgctggagcacatcaggaagaagaggcacttcagcgagagcgaggccagccagatcctgcggagcctggtgtctgctgtgtccttcatgcatgaggaggccggcgtggtgcaccgggacctgaagccagagaacatcctgtatgcagatgacacccctggggcccctgtgaagatcatcgactttggatttgcccggctgcggccccagagccctggggtgcccatgcagaccccctgcttcaccctgcagtatgctgcccctgagctgctggcccagcagggctatgatgagagctgtgacctgtggagcctgggcgtcatcctgtacatgatgctgagcggccaggtgcccttccagggcgccagcggccagggcggccagagccaggccgctgagatcatgtgcaagatccgggagggccgcttcagcctggatggagaggcctggcagggcgtgtctgaggaggccaaggagctggtgcggggcctgctgactgtggaccctgccaagaggctgaagctggagggcctgcggggcagctcctggctgcaggacggcagcgcccggagcagcccccccctgcggaccccagatgtgctggagagcagcggccctgctgtgcgcagcggcctgaatgccaccttcatggccttcaacagaggcaagcgggagggcttcttcctgaagtctgtggagaatgcccccctggccaagaggaggaagcagaagctgcggagcgccacagccagccggcggggcagccctgccccagccaaccctggccgggcccctgtggccagcaaaggagccccccggcgggccaacggccccctgccccccagctag

SEQ ID NO: 142293 - DNA, 2319 bp, Artificial Sequence
  derived and/or modified sequence
atgggcgacgaggacgacgacgagagctgcgccgtggagctgcggatcactgaggccaacttaacaggacacgaagagaaagtttcagtggagaacttcgaacttcttaaggtgctcggcacgggtgcctatggtaaggtatttctggtgagaaaagcaggggggcacgacgctgggaaactctatgcaatgaaggtactgcgcaaggcagctctggtgcagcgggcaaagacccaggagcatacccgaacagaacgaagcgttctggaattagtacgacaggccccatttcttgtaaccctgcactatgccttccaaaccgacgctaaacttcacctcattctggactatgtgtcaggcggtgagatgttcacacatctctaccaaaggcagtacttcaaggaagcagaggtccgcgtttacggtggcgaaattgtactcgcactagaacacctgcacaaactagggatcatctacagggacctgaaacttgagaacgtactcctggattcagagggacacatagtgctgaccgattttggattgtcaaaggagttcctgaccgaggagaaggaacgtacattttccttttgcgggaccatagagtacatggcccctgagatcatccggtctaagactgggcatgggaaagctgtggattggtggagccttggcatattattattcgaattgcttactggggccagtccatttactttggaaggtgagaggaacacgcaggccgaggtgtctcgtcggatactgaagtgctccccaccgtttcctccccggattggtccagtggcccaggacctgcttcagcggcttctttgtaaggatcctaaaaaacgtctaggcgcgggcccccagggcgctcaggaagtgagaaatcatcctttctttcagggactggactgggtcgctctcgcggctcgcaaaattcccgcccccttcagaccgcagattagatcagaactggatgtgggaaatttcgccgaagaattcacaagactggaacctgtgtattcgcccccgggctccccccctcccggagatccgaggatatttcagggatactcctttgtggcacccagcatattatttgaccataacaatgcagtcatgactgacggtttggaggcgcctggagccggagaccgacctggaagagcagccgtggcccggtcagcaatgatgcaggactcacccttttttcaacagtacgaactcgatttgagagaacccgccctagggcaaggaagcttctccgtgtgcaggcgctgcagacagcgacaatccgggcaggaatttgctgtgaagattctaagtcgtcgtctcgaggccaatacccagagggaagtcgcagcgctgcggctttgtcagagccaccctaacgtggttaatctgcacgaagttcaccacgaccagctccacacatacttggtcctggagttgctcagaggaggtgagctgctagagcatattaggaaaaagagacattttagcgaatccgaggcttcccaaatactgaggagcttagtttccgctgtatccttcatgcatgaggaagcgggcgtagtgcatcgtgatctgaagccagagaatatactttatgcagacgacacacccggggcccctgtgaaaataatcgattttggatttgctcggctccgtcctcagagcccaggtgtccctatgcaaactccatgctttaccctgcaatatgccgcccccgagctgcttgcacagcagggttatgacgagtcgtgtgacctgtggagcctcggcgtgattttgtacatgatgctctcagggcaggtaccctttcagggcgcgtcagggcaaggagggcagtcccaggcggctgagattatgtgcaaaattagggagggtagattcagcctggacggagaagcctggcagggcgtgagtgaggaagctaaggaattggtgcggggcctgctcaccgttgaccccgcaaagcggctgaaattggaaggactccgcggttctagctggctgcaagatggctccgcccgcagcagccccccgctccgaactccggatgttctggagagctctggtcctgcagtgagaagtggactgaacgccacctttatggcctttaacagaggaaagcgagaaggattcttcctcaagtccgttgaaaatgccccattggccaagcgtcgcaaacagaagcttcggagtgccaccgccagcagacgaggatccccagcgccagctaaccccggccgggcccccgtggcaagtaagggcgcacctcggagagctaatggcccactacccccttcatag

SEQ ID NO: 142294 - DNA, 2319 bp, Artificial Sequence
  derived and/or modified sequence
atgggagacgaagatgatgatgaatcatgcgcagttgagctcagaatcacagaggcaaacctgaccgggcatgaagaaaaagtgtctgtcgagaacttcgaactgctcaaggtcctgggaacaggcgcttatggaaaggtgtttctagttcgaaaagccggaggacacgatgccggaaagttgtatgccatgaaggtgctcaggaaggccgctcttgtgcagcgagcgaagactcaggagcacactcgcacagaaagaagcgtgctagagttggttagacaagctccctttttggtgacactccactacgcattccagacagatgctaaactgcatctcattctggattacgtcagcggcggagaaatgtttactcatctgtatcagagacagtacttcaaggaggccgaagtgcgtgtgtatggaggagagatagtactcgcacttgagcaccttcacaaactcgggattatttatcgggacttaaaactcgagaacgtcttactcgactctgaaggccatatagtgctcacagactttggcctctcaaaagagttcctcaccgaagagaaagagaggacattctctttctgcggtactattgaatatatggcgccagagataatcagatccaagactggacacggaaaagccgtggattggtggagtcttggtatcttactgttcgaactgctgacaggtgctagcccctttaccttggagggagaacgcaatacccaggccgaagtgtcaagacgcattctcaagtgtagcccacccttccctccgagaatcggcccagtcgcacaggatcttttgcaacggctgctctgcaaggacccaaagaaacgcttaggggctgggccacaaggtgcacaggaggtcagaaaccatcctttctttcagggcctggattgggtggccttggccgctaggaaaattccagcacccttccgtccccaaatcaggtccgaactcgacgtgggcaattttgctgaggagttcacgcgactggaacctgtgtactcacctcccggaagcccccctcccggtgatccaagaatctttcagggctactctttcgtggccccttcgattctcttcgaccataataacgccgtgatgacagacggcctcgaagccccaggggctggcgatagaccaggtagggcagcagtggcaaggtccgccatgatgcaggacagcccattttttcagcagtacgagctggacctgcgtgaacctgctttgggtcagggttccttctctgtctgcagaagatgccggcagcgacagtctggtcaggagttcgccgtcaaaatcctcagcagacgcctcgaggcaaacacacagcgagaagtcgcggctctccggctgtgtcaatctcacccaaacgtggtgaacctccatgaggtacaccatgatcagctacacacctatctcgtgctggagctcctccgtgggggagagctgttggagcacattcgcaaaaaacgccacttcagcgaatcagaggcctctcagattttgagatccctggtgagcgctgtgagcttcatgcatgaagaggcaggtgtcgtgcaccgcgatttgaagcctgaaaacattctgtatgccgacgacactccaggcgcaccggttaaaatcatcgatttcggcttcgcgcgtctgaggcctcaaagtcctggggtacctatgcagacaccgtgcttcacactgcagtatgctgctccagaactgctggcccagcagggctacgatgaatcatgcgacctttggtctctaggcgtcattctttacatgatgctgtccgggcaggtgccatttcagggcgctagtggccagggagggcagtcccaagccgcagagatcatgtgcaaaatcagagaggggcgttttagcctagatggcgaggcatggcagggtgtgtcagaagaggcaaaggaacttgtccgaggccttctgactgttgatccagcaaagcgcctaaaactagagggcctccgcggtagcagttggctccaggacggtagtgcaagatcttctcccccactaaggaccccggacgtgctggagagttcaggcccagctgtgcgatctggactgaatgcaaccttcatggctttcaacagaggcaagcgtgagggcttcttcctgaagtccgtggagaatgccccactcgccaagagaagaaaacagaagctcaggtctgccactgcatctcggcgaggcagtcccgctcccgctaatccgggaagagctcctgtcgcaagtaaaggggctccacgcagggcaaacggcccactgccaccatcctag

SEQ ID NO: 142295 - DNA, 3119 bp, Artificial Sequence
  derived and/or modified sequence
ggagccgccatgtaaccggcgccgcccggagcccgagccgcgcgggccccagcgacccgcccgccatgggggacgaggacgacgatgagagctgcgccgtggagctgcggatcacagaagccaacctgaccgggcacgaggagaaggtgagcgtggagaacttcgagctgctcaaggtgctgggcacgggagcctacggcaaggtgttcctggtgcggaaggcgggcgggcacgacgcggggaagctgtacgccatgaaggtgctgcgcaaggcggcgctggtgcagcgcgccaagacgcaagagcacacgcgcaccgagcgctcggtgctggagctggtgcgccaggcgcccttcctggtcacgctgcactacgctttccagacggatgccaagctgcacctcatcctggactatgtgagcggcggggagatgttcacccacctctaccagcgccagtacttcaaggaggctgaggtgcgcgtgtatgggggtgagatcgtgctggccctggaacacctgcacaagctcggcatcatttaccgagacctgaaactggagaatgtgctgctggactccgagggccacattgtcctcacggacttcgggctgagcaaggagttcctgacggaggagaaagagcggaccttctccttctgtggcaccatcgagtacatggcccccgaaatcatccgtagcaagacggggcatggcaaggctgtggactggtggagcctgggcatcttgctcttcgagctgctgacgggggcctcgcccttcaccctggagggcgagaggaacacgcaggctgaggtgtctcgacggatcctgaagtgctcccctcccttcccccctcggatcgggcccgtggcgcaggacctgctgcagcggctgctttgtaaggatcctaagaagcgattgggcgcggggccccagggggcacaagaagtccggaaccatcccttcttccagggcctcgattgggtggctctggctgccaggaagattccagccccattccggccccaaatccgctcagagctggatgtgggcaactttgcggaggaattcactcggctggagcctgtctactcaccccctggcagccccccacctggggacccccgaatctttcagggatactcctttgtggcaccctccattctctttgaccacaacaacgcggtgatgaccgatgggctggaagcgcctggtgctggagaccggccaggtcgggcagcggtggccaggagcgctatgatgcaggactcgcccttcttccagcagtacgagctggacctgcgggagcctgcgctgggccagggcagcttttctgtgtgtcgccgctgccgccagcgccagagcggccaggagttcgcagtcaagatcctcagtcgcaggctggaggcgaacacgcagcgcgaagtggctgccctgcgcctgtgccagtcacaccccaacgtggtgaatctgcacgaggtgcatcacgaccagctgcacacgtacctggtcctggagctgctgcggggcggggagctgctggagcacatccgcaagaagcggcacttcagcgagtcggaagcaagccagatcctgcgcagcctcgtgtcggccgtgagcttcatgcacgaggaggcgggcgtggtgcaccgcgacctcaagccggagaacatcctgtacgccgacgacacgcccggggccccggtgaaaatcatcgacttcgggttcgcgcggttgcggccgcagagtcccggggtgcccatgcagacgccctgcttcacgctgcagtacgctgcccccgagctgctggcgcagcagggctacgacgagtcctgcgacctctggagcctgggcgtcattctgtacatgatgctgtcggggcaggtccccttccagggggcctctggccagggcgggcagagccaggcggccgagatcatgtgcaaaatccgcgaggggcgcttctcccttgacggggaggcctggcagggtgtatccgaggaagccaaggagctggtccgagggctcctgaccgtggaccccgccaagcggctgaagctcgagggactgcggggcagctcgtggctgcaggacggcagcgcgcgctcctcgcccccgctccggacgcccgacgtgctcgagtcctctgggcccgcagtgcgctcgggtctcaacgccaccttcatggcattcaaccggggcaagcgggagggcttcttcctgaagagcgtggagaatgcacccctggccaagcggcggaagcagaagctgcggagcgccaccgcctcccgccggggctcccctgcaccagccaacccgggccgagcccccgtcgcctccaaaggggccccccgccgagccaacggccccctgcccccctcctaatccccaccactgtgacccccttccctcataggggctgtgacctgggagcccggctcactcccggaggcctctgcctgcggctgacctgatccccaagggactgtcctttcctctcctaccccaccccactcccagacagagcagaagtatttttataagcagagaattttttatgtcttaccagatagagttgcagggaagggggggcctgctggggagtggggtttggggggccctctcccaggacactgcctcttctgggcagaaggcccctccagggggactgctccaacaggaaagagcccctcccccacttctaagcactgagttaggagtgctaactcctaaactgggaccccctaccctgttctcccctgaggccccgttcctgggaggggcacccctcaactgtcactttatggactgtctgtgcaattacgtccaccaaagacccgtgttgggggtactgaaggagaggccctgggggaccctctgaagcatttctgcctcactttatgtcatctgcttctcccctgttggggctaaggaaggagataggtggctcctaaaagaggaggccatcttctcacccaccccttcctctttggcacagctactcctggctgggggtggggccttgggggtctgggctgggcatccatggtcactgcctcagcccagccaggctgtgcctttgactttaaaataaaagtccacccagtgctgtgtgtggca

SEQ ID NO: 142296 - protein, 358 aa, Artificial Sequence
  derived and/or modified sequence
MGAVWSALLVGGGLAGALFVWLLRGGPGDTGKDGDAEQEKDAPLGGAAIPGGHQSGSSGLSPGPSGQELVTKPEHLQESNGHLISKTKDLGKLQAASWRLQNPSREVCDNSREHVPSGQFPDTEAPATSETSNSRSYSEVSRNESLESPMGEWGFQKGQEISAKAATCFAEKLPSSNLLKNRAKEEMSLSDLNSQDRVDHEEWEMVPRHSSWGDVGVGGSLKAPVLNLNQGMDNGRSTLVEARGQQVHGKMERVAVMPAGSQQVSVRFQVHYVTSTDVQFIAVTGDHECLGRWNTYIPLHYNKDGFWSHSIFLPADTVVEWKFVLVENGGVTRWEECSNRFLETGHEDKVVHAWWGIH

SEQ ID NO: 142297 - protein, 209 aa, Artificial Sequence
  derived and/or modified sequence
MGEWGFQKGQEISAKAATCFAEKLPSSNLLKNRAKEEMSLSDLNSQDRVDHEEWEMVPRHSSWGDVGVGGSLKAPVLNLNQGMDNGRSTLVEARGQQVHGKMERVAVMPAGSQQVSVRFQVHYVTSTDVQFIAVTGDHECLGRWNTYIPLHYNKDGFWSHSIFLPADTVVEWKFVLVENGGVTRWEECSNRFLETGHEDKVVHAWWGIH

SEQ ID NO: 142298 - DNA, 1077 bp, Artificial Sequence
  derived and/or modified sequence
atgggcgccgtgtggagcgccctgctggtgggcggcggcctggccggcgccctgttcgtgtggctgctgagaggcggccccggcgacaccggcaaggacggcgacgccgagcaggagaaggacgcccccctgggcggcgccgccatccccggcggccaccagagcggcagcagcggcctgagccccggccccagcggccaggagctggtgaccaagcccgagcacctgcaggagagcaacggccacctgatcagcaagaccaaggacctgggcaagctgcaggccgccagctggagactgcagaaccccagcagagaggtgtgcgacaacagcagagagcacgtgcccagcggccagttccccgacaccgaggcccccgccaccagcgagaccagcaacagcagaagctacagcgaggtgagcagaaacgagagcctggagagccccatgggcgagtggggcttccagaagggccaggagatcagcgccaaggccgccacctgcttcgccgagaagctgcccagcagcaacctgctgaagaacagagccaaggaggagatgagcctgagcgacctgaacagccaggacagagtggaccacgaggagtgggagatggtgcccagacacagcagctggggcgacgtgggcgtgggcggcagcctgaaggcccccgtgctgaacctgaaccagggcatggacaacggcagaagcaccctggtggaggccagaggccagcaggtgcacggcaagatggagagagtggccgtgatgcccgccggcagccagcaggtgagcgtgagattccaggtgcactacgtgaccagcaccgacgtgcagttcatcgccgtgaccggcgaccacgagtgcctgggcagatggaacacctacatccccctgcactacaacaaggacggcttctggagccacagcatcttcctgcccgccgacaccgtggtggagtggaagttcgtgctggtggagaacggcggcgtgaccagatgggaggagtgcagcaacagattcctggagaccggccacgaggacaaggtggtgcacgcctggtggggcatccactag

SEQ ID NO: 142299 - DNA, 630 bp, Artificial Sequence
  derived and/or modified sequence
atgggcgagtggggcttccagaagggccaggagatcagcgccaaggccgccacctgcttcgccgagaagctgcccagcagcaacctgctgaagaacagagccaaggaggagatgagcctgagcgacctgaacagccaggacagagtggaccacgaggagtgggagatggtgcccagacacagcagctggggcgacgtgggcgtgggcggcagcctgaaggcccccgtgctgaacctgaaccagggcatggacaacggcagaagcaccctggtggaggccagaggccagcaggtgcacggcaagatggagagagtggccgtgatgcccgccggcagccagcaggtgagcgtgagattccaggtgcactacgtgaccagcaccgacgtgcagttcatcgccgtgaccggcgaccacgagtgcctgggcagatggaacacctacatccccctgcactacaacaaggacggcttctggagccacagcatcttcctgcccgccgacaccgtggtggagtggaagttcgtgctggtggagaacggcggcgtgaccagatgggaggagtgcagcaacagattcctggagaccggccacgaggacaaggtggtgcacgcctggtggggcatccactag

SEQ ID NO: 142300 - DNA, 1077 bp, Artificial Sequence
  derived and/or modified sequence
atgggagctgtgtggtccgccctgctcgtcggagggggtttggctggtgcccttttcgtttggctgcttaggggcgggcccggcgacactggcaaggatggcgatgctgagcaggagaaagacgcgccattgggcggagctgcaatcccaggaggtcaccagtccggcagctctggtttaagtcccggccctagtggacaagagctggtgaccaagcccgagcacttacaagagtctaatggccatttaatcagtaagacaaaggatctgggtaagcttcaggctgctagctggcgtctccagaacccatcacgtgaagtctgcgataattcccgcgagcatgtaccatctggacagttccccgacactgaagccccagcaaccagcgagacgagcaactcgaggagctacagcgaagtgagtcgaaacgagtccttagagagccccatgggagagtggggattccaaaagggtcaggaaatttccgcaaaagctgccacctgcttcgcggagaaactgcccagcagtaatctactcaaaaaccgcgcaaaggaagagatgagtttgtctgatctgaactcccaagatcgggtggaccacgaagagtgggagatggtgccccgacacagctcttggggcgatgtgggagttggggggtcattgaaggccccagtgctgaacctcaatcagggcatggataacggccggtctacactagtcgaggcacggggccagcaggtgcatggcaagatggaacgcgtcgcagtgatgcctgccggaagccagcaggtctccgtccggttccaggtgcactacgtgacctccacggatgtgcagttcatcgcggtgacaggagaccatgagtgcctcggtagatggaacacttatattccactgcactataacaaggacggtttttggtctcattccatcttcttacccgccgacacagtagtcgagtggaagttcgtcttagtagaaaatggcggcgtgacaaggtgggaagaatgttctaacaggttcctggagactggccacgaggacaaggtggtgcatgcatggtgggggattcactag

SEQ ID NO: 142301 - DNA, 630 bp, Artificial Sequence
  derived and/or modified sequence
atgggtgaatggggttttcaaaaagggcaggaaatcagcgctaaagcagcaacatgctttgccgaaaagctgccatctagcaaccttctcaagaatcgggctaaggaagaaatgtccttgagtgacttgaattcccaggaccgagtcgatcatgaagagtgggagatggtaccgcgccattcctcctggggggatgtgggggtgggtggtagtctcaaggccccggtgttgaacctaaaccagggaatggataatggccgttccaccctggttgaggctcggggacagcaggtccatggcaaaatggaacgagtggcagtgatgccggccggctcccagcaggtatctgtgcgattccaggtccattatgtcaccagtacggatgtgcagtttatcgctgtgacaggcgaccacgagtgcttgggccgctggaacacatatatccctcttcactacaacaaggatgggttctggtcccattccatctttctgcctgctgatactgtcgtggagtggaaatttgtgcttgtagaaaacgggggtgttacccgttgggaggagtgcagtaatcggtttttagagacagggcacgaagacaaagtcgtacatgcctggtggggaatccattag

SEQ ID NO: 142302 - DNA, 1077 bp, Artificial Sequence
  derived and/or modified sequence
atgggcgctgtgtggagcgccctgctggtgggcggcggcctggccggggccctgtttgtgtggctgctgcggggcggccctggggacaccgggaaggatggagatgctgagcaggagaaggatgcccccctgggcggggccgccatccctgggggccaccagagcggcagcagcggcctgagccctggccccagcggccaggagctggtgaccaagccagagcacctgcaggagagcaatggccacctgatcagcaagaccaaggacctgggcaagctgcaggccgcctcctggaggctgcagaaccccagccgggaggtgtgtgacaacagccgggagcacgtgcccagcggccagttcccagacacagaggccccagccaccagcgagaccagcaacagccgcagctacagcgaggtgtccagaaatgaaagcctggagagccccatgggagagtggggcttccagaagggccaggagatcagcgccaaggccgccacctgctttgctgagaagctgcccagcagcaacctgctgaagaacagagccaaggaggagatgagcctgagtgacctgaacagccaggacagagtggaccacgaggagtgggagatggtgcccaggcacagctcctggggagatgtgggcgtgggcggcagcctgaaggcccctgtgctgaacctgaaccagggcatggacaatggccgcagcaccctggtggaggcccggggccagcaggtgcacggcaagatggagcgggtggccgtgatgcctgctggcagccagcaggtgtctgtgcgcttccaggtgcactacgtgaccagcacagatgtgcagttcatcgctgtgactggagaccacgagtgcctgggccgctggaacacctacatccccctgcactacaacaaggatggcttctggagccacagcatcttcctgcctgctgacacagtggtggagtggaagtttgtgctggtggagaatggaggagtgacccgctgggaggagtgcagcaaccgcttcctggagaccggccacgaggacaaggtggtgcacgcctggtggggcatccactag

SEQ ID NO: 142303 - DNA, 630 bp, Artificial Sequence
  derived and/or modified sequence
atgggagagtggggcttccagaagggccaggagatcagcgccaaggccgccacctgctttgctgagaagctgcccagcagcaacctgctgaagaacagagccaaggaggagatgagcctgagtgacctgaacagccaggacagagtggaccacgaggagtgggagatggtgcccaggcacagctcctggggagatgtgggcgtgggcggcagcctgaaggcccctgtgctgaacctgaaccagggcatggacaatggccgcagcaccctggtggaggcccggggccagcaggtgcacggcaagatggagcgggtggccgtgatgcctgctggcagccagcaggtgtctgtgcgcttccaggtgcactacgtgaccagcacagatgtgcagttcatcgctgtgactggagaccatgaatgtctgggccgctggaacacctacatccccctgcactacaacaaggatggcttctggagccacagcatcttcctgcctgctgacacagtggtggagtggaagtttgtgctggtggagaatggaggagtgacccgctgggaggagtgcagcaaccgcttcctggagactggacatgaggacaaggtggtgcacgcctggtggggcatccactag

SEQ ID NO: 142304 - DNA, 1077 bp, Artificial Sequence
  derived and/or modified sequence
atgggcgccgtgtggagcgccctgctggtgggcggcggcctggccggcgcgctgtttgtatggcttttaaggggcggcccaggagatacaggcaaagacggtgatgcagaacaggagaaggacgccccacttgggggagcagccatacccggcggacaccagagcggaagttccggattatccccgggaccaagcggacaggaactggtgacaaagccagaacatctccaagaaagcaatgggcacctgatctctaagacgaaagacctggggaaactgcaggccgcgagttggcgactgcagaacccgagccgagaggtctgcgacaactctcgggaacacgttccctctggccagtttccagacaccgaggcacccgctacttcagagacctcaaactctaggtcctactccgaggtgagccgcaacgagtctctggagagcccgatgggggaatggggattccagaaaggccaggaaatctcagccaaagccgcgacatgtttcgcagagaagctgccaagttcaaatcttctgaaaaatcgcgccaaggaggagatgagtctctccgacctgaacagtcaggacagagtggatcatgaagagtgggagatggtaccgcgacacagtagttggggagatgtgggggtgggaggaagcctcaaagctccagtcctgaacctcaatcaaggaatggataacggacggtcgactctggtggaggcccgcggacagcaggttcacggaaagatggagcgcgtcgccgttatgccagccgggtctcaacaggtcagcgtccgcttccaggttcactatgttactagcacggacgtgcaattcatcgctgtcacgggagatcacgagtgtttggggaggtggaacacatatattccactgcattataataaagacggcttttggtctcactctatattcctaccggccgacacagtcgtcgagtggaagtttgtcttagtagagaatggtggcgtgacacgttgggaagaatgctctaaccggttcctagaaaccggtcacgaggataaggtggtgcatgcttggtggggtatccattag

SEQ ID NO: 142305 - DNA, 630 bp, Artificial Sequence
  derived and/or modified sequence
atgggcgagtggggcttccagaagggccaggagatcagcgccaaggccgccacgtgttttgctgaaaagctgccaagcagcaacctgctgaagaatagagctaaggaagagatgtcactaagcgacctaaacagtcaggaccgagtcgatcacgaagaatgggaaatggtacccagacactcctcctggggcgatgtaggcgttggggggtctctaaaggcaccggtcctgaatctgaatcagggcatggataatggtcgcagcaccctcgtggaggctcggggacagcaagtgcacggtaaaatggagagggtggccgtaatgcctgccggctctcagcaggtcagcgtccgattccaggtgcactatgttacctctacagatgtacagtttatagctgtcacaggggatcatgagtgcctgggcagatggaatacgtatatcccactgcactacaataaggatggcttttggtctcatagcatctttctgccagcagatactgtagtcgaatggaaatttgtattggtggaaaatggcggggtaacgcgctgggaggagtgcagtaatagattcctagaaacaggacacgaagacaaggtcgtgcatgcttggtggggcattcattag

SEQ ID NO: 142306 - DNA, 1077 bp, Artificial Sequence
  derived and/or modified sequence
atgggggctgtgtggagcgcgttattggttggaggcggtctcgcaggggctctgttcgtatggctgctgcgagggggtccaggggatacgggaaaagatggcgacgcggaacaggaaaaagatgcaccgcttgggggtgcagcaataccaggaggccaccagagtggttcctcggggctctctccgggtccttctggtcaggagctcgtgacgaagcctgagcatctgcaggagagcaatggccacctcatcagcaaaactaaagacttaggcaaactgcaggctgcgtcctggcggctgcaaaaccccagtcgggaagtttgtgataactcccgggaacacgtgcccagtggccaatttccggatacagaggccccagccactagcgagacgtccaattccagaagctatagtgaagtgtccaggaatgagagcttggaatcccccatgggagaatggggattccagaagggtcaagagatctccgccaaggccgcaacgtgcttcgccgaaaaattgcctagctcaaacttgttaaagaatagagcaaaagaggagatgtctctgagcgatctgaatagtcaggatcgagttgaccacgaggagtgggagatggtgcccaggcattccagttggggggacgtgggggttggtggatccctgaaagcacctgtgttaaacctgaatcaggggatggataacgggcgatccacactggtcgaagcccgtggacaacaagttcatggcaagatggagagggtggcggttatgcccgctggctcacaacaggtgagtgtgaggttccaggtgcattatgttacctctacagacgttcaattcatcgcagttactggcgatcatgaatgtttgggcaggtggaacacctatattccacttcactacaataaggacggcttctggtctcacagtatcttccttcccgctgacactgtagtcgaatggaagttcgtcttggtagagaacggcggagtgactcgttgggaagaatgcagtaataggttcctggagactggacacgaagataaggtcgtgcacgcatggtggggcatccactag

SEQ ID NO: 142307 - DNA, 630 bp, Artificial Sequence
  derived and/or modified sequence
atgggtgaatggggcttccagaaaggccaggagatctctgcgaaggccgcaacctgcttcgctgagaagctgccttcctccaacctgctgaagaatcgtgctaaagaggagatgtccctttccgatctgaacagtcaggatcgggtagatcatgaggagtgggagatggtgccgaggcactcatcctggggggacgtgggagtgggcggatctctcaaagccccagtactgaatttaaaccaaggtatggacaacggccgatccaccttggtggaggcccgagggcaacaggtacacggcaaaatggagcgcgttgccgtgatgcctgccggttcccagcaagtcagtgtcaggttccaggtgcattatgtcacatctaccgatgtgcagttcatcgcagttactggcgaccacgaatgcttaggcaggtggaatacctatattccactgcattataataaagatgggttctggagccactcaatttttctgcccgctgacaccgttgtagaatggaaattcgtgctcgtcgaaaacgggggagtgactcggtgggaggagtgttcaaaccgtttcttagaaactggccatgaagacaaagtcgtacacgcttggtggggcatccactag

SEQ ID NO: 142308 - DNA, 3420 bp, Artificial Sequence
  derived and/or modified sequence
gagctgactggcatctttagatggatggtcctcagtccagtccttccattttacaggcgaggaggcggaagcttggggaggctaagcgcgctgagctggcggcggagcggagcttccactagggctcccagtttccccgcaccgcgcccgccgtcctccgggccacccatcccacccgaacgcgccaccgctctagcccgcgctccagcccgcgcgtcaccgacgcccgcggcctctcccacctctaagttccaggaagctctcggcctctagctgaccgcgttgctgctgagcttccctggggagaaggcgccgaggtgcccggtgcgggccgaggcagggctgggcctcgcgggcagcaggcggaagaaggaagggcggtggggcaggtcccggctgcgcggggcagttgtgcgcacttgggttcttcacgcgggacacacgtggaacgccgacccctgcgcccctggccgctggcaactggcaaggccgggaacagaaagtgtagggacagaagagcgctggagtcttccccgggagggagcccggggctgcagcccaggggcggggagcggggcggggctgggaaagttgagtactggtcgctcagggccgggctccgccggagtgcccggcgcagaaaccgtaaaaggctggagcgggcggggtaggtgtggctctgtgtgcgtgacctgagccccggtcccagtccctgtagtctcctgcggccgcggcctctcagccatgggcgccgtctggtccgccctgctggttggagggggtctggccggagcacttttcgtttggctgctgcggggcggccctggcgacaccgggaaggacggggatgcggagcaggagaaagacgcccctcttgggggagctgcgattccgggaggccatcagagtggcagcagcggactgagccctggaccttccgggcaggagctggtcaccaaaccagagcatcttcaagaaagcaatggacatttgatttctaagaccaaagaccttggtaaactgcaagcagcatcatggagattgcagaatccttccagggaagtctgtgacaattcaagagaacatgttccttctggacagtttccagacacagaagctccagctacctctgagaccagtaactctaggagttactctgaagtttcaagaaatgaaagccttgaatctcctatgggagaatggggattccaaaaaggacaagagatatctgctaaagcagctacatgttttgcagagaagttgccttctagcaacctgctcaagaacagagctaaagaagaaatgagcctctctgatttgaacagtcaggaccgggttgaccacgaggagtgggaaatggtgcctaggcactcatcttggggggatgttggtgtgggtggcagtcttaaggctccagtgttaaacctaaaccagggaatggacaatggaagaagcactttggtggaagcaagaggtcagcaagtgcatgggaaaatggaaagggtagcagtgatgcctgcagggtctcagcaagttagtgtcaggttccaggtccattatgtcacaagcactgatgtgcaattcattgcagtaactggagaccatgagtgtcttgggagatggaacacttacatcccactccactataacaaggatgggttctggtctcattccattttcctgcctgcagatacagtggtggagtggaagtttgtgttggtagagaatgggggagttacccgctgggaagaatgcagcaatagattcctagaaactggccatgaggataaagtggttcacgcatggtgggggattcactgattcagtttgcaaagtaatggagaagctgtagaacaatgtggaagaggctgaggttgtggaacacactgaataaaataaaggcagtgtgactccaaattcagccatctgaattgtttaaatttgctagtggattttgtctaatgtgcagaaatatatatgtctaatgtgcagaaatatatatgtgtgtatgtgtgtatatatatgcacacacacacagataatgcttccagtgaatgtgaacttcttttccctgtggcactgattgacagacttgtgctgatccattattactttagggcttgattctcttggggagtgacttggctaagcttcaggtgtaaactgtggtcacggagcaaaaacattaaccagctgcccagggttcaagcttgagcctttaggtgatctttaaactatggtagtaaaataagcctcactcaaacatagctgacttcctattggtacagcttgaaaagcactttttactacatacacattttatgcttaaaaagttaacatgatacgaaactgtgattagaaaatatctggtctggatgtgattagtaaggatacaagataatgttctaagactgcctaatgctttttgtttgattttcatctgccaggcgttgttatgtgctatgagggtagcaagtacgtctttgtcttaatgatctaaggctggtgtagaaacaaagggcctaatgagaaccaatcatcatggaagtcagttgcgggggcagcccataaggaaagggaaagtgagtggggttgggcataggctgagtgaggtggcctgaatgacacctcttagaggactgtgaagtacaggcacagcccgactgcagggagggatgcacccatcatttacccatgggagcatctgtaggaccatctctctcccacttcttctcccctcccccaccgcatctggccagatggactgtcctacagcaatcgtttccatctgtcaccctcttccctctcctttcataccagtcactatcttgggtaacaaatttatacaggacagtggtacagaaatacatctttgctctgagaatacagcaaatattaacttaaattattataactgaacaaataataaaacctgaattttaatatcttcatttgatgtctgaattatttgtctaaattttagtatcacaatagcctagatgtaaaataaaatacaaatattttcctccactaataagagacatatacagaaaagcaaacatcaaaaggtacagaagacatgaagattctgtttttctcctccctttggagaaaaagttgacaatatttattctcaaagttcacctttgactggagggaaattcagcacgcctgtacttgaaaatgaattcttacatgttaaaataacttttaataagtttaacatctatcagtgaaataatgtttaatccttttaaacagatggtctttgctgaaaagaataaacccaactgaaaatagcattagaaagtacttaaaagaactatgtttgacagtttttggctcatagcacttttatgttaaattcatgtatactgtttacagacttcataatgaattttatattgtaccagtaagctc

SEQ ID NO: 142309 - DNA, 1484 bp, Artificial Sequence
  derived and/or modified sequence
aagctagggccaccatggcggaccgcaggcggcggctccggccggggacgttggccccggtgcgcgagggcgtgaactgcaggtccagctcttatcaaaggtgctggaagtgcttgatcctgaccggaagctggaggacacatgggcttattgtcaggacaccaggaaaggaatgaaggaacccacgaagcttttaaaaaaacattctacccaagtctacctgggaccttccaagaagacgtctgtgtcaaacgcaggccaatggctttatgaagaaaagccacataaaatggatttgctccatgaaaatggtcctcgtcctggtcttcatgaaaatgtatgcaaagcagttagtgacttctgcaagtgggttactacttttggaatttcggacatcgatgaagagttcatcttgaaacagtttgacattgactatgagaccaaaccaagccatgatgcgctccacacgatgaagctaaatcaggttcctctggagctaaagcgtagtgtggggctcagtaaactgcaggagacagagttcttccagaaactaggctatgagaggaaactccagaaaccacagagcatcttcaagaaagcaatggacatttgatttctaagaccaaagaccttggtaaactgcaagcagcatcatggagattgcagaatccttccagggaagtctgtgacaattcaagagaacatgttccttctggacagtttccagacacagaagctccagctacctctgagaccagtaactctaggagttactctgaagtttcaagaaatgaaagccttgaatctcctatgggagaatggggattccaaaaaggacaagagatatctgctaaagcagctacatgttttgcagagaagttgccttctagcaacctgctcaagaacagagctaaagaagaaatgagcctctctgatttgaacagtcaggaccgggttgaccacgaggagtgggaaatggtgcctaggcactcatcttggggggatgttggtgtgggtggcagtcttaaggctccagtgttaaacctaaaccagggaatggacaatggaagaagcactttggtggaagcaagaggtcagcaagtgcatgggaaaatggaaagggtagcagtgatgcctgcagggtctcagcaagttagtgtcaggttccaggtccattatgtcacaagcactgatgtgcaattcattgcagtaactggagaccatgagtgtcttgggagatggaacacttacatcccactccactataacaaggatgggttctggtctcattccattttcctgcctgcagatacagtggtggagtggaagtttgtgttggtagagaatgggggagttacccgctgggaagaatgcagcaatagattcctagaaactggccatgaggataaagtggttcacgcatggtgggggattcactgattcagtttgcaaagtaatggagaagctgtagaacaatgtggaag

SEQ ID NO: 142310 - protein, 472 aa, Artificial Sequence
  derived and/or modified sequence
MATKCGNCGPGYSTPLEAMKGPREEIVYLPCIYRNTGTEAPDYLATVDVDPKSPQYCQVIHRLPMPNLKDELHHSGWNTCSSCFGDSTKSRTKLVLPSLISSRIYVVDVGSEPRAPKLHKVIEPKDIHAKCELAFLHTSHCLASGEVMISSLGDVKGNGKGGFVLLDGETFEVKGTWERPGGAAPLGYDFWYQPRHNVMISTEWAAPNVLRDGFNPADVEAGLYGSHLYVWDWQRHEIVQTLSLKDGLIPLEIRFLHNPDAAQGFVGCALSSTIQRFYKNEGGTWSVEKVIQVPPKKVKGWLLPEMPGLITDILLSLDDRFLYFSNWLHGDLRQYDISDPQRPRLTGQLFLGGSIVKGGPVQVLEDEELKSQPEPLVVKGKRVAGGPQMIQLSLDGKRLYITTSLYSAWDKQFYPDLIREGSVMLQVDVDTVKGGLKLNPNFLVDFGKEPLGPALAHELRYPGGDCSSDIWI

SEQ ID NO: 142311 - DNA, 1419 bp, Artificial Sequence
  derived and/or modified sequence
atggctaccaaatgcgggaattgtgggcccgggtactcaacccccctcgaagcgatgaaaggccccagagaggagatcgtttacctcccatgcatttatagaaacactgggaccgaagccccagactaccttgccactgtcgacgtagacccaaagtccccccagtactgccaagtgatccacagattacctatgccgaacttgaaggacgagttgcatcatagtggatggaatacatgctctagctgctttggggactcgaccaagtcacgcaccaagctggtcctgccatccctgatcagtagccgcatttacgtcgtcgatgtgggatctgagccgcgggcccccaagctgcacaaggtgatcgagccgaaggatatccatgctaaatgtgaactagcttttctgcacacgtcccactgtctggcgtctggggaggtgatgataagctctcttggagacgtcaaggggaacggcaagggcggctttgtcctgttagatggagagacatttgaagtgaaaggcacttgggaaagaccagggggcgctgcccctctcggctatgacttttggtatcagccccgtcataatgtgatgattagcaccgaatgggcagcccctaacgtgttaagagatgggttcaaccccgccgacgttgaggctggcctatacggctctcacttatacgtgtgggactggcagagacacgagatcgttcagacactgtcccttaaagacgggttgatacccctcgagatccgcttcctgcacaacccggacgctgcccagggatttgtaggctgcgctctgagctccacaattcaacgcttctataagaacgagggcggcacttggtcagttgaaaaggttattcaggtcccaccaaagaaggtgaaggggtggctcctgcccgaaatgcccggtctgattaccgacattctactgtcactggatgatcgcttcctttacttctccaactggctgcatggagacttgaggcagtacgacatctccgaccctcagagaccaagactgacagggcagcttttccttgggggctcgatagtgaaaggcggacccgtacaggttctcgaagatgaggaattaaagtcacagccggagcctcttgtggtgaagggaaagagggtggcaggagggcctcaaatgatccagctgagcctggacggaaagcgcttatacatcacgacctctctttatagtgcttgggataagcagttctatcctgacctgatccgtgaggggagtgttatgttgcaggtcgatgtagataccgtcaaagggggcctcaagctgaaccccaattttttggttgacttcggcaaggaacctctcggaccggccctggcccacgaattgaggtacccgggcggggactgctcaagcgacatttggatttag

SEQ ID NO: 142312 - DNA, 1227 bp, Artificial Sequence
  derived and/or modified sequence
atgcccaatctcaaggacgagttacaccattccggctggaatacttgctcctcctgctttggtgattcaactaaaagccggaccaagctcgtgctcccgtcacttatctcctctaggatatacgtggtggacgtaggctcagaaccaagggcgccgaaattgcataaagtgatagaaccgaaagatattcatgccaaatgtgagctcgcttttctccatacaagtcactgccttgcttcaggcgaagtgatgatcagcagcctgggcgatgtgaaaggcaacggcaagggcggttttgttctgctggatggcgagacatttgaagtcaagggtacgtgggaacgaccaggtggcgccgcccctctggggtatgatttttggtatcagccccgccacaacgtaatgattagcaccgaatgggcagcacctaacgtcctgagagacggttttaaccctgcggatgtggaagcaggattatatggctcacacttgtacgtgtgggattggcagcgacacgagatcgtgcagaccctatcacttaaagatggtctgatcccactggaaatacgctttttgcataatccggacgctgcgcaaggtttcgtgggctgcgctcttagctcgactattcagcgtttctataaaaacgagggcggcacgtggagcgtagaaaaggtgatccaggtgccccctaaaaaagtcaaaggatggctcctccccgaaatgcccgggcttataactgatatcctactgtcccttgatgatcgtttcctgtactttagcaactggctgcatggcgatctgcggcagtacgacatttctgatccccaaagaccgaggctcactggccaactgtttctggggggctcaatagtgaaagggggtcctgtacaggttcttgaagatgaggagttaaagagtcagcccgaacctcttgtggtgaaaggcaagcgagtcgccggcggacctcagatgatccaattgtctttagatgggaaaagattgtacatcaccacaagtctgtattctgcttgggacaagcagttctatccagacctgattagagaggggtccgtgatgttacaagtggacgttgacacggtcaaaggcggattaaagctgaacccaaattttctggttgactttgggaaagagcctttagggcccgccttagcacatgagttaaggtacccgggtggggactgttcgagtgatatttggatctag

SEQ ID NO: 142313 - DNA, 1419 bp, Artificial Sequence
  derived and/or modified sequence
atggccaccaagtgtggcaactgtggccctggctacagcacccccctggaggccatgaagggcccccgggaggagatcgtgtacctgccctgcatctacagaaacacaggaacagaggccccagactacctggccaccgtggatgtggaccccaagagcccccagtactgccaggtgatccaccggctgcccatgcccaacctgaaggatgagctgcaccacagcggctggaacacctgcagcagctgcttcggggacagcaccaagagcaggaccaagctggtgctgcccagcctcatcagcagccgcatctacgtggtggatgtgggcagcgagccccgggcccccaagctgcacaaggtgattgagcccaaggacatccacgccaagtgtgagctggccttcctgcacaccagccactgcctggccagcggggaggtgatgatcagcagcctgggagatgtgaagggaaatggcaagggcggctttgtgctgctggatggagagacctttgaggtgaagggcacctgggagaggcctgggggcgccgcccccctgggctatgacttctggtaccagcccaggcacaacgtgatgatcagcacagagtgggccgcccccaacgtgctgagagatggcttcaacccagcagatgtggaggccggcctgtatggcagccacctgtatgtgtgggactggcagagacatgagatcgtgcagaccctgagcctgaaggatggcctcatccccctggagatccgcttcctgcacaacccagatgctgcccagggctttgtgggctgtgccctgagcagcaccatccagcgcttctacaagaatgaaggaggcacctggagcgtggagaaggtgatccaggtgccccccaagaaggtgaagggctggctgctgcctgagatgcctggcctcatcacagacatcctgctgagcctggatgaccgcttcctgtacttcagcaactggctgcatggagacctgcggcagtatgacatcagtgacccccagaggccccggctgaccggccagctgttcctgggcggcagcatcgtgaagggcggccctgtgcaggtgctggaggatgaggagctgaagagccagcctgagcccctggtggtgaagggcaagagggtggccggcggcccccagatgatccagctgagcctggatggcaagaggctgtacatcaccaccagcctgtacagcgcctgggacaagcagttctacccagacctgatccgggagggctctgtgatgctgcaggtggatgtggacacagtgaagggcggcctgaagctgaaccccaacttcctggtggactttgggaaggagcccctgggccctgccctggcccacgagctgcgctacccaggaggagactgcagcagtgacatctggatctag

SEQ ID NO: 142314 - DNA, 1227 bp, Artificial Sequence
  derived and/or modified sequence
atgcccaacctgaaggatgagctgcaccacagcggctggaacacctgcagcagctgcttcggggacagcaccaagagcaggaccaagctggtgctgcccagcctcatcagcagccgcatctacgtggtggatgtgggcagcgagccccgggcccccaagctgcacaaggtgattgagcccaaggacatccacgccaagtgtgagctggccttcctgcacaccagccactgcctggccagcggggaggtgatgatcagcagcctgggagatgtgaagggaaatggcaagggcggctttgtgctgctggatggagagacctttgaggtgaagggcacctgggagaggcctgggggcgccgcccccctgggctatgacttctggtaccagcccaggcacaacgtgatgatcagcacagagtgggccgcccccaacgtgctgagagatggcttcaacccagcagatgtggaggccggcctgtatggcagccacctgtatgtgtgggactggcagagacatgagatcgtgcagaccctgagcctgaaggatggcctcatccccctggagatccgcttcctgcacaacccagatgctgcccagggctttgtgggctgtgccctgagcagcaccatccagcgcttctacaagaatgaaggaggcacctggagcgtggagaaggtgatccaggtgccccccaagaaggtgaagggctggctgctgcctgagatgcctggcctcatcacagacatcctgctgagcctggatgaccgcttcctgtacttcagcaactggctgcatggagacctgcggcagtatgacatcagtgacccccagaggccccggctgaccggccagctgttcctgggcggcagcatcgtgaagggcggccctgtgcaggtgctggaggatgaggagctgaagagccagcctgagcccctggtggtgaagggcaagagggtggccggcggcccccagatgatccagctgagcctggatggcaagaggctgtacatcaccaccagcctgtacagcgcctgggacaagcagttctacccagacctgatccgggagggctctgtgatgctgcaggtggatgtggacacagtgaagggcggcctgaagctgaaccccaacttcctggtggactttgggaaggagcccctgggccctgccctggcccacgagctgcgctacccaggaggagactgcagcagtgacatctggatctag

SEQ ID NO: 142315 - DNA, 1419 bp, Artificial Sequence
  derived and/or modified sequence
atggccaccaagtgcggcaactgcggccccggctacagcacccccctggaggccatgaaaggcccacgggaggaaattgtatatctgccctgcatctacagaaataccgggactgaagcccctgattacttggctactgtggacgtcgacccgaaatcccctcagtattgtcaggtcatacaccgcttgccaatgcctaatctgaaagatgagctgcaccacagcggttggaacacttgctcaagttgctttggcgatagcaccaagtcaaggaccaagctagtgctgccatctcttatctcctcccgtatatatgtcgtcgacgtggggtctgagcctcgggcccctaaattgcacaaggttattgagccaaaagacatccacgccaagtgtgagctggcatttctgcatacttcacattgcctggccagcggagaggtgatgatctcaagcctgggcgacgtaaagggaaacggtaagggtggatttgtgttgctagatggcgaaacttttgaagtgaaggggacttgggagaggccaggtggggcagctcctctggggtatgatttctggtaccagcctagacacaacgttatgatctccacagaatgggcagcgcccaacgtactgcgcgacgggttcaatcctgccgatgtcgaggccggactgtacggatcccacctgtatgtctgggactggcagcgccatgaaatcgtccaaacactaagcctgaaggacggccttatacctctggagatccgctttctccacaaccctgatgcagcacagggcttcgtaggttgtgcgttatcatctaccatccaacgcttttacaagaacgagggtggcacatggtcagtcgagaaagtgatccaagtgccaccgaaaaaggtgaaggggtggctcctccctgagatgcccggactcattactgatatcctactgtctctagacgacagattcctgtacttttcaaactggttacacggggaccttcgccagtacgacatctcagatccccaacgacctaggcttactggccagctgttcctgggcggtagcatcgtgaaggggggcccggtccaagttttagaggacgaagagttgaaaagtcagccggagcccttagtggttaaagggaaacgcgttgccggaggtcctcagatgatccaactgtcactggacggaaagagattgtatataaccactagtctttacagcgcctgggataagcagttttacccagatctaattcgcgaaggatcggtcatgctgcaggttgacgtggataccgtgaaggggggcctcaaactgaacccaaacttcctggtagatttcggcaaggagcccctgggaccagccctcgcccacgagctcagatacccaggcggagactgttcctctgacatctggatctag

SEQ ID NO: 142316 - DNA, 1227 bp, Artificial Sequence
  derived and/or modified sequence
atgcccaacctgaaggacgagctgcaccacagcggctggaacacctgttcttcctgcttcggggatagcactaagtcaagaacgaaactcgtgcttccaagcctgatctccagtagaatttacgtggtagatgtgggatcagagccaagggctccgaaactccacaaggtcatcgaaccaaaagatatccatgccaagtgcgagctggcgtttctgcacacgtctcactgtctggctagtggggaagtcatgattagcagcttgggagatgtaaaaggcaatggcaaaggcggattcgttctcttggacggggagacctttgaagtgaagggaacttgggaaaggcctggcggagccgcacctctggggtacgacttctggtatcagccacgccacaacgtcatgatcagcactgagtgggcggcaccaaatgtacttcgcgacgggtttaatcccgcagatgtggaagccggactctacggatcacacttgtatgtgtgggactggcagagacacgaaattgttcagacgttatcattaaaggatggactgattcccctggagatccggttcctccataatcccgatgctgctcagggctttgttgggtgtgccctgtcctccacgatccagcgtttttacaagaatgaggggggtacttggtccgttgagaaggtcatccaagttcccccaaaaaaagtgaaaggctggctcctccccgaaatgcccggcctgatcactgatattctgctgtcactggatgaccggttcttatatttctcaaactggctccacggcgacctcagacagtatgacatcagcgatccccaaagacccagactcactggtcagctctttctgggcggtagcatcgtcaaaggaggaccagtgcaggtgctggaggatgaagagttgaaatctcagccagaaccacttgtagttaaaggtaagagggtggctggaggaccccagatgatacagctctccctcgatggcaagaggctctacatcaccacatccctttactctgcttgggataaacagttctatccagacctgattcgggaggggtcagttatgctccaggtcgacgttgataccgtaaaaggcggtcttaagcttaatccgaactttctggtcgattttggcaaagagccgttgggaccagcattggctcatgagctgagataccccggtggagattgctcttctgatatttggatctag

SEQ ID NO: 142317 - DNA, 1419 bp, Artificial Sequence
  derived and/or modified sequence
atggcgaccaaatgtggaaattgcggcccagggtactccacccccctcgaggccatgaagggaccgcgagaggagatcgtgtacctaccttgcatttacagaaatacagggacagaagcccctgactaccttgcaacagtcgatgtggacccgaaaagtccccagtactgtcaagtaattcacagactccccatgccgaacttgaaggatgagcttcaccacagcgggtggaacacatgctcaagttgttttggagactccacgaagagtagaacaaaactggttcttccgtccctgatttcatctcgaatctatgtcgtcgacgttggctcagagcctagagctcctaaacttcataaagtcatcgagcccaaagatatacatgccaaatgtgaactggcgttcttacacacctcccattgcctggcctctggggaggtcatgatctcatccctcggcgacgtgaagggcaacggcaaaggcggatttgtgttactggacggcgagacatttgaggtcaagggaacttgggagcggcctgggggagctgcccctctgggctatgacttttggtatcagcccaggcataacgtcatgatctccaccgagtgggctgctccaaatgtcctgcgggacgggttcaatccagcagatgtggaggcaggcttatatggctctcatttatacgtgtgggattggcagaggcacgagattgtccagaccctgtccctgaaggatggactcatccctttagagatcagatttcttcacaaccccgatgctgcccagggcttcgtgggatgtgcgctctcaagcacaattcagcggttctacaagaacgagggcggaacttggtcagtcgagaaggtgatccaggtgcctccaaagaaagtgaaaggttggctgctgcctgagatgccaggcctgatcacagatatccttctttccctcgatgatagattcctctacttcagcaactggcttcacggagacttgcgtcagtatgatatctccgatccacaacggccaagactgaccggccaactttttctcggcggaagcatcgtgaaaggaggccctgtgcaggtacttgaggatgaagagttgaaatcacagcctgaacccctcgtcgtgaaaggcaaacgggtggctggaggcccacaaatgattcagttgtcacttgacggcaagcggctctacatcacgacatccctgtattcagcttgggataagcagttttacccggatttaatcagggaggggagcgtgatgctacaggtggacgtagacacagtgaaaggagggctgaagctaaaccctaatttcctggtggacttcggtaaagaaccactgggaccggctctcgcccacgaactccggtatcctggcggtgattgtagctcagacatctggatctag

SEQ ID NO: 142318 - DNA, 1227 bp, Artificial Sequence
  derived and/or modified sequence
atgccaaatctgaaagacgaacttcaccactctggctggaacacatgcagttcttgctttggagactctacgaagagcaggactaaactggtattgcccagtttgatttcatcccgcatctatgtggtcgatgtcggcagcgagcccagggctcccaaactgcacaaagttatcgagccgaaggatatccatgcgaaatgcgaactcgcatttctccacacttcccattgcctggcatccggggaagtaatgatctctagcttaggggacgttaaggggaatggaaaaggcggatttgtgctccttgacggcgaaacatttgaagttaaaggaacgtgggaacgcccaggaggagctgcccctctggggtatgacttctggtatcagcctagacacaacgtgatgattagtaccgagtgggccgcaccgaacgtcttacgcgatggcttcaatcctgctgacgtggaggcaggtctatacggctctcatctttacgtgtgggactggcagaggcacgagatagtacaaaccctgtctttaaaggacggcctcatcccccttgaaattagattccttcacaatcctgatgccgcacaggggttcgtggggtgcgcgctcagctctactatccaacggttctataagaatgagggcggaacctggagcgtggagaaggtaattcaggtgccccctaagaaagtgaagggttggctattacctgaaatgcctgggctcattacagacatcctgctgtctctcgacgaccgcttcctgtacttttcaaactggctccacggtgatctccgtcaatatgacatctcggacccccaaagacccagactgacagggcagctgttcctgggcggatccattgtaaagggtggcccagtgcaggtcttagaggacgaagagctgaaaagtcagccggaaccactggtcgtgaagggtaagagagtcgccggtgggccacagatgatccagctctctttggatggcaaacggctgtacattacaacttcgctgtatagcgcttgggataaacagttttaccccgacctgatcagggagggatcagttatgctgcaagtcgacgtcgacactgttaagggagggctcaagctgaaccctaattttctggtagactttggaaaagagccgcttgggcctgctcttgcccatgagctgaggtaccctgggggagactgttccagcgacatatggatctag

SEQ ID NO: 142319 - DNA, 1419 bp, Artificial Sequence
  derived and/or modified sequence
atggccaccaagtgcggcaactgcggccccggctacagcacccccctggaggccatgaagggccccagagaggagatcgtgtacctgccctgcatctacagaaacaccggcaccgaggcccccgactacctggccaccgtggacgtggaccccaagagcccccagtactgccaggtgatccacagactgcccatgcccaacctgaaggacgagctgcaccacagcggctggaacacctgcagcagctgcttcggcgacagcaccaagagcagaaccaagctggtgctgcccagcctgatcagcagcagaatctacgtggtggacgtgggcagcgagcccagagcccccaagctgcacaaggtgatcgagcccaaggacatccacgccaagtgcgagctggccttcctgcacaccagccactgcctggccagcggcgaggtgatgatcagcagcctgggcgacgtgaagggcaacggcaagggcggcttcgtgctgctggacggcgagaccttcgaggtgaagggcacctgggagagacccggcggcgccgcccccctgggctacgacttctggtaccagcccagacacaacgtgatgatcagcaccgagtgggccgcccccaacgtgctgagagacggcttcaaccccgccgacgtggaggccggcctgtacggcagccacctgtacgtgtgggactggcagagacacgagatcgtgcagaccctgagcctgaaggacggcctgatccccctggagatcagattcctgcacaaccccgacgccgcccagggcttcgtgggctgcgccctgagcagcaccatccagagattctacaagaacgagggcggcacctggagcgtggagaaggtgatccaggtgccccccaagaaggtgaagggctggctgctgcccgagatgcccggcctgatcaccgacatcctgctgagcctggacgacagattcctgtacttcagcaactggctgcacggcgacctgagacagtacgacatcagcgacccccagagacccagactgaccggccagctgttcctgggcggcagcatcgtgaagggcggccccgtgcaggtgctggaggacgaggagctgaagagccagcccgagcccctggtggtgaagggcaagagagtggccggcggcccccagatgatccagctgagcctggacggcaagagactgtacatcaccaccagcctgtacagcgcctgggacaagcagttctaccccgacctgatcagagagggcagcgtgatgctgcaggtggacgtggacaccgtgaagggcggcctgaagctgaaccccaacttcctggtggacttcggcaaggagcccctgggccccgccctggcccacgagctgagataccccggcggcgactgcagcagcgacatctggatctag

SEQ ID NO: 142320 - DNA, 1227 bp, Artificial Sequence
  derived and/or modified sequence
atgcccaacctgaaggacgagctgcaccacagcggctggaacacctgcagcagctgcttcggcgacagcaccaagagcagaaccaagctggtgctgcccagcctgatcagcagcagaatctacgtggtggacgtgggcagcgagcccagagcccccaagctgcacaaggtgatcgagcccaaggacatccacgccaagtgcgagctggccttcctgcacaccagccactgcctggccagcggcgaggtgatgatcagcagcctgggcgacgtgaagggcaacggcaagggcggcttcgtgctgctggacggcgagaccttcgaggtgaagggcacctgggagagacccggcggcgccgcccccctgggctacgacttctggtaccagcccagacacaacgtgatgatcagcaccgagtgggccgcccccaacgtgctgagagacggcttcaaccccgccgacgtggaggccggcctgtacggcagccacctgtacgtgtgggactggcagagacacgagatcgtgcagaccctgagcctgaaggacggcctgatccccctggagatcagattcctgcacaaccccgacgccgcccagggcttcgtgggctgcgccctgagcagcaccatccagagattctacaagaacgagggcggcacctggagcgtggagaaggtgatccaggtgccccccaagaaggtgaagggctggctgctgcccgagatgcccggcctgatcaccgacatcctgctgagcctggacgacagattcctgtacttcagcaactggctgcacggcgacctgagacagtacgacatcagcgacccccagagacccagactgaccggccagctgttcctgggcggcagcatcgtgaagggcggccccgtgcaggtgctggaggacgaggagctgaagagccagcccgagcccctggtggtgaagggcaagagagtggccggcggcccccagatgatccagctgagcctggacggcaagagactgtacatcaccaccagcctgtacagcgcctgggacaagcagttctaccccgacctgatcagagagggcagcgtgatgctgcaggtggacgtggacaccgtgaagggcggcctgaagctgaaccccaacttcctggtggacttcggcaaggagcccctgggccccgccctggcccacgagctgagataccccggcggcgactgcagcagcgacatctggatctag

SEQ ID NO: 142321 - protein, 81 aa, Artificial Sequence [sequence omitted]

SEQ ID NO: 142322 - DNA, 246 bp, Artificial Sequence
  derived and/or modified sequence
atggcctaccacggcctgaccgtgcccctgatcgtgatgagcgtgttctggggcttcgtgggcttcctggtgccctggttcatccccaagggccccaacagaggcgtgatcatcaccatgctggtgacctgcagcgtgtgctgctacctgttctggctgatcgccatcctggcccagctgaaccccctgttcggcccccagctgaagaacgagaccatctggtacctgaagtaccactggccctag

SEQ ID NO: 142323 - DNA, 246 bp, Artificial Sequence
  derived and/or modified sequence
atggcttatcacggactcactgtgccgctgatcgtcatgtcggtgttttggggtttcgtagggtttctggtaccatggtttattccaaaaggacctaatcgaggtgtcattatcacgatgctagttacttgcagcgtctgctgctatctgttctggctgattgccatattagcacagctcaaccctctctttggtcctcagctgaaaaatgagacgatctggtatttgaaatatcattggccatag

SEQ ID NO: 142324 - DNA, 246 bp, Artificial Sequence
  derived and/or modified sequence
atggcttatcacgggttgaccgtgccgctgatcgtcatgagtgtgttctggggctttgttggcttcctggtgccctggtttatccccaaaggaccaaaccgaggtgtgattataaccatgctcgtcacctgcagtgtgtgctgttacctgttctggctgattgccatcctggcccaactgaaccccttgttcgggccccagctgaagaatgagaccatatggtatctcaaatatcactggccttag

SEQ ID NO: 142325 - DNA, 246 bp, Artificial Sequence
  derived and/or modified sequence
atggcctaccacggcctgactgtgcccctgattgtgatgtctgtgttctggggctttgtgggcttcctggtgccctggttcatccccaagggccccaacagaggagtcatcatcaccatgctggtgacctgcagcgtgtgctgctacctgttctggctgattgccatcctggcccagctgaaccccctgtttggcccccagctgaagaatgagaccatctggtacctgaagtaccactggccctag

SEQ ID NO: 142326 - DNA, 246 bp, Artificial Sequence
  derived and/or modified sequence
atggcctaccacggcctgaccgtgcccctgatcgtgatgagcgtgttctgggggtttgtgggttttctagtcccatggttcatccctaagggaccaaatcgtggcgttattataacaatgctggtcacctgctccgtctgctgttacctcttttggctcatcgcaatcctggcccaactgaaccctttattcggaccgcagctgaagaatgagacgatatggtatctaaagtaccattggccttag

SEQ ID NO: 142327 - DNA, 246 bp, Artificial Sequence
  derived and/or modified sequence
atggcctaccacggcctgaccgtgcccctgatcgtgatgagcgtgttctggggattcgtgggttttttagtgccttggttcattccaaaaggaccaaatcggggagtgatcattactatgctcgtcacgtgcagtgtttgctgttacttattctggttgatagcaattctggctcaattgaacccactgtttggtccccagctgaaaaatgagacaatctggtacctaaagtaccactggccatag

SEQ ID NO: 142328 - DNA, 246 bp, Artificial Sequence
  derived and/or modified sequence
atggcctaccacggattgaccgtcccactgatcgtaatgtcagttttttggggcttcgtgggctttctagtgccgtggttcattccaaaaggcccaaatcgaggggtcatcatcactatgcttgtaacatgttcagtctgctgctaccttttctggctcatcgctattttggcccaacttaacccccttttcgggccacagctgaagaacgagacaatttggtacctcaaataccactggccatag

SEQ ID NO: 142329 - DNA, 246 bp, Artificial Sequence
  derived and/or modified sequence
atggcgtaccacggcctgaccgtaccacttatcgtgatgtccgtgttctggggttttgtgggcttcctggtcccatggtttatccctaaggggccaaaccgcggtgtgattatcaccatgctcgtcacctgtagtgtctgctgctatttgttttggctgattgctatcctggctcagctgaatcccctgttcggtccacagcttaagaatgagacaatctggtaccttaagtatcactggccttag

SEQ ID NO: 142330 - DNA, 502 bp, Artificial Sequence
  derived and/or modified sequence
ggggtaggggttggcgctcaggcggcgaccatggcgtatcacggcctcactgtgcctctcattgtgatgagcgtgttctggggcttcgtcggcttcttggtgccttggttcatccctaagggtcctaaccggggagttatcattaccatgttggtgacctgttcagtttgctgctatctcttttggctgattgcaattctggcccaactcaaccctctctttggaccgcaattgaaaaatgaaaccatctggtatctgaagtatcattggccttgaggaagaagacatgctctacagtgctcagtctttgaggtgactatgcttgtgacctttcttatcagtatggtcaggcagtcagagtttgccttgactttttctcacattttatggccattttaacacgtggcaagggcaagctgctgaatgcaaacacgatctgaagagcagaaataaaattggaacttaagccttagcttacctaaatctcattaagattcttttt

SEQ ID NO: 142331 - DNA, 1433 bp, Artificial Sequence
  derived and/or modified sequence
gggaggcggggcttgcacacgctggtcacgcggtcagctattgacacttcctggtgggatccgagtgaggcgacggggtaggggttggcgctcaggcggcgaccatggcgtatcacggcctcactgtgcctctcattgtgatgagcgtgttctggggcttcgtcggcttcttggtgccttggttcatccctaagggtcctaaccggggagttatcattaccatgttggtgacctgttcagtttgctgctatctcttttggctgattgcaattctggcccaactcaaccctctctttggaccgcaattgaaaaatgaaaccatctggtatctgaagtatcattggccttgaggaagaagacatgctctacagtgctcagtctttgaggtcacgagaagagaatgccttctagatgcaaaatcacctccaaaccagaccacttttcttgacttgcctgttttggccattagctgccttaaacgttaacagcacatttgaatgccttattctacaatgcagcgtgttttcctttgccttttttgcactttggtgaattacgtgcctccataacctgaactgtgccgactccacaaaacgattatgtactcttctgagatagaagatgctgttcttctgagagatacgttactctctccttggaatctgtggatttgaagatggctcctgccttctcacgtgggaatcagtgaagtgtttagaaactgctgcaagacaaacaagactccagtggggtggtcagtaggagagcacgttcagagggaagagccatctcaacagaatcgcaccaaactatactttcaggatgaatttcttctttctgccatcttttggaataaatattttcctcctttctatggaaatctgggctcggtgtttgtaaagttcatttttataagcttttctatcgctacataatgcctttttaaaaaatgattttgtagtctaaacttaggttgagtatataaaccctgccatgtagcttgagatgcctgaaaagactggtaagtgcgtttcttaatcgttcagtaactatttgagtgcctactgcagccaaggcactggagggatcaaagatgtgtaaatttggagtccctgcaagttcacaagctatttggagagataaggttagtatacatagaactgtaatataaggttgtgttggagcattgtccttaaagatggtaccatggtgagcagttcaaggttacctgccagctgcagaacaaggcagcaaatgctcctgagatggaaccatcacagcctcagacataggactaaagaagtcaagagtgattaaaaagccaggggcaggagacagtaattttgtatttcagtagcaggcatctcgatacactaatttgagagctttattacttttaagaaattaaaaattaaaatgaacctaaattttca

SEQ ID NO: 142332 - protein, 1663 aa, Artificial Sequence
  derived and/or modified sequence
MTDRFWDQWYLWYLRLLRLLDRGSFRNDGLKASDVLPILKEKVAFVSGGRDKRGGPILTFPARSNHDRIRQEDLRKLVTYLASVPSEDVCKRGFTVIIDMRGSKWDLIKPLLKTLQEAFPAEIHVALIIKPDNFWQKQKTNFGSSKFIFETSMVSVEGLTKLVDPSQLTEEFDGSLDYNHEEWIELRLSLEEFFNSAVHLLSRLEDLQEMLARKEFPVDVEGSRRLIDEHTQLKKKVLKAPVEELDREGQRLLQCIRCSDGFSGRNCIPGSADFQSLVPKITSLLDKLHSTRQHLHQMWHVRKLKLDQCFQLRLFEQDAEKMFDWISHNKELFLQSHTEIGVSYQYALDLQTQHNHFAMNSMNAYVNINRIMSVASRLSEAGHYASQQIKQISTQLDQEWKSFAAALDERSTILAMSAVFHQKAEQFLSGVDAWCKMCSEGGLPSEMQDLELAIHHHQTLYEQVTQAYTEVSQDGKALLDVLQRPLSPGNSESLTATANYSKAVHQVLDVVHEVLHHQRRLESIWQHRKVRLHQRLQLCVFQQDVQQVLDWIENHGEAFLSKHTGVGKSLHRARALQKRHDDFEEVAQNTYTNADKLLEAAEQLAQTGECDPEEIYKAARHLEVRIQDFVRRVEQRKLLLDMSVSFHTHTKELWTWMEDLQKEMLEDVCADSVDAVQELIKQFQQQQTATLDATLNVIKEGEDLIQQLRSAPPSLGEPSEARDSAVSNNKTPHSSSISHIESVLQQLDDAQVQMEELFHERKIKLDIFLQLRIFEQYTIEVTAELDAWNEDLLRQMNDFNTEDLTLAEQRLQRHTERKLAMNNMTFEVIQQGQDLHQYITEVQASGIELICEKDIDLAAQVQELLEFLHEKQHELELNAEQTHKRLEQCLQLRHLQAEVKQVLGWIRNGESMLNASLVNASSLSEAEQLQREHEQFQLAIESLFHATSLQKTHQSALQVQQKAEVLLQAGHYDADAIRECAEKVALHWQQLMLKMEDRLKLVNASVAFYKTSEQVCSVLESLEQEYRRDEDWCGGRDKLGPAAEIDHVIPLISKHLEQKEAFLKACTLARRNAEVFLKYIHRNNVSMPSVASHTRGPEQQVKAILSELLQRENRVLHFWTLKKRRLDQCQQYVVFERSAKQALDWIQETGEFYLSTHTSTGETTEETQELLKEYGEFRVPAKQTKEKVKLLIQLADSFVEKGHIHATEIRKWVTTVDKHYRDFSLRMGKYRYSLEKALGVNTEDNKDLELDIIPASLSDREVKLRDANHEVNEEKRKSARKKEFIMAELLQTEKAYVRDLHECLETYLWEMTSGVEEIPPGILNKEHIIFGNIQEIYDFHNNIFLKELEKYEQLPEDVGHCFVTWADKFQMYVTYCKNKPDSNQLILEHAGTFFDEIQQRHGLANSISSYLIKPVQRITKYQLLLKELLTCCEEGKGELKDGLEVMLSVPKKANDAMHVSMLEGFDENLDVQGELILQDAFQVWDPKSLIRKGRERHLFLFEISLVFSKEIKDSSGHTKYVYKNKLLTSELGVTEHVEGDPCKFALWSGRTPSSDNKTVLKASNIETKQEWIKNIREVIQERIIHLKGALKEPLQLPKTPAKQRNNSKRDGVEDIDSQGDGSSQPDTISIASRTSQNTVDSDKDGNLVPRWHLGPGDPFSTYV

SEQ ID NO: 142333 - DNA, 4992 bp, Artificial Sequence
  derived and/or modified sequence
atgaccgatcgcttttgggaccaatggtacctctggtacttgcgactgctgcgattgctcgatcgcgggtccttccggaacgacgggctgaaggcgtcagacgtgctgcccatcttaaaagaaaaggtcgccttcgtgtccggggggcgcgacaagaggggagggcccatcctgacattccctgcaaggtcaaatcacgaccgaatccggcaggaggatcttaggaagctggttacatatctggcatcagttccgtccgaggacgtgtgtaagcggggcttcaccgtaatcatcgacatgaggggcagcaaatgggatctgatcaaacctcttctgaaaacccttcaagaagcctttcccgccgagattcatgtcgctctcataataaaaccagataatttttggcagaaacagaaaacaaacttcggatcatcaaagtttatctttgaaacgtccatggtctctgtcgaagggctgacgaaactggttgatccctcgcagttaactgaagagtttgatgggtccctggactacaatcatgaagagtggatcgagctccgactgagcctggaagagttctttaacagtgctgtacacctgctcagccggctggaggacttgcaggagatgctcgcgcgaaaggagtttcctgttgatgtggagggctccaggcggcttattgacgaacacacacagctgaaaaagaaggtgttaaaggctccggttgaggaactggaccgggaaggacagaggctcctgcagtgcatccggtgctcggatgggttcagcggtaggaactgcatccccggaagcgccgattttcaaagtctggtgcccaaaatcacctcccttcttgataaactccattccactaggcaacatctgcaccagatgtggcatgtgcgaaaactaaaattagatcagtgctttcagttacgcctgttcgagcaggacgcagaaaagatgttcgactggatctcacacaacaaggagctgtttctgcaatcccatacagagattggagtgtcatatcagtatgcactggacctacaaacacagcataaccattttgctatgaatagtatgaacgcatacgtgaacattaacaggatcatgtccgttgcatcccgcttatcagaagctggacattacgcaagtcaacaaatcaagcaaatttcaacccagctcgatcaggagtggaagagctttgccgcagccttggacgagcgatcaaccatactggcaatgtcggccgtgtttcaccaaaaagctgaacagtttctgtctggcgtggatgcctggtgtaaaatgtgtagcgagggggggctgcctagtgagatgcaggatcttgaactggccatccaccaccaccaaacactttacgaacaggtgacacaggcgtacactgaggtgtcccaggacgggaaagctctgcttgatgttctacagcgccctctttcccctggcaactctgagagtttgactgccaccgctaactacagtaaagctgtgcaccaggtgctggacgtcgtccatgaggtactgcaccatcaacgacgcctggaatctatctggcaacatcgtaaagtgaggctgcatcagcggctgcagctttgcgtttttcagcaggatgtgcagcaggtgctggattggattgagaaccatggtgaggcttttctgtcaaagcacaccggtgtgggaaagtctctgcatcgggctagagcactgcagaaaagacacgatgactttgaggaagtcgcacaaaacacttacaccaatgctgataagctcttggaagcggcagagcaactcgctcagacgggggaatgtgatcccgaggaaatatacaaagcagcaagacatctagaggtaagaatccaagactttgtgcggcgcgttgaacagaggaaattgctccttgatatgtctgttagcttccacacccatacgaaggagctgtggacttggatggaggaccttcagaaagagatgctcgaggacgtgtgcgccgactcggtggatgccgttcaggagctcatcaagcagttccagcagcagcagaccgctactctcgacgctacattaaatgtgataaaagaaggggaggatcttattcagcagctgcgatcggcaccccctagccttggagaaccaagcgaggcacgtgattccgctgtatccaataacaagacgccacactcaagcagcatcagtcacattgaaagtgtgctgcagcagttagacgacgctcaagtgcaaatggaggagctttttcacgaacggaaaattaagctagatatcttcctgcagctgcggatattcgagcaatataccatcgaggtcaccgcagagctggacgcatggaatgaggacctgctgagacagatgaatgactttaataccgaagacctgaccttggcagagcagaggctgcaaagacatactgagcgcaaactcgcaatgaacaatatgacgttcgaggtgatccagcaggggcaggacctgcaccagtatatcactgaggtgcaagcctctggaattgagctgatatgtgagaaggatatagacctggctgcccaagtgcaggaactcctcgagttcctgcatgaaaagcagcacgagctggagctgaacgctgagcagacgcacaagagactggagcaatgtttgcagcttagacacctccaagccgaggtgaagcaggtgctgggttggatacggaatggagaatcgatgcttaatgcttccttggtgaatgctagtagcctgagtgaagcggagcagttgcagagggaacacgaacaattccagctggctatcgagagtcttttccatgcaacgtcacttcaaaaaacacatcagtcagccctgcaagtgcaacagaaagcagaggtgttgctgcaggcgggtcattacgacgcagacgccatacgcgagtgtgctgagaaagtagctctgcactggcagcagctgatgctgaagatggaggaccgtctaaaactggtcaatgcttctgtggcattctacaaaacctcagagcaggtgtgctctgtgttagagtcgcttgagcaggagtaccggcgtgacgaggattggtgtggaggccgtgataagcttggtccagccgctgaaattgaccacgtcatccccctaatttccaagcacctggaacagaaggaggcctttctcaaagcctgcactctggccaggagaaacgccgaggtgttcctgaaatacatacatcggaacaacgtgtccatgcccagcgtggccagtcacacccggggacctgagcagcaggtgaaggccatacttagcgagctactccagcgagagaatagagtgctccacttctggaccctcaaaaagagaagactagaccagtgtcagcaatacgttgtgttcgaacgcagcgcaaagcaggctctcgattggattcaggaaactggggagttctatttgtctacacacacatctacgggcgaaacgaccgaggaaacccaggagcttcttaaagagtatggggaatttagagtgccggccaaacaaactaaggagaaagtgaaattactcatccagctcgctgactccttcgtagagaagggtcacattcacgctaccgaaatacgtaaatgggtgactaccgtggacaaacactatcgggatttcagcctgcggatgggaaagtaccgctactctctggagaaggcgctcggcgtaaacacagaagacaacaaggatctcgaactggatatcatccctgccagcttatcagaccgggaggtgaaactgcgggacgctaatcatgaggtcaatgaagaaaagagaaaaagcgcacggaagaaggagtttattatggccgaattgctacaaaccgaaaaagcctacgtgcgagatctgcatgagtgtcttgagacttatctctgggaaatgacgtcaggcgtagaagaaatcccacccggaatccttaataaggagcacatcatctttggcaatatccaggaaatctatgacttccacaacaacatatttctgaaagagctagagaagtacgaacagttgcccgaagacgtgggccattgtttcgtgacatgggccgacaagtttcagatgtatgtgacctattgtaagaataagcccgattctaatcagctcattcttgaacatgctggaaccttcttcgacgaaatacagcagcgccatggtctggcaaacagcatcagctcttatctaattaagcccgtccagaggatcacaaaatatcagctgctgctgaaggaactgctgacatgctgcgaggaagggaaaggcgagctcaaggatggcctggaggtgatgctgagcgtgcctaaaaaagcgaatgatgccatgcatgttagtatgctcgagggatttgacgaaaacctcgacgtccagggcgaactgattctccaggatgcttttcaggtttgggaccctaagagcttgatcaggaagggcagagaacgacacttatttctgttcgaaatctccctagtgtttagcaaggaaatcaaagattcctccggtcacacgaagtacgtgtacaaaaataaactcttaacatctgaactgggagttaccgagcacgtggaaggggatccatgtaagtttgcactctggtctgggcggaccccttcgtcagacaacaagaccgtgttgaaagcctctaacattgaaacgaagcaggagtggatcaagaacattagagaggtgatccaggagagaattatccatctgaagggcgcattgaaggagccattgcagctgccgaagacaccagctaaacaacgcaataactctaaacgcgatggggtcgaggatatagatagtcagggggacggctcgagccagcccgacacaatctcaatcgctagcaggactagtcagaacacggtggatagtgacaaagacggaaatctcgtgcctcgctggcaccttggcccaggagatccttttagcacctatgtttag

SEQ ID NO: 142334 - DNA, 6537 bp, Artificial Sequence
  derived and/or modified sequence
gtgtgggaggactggtggctgtctttgcaggcaggcatttgcttagagcaggctgtgtgcgagcccagcgtcaagtgattccggcctcctcgagtcagcggtggtgggatgaggctctgccgaggggactggctgtgaaggatgagttcagggtgggatgacggaccgcttctgggaccagtggtatctctggtatctccgcttgctccggctgctggatcgagggtcttttcggaatgatggtttgaaagcttctgatgtccttcctatcctaaaggaaaaggtggccttcgtgtctgggggtcgtgataagcgaggcggacccatcctgaccttccctgctcgcagcaatcatgacagaataagacaggaagacctgcggaaactcgtgacgtatttggccagcgtgccaagtgaggacgtgtgcaaacgtggcttcactgtcatcatcgacatgcggggctccaagtgggacctcatcaagcccctcctcaaaacgctgcaggaagcctttccagctgagatccatgtggccctcatcattaaacccgacaacttctggcagaaacagaagaccaactttggcagctccaaattcatctttgagacgagcatggtatctgtggagggcctcacaaagctggtggacccctcccagctgacggaggagtttgatggctccctggactacaaccatgaggagtggatcgaactgcggctctccctggaggagttcttcaacagcgccgtgcacctgctctcgcgcctcgaggacctccaggagatgctagcccggaaggagtttcctgtggatgtggagggctctcggcggctcattgacgaacacacacagctcaagaaaaaggtgctgaaggcccctgtggaggagctggaccgggaggggcagcggctgctgcagtgcatccgctgcagcgacggcttctcaggacgcaactgcatcccgggcagtgctgacttccagagcctggtgcccaagatcaccagtctcctggacaagctgcactccacccggcagcacctgcaccagatgtggcatgtgcgcaagctcaagctggaccagtgctttcagctgcggctcttcgagcaggatgctgagaagatgtttgactggataagccacaacaaggagttattcctccagagccacacggagatcggagtcagctaccagtacgcccttgacctccagacgcagcacaatcactttgccatgaactccatgaatgcctatgtcaacatcaaccgcatcatgtccgtggcttcccgcctctctgaggccggtcattatgcctcacaacaaatcaagcagatctccacccagctggaccaggagtggaagagcttcgctgctgccctggatgaacgcagcaccatcctcgccatgtctgctgtgttccaccagaaggctgagcagttcctgtcgggagtggatgcctggtgcaagatgtgcagtgaaggtggtctgccatccgagatgcaagacctagagctggcaatccaccaccaccagaccttgtatgagcaggtgacccaagcctacacagaggtcagccaggatggcaaagcactacttgatgtgctgcagcggcccctgagccctgggaactccgaatccctcacggccacagccaactactccaaggcagtgcaccaggtgctggacgtggtgcatgaggtgttacatcaccagcgacggctggagagcatctggcagcaccgcaaggtgcggctccaccagcggctgcagctctgcgtcttccagcaggatgtacagcaggtgttggactggattgaaaaccatggtgaggcctttctcagcaaacacactggagttgggaagtccctacatcgagcccgggccctgcagaagaggcatgatgactttgaagaggtggctcagaatacgtacaccaatgcggacaagctcctagaagcagcagagcagttggctcagacgggggaatgtgaccccgaggagatctacaaggcagctcgacacctggaggtgcgcatccaagacttcgtgcgcagggtggagcagcggaagcttctcctggacatgtctgtttccttccacacacacaccaaagagttgtggacatggatggaagaccttcagaaggagatgttggaggatgtctgtgcagattctgtggatgcagtccaggaactgatcaagcagttccagcagcagcagaccgccactctagatgccacactcaatgtcatcaaggaaggcgaagaccttatccagcagctcaggtcagcgcctccctccctcggggagcccagcgaggccagggactcggctgtgtccaacaacaaaacaccccacagcagctccatcagccacatcgagtcggtcctgcagcagcttgatgatgcccaggtgcagatggaggagctgttccacgagcggaagatcaagctggacatcttcctgcaactgcgcatctttgagcagtacaccatcgaggtgacagcagagctagacgcctggaatgaagacttgcttcggcagatgaatgacttcaacacagaggacctaaccctggcagaacagcggctgcagcgccacacagaacggaagctagccatgaacaacatgacctttgaggttatccagcagggacaggatctgcaccagtacatcacggaggtccaggcatcaggaattgagttgatctgtgaaaaagacattgatctggcagcccaggtgcaagagttattggaatttctccatgagaagcagcatgaattggagctcaatgcagagcagactcataagcggctagagcagtgcctccaattacgtcacctccaggctgaagtcaaacaggttctgggatggatccgcaatggagagtcaatgctcaacgccagcctggtcaatgccagctctttgtcggaagcagagcagctgcagcgggagcacgagcagttccaactggccatcgagtccctctttcatgccacttccttgcagaagacgcaccagagtgccctgcaggtacagcagaaagccgaggtgctgctccaggccggccactacgatgccgatgccatccgggaatgtgctgagaaggtggccctccactggcagcagctcatgctgaagatggaagaccggctaaaattggtcaatgcctctgtggccttttacaaaacttctgaacaggtgtgtagtgtcctggagagcttagagcaagaataccggagagatgaggactggtgtggtggacgagataagctggggccagcagcagagatcgaccatgtcattcccctcatcagcaaacatttggaacaaaaggaggcctttcttaaggcctgcaccctggctcggcggaatgctgaggtgtttctcaagtacatccacaggaacaacgtcagcatgcccagtgtcgccagccacactcggggacccgagcaacaagtgaaagccatcctgagtgagctcctgcagagggagaatcgcgtgctgcatttctggaccttgaagaagcggcggttagaccaatgccagcaatatgtggtgttcgagcgcagcgctaagcaggcgcttgactggatccaagaaacaggtgaattttacctctcaacacatacctccactggagagaccacagaggagactcaggaactgctgaaagaatatggggaattcagggtgcctgccaagcaaacaaaggagaaggtgaagcttctgattcagctggccgatagctttgtggaaaaaggccacattcatgccacggagataaggaaatgggtgaccacggtggacaagcactacagagatttctccctgaggatgggaaagtaccgatactcactggagaaagccctaggagtcaacacagaggataataaggacctggagctggatattatcccagcaagcctttcggatcgggaggtcaagctgcgggacgccaaccacgaagtcaatgaagagaagcggaagtcagcccggaagaaagaatttattatggctgaactactccagacagagaaggcttatgtaagggatttgcatgagtgcttagagacctacctgtgggaaatgaccagtggtgtggaggagatcccccctgggatcctcaataaagagcatatcatctttggcaacatccaagagatctacgatttccataacaacatcttcctcaaagagctggagaagtacgagcaactgcctgaggatgtgggacactgctttgttacctgggcagacaaatttcagatgtatgtcacctactgtaaaaacaagcctgattccaaccagcttatcctggagcatgcgggcaccttctttgatgagatacaacagcggcatggtctggccaactccatctcttcctacctaattaagcctgtccaaaggatcaccaaatatcaactgctcctgaaggaacttttaacttgctgtgaagaagggaaaggggagctcaaggatggcctggaggtgatgctcagtgtcccaaagaaagccaatgatgccatgcatgtcagcatgctggaagggttcgacgagaacctggatgtgcagggggagttgattctccaggatgcctttcaagtgtgggacccgaagtcgctgatccggaaggggcgggagcggcacttgttcctctttgagatctccttggtttttagcaaggagatcaaagattcttcaggacacacgaaatatgtttacaagaacaagctactgacctcagagctgggtgtgaccgagcacgtggagggcgatccctgcaaattcgccttgtggtctgggcgcaccccatcctcagacaataaaacagtgctgaaagcctccaacattgaaaccaagcaggagtggatcaagaacattcgagaagtgattcaagaaaggatcattcacctgaaaggagctttaaaggagccacttcagctccccaaaacaccagccaaacagaggaacaatagtaagagggatggagtggaggatattgacagccagggggatgggagcagccaaccagacaccatctccattgcttctaggacctctcagaacacagtggacagtgacaaggatggcaaccttgttcctcggtggcacctgggacctggagatcctttctccacttacgtttagcgcgcatcctgggacttgtccctgcagctcaccgggttagccgtggcaccgttgggacctcccaccaggactccaatcacccacctctcttgagacttctctggcagggctggtgtggggtgcagcctttgctcagagggcaacatgttccaagcaaaatctccccgcctgggccatgggctcaccctcggggctcccttcttctctactgggtgcaattcgaggttgctgagcttctctccaaagtctaaaatggtggggcagtagggacctgtgagaggcccaatggcccaatgtacttcccccagatcccactcagaacagcaggtacgcccaggctcctgctgccctagaggtctgcaacatgagtgaagaggttaattagagggacacacttatctctgaagtttttctccaggctgaacatttctattatcagtggcccctaatctggaaaaacccatcattctaatctagcttgtatccccacatcatgagaaagagggaagaagaagaagggatgatgtgtggtagagaagatgagggttaactttagcctttcccaaacactggcaacaaccacttcctcaacaatttttctatttgcttcagcctactcagattttttcaggtttttctagctcctccataacctcactccctcccgaggtctctggttcaaagaccaccctaccagcccctatttgcttcaggttatcctgttgagggtgggtgggaagagtgagaagatataaatgaaaaactggccacatgttgataattgttgaaactagatgatggtacgtggacattcattataccattctccccacttctgtatttgtttgcaatttttcataataaaaaagttttaaaagtcctccagtttccaacacactcaagagagagccccaaccccaaacacagagtttcatggaaaccccacaccaaggcaagaggcagagatgatgattccatttcatatatacactcattttctaactttttttaaaggcccactgctttattttcaatagattaaacctgatttctgagaggtcctgaagttgggcttatttccctggctgggttatgggggagggcagggtaaagggatccttaaaaaagtttacacttctatgtatctcacaatcttattgtgaggatgtgacttgttcagtgttctgaacttttcgaaggaatcgtgctctcaatgcaaagtgtcattctctggaattgcacctggctcaggaaaggactgtctttgtacttgaatttaaatccaatggagaactttaacacgggcatttgcatgactgagaattgctgctgtcttttttccgtatgtcactttcttgaatgtgttctaataaaatgattctaaagca

SEQ ID NO: 142335 - DNA, 4992 bp, Artificial Sequence
  derived and/or modified sequence
atgacagaccgcttctgggaccagtggtacctgtggtacctgcggctgctgcggctgctggaccggggcagcttcagaaatgatggcctgaaggccagtgatgtgctgcccatcctgaaggagaaggtggcctttgtgtctgggggccgggacaagaggggcggccccatcctgaccttccctgcccggagcaaccacgaccgcatccggcaggaggacctgaggaagctggtgacctacctggcctctgtgcccagtgaagatgtgtgcaagaggggcttcaccgtcatcatcgacatgaggggcagcaagtgggacctgatcaagcccctgctgaagaccctgcaggaggccttccctgctgagatccacgtggccctgatcatcaagccagacaacttctggcagaagcagaagaccaactttggcagcagcaagttcatctttgagacctccatggtgtctgtggagggcctgaccaagctggtggaccccagccagctgacagaggagtttgatggcagcctggactacaaccacgaggagtggattgagctgcggctgagcctggaggagttcttcaacagcgctgtgcacctgctgagccggctggaggacctgcaggagatgctggccaggaaggagttccctgtggatgtggagggcagccggcggctgattgatgagcacacccagctgaagaagaaggtgctgaaggcccctgtggaggagctggaccgggagggccagaggctgctgcagtgcatccgctgcagtgatggcttctctggaagaaactgcatccctggcagcgctgacttccagagcctggtgcccaagatcaccagcctgctggacaagctgcacagcacccggcagcacctgcaccagatgtggcacgtgaggaagctgaagctggaccagtgcttccagctgcggctgtttgagcaggatgctgagaagatgtttgactggatcagccacaacaaggagctgttcctgcagagccacacagaaattggagtgtcctaccagtatgccctggacctgcagacccagcacaaccactttgccatgaacagcatgaatgcctacgtgaacatcaaccgcatcatgtctgtggccagccggctgtctgaggccggccactacgccagccagcagatcaagcagatcagcacccagctggaccaggagtggaagagctttgctgctgccctggatgagaggagcaccatcctggccatgtctgctgtgttccaccagaaggccgagcagttcctgtctggagtggatgcctggtgcaagatgtgcagcgagggcggcctgcccagcgagatgcaggacctggagctggccatccaccaccaccagaccctgtatgagcaggtgacccaggcctacacagaggtgtcccaggacggcaaggccctgctggatgtgctgcagaggcccctgagccctggcaacagcgagagcctgacagccacagccaactacagcaaggctgtgcaccaggtgctggatgtggtgcatgaggtgctgcaccaccagaggcggctggagagcatctggcagcacaggaaggtgcggctgcaccagaggctgcagctgtgtgtgttccagcaggatgtgcagcaggtgctggactggattgaaaatcatggagaggccttcctgagcaagcacactggagtgggcaagagcctgcaccgggcccgggccctgcagaagagacatgatgactttgaggaggtggcccagaacacctacaccaatgctgacaagctgctggaggccgctgagcagctggcccagacaggagaatgtgaccctgaggagatctacaaggccgcccggcacctggaggtgcgcatccaggactttgtgagaagagtggagcagaggaagctgctgctggacatgtctgtgtccttccacacccacaccaaggagctgtggacctggatggaggacctgcagaaggagatgctggaggatgtgtgtgccgacagcgtggatgctgtgcaggagctgatcaagcagttccagcagcagcagacagccaccctggatgccaccctgaatgtcatcaaggagggggaggacctgatccagcagctgcggagcgccccacccagcctgggggagcccagcgaggcccgggacagcgctgtgagcaacaacaagaccccccacagcagcagcatcagccacatcgagagcgtgctgcagcagctggatgatgcccaggtgcagatggaggagctgttccacgagaggaagatcaagctggacatcttcctgcagctgcgcatctttgagcagtacaccatcgaggtgacagctgagctggatgcctggaatgaagacctgctgcggcagatgaatgacttcaacacagaggacctgaccctggccgagcagaggctgcagaggcacacagagaggaagctggccatgaacaacatgacctttgaggtgatccagcagggccaggacctgcaccagtacatcacagaggtgcaggccagcggcatcgagctgatctgtgagaaggacatcgacctggccgcccaggtgcaggagctgctggagttcctgcacgagaagcagcacgagctggagctgaatgctgagcagacccacaagaggctggagcagtgcctgcagctgcggcacctgcaggccgaggtgaagcaggtgctgggctggatcagaaatggagagagcatgctgaatgccagcctggtgaatgccagcagcctgtctgaggccgagcagctgcagcgggagcacgagcagttccagctggccatcgagagcctcttccacgccaccagcctgcagaagacccaccagagcgccctgcaggtgcagcagaaggccgaggtgctgctgcaggccggccactatgatgctgatgccatcagagaatgtgccgagaaggtggccctgcactggcagcagctgatgctgaagatggaggaccggctgaagctggtgaatgcctctgtggccttctacaagaccagcgagcaggtgtgcagcgtgctggagagcctggagcaggagtacagaagagatgaggactggtgtggcggccgggacaagctgggccctgctgctgagattgaccacgtgatccccctcatcagcaagcacctggagcagaaggaggccttcctgaaggcctgcaccctggccaggagaaatgctgaggtgttcctgaagtacatccacaggaacaacgtgtccatgcccagcgtggccagccacacccggggccctgagcagcaggtgaaggccatcctgtctgagctgctgcagcgggagaacagagtgctgcacttctggaccctgaagaagaggcggctggaccagtgccagcagtatgtggtgtttgagaggtctgccaagcaggccctggactggatccaggagactggagagttctacctgagcacccacaccagcactggagagaccacagaggagacccaggagctgctgaaggagtatggagagttccgggtgcctgccaagcagaccaaggagaaggtgaagctgctgatccagctggccgacagctttgtggagaagggccacatccacgccacagagatcaggaagtgggtgaccaccgtggacaagcactacagagacttcagcctgaggatgggcaagtaccgctacagcctggagaaggccctgggcgtgaacacagaggacaacaaggacctggagctggacatcatcccagccagcctgagtgaccgggaggtgaagctgagagatgccaaccacgaggtgaatgaggagaagaggaagagcgccaggaagaaggagttcatcatggccgagctgctgcagacagagaaggcctacgtgcgggacctgcacgagtgcctggagacctacctgtgggagatgaccagcggcgtggaggagatccccccaggcatcctgaacaaggagcacatcatcttcggcaacatccaggagatctatgacttccacaacaacatcttcctgaaggagctggagaagtatgagcagctgcctgaagatgtgggccactgctttgtgacctgggccgacaagttccagatgtatgtgacctactgcaagaacaagccagacagcaaccagctgatcctggagcacgccggcaccttctttgatgagatccagcagagacatggcctggccaacagcatcagcagctacctgatcaagcctgtgcagaggatcaccaagtaccagctgctgctgaaggagctgctgacctgctgtgaggagggcaagggggagctgaaggatggcctggaggtgatgctgtctgtgcccaagaaggccaatgatgccatgcacgtgtccatgctggagggctttgatgagaacctggatgtgcagggcgagctgatcctgcaggatgccttccaggtgtgggaccccaagagcctcatcaggaagggccgggagcggcacctgttcctgtttgagatcagcctggtgttcagcaaggagatcaaggacagcagcggccacaccaagtatgtgtacaagaacaagctgctgaccagcgagctgggcgtgacagagcacgtggagggggacccctgcaagtttgccctgtggagcggccgcacccccagcagtgacaacaagacagtgctgaaggccagcaacatcgagaccaagcaggagtggatcaagaacatccgggaggtgatccaggagcgcatcatccacctgaagggggccctgaaggagcccctgcagctgcccaagaccccagccaagcagaggaacaacagcaagagagatggagtggaggacatcgacagccagggagatggcagcagccagcctgacaccatcagcatcgccagcaggaccagccagaacacagtggacagcgacaaggatggcaacctggtgccccgctggcacctgggccctggggaccccttcagcacctacgtgtag

SEQ ID NO: 142336 - DNA, 4992 bp, Artificial Sequence
  derived and/or modified sequence
atgaccgaccggttctgggaccagtggtacctgtggtacctgcggcttctgagactgcttgatcggggaagctttagaaacgatggcctgaaagccagcgacgtgctgccaatccttaaagagaaggtggcctttgtgtctggcggacgcgacaagcgaggcggacccatcttgacattcccagcaagaagcaaccacgacagaattcggcaggaagaccttagaaagctggttacctacctggctagcgttccaagcgaggatgtgtgcaagcggggatttacagtcatcatcgatatgcggggctctaaatgggatcttataaagcctctgctaaaaaccctgcaggaggctttccctgcggagatccatgtggctcttattattaaacccgataatttttggcaaaagcaaaaaaccaacttcggctcaagtaagttcatcttcgagacttctatggtatccgtggaagggctgactaagctcgtcgacccctcccagctgaccgaggagttcgacggttccctggattacaaccatgaggagtggatcgagctgagactgtccctcgaggaatttttcaacagtgccgtgcatctcttgtctcgccttgaagatctccaggagatgctggcccgaaaagagtttccagtggacgtcgagggctctaggaggctgattgacgagcatactcagttgaagaagaaggtactgaaggctccagttgaagagctggacagagaagggcagcggctgttacagtgcatcagatgctctgatgggttctctggccgcaattgcatcccaggctctgcagatttccagagtctggtgccaaagatcacgtctctgttggacaaattgcacagcacccggcagcacttacatcagatgtggcatgttcgaaagttgaagctggaccagtgttttcagctcagattgtttgagcaggatgcagagaaaatgtttgactggatctcacacaacaaagagttgttcctacagagtcacacagaaattggtgtcagttaccaatacgctcttgacctgcagacccaacataatcactttgcgatgaactctatgaacgcttatgttaatattaaccgcatcatgagcgtggcaagccggctgtctgaggcgggacactacgctagtcagcagatcaagcagattagcacccagctggaccaggagtggaagagctttgcggctgcgctggacgaacgctccacaatattagcaatgtctgccgtgtttcatcagaaagccgagcagttcctgtctggcgtggatgcatggtgcaagatgtgctctgaaggggggctgccgtcagagatgcaggacctagaactggcaatccatcatcatcagaccctgtacgagcaggttactcaggcgtatacggaagttagccaggacgggaaggccttgttggacgtgttgcagaggcctttgtctccgggcaattcagaatcactaactgccactgccaactatagtaaagctgtccatcaggtccttgacgttgtacacgaggtgctgcatcatcaaaggcgcctggaaagtatctggcagcatcgaaaggttcgactgcatcagcggctacaactttgcgtttttcaacaggatgtccaacaggtgctggactggatcgagaatcacggagaagcttttctgagcaagcacacaggtgtgggaaagtctttgcatagggcccgggctctgcagaaacgccacgatgattttgaagaggtagcccagaatacctacaccaacgccgataagctgttagaagccgcagaacagctggctcagacaggagagtgcgacccagaggagatatacaaagctgccagacaccttgaggtacgcatacaagacttcgtaagacgagttgaacagcgtaaactacttttggacatgtctgtgagttttcatacccatacaaaagagctgtggacctggatggaagatctgcagaaggagatgctcgaggatgtctgtgccgatagcgtggacgccgttcaggagctgattaagcagttccaacagcagcagactgccacactggacgctactctgaacgtgatcaaagaaggagaagatctaatccaacagctgcgttcagctccacctagcctcggtgaacctagcgaggctagggactccgccgtgagcaacaataaaacaccacactcgtccagtatcagccatattgaatccgttctgcaacagctggacgacgcccaggttcagatggaggaactctttcacgagaggaaaattaagctggacattttcctacaactgcgtatattcgagcagtataccatcgaggtgaccgcagaactggacgcatggaatgaagaccttctccgtcagatgaacgactttaataccgaggaccttacactggccgaacaacggcttcaaagacacacggagcgcaagttagctatgaacaacatgacgtttgaggtcattcagcagggccaagatttacaccagtatatcacagaagtgcaggcaagcggaatagagttaatctgtgagaaggacattgaccttgccgcacaggttcaggagttgctggagttcctgcacgaaaagcagcacgagcttgagcttaacgctgagcagactcacaagcggttagagcagtgtctccagctccgccacctgcaggcagaagtgaaacaagtcctcggctggataaggaacggcgagagcatgttgaatgctagtcttgtcaacgcatcctctctgtccgaagcagagcagctgcagagagaacatgagcagtttcagctggcaattgaatctcttttccacgcaacctcccttcaaaaaacccaccagagcgcgctccaagtacagcagaaggcggaagtgctactgcaggctggtcactatgacgcagacgccattagagaatgcgctgagaaggtggccctgcattggcagcaactcatgttaaaaatggaagaccgcctgaagcttgtgaatgcctcagttgcgttctacaagacctctgaacaggtctgtagcgtacttgaaagtctggaacaggaatacaggagagatgaggactggtgtggcgggagagataaactgggtcccgcagctgaaatcgaccatgttatacctctgatttccaagcacttggagcagaaagaggcattcctcaaggcatgtacattagcaaggcgcaacgcagaggtttttctaaagtacatccaccgcaataatgtgagcatgccttcagtcgcttcccacactcggggacctgagcagcaagttaaggccatcctgtccgagctgctgcagcgagagaatcgagtcctccacttctggacactgaaaaagcgtaggttggatcagtgtcaacagtacgtggtcttcgagcgatccgccaaacaagccctggactggattcaggagactggcgagttctatctcagtacacatacttcgaccggagagaccacagaggaaacccaggaactcctgaaggagtacggagagtttcgagtccccgctaaacaaacaaaagagaaggtgaaacttctgattcagctggctgactccttcgttgagaagggccatatccacgccactgaaatccggaagtgggtcacaacagtggataagcattatcgggatttttctctcaggatgggcaagtaccgctactccctcgagaaggcactgggcgtcaatacagaagataataaggatctggagctcgacatcattccagcctccttgtcggaccgtgaagtgaagctgagagacgcaaaccatgaagtgaacgaggagaaacgtaagagcgctcgaaagaaggagtttattatggcagagctcctccagactgagaaggcatatgtgcgcgatcttcatgaatgccttgaaacctatctctgggagatgacgtccggagtggaagagatcccccctggcatcctgaataaggaacatataatcttcggaaacatccaggagatctatgattttcacaacaatattttcctgaaggagttggaaaagtacgaacagcttccagaagatgtgggccactgcttcgtcacctgggccgacaaattccagatgtatgtcacttactgcaagaataagccagacagcaaccagctgattctggaacacgccggcacctttttcgacgagatccagcagagacatggccttgcgaactcaatttcctcttacctgatcaagcccgtgcagcgcattactaaataccagttactcctcaaagaactgttgacttgttgtgaggagggaaagggagaactaaaagacggacttgaggtcatgctgagtgtccccaaaaaggccaacgatgcgatgcacgtgtctatgcttgaggggtttgacgagaacctagacgtgcaaggtgagctcatcttgcaggacgccttccaagtttgggaccccaagagcctgattcggaaaggacgcgagcggcacctgtttctctttgagataagtctagtgttttccaaagaaatcaaggatagctctggccacacaaagtacgtgtataaaaataagttactaacaagcgagctgggcgttaccgagcatgttgaaggtgacccgtgtaaattcgccctctggtccggtagaacccccagtagtgacaacaagaccgttctgaaggcgtccaatatcgagaccaaacaggagtggatcaagaacatccgcgaggtgatccaggagagaatcatccacctaaaaggcgccctgaaagagcctcttcagctccctaaaacacctgcaaaacaaagaaataacagcaagagggatggagtggaggacatcgacagccagggagacggatcttcacagcccgatacaatcagcattgctagccgcaccagccagaataccgtggactcagacaaggacggaaacttggtgcctagatggcacctgggccccggcgatcctttcagcacgtatgtgtag

SEQ ID NO: 142337 - DNA, 4992 bp, Artificial Sequence
  derived and/or modified sequence
atgactgaccgcttctgggaccaatggtatctctggtatctgcgcctcctcaggctgttggaccggggttccttccggaacgacggactcaaagcttccgatgtgttaccaattcttaaggagaaggtggcgttcgtgtccgggggaagggacaaacgtggcggacctatactgactttccccgctcgaagcaaccacgacagaattcgtcaggaagacctccgcaaactcgtgacgtatttggcctcagttccttccgaagacgtatgtaagcgcggatttactgtgataattgatatgcggggtagtaagtgggatttgattaagccgctgttgaagactttacaagaggctttccctgctgagattcacgtagccttgattatcaagccagacaatttctggcaaaaacaaaagacaaactttggatcttcaaagttcatttttgagacgtcaatggtctctgtggaagggcttacgaaactggtggacccatcccagctgaccgaagaattcgatggctctttagactacaatcacgaggaatggatcgagctgagactgtcattggaagagttctttaactccgctgtgcatctgctgtcccgtctggaagacctgcaggagatgttggcgcgaaaagaattccccgtggatgtggagggaagccggcgactgattgacgagcacacacagcttaagaaaaaggtgctcaaagcacctgtcgaggagctggatcgtgaggggcaacgtctgctccagtgtatccgctgtagcgacggattcagcgggaggaactgtattccagggtccgctgacttccaatcactggttccaaaaattacttctttgctggataagctgcactccaccagacagcatttgcatcagatgtggcatgtgagaaaactgaaattagatcagtgctttcaactacggctgtttgagcaggatgcagaaaagatgtttgattggatctcccataataaggaactcttcctacagtcccacactgagatcggcgttagttaccagtatgcccttgacttacaaacgcagcataatcactttgcaatgaactccatgaacgcctatgtaaatattaacagaatcatgtcggtcgcatctaggctgagcgaagccggtcactatgcctctcagcagataaaacaaatcagcacacagctggatcaagagtggaagagcttcgctgccgctctggacgaacggtcaaccatcctggcgatgtccgctgttttccaccagaaggccgaacaattcttatcgggggttgacgcctggtgcaaaatgtgcagtgagggcggattgccttctgagatgcaggatttggagctcgcaatccaccaccatcaaacattatacgagcaggttacacaggcgtacaccgaggtgtctcaagacggcaaggctctgttggacgtcctgcaacggccattgtctcccggaaatagcgaatcactgacagcgacagctaattattctaaagctgtccaccaggtactggatgtggtccacgaagtcctgcatcaccagcggagactagaaagtatttggcaacaccgaaaagtgcggttacatcagaggctccagctatgcgtcttccaacaggatgtccagcaagtcctggactggattgagaaccatggtgaggctttcttgtcaaagcacactggggtgggaaaaagcctgcacagagccagggcactgcaaaagagacacgatgactttgaggaggtagcccagaatacctacaccaatgccgacaagcttctcgaagcagccgagcagcttgcccagaccggcgaatgcgatccggaggaaatttacaaagctgccagacatcttgaagtacggatccaggattttgtgcgtagggttgagcagcgtaaactccttctcgatatgagcgtctccttccacacacataccaaggagttgtggacatggatggaggacctgcagaaggaaatgctggaggatgtgtgcgctgattctgttgacgccgtccaggaactaatcaagcaatttcagcaacaacagactgctaccttggatgctacactcaacgttattaaggagggcgaagacctgatacaacagctgagaagcgcccctccgagcttaggcgaaccatccgaggccagggactccgccgttagcaataataagactccacatagtagctctattagtcacattgagagcgtgcttcaacaactggatgatgcccaggtccagatggaagagctcttccacgaacgcaagataaagctcgatatctttttgcagcttcggatctttgagcagtatacgatcgaggtgaccgccgaacttgacgcctggaatgaggatctcctgcgccagatgaatgattttaataccgaggatctgacccttgccgagcaacgactccagcggcacactgagaggaaactagctatgaataatatgaccttcgaggtgatccagcaggggcaagacctccaccagtacattacagaggtccaggcgtcaggcatcgaactgatctgcgagaaggacatcgatctcgccgcacaggtgcaggagcttctggagtttctccacgaaaagcagcacgagctcgaactaaacgcggagcagactcacaagaggttggaacagtgcctccagttgcgacacctccaggcagaagtcaaacaggtcttggggtggatccgcaacggcgagagtatgctgaatgcatctctggtgaacgctagtagcctcagcgaagccgaacaactgcagagggagcacgaacagtttcaactggctattgaaagcctgttccatgcgacctctctgcagaagacccatcagagcgcattgcaagtgcagcagaaagctgaagtcctgttgcaggcgggacattacgacgcagatgccattcgcgagtgcgccgaaaaagtcgcattgcattggcagcaacttatgctcaaaatggaggataggctaaagctcgtcaacgcctccgtggcattctacaagacttctgaacaggtatgctcggtattggaatccctggagcaagagtatagacgagatgaagactggtgcggcggtagggacaaactaggcccagccgctgaaattgatcacgttatcccactgatttcaaagcatctggagcaaaaggaggcattcttgaaggcttgtacactcgctcggagaaacgccgaggtcttcttaaagtacatccacaggaataacgtgtccatgccaagcgtggcttctcacacacggggacccgaacagcaagtgaaggctatcttatctgagctgttgcagagggagaaccgggtccttcacttttggaccttgaaaaaaaggagactcgaccaatgtcagcaatatgtggtctttgaacgatccgccaaacaggcactggattggattcaggagacgggggagttctacttgtccacgcacacaagcactggcgaaacaaccgaggagacacaagaactgttgaaggaatatggggagttccgggttcctgcaaagcagacaaaagaaaaagtgaaactgctcattcagctggccgactctttcgtggaaaagggtcacatccacgctacagagatccgaaagtgggtgaccacggtggacaagcactatagagactttagtctcaggatgggcaagtacagatatagcctggagaaggcgctgggcgttaacactgaggacaacaaggacttggagcttgacattatccctgcctcactctcggaccgcgaagtgaagttaagagacgccaaccacgaagtgaacgaagagaaaagaaagtctgctagaaaaaaggagtttataatggccgagctgctccagaccgagaaagcttatgtccgggatctccacgaatgtctggagacatatctgtgggagatgacctcaggtgtggaagagatccccccaggaatcctgaataaggagcacatcatcttcggaaatattcaagagatctacgatttccacaacaacatttttctcaaggagttagaaaagtatgaacagctccccgaagacgtggggcattgcttcgtgacctgggccgataagtttcagatgtacgtcacctactgtaagaacaaacctgatagcaaccagctgatcctggaacacgccggaaccttctttgacgaaatacagcaacggcacggcctagctaatagtatcagttcctatctcatcaagcctgtgcaacggattactaaatatcaactccttctcaaagagctgctcacgtgttgcgaggaaggaaaaggagagctgaaggatggtctagaagtcatgctttccgtcccgaaaaaagctaacgatgctatgcacgtgtccatgttagaggggttcgacgagaatctcgacgtgcagggggaacttatcctccaggatgcttttcaagtgtgggaccctaagtccctgatccggaaaggcagagaacgccacctgtttctcttcgagattagcttggtgttttccaaagagatcaaggattcctctggccacacaaaatatgtctacaagaataaactactgacgtcagaactgggcgttacggaacacgttgagggggatccatgtaaatttgccctctggtctggcagaacaccttctagcgacaacaaaaccgtcctaaaggccagcaatattgaaactaagcaggaatggatcaagaacattcgtgaggtgattcaggagagaattatccacttgaagggcgctctgaaggaaccgctccagctccccaaaacacctgcaaagcagcgcaacaactcgaaacgagatggggtcgaagatatcgatagccaaggcgatgggtcgagtcagcccgataccatttctatcgcttccagaacgtctcagaacaccgtcgacagtgacaaggacggcaatctggtgcctagatggcatctgggcccaggcgaccctttctccacgtacgtttaa

SEQ ID NO: 142338 - DNA, 4992 bp, Artificial Sequence
  derived and/or modified sequence
atgaccgacagattctgggaccagtggtacctgtggtacctgagactgctgagactgctggacagaggcagcttcagaaacgacggcctgaaggccagcgacgtgctgcccatcctgaaggagaaggtggccttcgtgagcggcggcagagacaagagaggcggccccatcctgaccttccccgccagaagcaaccacgacagaatcagacaggaggacctgagaaagctggtgacctacctggccagcgtgcccagcgaggacgtgtgcaagagaggcttcaccgtgatcatcgacatgagaggcagcaagtgggacctgatcaagcccctgctgaagaccctgcaggaggccttccccgccgagatccacgtggccctgatcatcaagcccgacaacttctggcagaagcagaagaccaacttcggcagcagcaagttcatcttcgagaccagcatggtgagcgtggagggcctgaccaagctggtggaccccagccagctgaccgaggagttcgacggcagcctggactacaaccacgaggagtggatcgagctgagactgagcctggaggagttcttcaacagcgccgtgcacctgctgagcagactggaggacctgcaggagatgctggccagaaaggagttccccgtggacgtggagggcagcagaagactgatcgacgagcacacccagctgaagaagaaggtgctgaaggcccccgtggaggagctggacagagagggccagagactgctgcagtgcatcagatgcagcgacggcttcagcggcagaaactgcatccccggcagcgccgacttccagagcctggtgcccaagatcaccagcctgctggacaagctgcacagcaccagacagcacctgcaccagatgtggcacgtgagaaagctgaagctggaccagtgcttccagctgagactgttcgagcaggacgccgagaagatgttcgactggatcagccacaacaaggagctgttcctgcagagccacaccgagatcggcgtgagctaccagtacgccctggacctgcagacccagcacaaccacttcgccatgaacagcatgaacgcctacgtgaacatcaacagaatcatgagcgtggccagcagactgagcgaggccggccactacgccagccagcagatcaagcagatcagcacccagctggaccaggagtggaagagcttcgccgccgccctggacgagagaagcaccatcctggccatgagcgccgtgttccaccagaaggccgagcagttcctgagcggcgtggacgcctggtgcaagatgtgcagcgagggcggcctgcccagcgagatgcaggacctggagctggccatccaccaccaccagaccctgtacgagcaggtgacccaggcctacaccgaggtgagccaggacggcaaggccctgctggacgtgctgcagagacccctgagccccggcaacagcgagagcctgaccgccaccgccaactacagcaaggccgtgcaccaggtgctggacgtggtgcacgaggtgctgcaccaccagagaagactggagagcatctggcagcacagaaaggtgagactgcaccagagactgcagctgtgcgtgttccagcaggacgtgcagcaggtgctggactggatcgagaaccacggcgaggccttcctgagcaagcacaccggcgtgggcaagagcctgcacagagccagagccctgcagaagagacacgacgacttcgaggaggtggcccagaacacctacaccaacgccgacaagctgctggaggccgccgagcagctggcccagaccggcgagtgcgaccccgaggagatctacaaggccgccagacacctggaggtgagaatccaggacttcgtgagaagagtggagcagagaaagctgctgctggacatgagcgtgagcttccacacccacaccaaggagctgtggacctggatggaggacctgcagaaggagatgctggaggacgtgtgcgccgacagcgtggacgccgtgcaggagctgatcaagcagttccagcagcagcagaccgccaccctggacgccaccctgaacgtgatcaaggagggcgaggacctgatccagcagctgagaagcgccccccccagcctgggcgagcccagcgaggccagagacagcgccgtgagcaacaacaagaccccccacagcagcagcatcagccacatcgagagcgtgctgcagcagctggacgacgcccaggtgcagatggaggagctgttccacgagagaaagatcaagctggacatcttcctgcagctgagaatcttcgagcagtacaccatcgaggtgaccgccgagctggacgcctggaacgaggacctgctgagacagatgaacgacttcaacaccgaggacctgaccctggccgagcagagactgcagagacacaccgagagaaagctggccatgaacaacatgaccttcgaggtgatccagcagggccaggacctgcaccagtacatcaccgaggtgcaggccagcggcatcgagctgatctgcgagaaggacatcgacctggccgcccaggtgcaggagctgctggagttcctgcacgagaagcagcacgagctggagctgaacgccgagcagacccacaagagactggagcagtgcctgcagctgagacacctgcaggccgaggtgaagcaggtgctgggctggatcagaaacggcgagagcatgctgaacgccagcctggtgaacgccagcagcctgagcgaggccgagcagctgcagagagagcacgagcagttccagctggccatcgagagcctgttccacgccaccagcctgcagaagacccaccagagcgccctgcaggtgcagcagaaggccgaggtgctgctgcaggccggccactacgacgccgacgccatcagagagtgcgccgagaaggtggccctgcactggcagcagctgatgctgaagatggaggacagactgaagctggtgaacgccagcgtggccttctacaagaccagcgagcaggtgtgcagcgtgctggagagcctggagcaggagtacagaagagacgaggactggtgcggcggcagagacaagctgggccccgccgccgagatcgaccacgtgatccccctgatcagcaagcacctggagcagaaggaggccttcctgaaggcctgcaccctggccagaagaaacgccgaggtgttcctgaagtacatccacagaaacaacgtgagcatgcccagcgtggccagccacaccagaggccccgagcagcaggtgaaggccatcctgagcgagctgctgcagagagagaacagagtgctgcacttctggaccctgaagaagagaagactggaccagtgccagcagtacgtggtgttcgagagaagcgccaagcaggccctggactggatccaggagaccggcgagttctacctgagcacccacaccagcaccggcgagaccaccgaggagacccaggagctgctgaaggagtacggcgagttcagagtgcccgccaagcagaccaaggagaaggtgaagctgctgatccagctggccgacagcttcgtggagaagggccacatccacgccaccgagatcagaaagtgggtgaccaccgtggacaagcactacagagacttcagcctgagaatgggcaagtacagatacagcctggagaaggccctgggcgtgaacaccgaggacaacaaggacctggagctggacatcatccccgccagcctgagcgacagagaggtgaagctgagagacgccaaccacgaggtgaacgaggagaagagaaagagcgccagaaagaaggagttcatcatggccgagctgctgcagaccgagaaggcctacgtgagagacctgcacgagtgcctggagacctacctgtgggagatgaccagcggcgtggaggagatcccccccggcatcctgaacaaggagcacatcatcttcggcaacatccaggagatctacgacttccacaacaacatcttcctgaaggagctggagaagtacgagcagctgcccgaggacgtgggccactgcttcgtgacctgggccgacaagttccagatgtacgtgacctactgcaagaacaagcccgacagcaaccagctgatcctggagcacgccggcaccttcttcgacgagatccagcagagacacggcctggccaacagcatcagcagctacctgatcaagcccgtgcagagaatcaccaagtaccagctgctgctgaaggagctgctgacctgctgcgaggagggcaagggcgagctgaaggacggcctggaggtgatgctgagcgtgcccaagaaggccaacgacgccatgcacgtgagcatgctggagggcttcgacgagaacctggacgtgcagggcgagctgatcctgcaggacgccttccaggtgtgggaccccaagagcctgatcagaaagggcagagagagacacctgttcctgttcgagatcagcctggtgttcagcaaggagatcaaggacagcagcggccacaccaagtacgtgtacaagaacaagctgctgaccagcgagctgggcgtgaccgagcacgtggagggcgacccctgcaagttcgccctgtggagcggcagaacccccagcagcgacaacaagaccgtgctgaaggccagcaacatcgagaccaagcaggagtggatcaagaacatcagagaggtgatccaggagagaatcatccacctgaagggcgccctgaaggagcccctgcagctgcccaagacccccgccaagcagagaaacaacagcaagagagacggcgtggaggacatcgacagccagggcgacggcagcagccagcccgacaccatcagcatcgccagcagaaccagccagaacaccgtggacagcgacaaggacggcaacctggtgcccagatggcacctgggccccggcgaccccttcagcacctacgtgtag

SEQ ID NO: 142339 - protein, 493 aa, Artificial Sequence
  derived and/or modified sequence
MEKYENLGLVGEGSYGMVMKCRNKDTGRIVAIKKFLESDDDKMVKKIAMREIKLLKQLRHENLVNLLEVCKKKKRWYLVFEFVDHTILDDLELFPNGLDYQVVQKYLFQIINGIGFCHSHNIIHRDIKPENILVSQSGVVKLCDFGFARTLAAPGEVYTDYVATRWYRAPELLVGDVKYGKAVDVWAIGCLVTEMFMGEPLFPGDSDIDQLYHIMMCLGNLIPRHQELFNKNPVFAGVRLPEIKEREPLERRYPKLSEVVIDLAKKCLHIDPDKRPFCAELLHHDFFQMDGFAERFSQELQLKVQKDARNVSLSKKSQNRKKEKEKDDSLVEERKTLVVQDTNADPKIKDYKLFKIKGSKIDGEKAEKGNRASNASCLHDSRTSHNKIVPSTSLKDCSNVSVDHTRNPSVAIPPLTHNLSAVAPSINSGMGTETIPIQGYRVDEKTKKCSIPFVKPNRHSPSGIYNINVTTLVSGPPLSDDSGADLPQMEHQH

SEQ ID NO: 142340 - DNA, 1482 bp, Artificial Sequence
  derived and/or modified sequence
atggagaagtacgagaacctgggcctggtgggcgagggcagctacggcatggtgatgaagtgcagaaacaaggacaccggcagaatcgtggccatcaagaagttcctggagagcgacgacgacaagatggtgaagaagatcgccatgagagagatcaagctgctgaagcagctgagacacgagaacctggtgaacctgctggaggtgtgcaagaagaagaagagatggtacctggtgttcgagttcgtggaccacaccatcctggacgacctggagctgttccccaacggcctggactaccaggtggtgcagaagtacctgttccagatcatcaacggcatcggcttctgccacagccacaacatcatccacagagacatcaagcccgagaacatcctggtgagccagagcggcgtggtgaagctgtgcgacttcggcttcgccagaaccctggccgcccccggcgaggtgtacaccgactacgtggccaccagatggtacagagcccccgagctgctggtgggcgacgtgaagtacggcaaggccgtggacgtgtgggccatcggctgcctggtgaccgagatgttcatgggcgagcccctgttccccggcgacagcgacatcgaccagctgtaccacatcatgatgtgcctgggcaacctgatccccagacaccaggagctgttcaacaagaaccccgtgttcgccggcgtgagactgcccgagatcaaggagagagagcccctggagagaagataccccaagctgagcgaggtggtgatcgacctggccaagaagtgcctgcacatcgaccccgacaagagacccttctgcgccgagctgctgcaccacgacttcttccagatggacggcttcgccgagagattcagccaggagctgcagctgaaggtgcagaaggacgccagaaacgtgagcctgagcaagaagagccagaacagaaagaaggagaaggagaaggacgacagcctggtggaggagagaaagaccctggtggtgcaggacaccaacgccgaccccaagatcaaggactacaagctgttcaagatcaagggcagcaagatcgacggcgagaaggccgagaagggcaacagagccagcaacgccagctgcctgcacgacagcagaaccagccacaacaagatcgtgcccagcaccagcctgaaggactgcagcaacgtgagcgtggaccacaccagaaaccccagcgtggccatcccccccctgacccacaacctgagcgccgtggcccccagcatcaacagcggcatgggcaccgagaccatccccatccagggctacagagtggacgagaagaccaagaagtgcagcatccccttcgtgaagcccaacagacacagccccagcggcatctacaacatcaacgtgaccaccctggtgagcggcccccccctgagcgacgacagcggcgccgacctgccccagatggagcaccagcactag

SEQ ID NO: 142341 - DNA, 1482 bp, Artificial Sequence
  derived and/or modified sequence
atggagaagtatgaaaatttaggcttagtcggcgaggggtcatatgggatggtgatgaagtgccggaataaagatacagggaggattgtcgccattaagaagtttctggaatctgacgatgataaaatggtgaagaagatcgctatgcgtgagatcaagctgctcaagcagctccgccatgagaacctcgtgaacttgctggaagtgtgtaagaagaagaaacgttggtatttggtcttcgaatttgtggaccataccattttagatgatttggaattattcccgaatggattggactaccaggtggtacagaagtatctttttcaaatcataaatggtattggattttgtcactcccataatataatccaccgggacatcaaacctgagaatatcctcgtttcacagagcggggtcgtgaaactgtgtgacttcggattcgctagaacccttgcagcacccggcgaagtatatacagattatgttgccacgagatggtatcgggcacctgaactcctcgtaggcgacgtcaagtacgggaaggccgtcgacgtttgggcaatcggttgcctcgtgacggaaatgtttatgggcgaaccccttttcccaggcgacagtgacattgatcagctctatcacatcatgatgtgcctaggcaacctgattccaagacaccaggagttgtttaacaagaaccccgttttcgccggggtgaggttgccagagatcaaagagcgggaacctcttgagcggcggtatccaaaactttccgaggtagtgatcgaccttgccaagaaatgtttgcacatcgatcccgacaaacggcctttctgtgcagaactgctccaccatgacttcttccagatggacggattcgcagaaagattctctcaggagcttcagcttaaggtccagaaggacgccaggaacgtcagtttatccaagaagtcacagaacaggaaaaaagaaaaagagaaggatgacagcctggtcgaagagaggaagaccctcgtggtgcaggacacaaacgccgacccaaagatcaaggattacaaattgttcaaaataaaagggtctaagatcgacggagaaaaagctgaaaagggtaacagagctagcaacgcctcctgcctgcacgattcaagaaccagtcacaacaagatcgtaccatctacttcactaaaggattgctctaatgtctccgttgaccacactaggaatccttctgtagccattccccccctgacgcataatctgagtgccgtagccccctcaattaactcaggaatgggtaccgagaccatccctattcaaggataccgcgtcgacgaaaagaccaaaaaatgtagcatcccttttgtaaaacccaatagacacagtccgagcggtatatacaatatcaacgtcactacccttgtttccgggccacccctctcagacgatagcggtgcagatctcccccaaatggaacatcaacactag

SEQ ID NO: 142342 - DNA, 1482 bp, Artificial Sequence
  derived and/or modified sequence
atggagaagtatgagaacctgggcctggtgggggagggcagctatggcatggtgatgaagtgcaggaacaaggacaccggcagaattgtggccatcaagaagttcctggagagtgatgatgacaagatggtgaagaagatcgccatgagggagatcaagctgctgaagcagctgcggcatgagaacctggtgaacctgctggaggtgtgcaagaagaagaagcgctggtacctggtgtttgaatttgtggaccacaccatcctggatgacctggagctgttccccaacggcctggactaccaggtggtgcagaagtacctgttccagatcatcaatggcatcggcttctgccacagccacaacatcatccaccgggacatcaagccagagaacatcctggtgtcccagagcggcgtggtgaagctgtgtgactttggatttgcccggaccctggccgcccctggagaggtgtacacagattatgtggccacccgctggtaccgggcccctgagctgctggtgggagatgtgaagtatggcaaggctgtggatgtgtgggccatcggctgcctggtgacagagatgttcatgggagagcccctcttccctggggacagcgacatcgaccagctgtaccacatcatgatgtgcctgggcaacctgatccccaggcaccaggagctgttcaacaagaaccctgtgtttgctggggtgcggctgcctgagatcaaggagcgggagcccctggagcggcgctaccccaagctgtctgaggtggtgattgacctggccaagaagtgcctgcacatcgaccctgacaagaggcccttctgtgccgagctgctgcaccacgacttcttccagatggatggctttgctgagcgcttcagccaggagctgcagctgaaggtgcagaaggatgccagaaatgtgtccctgagcaagaagagccagaacaggaagaaggagaaggagaaggatgacagcctggtggaggagaggaagaccctggtggtgcaggacaccaatgctgaccccaagatcaaggactacaagctgttcaagatcaagggcagcaagattgatggagagaaggccgagaagggcaacagagccagcaatgccagctgcctgcatgacagcaggaccagccacaacaagatcgtgcccagcaccagcctgaaggactgcagcaatgtgtctgtggaccacaccaggaaccccagcgtggccatcccccccctgacccacaacctgtctgctgtggcccccagcatcaacagcggcatgggcacagagaccatccccatccagggctacagagtggatgagaagaccaagaagtgcagcatcccctttgtgaagcccaacagacacagccccagcggcatctacaacatcaacgtgaccaccctggtgtctggcccccccctgagtgatgacagcggggctgacctgccccagatggagcaccagcactag

SEQ ID NO: 142343 - DNA, 1482 bp, Artificial Sequence
  derived and/or modified sequence
atggagaagtacgagaacctgggcctggtgggcgagggcagctacggcatggtgatgaagtgtaggaacaaggacacaggacgcatcgtggccattaaaaagttcctggagagtgacgacgataagatggtgaaaaagatcgccatgcgggaaataaagctgctgaaacagctacgtcatgaaaaccttgtcaatctcctcgaggtgtgtaagaagaaaaagaggtggtatctggtattcgaatttgtcgaccatacaatcctcgacgatcttgagctctttcccaacggactggactaccaggtggtccagaagtatctttttcagatcataaacggcataggcttctgccacagccataatattatccatcgcgatattaagccagagaacatactggtctcccagagcggcgtggtcaagctctgcgacttcggtttcgcaaggacattggccgctcccggggaagtctacaccgattacgtggccacacggtggtatagagccccagagttgctggtcggggatgtgaagtacggaaaagccgttgacgtgtgggccattggctgtttggtgactgaaatgtttatgggtgagccgctgtttccgggtgactcagatatcgatcagctctaccacataatgatgtgcctcggcaatctcatccccaggcaccaagaactgttcaacaaaaatcccgtttttgcaggcgtgagacttccggaaattaaagagcgggagccacttgagcgaaggtatccgaagttgtcagaggtagtcattgatctcgcaaagaagtgcctgcacattgacccggacaagcggccattttgcgctgagctcctacaccacgactttttccagatggacggattcgcagagaggttttcacaagagctccaactgaaagtgcaaaaagatgcccgcaatgtgagcctttccaagaagtcccaaaatcgtaagaaggagaaagaaaaagatgatagtctggtggaagagcgtaagaccctggttgtgcaggacacgaacgctgaccccaagatcaaggactacaaactgtttaaaatcaaaggctccaagattgacggtgaaaaggccgagaaaggcaaccgggccagtaacgcgtcatgtctgcatgacagtcggacctcccataataagatcgtcccctccacaagtcttaaagattgctctaatgtgtctgttgaccacacccgtaatccatcggttgcaattcctcctctcactcacaatctgagcgcagttgctcccagtattaatagtggcatgggaactgaaaccatccctatccaaggatatagggtggacgagaaaaccaagaagtgttccattcctttcgtgaaaccaaaccgccattcgccctcagggatatataacataaacgtgacaactctggtgagcggtccccccttgtccgatgacagcggagcagatttgccccagatggaacaccagcattag

SEQ ID NO: 142344 - DNA, 1482 bp, Artificial Sequence
  derived and/or modified sequence
atggaaaaatacgaaaacctggggctggtgggagaaggaagctacgggatggtgatgaagtgcaggaacaaggataccggacgtatagtggcaataaagaaattcctggaatccgatgacgataagatggtgaagaaaatcgccatgagggagattaagttacttaagcagctgcgtcacgagaatttggttaatttattagaagtgtgcaaaaaaaagaagaggtggtatctggtctttgagttcgtggaccacaccatcctggacgacctggagctgttccctaacggactggattaccaggttgtgcagaagtatttgttccagattataaatggcatcggtttttgccattcacacaacattattcatagggacattaagccagagaatatccttgtgagccaaagtggggtcgtcaaactctgcgacttcggctttgctcgtaccctggcagctcccggtgaggtctacacagactatgtcgccacacggtggtacagagccccagagctcctggtcggggatgtaaagtacggcaaggccgtggatgtgtgggccatcggatgcttggttaccgagatgttcatgggagagcctctattcccaggcgattcagatatcgatcagctgtaccatattatgatgtgcctggggaacctcattcccaggcaccaggaactgttcaacaagaatcctgtattcgctggtgtgcgactgcccgaaataaaagaaagggagcctctggagcggcgataccctaaactgagcgaggttgttatagacctggctaagaaatgccttcacatcgatcccgataaacggccattttgcgcagaactgctgcaccacgatttcttccagatggatgggttcgccgagcggttcagccaagagctgcaacttaaggtccagaaggacgctagaaatgtgtccctgagcaagaaatcccagaatcgtaaaaaggaaaaggaaaaggacgattcactggttgaggagcgcaagaccctggtcgtgcaggataccaacgccgatcccaagatcaaggactacaagctgtttaagattaaaggatccaagatcgacggggagaaggcagagaaggggaatagggcatccaacgcctcctgtttacatgacagccgtacgtctcataataagattgtgccctccacaagcctcaaagactgcagcaacgtgtcggttgaccacactcgcaatccatctgtcgctattccaccattgactcataacctgagcgcagtggcaccgtctatcaattccgggatgggtaccgagacaattcctatccagggatatcgtgttgatgagaagaccaaaaagtgctccattccgtttgtaaagccgaaccgtcactccccctccgggatctacaacattaacgtgacgactctggtgagcggccctcctttgtcagatgactcgggggctgacctaccgcagatggagcatcagcattag

SEQ ID NO: 142345 - DNA, 3383 bp, Artificial Sequence
  derived and/or modified sequence
cctcctgacgagaaccaaggcgtgtggggacgcagggcctctgcgtgtcagggagcagaacctgggccgagccctaggtgaaggggcggggtggttggccctgagccaatcatggctcgtgacgactcggctcggccaatcagaagaagggaggcctggcgctctcggggcgggtgagaaaccgcccccccttgcagctccgcggccaacgccttcgcccaggggtagttggagcggtgcaggttcccaggctccaggtactgggcgccttacgagctgggaggtggtgcctctcacccagctaattgctctctagcccttggccttcacaggtgttggtgcctgccgtgaacgcattctgacctgggccgtatctgtctcccaagactttgtgcctatggttggggacagagtgaggtcgttgccttgacgacgacagcatgcggcccgtggtcctcctaagtgtgagcttgcggcggaccgaggcccacctgcctccctgcctgcttcgccctggactcgtgactgcgtccgcagaagaaatcacaacagcgctggaattgctagtttgctaggcagcatcttttggacctgcgaaccatatgcatttcacctcaaatttgtttccaagttgaaaacctttgggtctttctatgcgaacggattgaagaaacgcaaaaagtttctacggactttaaattaaaatggaaaaatatgaaaacctgggtttggttggagaagggagttatggaatggtgatgaagtgtaggaataaagatactggaagaattgtggccataaagaagttcttagaaagtgacgatgacaaaatggttaaaaagattgcaatgcgagaaatcaagttactaaagcaacttaggcatgaaaacttggtgaatctcttggaagtgtgtaagaaaaaaaaacgatggtacctagtctttgaatttgttgaccacacaattcttgatgacttggagctctttccaaatggactagactaccaagtagttcaaaagtatttgtttcagattattaatggaattggattttgtcacagtcacaatatcatacacagagatataaagccagagaatatattagtctcccagtctggcgttgtcaagctatgcgattttggatttgcgcgaacattggcagctcctggggaggtttatactgattatgtggcaacccgatggtacagagctccagaactattggttggtgatgtcaagtatggcaaggctgttgatgtgtgggccattggttgtctggtaactgaaatgttcatgggggaacccctatttcctggagattctgatattgatcagctatatcatattatgatgtgtttaggtaatctaattccaaggcatcaggagctttttaataaaaatcctgtgtttgctggagtaaggttgcctgaaatcaaggaaagagaacctcttgaaagacgctatcctaagctctctgaagtggtgatagatttagcaaagaaatgcttacatattgaccccgacaaaagacccttctgtgctgagctcctacaccatgatttctttcaaatggatggatttgctgagaggttttcccaagaactacagttaaaagtacagaaagatgccagaaatgtttctttatctaaaaaatcccaaaacagaaagaaggaaaaagaaaaagatgattccttagttgaagaaagaaaaacacttgtggtacaggataccaatgctgatcccaaaattaaggattataaactatttaaaataaaaggctcaaaaattgatggagaaaaagctgaaaaaggcaatagagcttcaaatgccagctgtctccatgacagtaggacaagccacaacaaaatagtgccttcaacaagcctcaaagactgcagcaatgtcagcgtggaccacacaaggaatccaagcgtggcaattcccccacttacacacaatctttctgcagttgctcccagcattaattctggaatggggactgagactataccaattcagggttacagagtggatgagaaaactaagaagtgttctattccatttgttaaaccgaacagacattccccatcaggcatttataacattaatgtgaccacattagtatcaggacctcccctgtcagatgattcaggggctgatttgcctcaaatggaacaccagcactgagaaccattttggttctgaactggatgatgctcttgcacttgagatgacatcttcttgcagcaagagtgctgatatcccaagaggagagattcatggttttgatcatttccttctgaactgcctgcattttctgaggaaggccttctagaagaaggaaagacaaagacttccaaatgtttcaaaggaagattgaacaaatggccctccccaactgttatcccattacctttcacgtccaccgatgctatttcaagacatatccagtggaataacagtgatatggttcttgttacatgaatgtgtatttactgttaggagattgtatattttaagttaccatgattaaaagtgtgtaaaaaagggggacagagagaaatactataaaaggccatgttactcatgcattgaactttgtgtgttttctgtataaatgtgtacatttatttaggagtgggtttcttgggggtaggtgataaaaattaggatcagttgaagaaaattgaagaaactaggatcagtaagagaaactgtttgctttacctgaatttaactatgaaaacacacttaacaatcttacacgtttctagatattaagtgaatatgtaactcctgtccatgggtagatgtgtatctttgacttctgtaattatttttgatattctatcagtgtattatgagactctggcctccctgcagatcttctaagaaccacactaatgcaagcgtgacagagaaacctctttcgaatgacttactacaactctggcattggttagttccatgtattgtaagattctggtgctaatgctccatacagaattgatcaggactgattactcttctgtggaccaattgctattgaactacccagctgaagagggtttggggagagaacgttcattattatggactccacttttgtcccctggtagtttaagggtgatactagaatccagagaagttcctgtctccttgtggcctcaaacactcaggccgtctcaaaagcttttcaccaaggtgcaaaatcatttacctgcattccacacatcttttccaatgcatggatccaaaactttttaggtgggaggaataaactaagttggctacaggttcttgatttctgggtttctacacatgctctgcatttatcattttagagaatggttgtttagggaaccagaatttgtgagttttttt

SEQ ID NO: 142346 - protein, 385 aa, Artificial Sequence
  derived and/or modified sequence
MWGRLLLWPLVLGFSLSGGTQTPSVYDESGSTGGGDDSTPSILPAPRGYPGQVCANDSDTLELPDSSRALLLGWVPTRLVPALYGLVLVVGLPANGLALWVLATQAPRLPSTMLLMNLAAADLLLALALPPRIAYHLRGQRWPFGEAACRLATAALYGHMYGSVLLLAAVSLDRYLALVHPLRARALRGRRLALGLCMAAWLMAAALALPLTLQRQTFRLARSDRVLCHDALPLDAQASHWQPAFTCLALLGCFLPLLAMLLCYGATLHTLAASGRRYGHALRLTAVVLASAVAFFVPSNLLLLLHYSDPSPSAWGNLYGAYVPSLALSTLNSCVDPFIYYYVSAEFRDKVRAGLFQRSPGDTVASKASAEGGSRGMGTHSSLLQ

SEQ ID NO: 142347 - DNA, 1158 bp, Artificial Sequence
  derived and/or modified sequence
atgtggggacggttactgctgtggcctctggtgctggggttctctctttcgggaggcacacagacaccgagcgtgtacgacgagtctggcagcacgggagggggggatgatagtacaccatcgattctacccgcgccccgcgggtaccccgggcaagtttgcgctaacgactctgatacactggagcttcctgattcctccagagccctgcttcttggctgggttccaacaagactggttcccgccttatacggtctcgtcctggtggtgggacttccagctaacggtctggccttgtgggtgttggctactcaggcccctcgcctgccttcaacaatgctgctcatgaatcttgccgcagcagacctgctgttggcattggccttgcctcccagaattgcataccatctcaggggacagcgatggccgttcggcgaggcagcctgcagactggcaacagcagctctgtatggccacatgtacggcagcgtgctgctgcttgcagctgtgagtcttgatcggtacctggccctcgtccatcctttgagagcacgggcacttagaggacgacggcttgccctgggcctctgcatggctgcgtggctcatggctgccgcgctcgccctcccactgacacttcaacgccagacctttcgtctcgctagatccgatcgggtcctctgtcacgacgctctcccactggatgcacaagcatcccactggcagccagccttcacctgccttgccctgctgggctgcttcctgcctctgttggcaatgcttctgtgttatggggcaacgttacataccctcgctgctagcggtagaagatatggccatgctctccgcctgactgccgttgttctggccagcgctgtcgcctttttcgtcccttccaatctccttttgcttcttcactattccgatcctagtccctctgcttggggcaatctgtatggggcctacgttccttccctagcactaagcaccctaaactcctgtgtagatcctttcatttactattacgtgtccgccgagtttcgtgataaggtccgcgcgggattgttccagcgctcgcccggggacacagtcgccagcaaggcctctgctgaaggtgggtctcgcgggatgggcacgcactcctccctgctgcagtag

SEQ ID NO: 142348 - DNA, 1158 bp, Artificial Sequence
  derived and/or modified sequence
atgtggggccgcctgctgctgtggcccctggtgctgggcttcagcctgagcggcggcacccagacccccagcgtgtatgatgaaagtggcagcactggaggaggagatgacagcacccccagcatcctgcctgccccccggggctacccaggccaggtgtgtgccaatgacagcgacaccctggagctgcctgacagcagccgggccctgctgctgggctgggtgcccacccggctggtgcctgccctgtatggcctggtgctggtggtgggcctgcctgccaacggcctggccctgtgggtgctggccacccaggccccccggctgcccagcaccatgctgctgatgaacctggccgctgctgacctgctgctggccctggccctgcccccaagaattgcctaccacctgcggggccagcgctggccctttggagaggccgcctgccgcctggccacagctgccctgtatggccacatgtatggctctgtgctgctgctggccgctgtgtccctggaccgctacctggccctggtgcaccccctgcgggcccgggccctgcggggccggcggctggccctgggcctgtgcatggccgcctggctgatggctgctgccctggccctgcccctgaccctgcagaggcagaccttccggctggcccggagtgacagagtgctgtgccatgatgccctgcccctggatgcccaggccagccactggcagcctgccttcacctgcctggccctgctgggctgcttcctgcccctgctggccatgctgctgtgctacggggccaccctgcacaccctggccgccagcggccgccgctatggccacgccctgcggctgacagctgtggtgctggccagcgctgtggccttctttgtgcccagcaacctgctgctgctgctgcactacagcgaccccagccccagcgcctggggcaacctgtatggagcctacgtgcccagcctggccctgagcaccctgaacagctgtgtggaccccttcatctactactacgtgtctgctgagttccgggacaaggtgcgggccggcctcttccagaggagccctggggacacagtggccagcaaggccagcgctgagggcggcagccggggcatgggcacccacagcagcctgctgcagtag

SEQ ID NO: 142349 - DNA, 1158 bp, Artificial Sequence
  derived and/or modified sequence
atgtggggccggctgctgctgtggcccctggtgctgggcttcagcctctcaggcggaacacagacaccgtccgtatatgatgagagcgggtctactggcgggggggacgactcaactccctcaatattgcccgcccccagggggtatcccgggcaagtgtgtgcaaatgacagtgacacgttagaattgccagactccagtcgcgccctgctcttgggttgggtgcccaccaggctcgtacccgccctctacggcctagtgttggtagtcggactgcccgcaaacggtctcgcgctgtgggtccttgctacacaggcacctcgtctcccctcaactatgctgctgatgaaccttgctgccgctgacctgttgctggcattggcactgcctccaaggatagcctaccacctcagaggccagagatggccctttggagaggctgcatgtaggctcgcaactgcggcattatacggccatatgtacgggtccgtcctattactcgccgccgtgtcccttgaccgatatcttgctttagtacacccattgagggcccgcgcactgcgagggaggcgtttagctctgggattatgtatggcggcttggctgatggccgcagccttagcgctacccctcaccctccaaaggcagacattcagacttgctaggtcagaccgggtactgtgtcacgatgccctgcccctggacgcacaggcgagtcactggcagccagccttcacttgtctggctttgctgggttgcttcctgccactattggccatgctcttgtgttacggagccaccttgcacaccctcgctgcctccggacgcagatatggccatgcactgaggttgacagccgttgtgctcgcatccgctgtcgcttttttcgtcccaagtaacttgctactgttactgcactattctgacccaagcccatcagcatggggcaacctatatggcgcttatgtccctagtctggccctctccacgctcaatagctgcgtcgatccattcatctactattacgtgtcggctgaattcagggataaggtgcgggcgggattgtttcagcggtctcccggcgacacagtggctagtaaggccagtgccgaaggaggttcaagggggatgggaacacacagcagcctactgcagtag

SEQ ID NO: 142350 - DNA, 1158 bp, Artificial Sequence
  derived and/or modified sequence
atgtgggggcgtttgttgctttggcccttggtcctgggattctccttgtcggggggaacccagacaccatcagtttatgacgaatctgggtctacgggaggaggcgatgatagtacccctagcatcttgcctgcccctagaggataccctggccaggtatgcgccaacgacagcgacacactcgaacttcctgattcctcacgcgcactcctgctggggtgggttcctactaggctagtgcctgcgctgtacggcctggtacttgttgtcggcctgcccgcaaacgggctggctctgtgggtgctggccacacaagcgcctcgactcccctctacaatgttacttatgaacttggctgcagccgacttgctgttggcgttggcgttaccccctagaattgcttatcacttgagaggccagagatggccttttggcgaggcggcttgcaggctggcgacagcagcactgtatggacatatgtacggctcagtgctcctgcttgccgcagtatccctcgaccggtaccttgctttggtgcaccctcttagggccagagccctacggggtcgcagattggccctgggactttgtatggctgcatggttaatggccgctgcactggctctgcccctcaccttacagcgccagacctttcggctagccaggtctgaccgcgtgctgtgccacgacgctttgccgctggatgctcaggcatctcactggcagcccgcttttacatgtcttgcgttactgggttgcttcctaccactgctcgccatgcttttatgttatggggcaactctgcataccctcgctgcctcaggacgacgctatggacacgctctgcggctaacggccgtagtgctcgcgtctgccgttgcctttttcgtaccctccaacctgctgctgctattgcactattccgatccatcaccatctgcctggggcaacctgtatggagcctacgttccgtccctggccttgtccacactgaattcttgcgtagaccccttcatctattactatgtttccgctgaattcagagacaaagttcgagccggtctgtttcagcgcagtcccggagacaccgtcgcctcaaaggcctccgctgagggtggaagccggggaatgggaacacactctagcctcctgcagtag

SEQ ID NO: 142351 - DNA, 2731 bp, Artificial Sequence
  derived and/or modified sequence
ctcccacgggctggctggcaagcggccctggtgggtctgcgggggcaggggcagccttcctggtttatctctaccggcgcgatctgctcgtccgcctcggctccagaagctggggctcagggtccggcgaggcaggaagcctgaggccacagcccagagcagcctgagtgcagtcatgtgggggcgactgctcctgtggcccctggtgctggggttcagcctgtctggcggcacccagacccccagcgtctacgacgagagcgggagcaccggaggtggtgatgacagcacgccctcaatcctgcctgccccccgcggctacccaggccaagtctgtgccaatgacagtgacaccctggagctcccggacagctcacgggcactgcttctgggctgggtgcccaccaggctggtgcccgccctctatgggctggtcctggtggtggggctgccggccaatgggctggcgctgtgggtgctggccacgcaggcacctcggctgccctccaccatgctgctgatgaacctcgcggctgctgacctcctgctggccctggcgctgcccccgcggatcgcctaccacctgcgtggccagcgctggcccttcggggaggccgcctgccgcctggccacggccgcactctatggtcacatgtatggctcagtgctgctgctggccgccgtcagcctggatcgctacctggccctggtgcacccgctgcgggcccgcgccctgcgtggccggcgcctggcccttggactctgcatggctgcttggctcatggcggccgccctggcactgcccctgacactgcagcggcagaccttccggctggcgcgctccgatcgcgtgctctgccatgacgcgctgcccctggacgcacaggcctcccactggcaaccggccttcacctgcctggcgctgttgggctgtttcctgcccctgctggccatgctgctgtgctacggggccaccctgcacacgctggcggccagcggccggcgctacggccacgcgctgaggctgaccgcagtggtgctggcctccgccgtggccttcttcgtgcccagcaacctgctgctgctgctgcattactcggacccgagccccagcgcctggggcaacctctatggtgcctacgtgcccagcctggcgctgagcaccctcaacagctgcgtggatcccttcatctactactacgtgtcggccgagttcagggacaaggtgcgggcagggctcttccaacggtcgccgggggacaccgtggcctccaaggcctctgcggaagggggcagccggggcatgggcacccactcctctttgctccagtgacacaaagtggggaaggctgtactgggtcgaacagggtcccttcccccacttcacgtccttcctgggacctcagaatgtgaccttatttggaaatagggttgttacaactgtcactagcggaggtcactttggagaagggtgggccttacatccagtgtgggtggtgtcctcataagataaggagaggccaggcctggtggctcacgcctgtaatcccagcactttaagaggccaaggcggatggatcacttgagcccaggagttcaacaccagcctgagcaacatggtaaaaccccatctctaccaaaaatacaaaaattagctgggcttggtggctggcgcctgtaatcccagctactcaggagactgaggcagaaggatcgcttgaacctgggaggcagaggttgcagtgagccgagattgcgccactggactccagcctgcgtgacagagagcctgtctctaaattaattaattaattaatttaattcaattttaaaaagacgaaaagtgacggccaggtgcagtggctcacgcctataatctcagcactctgggaggccaagatggaggattgcttgaagccaggagtttgggaccagcctgggcaacatagggggatcccatctctacacacaaaaaaattttttaatgaaccaggcattgtggcatgcgcctatagtcccagccactcaagaggcacaggcgggaggatcacttgagcctgggaggttgtggttgcagtgagctatgattgtaccactgcactccagcctgggcaacagagcaagaccttgtctcaaaaataaacaaactaaaattaaaaaaagaagacgagagatagtgggtgtggtggctcacacctgcaatcccagcactttggaaggccgaggtgggcagatcatctgaggccaggagttcaagaccagcctggctaacatggtgaaatcctatctctaccaaaaatacaaaaattagccaggcgtggtggtgggcacctgtactggggaggtgcccacccagctactggggaggctgagtcaggagaatcgcttgaacctgggaggcggaggttgcggtcagctgagatggtgccactgcactccagcctgggcgaaagagcgactctgtctccaaaaaaaagagaagaggagaggacacagagacacacagagaagaaagccatgtggcggcagaggcagagatgggagtgatgcggacggacacaaactaagggatgccacgatgccaagcacagccaacagccaccagcagccaggagacaggcctgggacgggctctccctcacagcctccagagggaaccagccctgccaccaccttgaccctggacttctggcctgcagaactgtgagacaataaactctcattgttttaa

SEQ ID NO: 142352 - DNA, 1158 bp, Artificial Sequence
  derived and/or modified sequence
atgtggggcagactgctgctgtggcccctggtgctgggcttcagcctgagcggcggcacccagacccccagcgtgtacgacgagagcggcagcaccggcggcggcgacgacagcacccccagcatcctgcccgcccccagaggctaccccggccaggtgtgcgccaacgacagcgacaccctggagctgcccgacagcagcagagccctgctgctgggctgggtgcccaccagactggtgcccgccctgtacggcctggtgctggtggtgggcctgcccgccaacggcctggccctgtgggtgctggccacccaggcccccagactgcccagcaccatgctgctgatgaacctggccgccgccgacctgctgctggccctggccctgccccccagaatcgcctaccacctgagaggccagagatggcccttcggcgaggccgcctgcagactggccaccgccgccctgtacggccacatgtacggcagcgtgctgctgctggccgccgtgagcctggacagatacctggccctggtgcaccccctgagagccagagccctgagaggcagaagactggccctgggcctgtgcatggccgcctggctgatggccgccgccctggccctgcccctgaccctgcagagacagaccttcagactggccagaagcgacagagtgctgtgccacgacgccctgcccctggacgcccaggccagccactggcagcccgccttcacctgcctggccctgctgggctgcttcctgcccctgctggccatgctgctgtgctacggcgccaccctgcacaccctggccgccagcggcagaagatacggccacgccctgagactgaccgccgtggtgctggccagcgccgtggccttcttcgtgcccagcaacctgctgctgctgctgcactacagcgaccccagccccagcgcctggggcaacctgtacggcgcctacgtgcccagcctggccctgagcaccctgaacagctgcgtggaccccttcatctactactacgtgagcgccgagttcagagacaaggtgagagccggcctgttccagagaagccccggcgacaccgtggccagcaaggccagcgccgagggcggcagcagaggcatgggcacccacagcagcctgctgcagtag

SEQ ID NO: 142353 - protein, 482 aa, Artificial Sequence
  derived and/or modified sequence
MAAVFDLDLETEEGSEGEGEPELSPADACPLAELRAAGLEPVGHYEEVELTETSVNVGPERIGPHCFELLRVLGKGGYGKVFQVRKVQGTNLGKIYAMKVLRKAKIVRNAKDTAHTRAERNILESVKHPFIVELAYAFQTGGKLYLILECLSGGELFTHLEREGIFLEDTACFYLAEITLALGHLHSQGIIYRDLKPENIMLSSQGHIKLTDFGLCKESIHEGAVTHTFCGTIEYMAPEILVRSGHNRAVDWWSLGALMYDMLTGSPPFTAENRKKTMDKIIRGKLALPPYLTPDARDLVKKFLKRNPSQRIGGGPGDAADVQRHPFFRHMNWDDLLAWRVDPPFRPCLQSEEDVSQFDTRFTRQTPVDSPDDTALSESANQAFLGFTYVAPSVLDSIKEGFSFQPKLRSPRRLNSSPRAPVSPLKFSPFEGFRPSPSLPEPTELPLPPLLPPPPPSTTAPLPIRPPSGTKKSKRGRGRPGR

SEQ ID NO: 142354 - protein, 154 aa, Artificial Sequence
  derived and/or modified sequence
MAAVFDLDLETEEGSEGEGEPELSPADACPLAELRAAGLEPVGHYEEVELTETSVNVGPERIGPHCFELLRVLGKGGYGKVFQVRKVQGTNLGKIYAMKVLRKAKIVRNAKDTAHTRAERNILESVKHPFIVELAYAFQTGGKLYLILECLSVD

SEQ ID NO: 142355 - DNA, 1449 bp, Artificial Sequence
  derived and/or modified sequence
atggccgccgtgttcgacctggacctggagaccgaggagggcagcgagggcgagggcgagcccgagctgagccccgccgacgcctgccccctggccgagctgagagccgccggcctggagcccgtgggccactacgaggaggtggagctgaccgagaccagcgtgaacgtgggccccgagagaatcggcccccactgcttcgagctgctgagagtgctgggcaagggcggctacggcaaggtgttccaggtgagaaaggtgcagggcaccaacctgggcaagatctacgccatgaaggtgctgagaaaggccaagatcgtgagaaacgccaaggacaccgcccacaccagagccgagagaaacatcctggagagcgtgaagcaccccttcatcgtggagctggcctacgccttccagaccggcggcaagctgtacctgatcctggagtgcctgagcggcggcgagctgttcacccacctggagagagagggcatcttcctggaggacaccgcctgcttctacctggccgagatcaccctggccctgggccacctgcacagccagggcatcatctacagagacctgaagcccgagaacatcatgctgagcagccagggccacatcaagctgaccgacttcggcctgtgcaaggagagcatccacgagggcgccgtgacccacaccttctgcggcaccatcgagtacatggcccccgagatcctggtgagaagcggccacaacagagccgtggactggtggagcctgggcgccctgatgtacgacatgctgaccggcagcccccccttcaccgccgagaacagaaagaagaccatggacaagatcatcagaggcaagctggccctgcccccctacctgacccccgacgccagagacctggtgaagaagttcctgaagagaaaccccagccagagaatcggcggcggccccggcgacgccgccgacgtgcagagacaccccttcttcagacacatgaactgggacgacctgctggcctggagagtggacccccccttcagaccctgcctgcagagcgaggaggacgtgagccagttcgacaccagattcaccagacagacccccgtggacagccccgacgacaccgccctgagcgagagcgccaaccaggccttcctgggcttcacctacgtggcccccagcgtgctggacagcatcaaggagggcttcagcttccagcccaagctgagaagccccagaagactgaacagcagccccagagcccccgtgagccccctgaagttcagccccttcgagggcttcagacccagccccagcctgcccgagcccaccgagctgcccctgccccccctgctgcccccccccccccccagcaccaccgcccccctgcccatcagaccccccagcggcaccaagaagagcaagagaggcagaggcagacccggcagatag

SEQ ID NO: 142356 - DNA, 465 bp, Artificial Sequence
  derived and/or modified sequence
atggccgccgtgttcgacctggacctggagaccgaggagggcagcgagggcgagggcgagcccgagctgagccccgccgacgcctgccccctggccgagctgagagccgccggcctggagcccgtgggccactacgaggaggtggagctgaccgagaccagcgtgaacgtgggccccgagagaatcggcccccactgcttcgagctgctgagagtgctgggcaagggcggctacggcaaggtgttccaggtgagaaaggtgcagggcaccaacctgggcaagatctacgccatgaaggtgctgagaaaggccaagatcgtgagaaacgccaaggacaccgcccacaccagagccgagagaaacatcctggagagcgtgaagcaccccttcatcgtggagctggcctacgccttccagaccggcggcaagctgtacctgatcctggagtgcctgagcgtggactag

SEQ ID NO: 142357 - DNA, 1449 bp, Artificial Sequence
  derived and/or modified sequence
atggctgcggtcttcgacctggatctcgagaccgaggaagggtctgaaggagaaggcgagcccgaactgagccccgccgatgcctgtcctcttgccgaactcagagctgcgggcctggagccagtgggccattacgaggaggtggaactcactgaaaccagtgtgaatgtcggcccggagagaataggccctcactgcttcgagctgctgcgcgtcttaggcaagggcgggtacggaaaggtctttcaagtgcggaaggtccagggcactaacctgggaaaaatttacgctatgaaggtccttcgtaaggccaaaatcgtacgaaatgctaaagacacggcacacacccgggccgagcggaacattcttgagtctgtgaagcacccatttattgtagagctcgcgtatgccttccaaacaggtggaaagctatacctcatactggagtgtctgtccggaggcgagctcttcactcatctggagcgcgagggcatctttttggaggacacagcatgcttctatctggccgagatcactttagctcttggacatctccacagccaaggcatcatctatagagatcttaagcccgaaaacatcatgctaagttcacagggacatatcaaattaactgactttggcctctgcaaagagagcatacacgaaggcgccgtgactcacaccttctgtggaacaatcgagtatatggcccccgaaatcctcgtgagaagtggacataaccgcgccgtggattggtggagcctgggggcactaatgtacgatatgcttacagggagccctccattcaccgcggaaaatcggaaaaagaccatggataaaatcattaggggtaaattagcgttgcccccctatctgactccagacgcccgagatctggtaaagaagttcctgaagcgaaacccgagtcaacggattgggggggggccaggagacgcggccgatgtccagagacatccctttttcaggcacatgaactgggacgatctgctcgcgtggcgtgtggatcccccatttcgcccctgcctgcagtccgaggaagacgtatcccagtttgacacaagattcactaggcagaccccagtagatagcccggacgatactgctctgtctgaatccgctaatcaggcctttcttggatttacatacgtggcgccctctgtactcgattccatcaaggagggcttcagctttcaaccgaagctgaggtcccctcgccgcctgaacagcagcccccgagcaccggtctcccccttgaagttctcacccttcgagggctttcgcccttcaccatctttaccagagcctaccgagttacccttaccccccttactgcctccacccccaccctctacaaccgctccactgccaattaggcctccctcaggaacaaaaaagtcaaagagagggagaggcagacctggcagatag

SEQ ID NO: 142358 - DNA, 465 bp, Artificial Sequence
  derived and/or modified sequence
atggccgcagtgttcgatctcgaccttgaaacagaggagggaagtgaaggggagggtgaacctgagctgagcccggcagacgcttgccctctggccgagctgagggctgcgggactcgagcctgtcggccattacgaggaggtggaactgactgaaacctctgttaatgtgggacctgagcgcatcgggccccattgctttgaactgctgagagttctcggaaaggggggttacggcaaagtcttccaagtaagaaaagttcagggaaccaatttggggaaaatatatgctatgaaagtgctgcgcaaggccaaaattgtcaggaatgctaaagatacggcacatacccgtgcagagcgaaacatcctggagagcgtcaagcaccctttcatagtggaactggcatatgctttccagaccggaggcaaactgtatttgatcttggaatgcctcagcgtcgactag

SEQ ID NO: 142359 - DNA, 465 bp, Artificial Sequence
  derived and/or modified sequence
atggcagctgtgtttgatctcgatttggagacggaagaaggcagtgagggagagggggaaccagaattgtctccagccgatgcatgtccactcgctgagctcagagctgccggattggaacccgtcggacactacgaggaagtggagttaactgagacttctgtgaatgtaggcccagaacgcatcggccctcactgcttcgaactgctccgcgtgcttggcaaaggcggatacggcaaggtgtttcaggtaaggaaggtgcagggtactaatctgggaaagatttatgccatgaaagtcttacggaaagcaaagatcgtaaggaatgccaaagacaccgcccacacccgagcagagcgcaacattctcgagtctgtcaagcatcctttcatagtggagctcgcttatgccttccagacaggtggtaagctgtatctgatcctagagtgcctgtccgtggactag

SEQ ID NO: 142360 - DNA, 1449 bp, Artificial Sequence
  derived and/or modified sequence
atggctgctgtgtttgacctggacctggagacagaggagggcagcgagggggagggggagcctgagctgagccctgcagatgcctgccccctggccgagctgcgggctgctggcctggagcctgtgggccactatgaggaggtggagctgacagagacctctgtgaatgtgggccctgagcgcatcggcccccactgctttgagctgctgcgggtgctgggcaaaggaggctacggcaaggtgttccaggtgaggaaggtgcagggcaccaacctgggcaagatctatgccatgaaggtgctgaggaaggccaagatcgtgagaaatgccaaggacacagcccacaccagggctgagaggaacatcctggagagcgtgaagcaccccttcatcgtggagctggcctatgccttccagacaggaggcaagctgtacctgatcctggagtgcctgagcggcggggagctgttcacccacctggagcgggagggcatcttcctggaggacacagcctgcttctacctggccgagatcaccctggccctgggccacctgcacagccagggcatcatctacagagacctgaagccagagaacatcatgctgagcagccagggccacatcaagctgacagactttggcctgtgcaaggagagcatccatgaaggagctgtgacccacaccttctgtggcaccatcgagtacatggcccctgagatcctggtgcgcagcggccacaacagagctgtggactggtggagcctgggcgccctgatgtatgacatgctgaccggcagcccccccttcaccgctgagaacaggaagaagaccatggacaagatcatccggggcaagctggccctgcccccctacctgaccccagatgcccgggacctggtgaagaagttcctgaagaggaaccccagccagagaattggaggcggccctggagatgctgctgatgtgcagaggcaccccttcttccgccacatgaactgggatgacctgctggcctggagggtggacccccccttccggccctgcctgcagagtgaagaagatgtgtcccagtttgacacccgcttcacccggcagacccctgtggacagcccagatgacacagccctgtctgagagcgccaaccaggccttcctgggcttcacctacgtggcccccagcgtgctggacagcatcaaggagggcttctccttccagcccaagctgcggagcccccggcggctgaacagcagcccccgggcccctgtgagccccctgaagttcagcccctttgagggcttccggcccagccccagcctgcctgagcccacagagctgcccctgccccccctgctgcccccacctccacccagcaccacagcccccctgcccatccggccccccagcggcaccaagaagagcaagaggggccggggccggcccggccgctag

SEQ ID NO: 142361 - DNA, 465 bp, Artificial Sequence
  derived and/or modified sequence
atggctgctgtgtttgacctggacctggagacagaggagggcagcgagggggagggggagcctgagctgagccctgcagatgcctgccccctggccgagctgcgggctgctggcctggagcctgtgggccactatgaggaggtggagctgacagagacctctgtgaatgtgggccctgagcgcatcggcccccactgctttgagctgctgcgggtgctgggcaaaggaggctacggcaaggtgttccaggtgaggaaggtgcagggcaccaacctgggcaagatctatgccatgaaggtgctgaggaaggccaagatcgtgagaaatgccaaggacacagcccacaccagggctgagaggaacatcctggagagcgtgaagcaccccttcatcgtggagctggcctatgccttccagacaggaggcaagctgtacctgatcctggagtgcctgtctgtggactag

SEQ ID NO: 142362 - DNA, 1449 bp, Artificial Sequence
  derived and/or modified sequence
atggccgccgtgttcgacctggacctggagaccgaggagggcagcgagggtgaaggcgaaccagagctgtctccagcagatgcttgcccgcttgcagagttacgcgcggcaggactcgaacccgttgggcattacgaggaggtggagttgacagagactagcgttaatgtaggccccgaacggatcggcccacactgttttgaactgcttcgggtgctagggaaaggggggtacggtaaggtctttcaagttcgcaaggtgcagggtactaacctgggaaaaatctacgccatgaaagttctgcgcaaagccaagatagtgcgaaacgccaaagacaccgcacatacccgggcggaacgcaacatcctggagagcgtgaaacacccgttcatcgtcgaactagcctacgccttccagactggaggcaaactttacctcattctggagtgtttgtctgggggagagctctttacccatctcgagagggaaggtatctttttggaggatacagcttgtttttatctcgctgaaatcactttggcgcttgggcacctccattcccagggtatcatatatagggatctgaaaccagagaatataatgttgagctctcagggtcacatcaagctgactgatttcgggctgtgcaaagagtctatacacgaaggggccgtcactcatactttttgtggtaccatcgaatatatggcaccagagattctcgtacggagcggacacaatcgggctgtggactggtggtcactgggggctctgatgtacgacatgctgacaggatcaccccccttcactgcagaaaatcgcaagaagaccatggacaaaatcattcggggaaagttggcactgccaccttacctaactcctgacgcaagagatctggtgaaaaaatttctcaagagaaacccaagccagaggatcggaggagggccgggagacgcagccgacgtgcaaagacatcctttctttcggcacatgaactgggacgacttactcgcgtggagagtggatcccccctttcgaccatgcctccagagtgaagaggatgtcagtcagtttgacacaagattcactcggcaaacgccggtcgacagtcctgacgacactgccttgtcggagagcgccaaccaagcgtttttaggctttacctacgtcgcccccagtgtcttggattctattaaggagggattctctttccagcctaagctccgttccccccggagactcaatagctctcccagagcacctgtttctcccctcaaattctctccttttgaagggttccgaccctccccaagcttacctgaacctacagagttgcctctgccacctctcctccctcctccaccaccctctactaccgcccccctgccaatcagaccaccatctgggacaaaaaaaagtaagcggggccgaggcaggcctggcaggtag

SEQ ID NO: 142363 - DNA, 465 bp, Artificial Sequence
  derived and/or modified sequence
atggccgccgtgttcgacctggacctggagaccgaggagggcagcgaaggagagggagagcccgaactatctcccgccgatgcctgccccctcgccgaactgcgggccgcaggcttagaacccgtgggtcactacgaagaagtagagctaacggagacatctgtaaatgtcggcccggagcgtattgggccccactgcttcgagctactgcgggtgttagggaagggggggtacggcaaggtcttccaagtgaggaaggttcaggggacaaacctaggcaagatttatgcaatgaaggtgctaagaaaagctaagattgttagaaatgcaaaagacactgctcacacaagggccgagcggaacatcctggaatcggtaaagcaccccttcatcgtggaactcgcctacgcgttccagactggcggcaaactttatttgattcttgagtgtctgtccgtggactag

SEQ ID NO: 142364 - DNA, 465 bp, Artificial Sequence
  derived and/or modified sequence
atggccgccgtgttcgacctggacctggagaccgaggagggcagcgagggagagggagaacccgagctttcacccgctgatgcctgcccactggctgaactcagggccgcaggtctggagccggtcggtcattacgaggaagtagaacttactgagacatccgttaatgttggcccagagcgaattgggccacactgttttgagctactgcgagttttggggaagggtggttacggaaaggtgttccaggtcaggaaggttcagggcacaaacctaggtaaaatttacgccatgaaggtgttgaggaaagccaagatagtaaggaatgctaaggacaccgcccatacgcgcgccgagagaaacatcctcgagtctgtgaaacaccccttcattgtggaactagcctatgcatttcaaactggcggcaagctctacctcatccttgagtgcttgtctgtcgactag

SEQ ID NO: 142365 - DNA, 1449 bp, Artificial Sequence
  derived and/or modified sequence
atggctgctgtattcgatcttgacttggagaccgaggagggtagcgagggtgaaggcgagccagaattgtctccagcagatgcatgcccacttgccgaactcagggccgcaggattggagccagtgggtcactacgaggaggtggaactcacagaaacgagtgtgaacgttggccctgagcgcattgggccacactgcttcgagctcctacgggtactcggcaagggcggatacggcaaggtgtttcaagtacggaaagtgcaaggcacgaatctgggcaagatctacgcgatgaaggttttgaggaaagccaaaatcgtgagaaatgccaaggacactgcccacacgcgcgcagagcgtaacattctggagtcagtaaaacatcccttcattgtggagctggcatacgcgttccaaactggtggaaaactgtacctgatcctcgagtgcctaagtggcggtgaactctttacacacctcgagagagaggggatctttttagaggacaccgcctgtttctacctagcggagattaccctagcactcgggcatctgcactcacagggaatcatataccgcgacctcaaacctgagaacataatgctgtcaagccaaggtcacatcaagctgaccgatttcggcctttgcaaggagagcattcacgaaggcgctgtgacccataccttctgcggtactattgaatacatggctccagagatactcgtgaggtctggccacaatcgcgctgtagactggtggagcctgggtgccctcatgtacgacatgttgactggctctccgccattcaccgctgaaaatcggaaaaaaacaatggacaagattataagaggaaaactggccctcccaccttacttgacccctgacgccagagatctggttaagaagtttctgaagaggaatccttcacaaaggatcggcggtggtccaggagatgccgctgacgtgcaaagacaccccttcttcagacacatgaattgggacgacctcctggcctggagggtagaccctcccttccgcccatgtctgcagtctgaagaagacgtctcccagttcgacacccgctttacacggcagaccccagtggactcccccgatgacacagcactgagcgagagcgccaatcaggccttccttggcttcacatacgtggcaccttctgtacttgattcgattaaggagggcttcagctttcagcctaagctgcggagcccacgacgcctcaactcctccccccgtgcacctgtaagtcccctcaagttctctccttttgaaggctttaggccttcgcctagcctgccagaacccacagaattacctttgcctcccctactccctcctcccccaccttctacaactgcacccctccccatcaggccaccctctggcaccaagaaatcaaagagaggacggggtagaccaggcaggtag

SEQ ID NO: 142366 - DNA, 465 bp, Artificial Sequence
  derived and/or modified sequence
atggccgcagtatttgatttggatctggaaacagaagaaggctccgagggagagggagaacctgaacttagccccgcagacgcctgccccctcgcagagctcagagccgcagggctcgagcctgttggtcattacgaggaagttgagctgacagaaacctctgtcaatgtcgggccagagcgtattgggccacactgtttcgagctactgcgtgttttagggaagggtggatatgggaaggtatttcaggtccggaaggtgcaaggcacaaacttaggaaagatttatgcaatgaaagtgctgcgcaaagccaaaatcgtaagaaacgccaaggacacagctcatacacgagctgagcggaatatcctggagagtgtgaagcacccctttatcgtggaactggcctatgccttccagaccggcggtaaactgtatctgatcttagaatgtctgagtgtcgactag

SEQ ID NO: 142367 - DNA, 465 bp, Artificial Sequence
  derived and/or modified sequence
atggcagcggtgtttgacctcgacctggaaacagaggagggatctgagggggaaggtgagcccgagctctcacccgcagacgcctgcccacttgccgagctcagagctgcgggacttgagccagtcggtcattacgaagaggtggaactcactgagacatctgtcaacgtgggccctgaaaggatcgggccacactgtttcgagctgttacgcgtgctcggcaaaggcggttatggaaaggtcttccaagtgcgcaaggtgcagggcacaaacctgggcaaaatttacgctatgaaagttctaagaaaggccaagatcgtccgtaatgcaaaagacaccgctcacactcgggctgaacgcaacattctggagagcgtgaagcatcctttcatcgtcgagttggcttacgccttccagacaggcggaaaactctatctgatcctcgaatgtctgtcggtggactag

SEQ ID NO: 142368 - DNA, 1726 bp, Artificial Sequence
  derived and/or modified sequence
gcgcggccaggtacgggccgacgggcccgcggggccggcgccgccatggcggccgtgtttgatttggatttggagacggaggaaggcagcgagggcgagggcgagccagagctcagccccgcggacgcatgtccccttgccgagttgagggcagctggcctagagcctgtgggacactatgaagaggtggagctgactgagaccagcgtgaacgttggcccagagcgcatcgggccccactgctttgagctgctgcgtgtgctgggcaaggggggctatggcaaggtgttccaggtgcgaaaggtgcaaggcaccaacttgggcaaaatatatgccatgaaagtcctaaggaaggccaaaattgtgcgcaatgccaaggacacagcacacacacgggctgagcggaacattctagagtcagtgaagcacccctttattgtggaactggcctatgccttccagactggtggcaaactctacctcatccttgagtgcctcagtggtggcgagctcttcacgcatctggagcgagagggcatcttcctggaagatacggcctgcttctacctggctgagatcacgctggccctgggccatctccactcccagggcatcatctaccgggacctcaagcccgagaacatcatgctcagcagccagggccacatcaaactgaccgactttggactctgcaaggagtctatccatgagggcgccgtcactcacaccttctgcggcaccattgagtacatggcccctgagattctggtgcgcagtggccacaaccgggctgtggactggtggagcctgggggccctgatgtacgacatgctcactggatcgccgcccttcaccgcagagaaccggaagaaaaccatggataagatcatcaggggcaagctggcactgcccccctacctcaccccagatgcccgggaccttgtcaaaaagtttctgaaacggaatcccagccagcggattgggggtggcccaggggatgctgctgatgtgcagagacatccctttttccggcacatgaattgggacgaccttctggcctggcgtgtggacccccctttcaggccctgtctgcagtcagaggaggacgtgagccagtttgatacccgcttcacacggcagacgccggtggacagtcctgatgacacagccctcagcgagagtgccaaccaggccttcctgggcttcacatacgtggcgccgtctgtcctggacagcatcaaggagggcttctccttccagcccaagctgcgctcacccaggcgcctcaacagtagcccccgggcccccgtcagccccctcaagttctccccttttgaggggtttcggcccagccccagcctgccggagcccacggagctacctctacctccactcctgccaccgccgccgccctcgaccaccgcccctctccccatccgtcccccctcagggaccaagaagtccaagaggggccgtgggcgtccagggcgctaggaagccgggtgggggtgagggtagcccttgagccctgtccctgcggctgtgagagcagcaggaccctgggccagttccagagacctgggggtgtgtctgggggtggggtgtgagtgcgtatgaaagtgtgtgtctgctggggcagctgtgcccctgaatcatgggcacggagggccgcccgccacgccccgcgctcaactgctcccgtggaagattaaagggctgaatcatg

SEQ ID NO: 142369 - DNA, 918 bp, Artificial Sequence
  derived and/or modified sequence
agtgcgcggccaggtacgggccgacgggcccgcggggccggcgccgccatggcggccgtgtttgatttggatttggagacggaggaaggcagcgagggcgagggcgagccagagctcagccccgcggacgcatgtccccttgccgagttgagggcagctggcctagagcctgtgggacactatgaagaggtggagctgactgagaccagcgtgaacgttggcccagagcgcatcgggccccactgctttgagctgctgcgtgtgctgggcaaggggggctatggcaaggtgttccaggtgcgaaaggtgcaaggcaccaacttgggcaaaatatatgccatgaaagtcctaaggaaggccaaaattgtgcgcaatgccaaggacacagcacacacacgggctgagcggaacattctagagtcagtgaagcacccctttattgtggaactggcctatgccttccagactggtggcaaactctacctcatccttgagtgcctcagtgtagactgagcgtcctgagggcagtggctgggtctcttcatcctgtccccagcttcacccagcacagggccaggcaccgagtaggcgtcggtagatgtttgctgaattgaattgaatccccacggcagctctgtgaggcaggtggcgagctcttcacgcatctggagcgagagggcatcttcctggaagatacggcctgcttctacctggctgagatcacgctggccctgggccatctccactcccagggcatcatctaccgggacctcaagcccgagaacatcatgctcagcagccagggccacatcaaactgaccgactttggactctgcaaggagtctatccatgagggcgccgtcactcacaccttctgcggcaccattgagtacatgtaagtggcacctggctggccca

SEQ ID NO: 142370 - protein, 269 aa, Artificial Sequence
  derived and/or modified sequence
MAASAGAGAVIAAPDSRRWLWSVLAAALGLLTAGVSALEVYTPKEIFVANGTQGKLTCKFKSTSTTGGLTSVSWSFQPEGADTTVSFFHYSQGQVYLGNYPPFKDRISWAGDLDKKDASINIENMQFIHNGTYICDVKNPPDIVVQPGHIRLYVVEKENLPVFPVWVVVGIVTAVVLGLTLLISMILAVLYRRKNSKRDYTGCSTSESLSPVKQAPRKSPSDTEGLVKSLPSGSHQGPVIYAQLDHSGGHHSDKINKSESVVYADIRKN

SEQ ID NO: 142371 - DNA, 810 bp, Artificial Sequence
  derived and/or modified sequence
atggccgccagcgccggcgccggcgccgtgatcgccgcccccgacagcagaagatggctgtggagcgtgctggccgccgccctgggcctgctgaccgccggcgtgagcgccctggaggtgtacacccccaaggagatcttcgtggccaacggcacccagggcaagctgacctgcaagttcaagagcaccagcaccaccggcggcctgaccagcgtgagctggagcttccagcccgagggcgccgacaccaccgtgagcttcttccactacagccagggccaggtgtacctgggcaactacccccccttcaaggacagaatcagctgggccggcgacctggacaagaaggacgccagcatcaacatcgagaacatgcagttcatccacaacggcacctacatctgcgacgtgaagaacccccccgacatcgtggtgcagcccggccacatcagactgtacgtggtggagaaggagaacctgcccgtgttccccgtgtgggtggtggtgggcatcgtgaccgccgtggtgctgggcctgaccctgctgatcagcatgatcctggccgtgctgtacagaagaaagaacagcaagagagactacaccggctgcagcaccagcgagagcctgagccccgtgaagcaggcccccagaaagagccccagcgacaccgagggcctggtgaagagcctgcccagcggcagccaccagggccccgtgatctacgcccagctggaccacagcggcggccaccacagcgacaagatcaacaagagcgagagcgtggtgtacgccgacatcagaaagaactag

SEQ ID NO: 142372 - DNA, 810 bp, Artificial Sequence
  derived and/or modified sequence
atggccgctagtgccggagctggcgccgttatcgcggcacccgatagcaggagatggctgtggagcgtgcttgccgcggcactcgggctacttactgctggagtgagcgcccttgaagtctacaccccaaaggagattttcgtagccaacggtacgcaaggcaaacttacatgcaagttcaagtccacatccaccactggaggattaacctctgtgtcgtggtccttccagcccgagggtgctgacacaaccgtaagcttctttcattactcccaggggcaggtgtacctgggtaactaccccccatttaaagacagaatctcatgggctggcgatctcgacaaaaaggacgcctcaatcaacatagagaatatgcaatttatacacaacggtacatatatttgcgacgtgaaaaatccgccggacatcgtggtccaacccgggcatatcaggctatacgtcgtggagaaagaaaaccttccagtgtttccagtgtgggtagtggtcggtatagtaacggccgtcgtcctgggattgaccttgctgatttccatgattctcgcggtgctgtacaggcgcaaaaatagcaagagagattataccggatgttccacttcagaatctctgtctccagttaagcaggcgcctcgaaagagccctagcgatacggagggccttgtgaaaagtctgccctccgggtcccaccagggtccagtcatctacgcgcagctcgaccattcaggcggtcaccacagcgataaaattaacaagtcagagtccgtcgtttacgccgatattaggaaaaattag

SEQ ID NO: 142373 - DNA, 810 bp, Artificial Sequence
  derived and/or modified sequence
atggccgccagcgctggagctggagctgtgattgctgccccagacagccgccgctggctgtggagcgtgctggccgccgccctgggcctgctgacagctggggtgtctgccctggaggtgtacacccccaaggagatctttgtggccaacggcacccagggcaagctgacctgcaagttcaagagcaccagcaccaccggcggcctgacctctgtgtcctggagcttccagcctgagggcgctgacaccaccgtgtccttcttccactacagccagggccaggtgtacctgggcaactacccacccttcaaggaccgcatctcctgggccggggacctggacaagaaggatgccagcatcaacatcgagaacatgcagttcatccacaacggcacctacatctgtgatgtgaagaaccccccagacatcgtggtgcagcccggccacatccggctgtatgtggtggagaaggagaacctgcctgtgtttcctgtgtgggtggtggtgggcatcgtgacagctgtggtgctgggcctgaccctgctgatctccatgatcctggccgtgctgtacagaaggaagaacagcaagagggactacacaggctgcagcaccagcgagagcctgagccctgtgaagcaggcccccaggaagagccccagcgacacagagggcctggtgaagagcctgcccagcggcagccaccagggccctgtgatctatgcccagctggaccacagcggcggccaccacagcgacaagatcaacaagtctgagagcgtggtgtatgctgacatcaggaagaactag

SEQ ID NO: 142374 - DNA, 5010 bp, Artificial Sequence
  derived and/or modified sequence
agcgagggccggagtggggctgaggcttcggtgcagagctggagagccgcggctgggaccggagtggggagcgcggcgtggaggtgccacccggcgcgggtggcggagagatcagaagcctcttccccaagccgagccaacctcagcggggacccgggctcagggacgcggcggcggcggcggcgactgcagtggctggacgatggcagcgtccgccggagccggggcggtgattgcagccccagacagccggcgctggctgtggtcggtgctggcggcggcgcttgggctcttgacagctggagtatcagccttggaagtatatacgccaaaagaaatcttcgtggcaaatggtacacaagggaagctgacctgcaagttcaagtctactagtacgactggcgggttgacctcagtctcctggagcttccagccagagggggccgacactactgtgtcgtttttccactactcccaagggcaagtgtaccttgggaattatccaccatttaaagacagaatcagctgggctggagaccttgacaagaaagatgcatcaatcaacatagaaaatatgcagtttatacacaatggcacctatatctgtgatgtcaaaaaccctcctgacatcgttgtccagcctggacacattaggctctatgtcgtagaaaaagagaatttgcctgtgtttccagtttgggtagtggtgggcatagttactgctgtggtcctaggtctcactctgctcatcagcatgattctggctgtcctctatagaaggaaaaactctaaacgggattacactggctgcagtacatcagagagtttgtcaccagttaagcaggctcctcggaagtccccctccgacactgagggtcttgtaaagagtctgccttctggatctcaccagggcccagtcatatatgcacagttagaccactccggcggacatcacagtgacaagattaacaagtcagagtctgtggtgtatgcggatatccgaaagaattaagagaatacctagaacatatcctcagcaagaaacaaaaccaaactggactctcgtgcagaaaatgtagcccattaccacatgtagccttggagacccaggcaaggacaagtacacgtgtactcacagagggagagaaagatgtgtacaaaggatatgtataaatattctatttagtcatcctgatatgaggagccagtgttgcatgatgaaaagatggtatgattctacatatgtacccattgtcttgctgtttttgtactttcttttcaggtcatttacaattgggagatttcagaaacattcctttcaccatcatttagaaatggtttgccttaatggagacaatagcagatcctgtagtatttccagtagacatggccttttaatctaagggcttaagactgattagtcttagcatttactgtagttggaggatggagatgctatgatggaagcatacccagggtggcctttagcacagtatcagtaccatttatttgtctgccgcttttaaaaaatacccattggctatgccacttgaaaacaatttgagaagtttttttgaagtttttctcactaaaatatggggcaattgttagccttacatgttgtgtagacttactttaagtttgcacccttgaaatgtgtcatatcaatttctggattcataatagcaagattagcaaaggataaatgccgaaggtcacttcattctggacacagttggatcaatactgattaagtagaaaatccaagctttgcttgagaacttttgtaacgtggagagtaaaaagtatcggttttattctttgctgatgtcctttctgcttgaaataacagtcaccatacagctaaaggagaggagtttctttccttctaagtaggcagaaatggtatcattatgttgccgctctccaatctcccagagctcgctctctagagaatcaccttctttcgcttttttttttttttttgaggtagagtctcactatgttgcccagactagccttgaactcttgggctcaagtgattctccctcctcagcctcccgagtagctggaacgaactatagttgcaccactgcagctggcaagaatcaccttctttataaagcgtcagtcatgcttccagcaagaggcagcatcagtcatggctttataacagcttcatggtgcctcaaagactgttgaggttaatgagagcctagattagacagtttggctgtccttccctaaaacttgttttctcctattcactactccccaccgcacttaaaatctatgagtttttactttttactgggaatggaaagtgtggtgaagatcattcaacacttatgttgtcatttctcccattttctgaatttttttttaaatttccccccttttaaaattgttcgaaagcccacagttatggaaagaattactgtctagatggtctgcagaacgtgtttggggtgagtgggagtgaggggcaatgttactttttctccctgtagtttggagtccattatgagctgctgctttttcttctcatcttgtcatcttctggggatgtttgaaggctgagttccaacagaattcacaaagggaataaaacaggattgagattttgaggtgtgcacaaggtggtaagataaagggcatatgagcttcaaaactaatgctgttgcatacatgaagccttttgttttttgaggagctatttttgttattcttgtaacgctccaccttacatgccacatctgtgtgagtcaacagggatcaggtttggtcaccacacatgtctgaagctgggcagcgtctgctctgtgttctgtgtggaatggagaaaaaaacgcctgccctgctgccttccatgttcataggcccagcccaagagagtgacacacagtgctggccctgagacatttccacaaagtggtcaactctgccttgcatcctaaaactttttgggcatctattttgaaaactataggagcctttggaaggcctcttatgtttggaggggaagggtgttgagattgtcaccatccttcaagctgagactcctggtgagcctttgccaccatgaaaaccacatagctgaccagggctgtgcttgaggtacagaggacacacattgtagacaggcctgtgtcatgtttccttacagtcgttttttacagagaaaaggggcattgttttttcactgctttctcaacagttcctgtgaataaatgaaacatttcggagctccctgagagcaagagccttcacttcttcttgcggtgccgggaccatgtgttggtgaagctggtgctgtgggggccactcactcgaatgacacctggaggcctgttcctcccttaccactcccttccccagcccgacttcttggcctcctgcccaaccagacacctcaaactctgtcagtgccctggcattctggcagagaatcctcaccagttctcaccaaccttccccccaggcaagggcagctgccagcatggtgctctgccaggacaggtttccctgaaggaagctgctcacactgagatgagcctctcagggcaggacctcttcccaagccctgcacacccacccctgcagcccttttggctccccttttccctgtgcctcagcactcctttcctggttgcagataacgaactaaggttgcctaaagggcagatctgccctctccatgtcttcgtcctggcaaacagggtcgtcttaaaattatgcgctaattctgtatgggagcactcaaaaggcattacttagagattgaaatttcaaactatctctagtttttcaatggaaatatatcagctagggaaaaaccatcaagctcattattattttttgatcttcagttgtatttttgtgaatattttaatacatctttttcaatttctgaattgtgttgtgtgctcattttgaccagaatagaaaaagagatatgcctttcactcatatcattccagctacacctgccttcttttcttcaaaaatgccgtccgtgtgcctgcttctgggcctttgcacatgctgttccctgggcctgaagcatgccttctgccaatattcctgtggtttgctctctgacttcctttaagcctctgctcaaatgttacctcctcagggagaccttctgtgatatataaaagagcaagccccccaccccaccgcctcagccttcctggccccctcagttctgctctagttactctatttctctccctctttcccagtacacacttgtctgttctcccgcattagaacatagttaacaagagaccagaaccttgctgttttgttcactgctccgtctgcagtaaagggaacagcacctggcacttagctgctcaatacatgttacgtggatggatgagtaggtggaagcattcatccattcagcaacctacactgagaacaatcctgtgccaagcactgtgctaagcataaggaaacaaaacaagacaaagctcctcaaggagcttgccacagggtggaggtgacaggtgacatgaatggaagtaactagtagttaccaaatacttggtgtgagccaggcactttgcatttctttctctattatttctgtgagttaacagtaattgtactaatcttaatcccattgtttgaaagattatatggcttacccagggccacttagctaataaaggaacagagaagaggggctgggcctggggccgctgtttgatccacagccttgttcctaaccactatgccctgtggcctctcacaccaaaaggaagtaccaaactgcttccttactcaaataaatgtgctgaaatgcagttgcagttttctcccagtcccttaggagctggttagagagtcccttaggaacttgagagggtagtgtagtctaggtggtaggcacagatgtctgagagctttaacctcagtctggaagacaatgtggtgacttaatttgttgagaactatgttacaaataatgtgttactaataaaacattgaggcttcgca

SEQ ID NO: 142375 - DNA, 810 bp, Artificial Sequence
  derived and/or modified sequence
atggccgccagcgccggcgccggcgccgtgatcgccgcccccgactctcgacgatggctttggtcggtcctcgccgcggcactggggcttctgacagcaggagtatccgccctagaagtgtatacaccaaaggagattttcgtcgccaacggcacccagggaaaactcacctgtaaatttaagagcacatccacgaccggcggtctgacttctgtgagctggtcatttcagcccgagggagctgatacaactgtatcgttcttccactattcacaaggtcaagtttacctcggaaattacccgccattcaaagatcggatcagttgggccggtgacctggacaagaaagacgcgagtataaacattgaaaatatgcagtttatacacaacggaacttatatttgcgacgttaagaacccaccagacatcgtggtgcaacccggccacatccggttgtacgtcgtagagaaggagaatcttcctgtcttccctgtgtgggtggtcgtggggatcgtgaccgcagtggtgttaggcctgacgttgttgatatctatgatcctagcggtgttgtacaggcgaaagaacagtaagagagattacacaggctgctccacatcagagtccttaagcccggtgaagcaggccccacgcaagagcccttcagataccgaaggactcgtgaagtccctccctagtgggtcccaccaggggcctgtcatttatgcacagttggaccatagcgggggacaccacagcgataaaattaataagagtgagagtgtggtttacgctgatattcggaaaaattag

SEQ ID NO: 142376 - DNA, 810 bp, Artificial Sequence
  derived and/or modified sequence
atggctgctagcgctggagccggagccgtcattgcagcccctgacagtcgcagatggctgtggtcagtcctggctgccgcactcgggctgctaacagccggagtgtccgcccttgaagtgtacacacccaaagagatttttgtcgctaacggtacccagggcaaactaacatgcaagttcaagagcacttccactaccggtgggctcacatcagtcagttggtcttttcagcccgaaggagccgacactacggtgtcatttttccattactcccagggacaggtgtatcttgggaattaccctccatttaaggaccgcatcagctgggcgggagacctggataaaaaggatgccagtattaatatcgagaacatgcagttcatccacaacgggacctacatttgtgatgttaagaatcctccagatattgtggtccaaccaggccacatcaggctctatgtggtggaaaaggagaatctcccggtgttccccgtttgggtagtggtgggcatagtgaccgcagtggtacttgggctgactcttctgatttccatgatactcgctgtactctatcgaaggaaaaactctaaacgtgactatactggatgttcgacctcggaatctctcagtcctgtgaaacaggcccctaggaagtccccaagtgatacagaaggcctggtgaagagtttacctagcgggagtcatcagggaccagtgatctatgcgcagctagatcattctggtggacaccattccgataagattaacaagagcgagtccgtggtctatgctgatattaggaaaaactag

SEQ ID NO: 142377 - protein, 225 aa, Artificial Sequence
  derived and/or modified sequence
MVTHSKFPAAGMSRPLDTSLRLKTFSSKSEYQLVVNAVRKLQESGFYWSAVTGGEANLLLSAEPAGTFLIRDSSDQRHFFTLSVKTQSGTKNLRIQCEGGSFSLQSDPRSTQPVPRFDCVLKLVHHYMPPPGAPSFPSPPTEPSSEVPEQPSAQPLPGSPPRRAYYIYSGGEKIPLVLSRPLSSNVATLQHLCRKTVNGHLDSYEKVTQLPGPIREFLDQYDAPL

SEQ ID NO: 142378 - DNA, 678 bp, Artificial Sequence
  derived and/or modified sequence
atggtgacccacagcaagttccccgccgccggcatgagcagacccctggacaccagcctgagactgaagaccttcagcagcaagagcgagtaccagctggtggtgaacgccgtgagaaagctgcaggagagcggcttctactggagcgccgtgaccggcggcgaggccaacctgctgctgagcgccgagcccgccggcaccttcctgatcagagacagcagcgaccagagacacttcttcaccctgagcgtgaagacccagagcggcaccaagaacctgagaatccagtgcgagggcggcagcttcagcctgcagagcgaccccagaagcacccagcccgtgcccagattcgactgcgtgctgaagctggtgcaccactacatgcccccccccggcgcccccagcttccccagcccccccaccgagcccagcagcgaggtgcccgagcagcccagcgcccagcccctgcccggcagcccccccagaagagcctactacatctacagcggcggcgagaagatccccctggtgctgagcagacccctgagcagcaacgtggccaccctgcagcacctgtgcagaaagaccgtgaacggccacctggacagctacgagaaggtgacccagctgcccggccccatcagagagttcctggaccagtacgacgcccccctgtag

SEQ ID NO: 142379 - DNA, 678 bp, Artificial Sequence
  derived and/or modified sequence
atggtcacacactcaaagtttccagccgcagggatgtcacggcctctagacaccagcttacgactgaaaaccttcagctcaaagtcggagtatcagttagtggtaaatgctgtgcgtaaactccaggagtctgggttctactggtcagcagtgacaggtggtgaagcgaacctcttgctatctgcagagcccgcaggaacgttcttgatccgagacagctcggatcaacgtcatttcttcaccctgtcggtgaagactcagtctggcacaaaaaatttaaggattcagtgcgaaggtggtagcttcagcctgcagtccgaccctagatcgacccagcctgtacccagattcgactgtgtcctgaagctcgtccatcactatatgcccccccccggcgcacccagctttccctctccaccaaccgaaccttctagcgaggtccccgagcagcccagcgcccaaccgctgccagggtcaccaccgcgccgtgcatactacatctattccggcggcgagaaaatacctctagtcctgagtcgcccactctcaagtaacgtcgctacgttacagcacctctgtagaaaaaccgtcaatggtcaccttgacagttatgagaaggttactcagttacccggtccaattcgcgaattcctggaccagtacgatgcgcccctgtag

SEQ ID NO: 142380 - DNA, 678 bp, Artificial Sequence
  derived and/or modified sequence
atggtgacccacagcaagtttcctgctgctggcatgagccggcccctggacaccagcctgcggctgaagaccttcagcagcaagtctgagtaccagctggtggtgaatgctgtgaggaagctgcaggagagcggcttctactggagcgctgtgactggaggagaggccaacctgctgctgtctgctgagcctgctggcaccttcctgatccgggacagcagtgaccagaggcacttcttcaccctgtctgtgaagacccagagcggcaccaagaacctgcgcatccagtgtgagggcggcagcttcagcctgcagagcgaccccaggagcacccagcctgtgcccaggtttgactgtgtgctgaagctggtgcaccactacatgcctcctcctggggcccccagcttccccagccccccaacagagcccagcagcgaggtgcctgagcagcccagcgcccagcccctgcccggcagccccccccggcgggcctactacatctacagcggcggggagaagatccccctggtgctgagccggcccctgagcagcaatgtggccaccctgcagcacctgtgcaggaagacagtgaatggccacctggacagctatgagaaggtgacccagctgcccggccccatccgggagttcctggaccagtatgatgcccccctgtag

SEQ ID NO: 142381 - DNA, 678 bp, Artificial Sequence
  derived and/or modified sequence
atggtgacccacagcaagttccccgccgccggcatgagccggcccctcgatacgtctttgagactgaagaccttcagttccaaaagcgagtatcagttggtagttaatgccgtgaggaaactgcaggagtctggcttttactggagtgccgtcaccggcggggaggctaacctcctcctctctgccgagccggcaggaacctttctgattcgcgactcatccgatcagagacatttcttcaccctcagtgttaagactcagagcgggacaaagaatttgagaattcagtgcgaaggagggagctttagcttacagtccgatcccagaagcacgcagcccgtgccccggttcgattgtgttctcaaactcgtccaccactacatgccaccccccggtgcaccatcttttccatcgcctcccacagagcccagctctgaagtgccagagcagcctagcgcccagccgctgcccggcagcccccccaggcgggcttactatatttatagcggtggcgagaagatccctctggtgttgagccgtccgctctcttcaaatgtcgctaccttgcagcacctgtgccgaaaaacggtgaatggccacctggattcctatgaaaaggtaacacagcttcctggacccatccgtgagtttctcgatcaatacgacgcaccgctgtag

SEQ ID NO: 142382 - DNA, 678 bp, Artificial Sequence
  derived and/or modified sequence
atggtgacacattccaaattccccgctgcagggatgagcagaccacttgatacctccctcagactgaagaccttttcctccaagtcagagtaccaactggtcgttaacgcagttaggaagctgcaggagtcgggattttactggtctgcagttacaggcggtgaggctaacctgctgctgagtgccgaaccggcaggcacctttctcatacgcgatagttccgatcagagacacttcttcaccctgtctgtaaaaactcagtccggcaccaaaaatctgagaatccaatgtgagggtggctcattctctctccaaagcgatccacgtagtacccaaccagtgccgaggtttgactgcgttcttaagctcgtacatcactacatgccccctcctggtgcgcctagctttcccagcccgcctaccgagccttcctcagaggtcccagaacaaccttcagcacagccattgccaggctcacctccgagaagggcttattacatctattctggaggcgagaaaatcccgttagtgttgagccgaccactgagctccaacgtggctactttacagcatctgtgccggaaaactgtaaatggccacctggatagttatgaaaaggtcacacagttgcccggacccatacgagaattcctggaccagtatgacgcccctctgtag

SEQ ID NO: 142383 - DNA, 2729 bp, Artificial Sequence
  derived and/or modified sequence
ggctccgacttggactccctgctccgctgctgccgcttcggccccgcacgcagccagccgccagccgcccgcccggcccagctcccgccgcggccccttgccgcggtccctctcctggtcccctcccggttggtccgggggtgcgcagggggcagggcgggcgcccaggggaagctcgagggacgcgcgcgcgaaggctcctttgtggacttcacggccgccaacatctgggcgcagcgcgggccaccgctggccgtctcgccgccgcgtcgccttggggacccgagggggctcagccccaaggacggagacttcgattcgggaccagccccccgggatgcggtagcggccgctgtgcggaggccgcgaagcagctgcagccgccgccgcgcagatccacgctggctccgtgcgccatggtcacccacagcaagtttcccgccgccgggatgagccgccccctggacaccagcctgcgcctcaagaccttcagctccaagagcgagtaccagctggtggtgaacgcagtgcgcaagctgcaggagagcggcttctactggagcgcagtgaccggcggcgaggcgaacctgctgctcagtgccgagcccgccggcacctttctgatccgcgacagctcggaccagcgccacttcttcacgctcagcgtcaagacccagtctgggaccaagaacctgcgcatccagtgtgaggggggcagcttctctctgcagagcgatccccggagcacgcagcccgtgccccgcttcgactgcgtgctcaagctggtgcaccactacatgccgccccctggagccccctccttcccctcgccacctactgaaccctcctccgaggtgcccgagcagccgtctgcccagccactccctgggagtccccccagaagagcctattacatctactccgggggcgagaagatccccctggtgttgagccggcccctctcctccaacgtggccactcttcagcatctctgtcggaagaccgtcaacggccacctggactcctatgagaaagtcacccagctgccggggcccattcgggagttcctggaccagtacgatgccccgctttaaggggtaaagggcgcaaagggcatgggtcgggagaggggacgcaggcccctctcctccgtggcacatggcacaagcacaagaagccaaccaggagagagtcctgtagctctggggggaaagagggcggacaggcccctccctctgccctctccctgcagaatgtggcaggcggacctggaatgtgttggagggaagggggagtaccacctgagtctccagcttctccggaggagccagctgtcctggtgggacgatagcaaccacaagtggattctccttcaattcctcagcttcccctctgcctccaaacaggggacacttcgggaatgctgaactaatgagaactgccagggaatcttcaaactttccaacggaacttgtttgctctttgatttggtttaaacctgagctggttgtggagcctgggaaaggtggaagagagagaggtcctgagggccccagggctgcgggctggcgaaggaaatggtcacaccccccgcccaccccaggcgaggatcctggtgacatgctcctctccctggctccggggagaagggcttggggtgacctgaagggaaccatcctggtaccccacatcctctcctccgggacagtcaccgaaaacacaggttccaaagtctacctggtgcctgagagcccagggcccttcctccgttttaagggggaagcaacatttggaggggatggatgggctggtcagctggtctccttttcctactcatactataccttcctgtacctgggtggatggagcgggaggatggaggagacgggacatctttcacctcaggctcctggtagagaagacaggggattctactctgtgcctcctgactatgtctggctaagagattcgccttaaatgctccctgtcccatggagagggacccagcataggaaagccacatactcagcctggatgggtggagaggctgagggactcactggagggcaccaagccagcccacagccagggaagtggggagggggggcggaaacccatgcctcccagctgagcactgggaatgtcagcccagtaagtattggccagtcaggcgcctcgtggtcagagcagagccaccaggtcccactgccccgagccctgcacagccctccctcctgcctgggtgggggaggctggaggtcattggagaggctggactgctgccaccccgggtgctcccgctctgccatagcactgatcagtgacaatttacaggaatgtagcagcgatggaattacctggaacagttttttgtttttgtttttgtttttgtttttgtgggggggggcaactaaacaaacacaaagtattctgtgtcaggtattgggctggacagggcagttgtgtgttggggtggtttttttctctatttttttgtttgtttcttgttttttaataatgtttacaatctgcctcaatcactctgtcttttataaagattccacctccagtcctctctcctcccccctactcaggcccttgaggctattaggagatgcttgaagaactcaacaaaatcccaatccaagtcaaactttgcacatatttatatttatattcagaaaagaaacatttcagtaatttataataaagagcactattttttaatg

SEQ ID NO: 142384 - protein, 272 aa, Artificial Sequence
  derived and/or modified sequence
MSCHNCSDPQVLCSSGQLFLQPLWDHLRSWEALLQSPFFPVIFSITTYVGFCLPFVVLDILCSWVPALRRYKIHPDFSPSAQQLLPCLGQTLYQHVMFVFPVTLLHWARSPALLPHEAPELLLLLHHILFCLLLFDMEFFVWHLLHHKVPWLYRTFHKVHHQNSSSFALATQYMSVWELFSLGFFDMMNVTLLGCHPLTTLTFHVVNIWLSVEDHSGYNFPWSTHRLVPFGWYGGVVHHDLHHSHFNCNFAPYFTHWDKILGTLRTASVPAR

SEQ ID NO: 142385 - DNA, 819 bp, Artificial Sequence
  derived and/or modified sequence
atgagctgtcacaactgttctgatccccaggtactttgctcctccgggcagctgttccttcaacccctctgggaccacctgagatcctgggaggctctgctgcagagccccttcttccccgtcattttctctattactacatatgtggggttctgcttaccgttcgttgtgctcgacattctctgctcctgggtgcctgcactacgacggtataagattcaccccgatttcagccccagtgcgcagcagctgcttccttgtctgggccaaactctgtatcaacacgtgatgtttgtattccccgttacactcttgcattgggccagaagccccgcactgctcccacatgaggccccagaactcctgctgctgctccatcacattctcttttgcctattgctgttcgacatggaatttttcgtttggcatctactgcaccataaggtgccctggctgtaccgcacttttcacaaagtgcatcatcagaactctagttcctttgcgctggccacacagtatatgtcagtttgggaactgttctctttgggattctttgacatgatgaacgtgacattattgggctgccaccctctgacaactctgacctttcatgttgtgaacatttggctcagtgtggaagaccactctggttacaacttcccatggtccacccaccggttggtgccctttggttggtatggaggcgtggtgcaccatgatttacaccattcgcactttaactgtaattttgctccttactttacgcattgggataagatactgggcaccctcagaacagccagcgtgcccgcaagatag

SEQ ID NO: 142386 - DNA, 819 bp, Artificial Sequence
  derived and/or modified sequence
atgagctgccacaactgcagcgacccccaggtgctgtgcagcagcggccagctgttcctgcagcccctgtgggaccacctgcgctcctgggaggccctgctgcagagccccttcttccctgtgatcttcagcatcaccacctacgtgggcttctgcctgccctttgtggtgctggacatcctgtgctcctgggtgcctgccctgcggcgctacaagatccacccagacttcagccccagcgcccagcagctgctgccctgcctgggccagaccctgtaccagcacgtgatgtttgtgtttcctgtgaccctgctgcactgggcccggagccctgccctgctgccccatgaggcccctgagctgctgctgctgctgcaccacatcctcttctgcctgctgctgtttgacatggagttctttgtgtggcacctgctgcaccacaaggtgccctggctgtaccgcaccttccacaaggtgcaccaccagaacagcagcagctttgccctggccacccagtacatgtctgtgtgggagctgttcagcctgggcttctttgacatgatgaatgtgaccctgctgggctgccaccccctgaccaccctgaccttccacgtggtgaacatctggctgtctgtggaggaccacagcggctacaacttcccctggagcacccaccggctggtgcccttcggctggtatggaggagtggtgcaccacgacctgcaccacagccacttcaactgcaactttgccccctacttcacccactgggacaagatcctgggcaccctgaggacagcctctgtgcctgccaggtag

SEQ ID NO: 142387 - DNA, 819 bp, Artificial Sequence
  derived and/or modified sequence
atgagctgccacaactgcagcgacccccaggtgctgtgcagcagcggccagctgtttctacagcccctgtgggaccacctgcggagctgggaggccctcctccagtcccctttcttcccggttatattcagtatcaccacatacgtgggattctgcctgccgtttgtggtgttggatattctttgcagttgggtgcccgctcttcggaggtacaagattcaccctgatttcagcccctccgcacagcagctcctgccctgcttgggccaaacattatatcagcacgtcatgtttgtgtttccggtcacacttctgcactgggcccgatctccagctctgcttccccacgaggctcccgaactcctgcttctcctccatcatatcttattctgtctcctcctctttgacatggaattttttgtgtggcacttgctacatcacaaggttccatggctctaccggacattccacaaggttcatcaccagaattcaagttccttcgccctggccacacagtatatgagtgtgtgggaactgttttctctggggttcttcgacatgatgaacgtgacactccttggatgccaccctctcacgaccttgacttttcacgttgtaaatatctggctttctgtggaagaccatagtgggtacaattttccttggtccacacaccgcctggtgccattcggatggtatggcggcgtggtccaccatgatctgcatcatagccacttcaactgtaacttcgcgccctatttcacccactgggacaagatattaggaaccctgaggaccgcctctgttccagctaggtag

SEQ ID NO: 142388 - DNA, 819 bp, Artificial Sequence
  derived and/or modified sequence
atgagctgtcataattgtagtgaccctcaggtcttgtgcagctccggccagctgtttctgcaacccctatgggatcaccttcgctcatgggaggctctactacagtcaccttttttccctgtgatcttttcgatcaccacctatgtaggattttgcctgccattcgtggtcctggacatcctctgtagctgggtcccagctctaagacgctataagattcacccagacttttccccaagtgcacagcagttacttccatgccttggacagaccctttaccagcacgtgatgttcgttttcccagttactttgctgcactgggcccgttcaccagccctgcttccgcatgaagcaccagaactgctgctcctcctgcatcacatcctgttctgcttgctgctgttcgacatggagttttttgtgtggcaccttttacaccacaaagtgccatggctatacagaacctttcataaggtgcatcaccaaaattcctccagctttgcactggccacacagtacatgtcagtctgggaactgttcagtctgggtttctttgacatgatgaatgtcacccttcttggctgtcatccactcactactctaacctttcacgtcgtgaatatctggctgagtgtggaagaccattcaggatacaactttccatggagtactcaccgcttggttccctttggatggtatggaggtgttgtgcatcacgatctgcatcatagtcacttcaattgcaactttgccccttacttcacccattgggacaagattctgggaacgctccgaacagcgagcgtccccgcacggtag

SEQ ID NO: 142389 - DNA, 1378 bp, Artificial Sequence
  derived and/or modified sequence
agctgccttgcacagcctcgcaatgagctgccacaactgctccgacccccaggtcctttgcagctccgggcagctgttcctgcagcccctctgggaccacctgaggagctgggaggccctcctacagtcgcccttcttcccggtcatcttctccatcaccacatacgtgggcttttgcctgcccttcgtggtcctggatatcctgtgctcctgggtgcccgccctgcggcgctacaagatccaccctgacttctcgccatccgcgcagcagctgctaccttgcctggggcagaccctctaccagcatgtgatgtttgtgttccccgtgacgctgctgcattgggcccgcagcccggccctcctgccccacgaagctcccgagctgctcctgctgctgcaccacatcctgttctgcctgctactcttcgacatggagttcttcgtgtggcacctgctgcaccacaaggtgccctggctgtaccgcaccttccacaaggtgcaccaccagaactcgtcctcgttcgcgctggcaacgcagtatatgagcgtctgggaactgttttctttgggcttcttcgacatgatgaacgtcacactgctcgggtgccacccgctcaccaccctgaccttccacgtggtcaacatctggctttccgtggaggaccactccggctacaacttcccttggtccactcacagactggtgcccttcgggtggtacgggggtgtggtgcaccacgacctgcatcactctcactttaactgcaacttcgctccgtactttacacactgggacaaaatactgggaacgctgcggactgcatctgtcccagcgcggtgatgtggctgcggtgggtgcccctaagactcgggactgctgtgcctttcacacttgaatgaagagaaacacctgagctatatatttttttaaagcaactaacttattgctttatgtttatctatgaaaaccatagataaaatctgatgcatttttgtaatctgacaaagtaatttacatactgtttgtgtatcaatacaattttgtgttcttggtattcttagtctagctcacctcaatagccttgaatcctgcatatgaattagacattcatcactggcatatttagaatatctctaaaaggacttgtttgtagaataaggaattttctatgtttcaaagtgttctaaaacctggctaaaagaatgtatttttgtggatggtgttgacttctgactctaaaagcaatcaaacatgtttctgctggacagtgaccaagaattatagtaccttcttatatttttttatagaactgtatatttattttgaaagaaatgttattcgtgctttaaaaaggaaaaaaaaccatgaatcaaataa

SEQ ID NO: 142390 - DNA, 819 bp, Artificial Sequence
  derived and/or modified sequence
atgagctgccacaactgcagcgacccccaggtgctgtgcagcagcggccagctgttcctgcagcccctgtgggaccacctgagaagctgggaggccctgctgcagagccccttcttccccgtgatcttcagcatcaccacctacgtgggcttctgcctgcccttcgtggtgctggacatcctgtgcagctgggtgcccgccctgagaagatacaagatccaccccgacttcagccccagcgcccagcagctgctgccctgcctgggccagaccctgtaccagcacgtgatgttcgtgttccccgtgaccctgctgcactgggccagaagccccgccctgctgccccacgaggcccccgagctgctgctgctgctgcaccacatcctgttctgcctgctgctgttcgacatggagttcttcgtgtggcacctgctgcaccacaaggtgccctggctgtacagaaccttccacaaggtgcaccaccagaacagcagcagcttcgccctggccacccagtacatgagcgtgtgggagctgttcagcctgggcttcttcgacatgatgaacgtgaccctgctgggctgccaccccctgaccaccctgaccttccacgtggtgaacatctggctgagcgtggaggaccacagcggctacaacttcccctggagcacccacagactggtgcccttcggctggtacggcggcgtggtgcaccacgacctgcaccacagccacttcaactgcaacttcgccccctacttcacccactgggacaagatcctgggcaccctgagaaccgccagcgtgcccgccagatag

SEQ ID NO: 142391 - protein, 668 aa, Artificial Sequence
  derived and/or modified sequence
MTSTGKDGGAQHAQYVGPYRLEKTLGKGQTGLVKLGVHCVTCQKVAIKIVNREKLSESVLMKVEREIAILKLIEHPHVLKLHDVYENKKYLYLVLEHVSGGELFDYLVKKGRLTPKEARKFFRQIISALDFCHSHSICHRDLKPENLLLDEKNNIRIADFGMASLQVGDSLLETSCGSPHYACPEVIRGEKYDGRKADVWSCGVILFALLVGALPFDDDNLRQLLEKVKRGVFHMPHFIPPDCQSLLRGMIEVDAARRLTLEHIQKHIWYIGGKNEPEPEQPIPRKVQIRSLPSLEDIDPDVLDSMHSLGCFRDRNKLLQDLLSEEENQEKMIYFLLLDRKERYPSQEDEDLPPRNEIDPPRKRVDSPMLNRHGKRRPERKSMEVLSVTDGGSPVPARRAIEMAQHGQRSRSISGASSGLSTSPLSSPRVTPHPSPRGSPLPTPKGTPVHTPKESPAGTPNPTPPSSPSVGGVPWRARLNSIKNSFLGSPRFHRRKLQVPTPEEMSNLTPESSPELAKKSWFGNFISLEKEEQIFVVIKDKPLSSIKADIVHAFLSIPSLSHSVISQTSFRAEYKATGGPAVFQKPVKFQVDITYTEGGEAQKENGIYSVTFTLLSGPSRRFKRVVETIQAQLLSTHDPPAAQHLSDTTNCMEMMTGRLSKCGIIPKS

SEQ ID NO: 142392 - DNA, 2007 bp, Artificial Sequence
  derived and/or modified sequence
atgaccagcaccggcaaggacggcggcgcccagcacgcccagtacgtgggcccctacagactggagaagaccctgggcaagggccagaccggcctggtgaagctgggcgtgcactgcgtgacctgccagaaggtggccatcaagatcgtgaacagagagaagctgagcgagagcgtgctgatgaaggtggagagagagatcgccatcctgaagctgatcgagcacccccacgtgctgaagctgcacgacgtgtacgagaacaagaagtacctgtacctggtgctggagcacgtgagcggcggcgagctgttcgactacctggtgaagaagggcagactgacccccaaggaggccagaaagttcttcagacagatcatcagcgccctggacttctgccacagccacagcatctgccacagagacctgaagcccgagaacctgctgctggacgagaagaacaacatcagaatcgccgacttcggcatggccagcctgcaggtgggcgacagcctgctggagaccagctgcggcagcccccactacgcctgccccgaggtgatcagaggcgagaagtacgacggcagaaaggccgacgtgtggagctgcggcgtgatcctgttcgccctgctggtgggcgccctgcccttcgacgacgacaacctgagacagctgctggagaaggtgaagagaggcgtgttccacatgccccacttcatcccccccgactgccagagcctgctgagaggcatgatcgaggtggacgccgccagaagactgaccctggagcacatccagaagcacatctggtacatcggcggcaagaacgagcccgagcccgagcagcccatccccagaaaggtgcagatcagaagcctgcccagcctggaggacatcgaccccgacgtgctggacagcatgcacagcctgggctgcttcagagacagaaacaagctgctgcaggacctgctgagcgaggaggagaaccaggagaagatgatctacttcctgctgctggacagaaaggagagataccccagccaggaggacgaggacctgccccccagaaacgagatcgacccccccagaaagagagtggacagccccatgctgaacagacacggcaagagaagacccgagagaaagagcatggaggtgctgagcgtgaccgacggcggcagccccgtgcccgccagaagagccatcgagatggcccagcacggccagagaagcagaagcatcagcggcgccagcagcggcctgagcaccagccccctgagcagccccagagtgaccccccaccccagccccagaggcagccccctgcccacccccaagggcacccccgtgcacacccccaaggagagccccgccggcacccccaaccccaccccccccagcagccccagcgtgggcggcgtgccctggagagccagactgaacagcatcaagaacagcttcctgggcagccccagattccacagaagaaagctgcaggtgcccacccccgaggagatgagcaacctgacccccgagagcagccccgagctggccaagaagagctggttcggcaacttcatcagcctggagaaggaggagcagatcttcgtggtgatcaaggacaagcccctgagcagcatcaaggccgacatcgtgcacgccttcctgagcatccccagcctgagccacagcgtgatcagccagaccagcttcagagccgagtacaaggccaccggcggccccgccgtgttccagaagcccgtgaagttccaggtggacatcacctacaccgagggcggcgaggcccagaaggagaacggcatctacagcgtgaccttcaccctgctgagcggccccagcagaagattcaagagagtggtggagaccatccaggcccagctgctgagcacccacgacccccccgccgcccagcacctgagcgacaccaccaactgcatggagatgatgaccggcagactgagcaagtgcggcatcatccccaagagctag

SEQ ID NO: 142393 - DNA, 2007 bp, Artificial Sequence
  derived and/or modified sequence
atgacaagcacgggaaaggacggcggcgctcagcatgctcaatacgtgggtccctatcgtctggaaaaaacgctaggaaagggccagaccgggctagtgaagctcggggtgcactgcgttacttgtcagaaagtggccattaagatcgttaatcgggagaagctgtccgagagcgtcctaatgaaagtagagagagagatagcaatccttaaactgattgaacatcctcacgtgctgaaactgcacgatgtgtatgaaaacaagaagtacctatacctagtccttgaacacgtgtccggcggtgagctatttgactacctggtcaagaaagggagactcactcctaaagaggccagaaagtttttcagacagattatctctgccctggacttctgtcatagtcattctatctgccatagggacctcaaaccagagaacctgctgctggatgaaaagaataacattcgaattgccgactttggcatggccagtcttcaggtcggggactccctgctggagacttcatgtggatcgcctcactacgcctgccctgaagtgattcggggggagaagtatgacggaagaaaggccgatgtgtggtcttgcggcgtgattctctttgcactgttagtgggcgcactcccatttgacgatgacaatctgcgccagctcctagaaaaagtgaagaggggagtgttccacatgccccatttcataccacccgactgccagtctctgttgcgcggtatgatcgaagtggacgccgctcgcaggctgacactcgaacatatacagaagcacatctggtacatcgggggcaaaaatgagccggagcctgagcaacccattccgcgcaaggtccagattcgaagcctccccagtctggaggatatcgatcccgacgtactcgacagcatgcactcactcggttgctttcgcgaccgaaacaaacttctgcaggatcttttatccgaggaggaaaatcaggaaaaaatgatttacttcctacttctcgacaggaaggaacgctatccctcccaggaggatgaggatctgcccccccgaaacgagatcgatcctccgcgcaaaagagtggattccccaatgcttaatcgacacgggaagcggcgcccggagcgtaaaagcatggaggtccttagtgttaccgacggggggtctccggtgccagctaggagagctattgagatggctcagcacggacagcgcagtaggtccatcagcggagccagcagcgggttgagcaccagtcctttgtcaagccccagagttaccccgcacccaagtcctcgcggttccccccttcccactcctaaaggcactcccgtccacacaccaaaagaatcacctgcgggaacgccaaacccaaccccaccatcctctccctccgtgggtggcgttccctggagggcaaggctgaattccatcaagaacagcttccttggttctccacgttttcatcgccgaaagcttcaggtgccaactcccgaagagatgagtaacctcaccccagagagcagccctgagctggccaaaaagagttggttcgggaacttcatatccctggaaaaggaagaacagatcttcgtggtgataaaggacaagcctctgtccagtataaaggctgacattgtacacgccttcctgtctattccgagtctctcccattccgtgatctcacagacgtcttttcgagctgagtacaaggccaccggaggcccggcagtgttccagaaacctgtcaagtttcaagtggacatcacatacaccgagggaggtgaggctcagaaagagaatggcatttattcagtgacgtttacacttctatctggaccaagtcgacgctttaaaagagtcgtggagactatccaggcccaactactcagtacccacgatccgccagccgcacagcatctgagcgacaccacaaactgtatggaaatgatgaccgggcggctgtccaagtgcggtatcatccctaagagctag

SEQ ID NO: 142394 - DNA, 2007 bp, Artificial Sequence
  derived and/or modified sequence
atgaccagcacaggcaaggatggaggagcccagcacgcccagtatgtgggcccctaccgcctggagaagaccctgggcaagggccagacaggcctggtgaagctgggcgtgcactgtgtgacctgccagaaggtggccatcaagatcgtgaaccgggagaagctgtctgagagcgtgctgatgaaggtggagcgggagatcgccatcctgaagctgattgagcacccccacgtgctgaagctgcatgatgtgtatgagaacaagaagtacctgtacctggtgctggagcacgtgtctggaggagagctgtttgactacctggtgaagaagggccgcctgacccccaaggaggccaggaagttcttccggcagatcatcagcgccctggacttctgccacagccacagcatctgccaccgggacctgaagccagagaacctgctgctggatgagaagaacaacatcagaattgctgactttggcatggccagcctgcaggtgggggacagcctgctggagaccagctgtggcagcccccactacgcctgcccagaggtgatccggggggagaagtatgatggcaggaaggcagatgtgtggagctgtggggtcatcctgtttgccctgctggtgggcgccctgccctttgatgatgacaacctgcggcagctgctggagaaggtgaagaggggcgtcttccacatgccccacttcatccccccagactgccagagcctgctgcggggcatgattgaggtggatgctgcccggcggctgaccctggagcacatccagaagcacatctggtacatcggcggcaagaatgaacctgagcctgagcagcccatccccaggaaggtgcagatccgcagcctgcccagcctggaggacatcgaccctgatgtgctggacagcatgcacagcctgggctgcttccgggacaggaacaagctgctgcaggacctgctgtctgaggaggagaaccaggagaagatgatctacttcctgctgctggacaggaaggagcgctaccccagccaggaggatgaggacctgcccccaagaaatgaaattgacccccccaggaagagggtggacagccccatgctgaacagacatggcaagaggaggcctgagaggaagtccatggaggtgctgtctgtgacagatggcggcagccctgtgcctgcccggcgggccatcgagatggcccagcacggccagaggagccgcagcatcagcggggccagcagcggcctgagcaccagccccctgagcagcccccgggtgaccccccaccccagcccccggggcagccccctgcccacccccaagggcacccctgtgcacacccccaaggagagccctgctggcacccccaaccccaccccacccagcagccccagcgtgggcggcgtgccctggagggcccggctgaacagcatcaagaacagcttcctgggcagcccccgcttccacaggaggaagctgcaggtgcccaccccagaggagatgagcaacctgaccccagagagcagccctgagctggccaagaagtcctggtttggaaacttcatcagcctggagaaggaggagcagatctttgtggtgatcaaggacaagcccctgagcagcatcaaggctgacatcgtgcacgccttcctgagcatccccagcctgagccacagcgtcatcagccagaccagcttccgggcagagtacaaggccactggaggccctgctgtgttccagaagcctgtgaagttccaggtggacatcacctacacagagggcggggaggcccagaaggaaaatggcatctacagcgtgaccttcaccctgctgagcggccccagccgccgcttcaagagggtggtggagaccatccaggcccagctgctgagcacccatgaccccccagctgcccagcacctgagtgacaccaccaactgcatggagatgatgacaggccgcctgagcaaatgtggcatcatccccaagagctag

SEQ ID NO: 142395 - DNA, 2007 bp, Artificial Sequence
  derived and/or modified sequence
atgaccagcaccggcaaggacggcggcgcccagcacgcccagtacgtggggccatatcgcctcgaaaaaaccctgggcaaagggcagactggtctcgtcaagcttggcgtgcactgtgtgacctgccagaaggtggcaatcaagatcgttaacagggagaagctgtcagaatccgtgcttatgaaggtcgagcgtgagatagccattcttaagctcattgaacatcctcatgtactaaaacttcacgacgtgtacgagaacaaaaaatatctgtatctggtgctcgagcacgtgtcaggcggcgagctttttgactatctcgttaagaaagggcggcttactcctaaagaagcacgtaaattttttaggcagatcatctctgccctggacttttgccacagccatagcatctgtcaccgcgacctgaagcccgaaaaccttttgttggatgagaagaataatataaggatagcagatttcggcatggcgagtctgcaggtgggagattctctgctggagacatcgtgtggatccccccactatgcctgtcccgaagtgatcagaggcgaaaagtacgacggcaggaaagccgacgtatggagttgtggcgtaatcctcttcgccctgctggtcggcgcccttccgttcgacgatgacaatttgcgccagctgctggaaaaagtgaaaagaggagtttttcatatgccccatttcatacctccagactgtcaatcacttctgagaggtatgatcgaggtggacgccgctaggagacttacccttgaacatatccagaagcacatctggtacattggaggcaagaatgagccggagcctgagcagcctattcccagaaaagtgcagatccgctcgctgcccagccttgaagacatagatccagacgtgctcgattctatgcactcattaggatgtttccgcgatcgaaataaactactgcaagatctgttgagtgaggaggaaaaccaggaaaagatgatttacttccttctgctggatcgcaaggagcggtatcccagccaggaggatgaagatctgccaccccggaacgagatagatcctcccaggaagagggtggattctccaatgctgaacaggcacgggaaacggagaccggaacgcaaaagcatggaagtactgtctgtgaccgatggcggatcaccagtgcctgctaggcgagccatcgagatggcccagcatggccagcggtctaggtctatttccggggcttcatctggcctctctacgtccccactctcttctcctcgtgtgactccccatccttctccaaggggctccccgctgcctactccaaaaggtacacccgtccatacccctaaggagagccccgctggaactccaaatcccacacccccgagtagcccttcggtcggtggagtgccttggcgggcccgccttaactccattaaaaacagcttcttgggaagcccccggtttcacagacgtaagctgcaggtacccacccccgaggagatgtccaatctgaccccagaatcttctcccgagctagctaagaagagttggttcggcaactttatctctctggagaaggaggaacagatcttcgtggtgatcaaagataagcctcttagcagtattaaggctgacattgtgcacgcctttctgtctataccttccttaagtcattcagtgatttctcagacctcattccgtgcggagtacaaagccactggcggtcccgccgtctttcaaaaaccggtgaagttccaggttgacattacctatacagaagggggcgaggctcaaaaagaaaacggcatctattctgttaccttcacactgttgtcagggccgagccgccgctttaaaagagtggtcgaaaccatccaggcccagctgttatctacccacgacccccccgccgcccagcacctaagtgatactactaattgcatggagatgatgactggccgcctgtctaagtgtggcatcatcccaaagtcctag

SEQ ID NO: 142396 - DNA, 2007 bp, Artificial Sequence
  derived and/or modified sequence
atgacttctactggaaaagacggcggagcccaacatgcccagtatgtcggtccctaccgattggaaaagaccctggggaaaggccagaccggactcgtaaaactaggggttcactgcgtgacttgtcagaaggtggccatcaaaatcgtcaaccgagagaaactgagcgagagcgtcctcatgaaagttgagcgcgagatagccattctgaagctgattgaacacccccatgtcctgaaactccacgacgtgtacgagaacaagaaatatctgtacctcgttttggagcacgtgtccggaggagaactttttgattatcttgttaagaagggcagactaaccccgaaagaggctcgaaagttctttcgtcagattatttccgctctcgatttctgccatagtcacagcatatgtcatagggatctgaagccagaaaacctccttttagatgagaagaacaatatacggattgcagactttggcatggcatccctgcaggtgggcgatagcttgctggaaacatcctgcgggagtccgcactacgcgtgtccagaagtcatccgtggagagaagtacgacggcaggaaggcagatgtctggtcatgtggcgtcatattgtttgctctcctggttggcgctttaccatttgacgatgataacctcaggcagctactagagaaggtgaagcgcggtgtgtttcacatgccacacttcattcccccagactgccaaagtctgctgcgaggaatgattgaggtagacgccgctagacgcctaacgctcgaacatattcagaagcatatttggtacataggcggaaaaaacgagccagagcccgagcaacccattcctcgaaaggtccagatcagatcgctgccatccctggaggacattgaccccgatgtgttagacagcatgcactcactgggctgcttcagggacagaaataaacttcttcaggacctcctctctgaggaggaaaatcaggagaaaatgatttattttctcctactcgacaggaaggaaagatatcccagtcaagaagatgaagacctgccccctaggaatgaaatagaccctccacgcaagagggtagatagtccgatgcttaaccgacatggcaaaaggcgacctgaacggaagagcatggaagtcctttctgtgactgatggcggaagtcccgtgccagccaggcgcgctatcgaaatggctcagcatggacagcggtctcgttccatctctggcgcatccagtggcttatctaccagcccgttatcatcccctagagttacacctcatccctctccaagaggatctcccctgcccactccaaaaggaacaccagtacacacccccaaggagtccccagcgggaactcctaaccccactccaccttcctccccatctgttggcggtgtcccgtggcgcgctcgcttgaactcgatcaagaactcctttttgggctctcctaggtttcaccgccgaaaactgcaggtgcctactcccgaggaaatgagcaacctaacccctgagagctctccagagctggcaaagaaatcctggttcggtaattttatctcgttagagaaagaggagcagatcttcgtggtcatcaaggacaaacctctctcaagtattaaggccgacatcgtacacgccttcctgtccatcccgtctctttcccattctgttatctcccagacatcttttcgtgccgagtacaaggcaaccgggggtcctgcggtcttccaaaaacccgttaagtttcaggtggacattacttatacagaagggggagaggcccagaaggagaacgggatctattctgtcaccttcacactgctttctgggccatccaggcgtttcaagagggtcgttgaaactattcaggcccagctccttagcactcacgatcctcccgcagctcagcatctgtccgatactacaaactgcatggagatgatgactgggagactgtcaaagtgtgggatcattcccaaatcttag

SEQ ID NO: 142397 - DNA, 4089 bp, Artificial Sequence
  derived and/or modified sequence
gctgttcggctcagctgcacggctcggctcggctcggctcggctcggctgcgcggccgctgacgggcgtgcgctgggggcgcggggcgcggggcgcgggcctcggcggcggcggcggcggcggcggcggaagccaggtgcccccgcccgccctgtcctctcgacgaggcggaggcgtcgccgcgggccaggcctcggactgccgcgtcggagtggacgcggggggcggcggcgcgggcggacgcgggcggcgcgaagcagcggggcccgcgggggcgccccggccgggtcggcgcggacggcactcggcggacgcgggcggacgctgggcggcccctccctgcccgcgcgcccgggcgcccctggccggcgccgggccccagagcgatgacatcgacggggaaggacggcggcgcgcagcacgcgcagtatgttgggccctaccggctggagaagacgctgggcaaggggcagacaggtctggtgaagctgggggttcactgcgtcacctgccagaaggtggccatcaagatcgtcaaccgtgagaagctcagcgagtcggtgctgatgaaggtggagcgggagatcgcgatcctgaagctcattgagcacccccacgtcctaaagctgcacgacgtttatgaaaacaaaaaatatttgtacctggtgctagaacacgtgtcaggtggtgagctcttcgactacctggtgaagaaggggaggctgacgcctaaggaggctcggaagttcttccggcagatcatctctgcgctggacttctgccacagccactccatatgccacagggatctgaaacctgaaaacctcctgctggacgagaagaacaacatccgcatcgcagactttggcatggcgtccctgcaggttggcgacagcctgttggagaccagctgtgggtccccccactacgcctgccccgaggtgatccggggggagaagtatgacggccggaaggcggacgtgtggagctgcggcgtcatcctgttcgccttgctggtgggggctctgcccttcgacgatgacaacttgcgacagctgctggagaaggtgaagcggggcgtgttccacatgccgcactttatcccgcccgactgccagagtctgctacggggcatgatcgaggtggacgccgcacgccgcctcacgctagagcacattcagaaacacatatggtatatagggggcaagaatgagcccgaaccagagcagcccattcctcgcaaggtgcagatccgctcgctgcccagcctggaggacatcgaccccgacgtgctggacagcatgcactcactgggctgcttccgagaccgcaacaagctgctgcaggacctgctgtccgaggaggagaaccaggagaagatgatttacttcctcctcctggaccggaaagaaaggtacccgagccaggaggatgaggacctgcccccccggaacgagatagaccctccccggaagcgtgtggactccccgatgctgaaccggcacggcaagcggcggccagaacgcaaatccatggaggtgctcagcgtgacggacggcggctccccggtgcctgcgcggcgggccattgagatggcccagcacggccagaggtctcggtccatcagcggtgcctcctcaggcctttccaccagcccactcagcagcccccgggtgacccctcacccctcaccaaggggcagtcccctccccacccccaaggggacacctgtccacacgccaaaggagagcccggctggcacgcccaaccccacgcccccgtccagccccagcgtcggaggggtgccctggagggcgcggctcaactccatcaagaacagctttctgggctcaccccgcttccaccgccggaaactgcaagttccgacgccggaggagatgtccaacctgacaccagagtcgtccccagagctggcgaagaagtcctggtttgggaacttcatcagcctggagaaggaggagcagatcttcgtggtcatcaaagacaaacctctgagctccatcaaggctgacatcgtgcacgccttcctgtcgattcccagtctcagccacagcgtcatctcccaaacgagcttccgggccgagtacaaggccacgggggggccagccgtgttccagaagccggtcaagttccaggttgatatcacctacacggagggtggggaggcgcagaaggagaacggcatctactccgtcaccttcaccctgctctcaggccccagccgtcgcttcaagagggtggtggagaccatccaggcccagctgctgagcacacacgacccgcctgcggcccagcacttgtcagacaccactaactgtatggaaatgatgacggggcggctttccaaatgtggaattatcccgaaaagttaacatgtcacctccacgaggccatcctctgtgaccgaaggcagctgctgcggacccgccctccctccgctcctgctgttgctgccgggcagtgaggcccagcccagcgccccgtccaccccgcggcagctcctcgcctcagctccgcacggcccgtgggaggaaggccaggctcgggggagcctcctccagcccggccgacccggactcccggtcacctgacccctcagcaagaacagcctgcctggtggccttctggggccaggacccctggtgggcaacgtagccacaggaacaggccccgtccaccgcctccacgccgcacctggaggcctcctcgcaggcccgtgccccgcctccctggctgcgccgcctccgtgtagtcttggcctcctcaggctgcctcccgtcctctcgtctcacccgcgcctcccttgcctcatctggggcggctgtgggctctggcgctcctctctggctgaggtggaaacagagacaccctgcggcaccagagccttcccagcaggccaggccgctgggctgggatcagtgttatttatttgccgttttaatttatggattctccgcacctctgttcagggaagggcggcggccacatcccctgccgtctgcgtgtctcaggcagtgggggggctggggccagggcgccctctgaggacagagctggtggggcgcgggggggctggcgagctactgtaaactttaaagaattcctgcaagatatttttataaacttttttttcttggtggtttttggaaaagggtgtgggggtgggggcgccgctggggcagggccaggttttgtgttttagtcccttgctcctgcttctttctacacacacatctaaagacggtgcggctcgctctgtcatgggttccgtctctctgtggagaagcagctccacctctgggggggctcggggcagaggggcggtgtcttgtagcgggcggcagcgccagcgcccctctgtcaggctggggcaatcttggttttgtgtccaaaggtgaaggggtaggaggagggccctcagctggccctccccacacacaggacggcaggggcactgtgaggcttttcttattaaaatgaaaaaattgaaaaaaaaggacaaagagtcggtggcgctcctctgcagggcgttctgtgcagagcgaggcccagggcgcagccctcagagggctgcaggcccaccctgcccagtgcccgccgccgtgcttcaccccagctccagcttctgtgttcccttccgcccatgtgcccagccctcccaggcgggcacagcccgggtgcggcggccgtgggggacggcgggtctgatgcatgcctctgccatggagtcgtctgtctgcttcggtgcctgcccctgcctcccacccacctcgtgtatagattttaacgcttctgttaacattagacctctgccacaggctgggatttctatacataagaacaaaagcaaacacctaggacagcaaacgccaggcggtacaggcgggaaggggctctccacggagatcgaggacacgaagcaaactgcctcttgcttgccttccccttttgtgcttcggacacacgcggactccagcaggcgccacggaaatgggcaagcccctgcagtgtacccctgtcataactgtgagcagctgcagctccggaacaataaatcccttccgcaaa

SEQ ID NO: 142398 - protein, 485 aa, Artificial Sequence
  derived and/or modified sequence
MGEPGFFVTGDRAGGRSWCLRRVGMSAGWLLLEDGCEVTVGRGFGVTYQLVSKICPLMISRNHCVLKQNPEGQWTIMDNKSLNGVWLNRARLEPLRVYSIHQGDYIQLGVPLENKENAEYEYEVTEEDWETIYPCLSPKNDQMIEKNKELRTKRKFSLDELAGPGAEGPSNLKSKINKVSCESGQPVKSQGKGEVASTPSDNLDPKLTALEPSKTTGAPIYPGFPKVTEVHHEQKASNSSASQRSLQMFKVTMSRILRLKIQMQEKHEAVMNVKKQTQKGNSKKVVQMEQELQDLQSQLCAEQAQQQARVEQLEKTFQEEEQHLQGLEIAQGEKDLKQQLAQALQEHWALMEELNRSKKDFEAIIQAKNKELEQTKEEKEKMQAQKEEVLSHMNDVLENELQCIICSEYFIEAVTLNCAHSFCSYCINEWMKRKIECPICRKDIKSKTYSLVLDNCINKMVNNLSSEVKERRIVLIRERKAKRLF

SEQ ID NO: 142399 - protein, 98 aa, Artificial Sequence
  derived and/or modified sequence
MGEPGFFVTGDRAGGRSWCLRRVGMSAGWLLLEDGCEVTVGRGFGVTYQLVSKICPLMISRNHCVLKQNPEGQWTIMDNKSFPSEKAEDFTAAGERFL

SEQ ID NO: 142400 - DNA, 5639 bp, Artificial Sequence
  derived and/or modified sequence
cttgcgcaggcgtagtgctcctgcttcctggccgagggcgggcgagcggagcctgctttcgcagcgatcgcgagcgtgtggcgattgcttctgtctgttatttagatatggaagctgaggggatgcacagaggcagccagaacctaggtcagggtctcgctcggtgctgaccgcccccggggtcgagtaggcgatgggggagcccggcttcttcgtcacaggagaccgcgccggtggccggagctggtgcctgcggcgggtggggatgagcgccgggtggctgctgctggaagatgggtgcgaggtgactgtaggacgaggatttggtgtcacataccaactggtatcaaaaatctgccccctgatgatttctcgaaaccactgtgttttgaagcagaatcctgagggccaatggacaattatggacaacaagagtctaaatggtgtttggctgaacagagcgcgtctggaacctttaagggtctattccattcatcagggagactacatccaacttggagtgcctctggaaaataaggagaatgcggagtatgaatatgaagttactgaagaagactgggagacaatatatccttgtctttccccaaagaatgaccaaatgatagaaaaaaataaggaattgagaactaaaaggaaattcagtttggatgaattagcaggtcctggagctgaaggcccctcaaatttgaaatccaaaataaataaagtgtcttgtgaatctggtcagccagtgaaatcacaggggaaaggtgaagtggccagtacaccctctgacaatttggatcctaagttgactgcccttgagccaagtaagaccacaggggctcccatttaccctggcttccccaaagtcacagaggttcatcatgagcagaaagcctcaaactcttcagcatctcagagaagcttacagatgtttaaggtgaccatgtccaggattctgaggctcaaaatacagatgcaggaaaaacatgaagccgttatgaatgtgaaaaagcagacccaaaaggggaactcaaagaaagttgtgcaaatggagcaggaacttcaggacttacagtcccagctgtgtgcagagcaggctcagcagcaggcaagagtggagcaactagagaagactttccaggaagaggaacagcatcttcagggtttggagatagcccaaggagaaaaggacctgaagcaacagctggcccaggctctgcaggagcattgggctctaatggaagagctaaatcgcagcaagaaggactttgaagcaatcattcaagccaagaacaaagaattagagcagaccaaggaagagaaggagaagatgcaagcacagaaggaagaagttcttagccacatgaatgatgtgctagagaatgagctccaatgtattatttgttcagaatacttcattgaggctgtcaccttgaactgtgcccacagtttctgctcctactgtatcaatgaatggatgaagcggaagatagaatgccccatttgtcggaaggacattaagtccaaaacgtactctttggttctggacaattgcattaataagatggtaaataatctgagctcagaagtgaaagaacgacgaattgttctcattagggaacgaaaagcaaagagattgttctgaagaccgtgctctaagggcatttgaaagactgccaggtagtgcgagcctgagatggtctggaggattctctctagccgtgactccgctgctctgaaggtcaactgagaagtcttgtgggacagagacttgagttaggaagccctcagtcacttgccttccacggtggccagccctgctgccatcattggctgaagcaccaccaggattcacggcacccaactgcttcagggtacttcgtagactctgcctcactacatgtcgaaagagttatttgagttctcttctgtttttttttaatttgttgttgttgttactgttttgatacctcggaaacacctccgttgacagttgttttggataggttgggtgtaccccatggctgcctctgaaggcagtgtctattttgagaggatggcttacctcttctttgtgaaaatactatctcatttcctggaaataaaatgtaaaacctgtcagttgctcagctgggctttggtgtatttaccttccttcccttcctgctcccagacagtctcacaagtaaacaccagcagctcatagattacaaccaagaaagtgactgtatcagatgatagacttcaagtgaatgtcagcctaagaggccaagctgcagatcgtggcaacagatgagctctgttaacctcctgactgtcgtgtttcctttttattacagaggtgggtcactgtttaccttgtttcaggggtgggagaaactcctttccttcagctggcatttgaatgtttccaaatctattttatctgacgtcatgaacacacaggcaatgattttatgacaacttgatgtgcttttttctttatttttcttttacattagaagttttctctcttttctccacctctcctttatttttaattttaattttaatttttgaaacaagatctgactctgttgcccaagctggagtacagtagtgcaatctcagctcactgcaacctccacctcccagactcaagccatcctcccacctcaacctcccaagtagctgggactacaggcatatgccatcacacccagctaatttttgtttttctgtagagacagggtttcaccatgttggccaggctggtctcaaattcctgaccttaagtgatccacctgcctaggcctctaaaatgctgggattacaggcgtgagccaccacgcccagcctataccccatgtattttcataaagggttggaaactattgattgccaactttttaaggatggtagggattttttctttgttgaatatactgtgaattttgggattctggagtccttagtcttcatttccattcttctgcccatgattactgatcaaaatactggtagagtcatggaggaagtaagttaaatgtggaaaaaatgctttaaaagtacttactataaccacatcataagaattctggaaaaatagagaacaaaaggaaaagattgttaccaccttgatttaataacttcttgtttccccatacatgtgttttgtttatagattgcatgggtatatgtcaatttttatatgttctgtgtttagtttacatattgtaattcatttttaagagagtacagacatacactttttgagtaggcaatatgttcacatagtttgaaattaaaggtacaaaatggcgtagaatgaaatgcctctcaccctttccccacagcgactacttcccactcagaggcaacaagtattacagttgcttgtatattcttccagagatctctgtctatacaagcaaaaacacatgtggtctttttccttgctttgcacaaatggtaaactgtacgctattctgaaccttgcttttttcagatatatgttggcaacagttccatgtcagtacatagtttcctttctttattacagctgcctgttttttcattgtgtatttgcaccatcatttacttttctggcttacttttgatagaaatctaggttggttcaaacctttttactcttaaaacaatgctgcagttaacacccttgtacatatatctttagagagaagatattttaaaaagaaatacctttttaaaaattattttattattttttaatagagactatgttgcctaggctggtcttgaaattctgggctaaagcaatcctaccaccttggcctcccaaagtgctgagattacaggcatgagccattgcacctggccaagaagagacatcttgacttgagcctgaagactatgtacagagactgacctcacagactgaccattccatcccacagctgctggacatagagtgatttgcagcccctcctttcagagtaccacatccctctcaagtgttccacaacatctaggaaagtgagctcttaaagacagactaaaaagagtaataaatcaatacaacaacattaaaagccagactagcggagtttgaatcttggccctgctgttagtaactgtgtgagccttgggcaagttactcagcctccttgtgtcttggttttggtttcttcatctctaagtaattatatctgtcattattgccctgatcacaaacaaaagcctgaatgtactatgtttaaaagacaaaccaaaaattaacccaaacttgcattatttgtctgagctacagaatgttctttccttggagagatatctgatattaaacatcatctgcattttacttgcctagaaaatacacggtaacttttctgccttgcagcatcaaactatagtacagctgagccccagtgctgtgcagtctgactctaattaaaggcaccttctttacagcagggctctggggaactggaaaagggggtttgtttcattatctggttttattaagcagatgaatgcagccagctatatgaagcactttgcagtgaatggcaggtgtcccatatctggttatgttaacctagaaagggctcactctacctctaggcatgtttcatcccaacaatcagactgtgccaaagcaggggactttgtcctttgtggattgcatagctggatacccatcatctgtttctctgattggaagctgctgttgtacagaaagacctgcatttcccccttgtctccagttctctcactactttttcctcctctgtgagtgaccatccaggcagtcaccataactgctggagtgtctgggattggtagctctctccaactgcctgcttgctctttacagcctctctctgtgactggaatctctccacctcatcgtatctaaggataacccagaaacatggggtgtcctaggtatgtttatctcgacactgaaccccctaggcttctgatgaatccagtgattagctaaatttgacatagaaagtaagaaggaatgtctactttgtattgtggtcctaatctaagatcaggagaatcctggaattgttatctgtctcttgctctgagatacagacttgttcataggtgtggggcctgattggaacaggatctgccattggtcacaataggtcaagggcttgttctgaaccctagttagcttcattcagagaaagaaacttcctacctggtcagctttttcagcttctccaacaaatgggagttgaggcagtaggagtgtggggttcttgggaagacgatggggccttgtattaaggagaaataatgaactatcttcttgattcttccattgagaaaagcatatgaatcctaggaaagggctcagcctgtgataggcattcaataaatactccaatgctgtcattcctttgtctacagcatccccaaacaatgtaccagtgatgggctacctgagctcatctagtcgccaagcagtatctcctgcttgctgctgctttactacattccagatgcccacctcatccaatttccagagccactatctctgctgtccactttccttcaggctctgtgaatacttcaacctgctgtgatttggggccgtttgtactctgcatgtattcaataaattcaattcagcaatagttaaaaaaaaa

SEQ ID NO: 142401 - DNA, 1458 bp, Artificial Sequence
  derived and/or modified sequence
atgggcgagcccggcttcttcgtgaccggcgacagagccggcggcagaagctggtgcctgagaagagtgggcatgagcgccggctggctgctgctggaggacggctgcgaggtgaccgtgggcagaggcttcggcgtgacctaccagctggtgagcaagatctgccccctgatgatcagcagaaaccactgcgtgctgaagcagaaccccgagggccagtggaccatcatggacaacaagagcctgaacggcgtgtggctgaacagagccagactggagcccctgagagtgtacagcatccaccagggcgactacatccagctgggcgtgcccctggagaacaaggagaacgccgagtacgagtacgaggtgaccgaggaggactgggagaccatctacccctgcctgagccccaagaacgaccagatgatcgagaagaacaaggagctgagaaccaagagaaagttcagcctggacgagctggccggccccggcgccgagggccccagcaacctgaagagcaagatcaacaaggtgagctgcgagagcggccagcccgtgaagagccagggcaagggcgaggtggccagcacccccagcgacaacctggaccccaagctgaccgccctggagcccagcaagaccaccggcgcccccatctaccccggcttccccaaggtgaccgaggtgcaccacgagcagaaggccagcaacagcagcgccagccagagaagcctgcagatgttcaaggtgaccatgagcagaatcctgagactgaagatccagatgcaggagaagcacgaggccgtgatgaacgtgaagaagcagacccagaagggcaacagcaagaaggtggtgcagatggagcaggagctgcaggacctgcagagccagctgtgcgccgagcaggcccagcagcaggccagagtggagcagctggagaagaccttccaggaggaggagcagcacctgcagggcctggagatcgcccagggcgagaaggacctgaagcagcagctggcccaggccctgcaggagcactgggccctgatggaggagctgaacagaagcaagaaggacttcgaggccatcatccaggccaagaacaaggagctggagcagaccaaggaggagaaggagaagatgcaggcccagaaggaggaggtgctgagccacatgaacgacgtgctggagaacgagctgcagtgcatcatctgcagcgagtacttcatcgaggccgtgaccctgaactgcgcccacagcttctgcagctactgcatcaacgagtggatgaagagaaagatcgagtgccccatctgcagaaaggacatcaagagcaagacctacagcctggtgctggacaactgcatcaacaagatggtgaacaacctgagcagcgaggtgaaggagagaagaatcgtgctgatcagagagagaaaggccaagagactgttctag

SEQ ID NO: 142402 - DNA, 1458 bp, Artificial Sequence
  derived and/or modified sequence
atgggggagcctgggttcttcgtaactggagatcgggcaggtggaagaagctggtgtctccggcgggtcggcatgtcggccgggtggcttcttctcgaggatggctgcgaagtgaccgtgggccgcggattcggcgttacctaccagctggtaagtaagatttgccctctaatgatcagtagaaaccactgcgtgttgaagcagaaccctgagggccaatggactattatggataataaatcactgaatggcgtgtggctgaaccgggctcgattggaaccgctgagagtgtattccattcaccagggggactacatccagctgggtgtcccactcgagaacaaagaaaacgctgaatacgagtatgaggttaccgaagaggactgggaaacgatctatccctgcctctcgcccaaaaatgatcagatgatcgaaaaaaacaaggagctgcgtaccaagaggaagttcagcctggatgaattagcaggtcccggcgcagaaggacccagcaatttaaagagcaaaattaacaaggtctcctgtgagagcggccagcccgtcaaaagccaggggaaaggcgaggtggcaagtacaccgtctgacaacctggatccgaagctcactgcccttgagccgtctaaaaccaccggggccccaatctaccccggatttcccaaggttactgaagttcaccatgagcaaaaggcatctaattccagtgccagtcagagatctctacaaatgtttaaggtgactatgagtagaatcctacggctgaaaattcaaatgcaagaaaagcatgaggccgttatgaatgtgaaaaagcaaactcagaaaggaaactccaaaaaggtggttcagatggagcaggagctccaggatttgcagtcacagctgtgtgccgagcaggcgcagcagcaggccagagtagaacagctcgaaaagacatttcaggaggaagaacagcacctacagggcctagaaattgcccagggtgaaaaggacctgaaacagcagttggcacaggcactgcaggagcactgggcccttatggaggaactaaatcgtagtaagaaggattttgaggccattatccaggcgaaaaacaaagaactggagcagaccaaagaagagaaggagaaaatgcaggctcagaaagaggaggtcctgtctcacatgaacgacgtgcttgagaacgaacttcagtgtattatatgttccgagtacttcatcgaagcagtgactctgaattgtgcccattccttctgttcatactgcatcaacgagtggatgaaaaggaaaatcgaatgtcctatatgtcgcaaggacattaaatcgaaaacttactcattggtgttggacaactgtatcaataaaatggtgaacaacctttcctcagaagtcaaagagagacggattgttctcataagggagcgcaaggccaaaagactcttctag

SEQ ID NO: 142403 - DNA, 1458 bp, Artificial Sequence
  derived and/or modified sequence
atgggagagcccggcttctttgtgactggagacagagctgggggccgctcctggtgcctgcggcgggtgggcatgtctgctggctggctgctgctggaggatggctgtgaggtgacagtgggccggggcttcggcgtgacctaccagctggtgtccaagatctgccccctgatgatcagcaggaaccactgtgtgctgaagcagaaccctgagggccagtggaccatcatggacaacaagagcctgaatggagtgtggctgaacagagcccggctggagcccctgcgggtgtacagcatccaccagggcgactacatccagctgggcgtgcccctggagaacaaggaaaatgcagaatatgaatatgaggtgacagaggaggactgggagaccatctacccctgcctgagccccaagaatgaccagatgattgagaagaacaaggagctgcggaccaagaggaagttcagcctggatgagctggccggccctggagctgagggccccagcaacctgaagagcaagatcaacaaggtgtcctgtgagagcggccagcctgtgaagagccagggcaagggggaggtggccagcacccccagcgacaacctggaccccaagctgacagccctggagcccagcaagaccaccggggcccccatctacccaggcttccccaaggtgacagaggtgcaccacgagcagaaggccagcaacagcagcgccagccagaggagcctgcagatgttcaaggtgaccatgagccgcatcctgcggctgaagatccagatgcaggagaagcatgaagctgtgatgaatgtgaagaagcagacccagaagggcaacagcaagaaggtggtgcagatggagcaggagctgcaggacctgcagagccagctgtgtgccgagcaggcccagcagcaggcccgggtggagcagctggagaagaccttccaggaggaggagcagcacctgcagggcctggagatcgcccagggcgagaaggacctgaagcagcagctggcccaggccctgcaggagcactgggccctgatggaggagctgaacagaagcaagaaggactttgaggccatcatccaggccaagaacaaggagctggagcagaccaaggaggagaaggagaagatgcaggcccagaaggaggaggtgctgagccacatgaatgatgtgctggagaatgagctgcagtgcatcatctgcagcgagtacttcattgaagctgtgaccctgaactgtgcccacagcttctgcagctactgcatcaatgagtggatgaagaggaagattgagtgccccatctgcaggaaggacatcaagagcaagacctacagcctggtgctggacaactgcatcaacaagatggtgaacaacctgagcagcgaggtgaaggagaggagaattgtgctgatccgggagaggaaggccaagaggctcttctag

SEQ ID NO: 142404 - DNA, 1458 bp, Artificial Sequence
  derived and/or modified sequence
atgggcgagcccggcttcttcgtgaccggcgaccgggccggcggcagatcttggtgtttgaggagagtgggtatgagtgccggatggctgctgttagaagatggctgtgaagtgactgttgggaggggcttcggagtcacataccagttggtcagtaaaatttgtccactgatgatctcaagaaaccactgcgtgctgaaacagaatccagaaggccaatggaccatcatggacaataagtctcttaatggggtgtggcttaatcgtgcccgactggagccgctaagagtctacagcatacaccagggcgactatatccaactgggagtgcctctggagaataaggagaatgctgagtacgaatacgaggtgacggaggaggattgggagaccatttacccctgcctttccccaaaaaatgatcagatgatagagaagaacaaggagctccgcactaaacgaaagttcagtctcgacgagctcgccgggccaggggctgagggtccgtctaatctgaagagtaaaattaataaagtgtcctgtgagagcgggcagccagttaaatctcagggcaagggagaagtggccagcactccgagtgacaatctagatccaaaactcactgccctggagccctctaagacaaccggagcaccaatctacccaggcttccccaaagtaacagaagttcaccacgaacaaaaggcctcaaactcttcggcctctcagaggtctttacaaatgttcaaagtgaccatgagcagaattctgcggctgaagattcaaatgcaggagaagcatgaagctgttatgaacgtgaaaaaacaaacacagaaagggaacagtaagaaggtggtccaaatggagcaagagctgcaagacctgcagagtcaactatgcgcagagcaggcacagcaacaggcacgggtagagcagttggagaagacgttccaagaagaagagcagcacttacaggggctcgagatcgctcagggcgaaaaggaccttaagcaacaacttgcacaggcccttcaggaacactgggccctaatggaggagctgaatcgaagcaagaaggactttgaggctattatacaagctaagaacaaagaacttgagcagacaaaagaagagaaagaaaagatgcaagcccagaaggaggaggtgctgtctcacatgaacgacgttctagagaacgaattgcagtgtataatttgttctgaatacttcatcgaagccgttaccctgaactgtgcacattccttttgttcctactgcatcaatgagtggatgaagagaaagattgagtgtccaatttgccggaaagacataaagtccaagacttactcattagtcctggacaactgcatcaacaagatggttaacaacttgtcgagtgaagtcaaggagcgtcgcatcgtgctgattagggagaggaaagccaaaaggctattttag

SEQ ID NO: 142405 - DNA, 1458 bp, Artificial Sequence
  derived and/or modified sequence
atgggagaacctggcttctttgtaactggcgaccgagccggaggcaggagttggtgtttgagaagagtaggcatgtctgcaggctggctactcctagaagacgggtgtgaagtgactgtgggacgtggatttggagtgacataccagttagtgagcaagatttgtcctctaatgatttcaaggaaccattgcgtgctgaaacagaaccccgaaggccagtggacaataatggacaataagtctttaaatggagtgtggctgaacagagcgagactagagccacttcgggtttattccattcaccagggcgattatatccaacttggggtgcccttagagaacaaggaaaacgcagagtacgaatacgaagttacagaggaggactgggagaccatttatccctgtctctctccaaagaatgatcagatgatcgagaagaataaggagctaaggactaagcgtaagttctcactggatgagttggccggaccaggagcagaggggccaagcaatctgaagtccaagattaacaaggtttcgtgcgaatctgggcaacccgttaaaagccagggtaagggggaggtggcctctacgccgtctgataacttagacccaaagctgacagccctagagccttccaagactaccggcgcaccaatctaccctggctttccaaaggttaccgaagtccatcacgaacaaaaagctagtaactccagcgctagccagaggtccctgcagatgtttaaggtcacaatgtctagaatactgcgtctgaagattcaaatgcaagaaaagcatgaagctgtcatgaacgtgaagaagcaaactcagaaagggaactccaaaaaggtcgtgcagatggagcaggagcttcaggatcttcaatcccaactgtgcgccgagcaggcacagcagcaggctagggtggagcagctggaaaagacatttcaggaggaagaacagcacctgcaagggctggagatcgctcaaggcgagaaggacctcaagcagcagttagcccaggccctgcaagaacattgggcccttatggaggagctgaatcgctcaaagaaggactttgaggctatcatccaagcgaagaacaaagagttggaacaaacaaaggaagagaaggagaagatgcaagcacagaaagaggaagtcctgtcccacatgaatgacgtacttgaaaacgaacttcagtgcattatctgctctgagtactttattgaagccgtgacactgaactgtgcgcattctttctgcagctattgcattaatgaatggatgaagaggaagattgagtgccctatttgtagaaaggacattaaaagtaagacctactcactggtcctcgacaactgcattaacaaaatggtcaacaacctgagcagcgaggttaaagaacgccgaatcgtgctcattcgcgagagaaaagctaaacggctcttttag

SEQ ID NO: 142406 - DNA, 5631 bp, Artificial Sequence
  derived and/or modified sequence
cttgcgcaggcgtagtgctcctgcttcctggccgagggcgggcgagcggagcctgctttcgcagcgatcgcgagcgtgtggcgattgcttctgtctgttatttagatatggaagctgaggggatgcacagaggcagccagaacctaggtcagggtctcgctcggtgctgaccgcccccggggtcgagtaggcgatgggggagcccggcttcttcgtcacaggagaccgcgccggtggccggagctggtgcctgcggcgggtggggatgagcgccgggtggctgctgctggaagatgggtgcgaggtgactgtaggacgaggatttggtgtcacataccaactggtatcaaaaatctgccccctgatgatttctcgaaaccactgtgttttgaagcagaatcctgagggccaatggacaattatggacaacaagagtctaaatggtgtttggctgaacagagcgcgtctggaacctttaagggtctattccattcatcagggagactacatccaacttggagtgcctctggaaaataaggagaatgcggagtatgaatatgaagttactgaagaagactgggagacaatatatccttgtctttccccaaagaatgaccaaatgatagaaaaaaataaggaattgagaactaaaaggaaattcagtttggatgaattagcaggtcctggagctgaaggcccctcaaatttgaaatccaaaataaataaagtgtcttgtgaatctggtcagccagtgaaatcacaggggaaaggtgaagtggccagtacaccctctgacaatttggatcctaagttgactgcccttgagccaagtaagaccacaggggctcccatttaccctggcttccccaaagtcacagaggttcatcatgagcagaaagcctcaaactcttcagcatctcagagaagcttacagatgtttaaggtgaccatgtccaggattctgaggctcaaaatacagatgcaggaaaaacatgaagccgttatgaatgtgaaaaagcagacccaaaaggggaactcaaagaaagttgtgcaaatggagcaggaacttcaggacttacagtcccagctgtgtgcagagcaggctcagcagcaggcaagagtggagcaactagagaagactttccaggaagaggaacagcatcttcagggtttggagatagcccaaggagaaaaggacctgaagcaacagctggcccaggctctgcaggagcattgggctctaatggaagagctaaatcgcagcaagaaggactttgaagcaatcattcaagccaagaacaaagaattagagcagaccaaggaagagaaggagaagatgcaagcacagaaggaagaagttcttagccacatgaatgatgtgctagagaatgagctccaatgtattatttgttcagaatacttcattgaggctgtcaccttgaactgtgcccacagtttctgctcctactgtatcaatgaatggatgaagcggaagatagaatgccccatttgtcggaaggacattaagtccaaaacgtactctttggttctggacaattgcattaataagatggtaaataatctgagctcagaagtgaaagaacgacgaattgttctcattagggaacgaaaagcaaagagattgttctgaagaccgtgctctaagggcatttgaaagactgccaggtagtgcgagcctgagatggtctggaggattctctctagccgtgactccgctgctctgaaggtcaactgagaagtcttgtgggacagagacttgagttaggaagccctcagtcacttgccttccacggtggccagccctgctgccatcattggctgaagcaccaccaggattcacggcacccaactgcttcagggtacttcgtagactctgcctcactacatgtcgaaagagttatttgagttctcttctgtttttttttaatttgttgttgttgttactgttttgatacctcggaaacacctccgttgacagttgttttggataggttgggtgtaccccatggctgcctctgaaggcagtgtctattttgagaggatggcttacctcttctttgtgaaaatactatctcatttcctggaaataaaatgtaaaacctgtcagttgctcagctgggctttggtgtatttaccttccttcccttcctgctcccagacagtctcacaagtaaacaccagcagctcatagattacaaccaagaaagtgactgtatcagatgatagacttcaagtgaatgtcagcctaagaggccaagctgcagatcgtggcaacagatgagctctgttaacctcctgactgtcgtgtttcctttttattacagaggtgggtcactgtttaccttgtttcaggggtgggagaaactcctttccttcagctggcatttgaatgtttccaaatctattttatctgacgtcatgaacacacaggcaatgattttatgacaacttgatgtgcttttttctttatttttcttttacattagaagttttctctcttttctccacctctcctttatttttaattttaattttaatttttgaaacaagatctgactctgttgcccaagctggagtacagtagtgcaatctcagctcactgcaacctccacctcccagactcaagccatcctcccacctcaacctcccaagtagctgggactacaggcatatgccatcacacccagctaatttttgtttttctgtagagacagggtttcaccatgttggccaggctggtctcaaattcctgaccttaagtgatccacctgcctaggcctctaaaatgctgggattacaggcgtgagccaccacgcccagcctataccccatgtattttcataaagggttggaaactattgattgccaactttttaaggatggtagggattttttctttgttgaatatactgtgaattttgggattctggagtccttagtcttcatttccattcttctgcccatgattactgatcaaaatactggtagagtcatggaggaagtaagttaaatgtggaaaaaatgctttaaaagtacttactataaccacatcataagaattctggaaaaatagagaacaaaaggaaaagattgttaccaccttgatttaataacttcttgtttccccatacatgtgttttgtttatagattgcatgggtatatgtcaatttttatatgttctgtgtttagtttacatattgtaattcatttttaagagagtacagacatacactttttgagtaggcaatatgttcacatagtttgaaattaaaggtacaaaatggcgtagaatgaaatgcctctcaccctttccccacagcgactacttcccactcagaggcaacaagtattacagttgcttgtatattcttccagagatctctgtctatacaagcaaaaacacatgtggtctttttccttgctttgcacaaatggtaaactgtacgctattctgaaccttgcttttttcagatatatgttggcaacagttccatgtcagtacatagtttcctttctttattacagctgcctgttttttcattgtgtatttgcaccatcatttacttttctggcttacttttgatagaaatctaggttggttcaaacctttttactcttaaaacaatgctgcagttaacacccttgtacatatatctttagagagaagatattttaaaaagaaatacctttttaaaaattattttattattttttaatagagactatgttgcctaggctggtcttgaaattctgggctaaagcaatcctaccaccttggcctcccaaagtgctgagattacaggcatgagccattgcacctggccaagaagagacatcttgacttgagcctgaagactatgtacagagactgacctcacagactgaccattccatcccacagctgctggacatagagtgatttgcagcccctcctttcagagtaccacatccctctcaagtgttccacaacatctaggaaagtgagctcttaaagacagactaaaaagagtaataaatcaatacaacaacattaaaagccagactagcggagtttgaatcttggccctgctgttagtaactgtgtgagccttgggcaagttactcagcctccttgtgtcttggttttggtttcttcatctctaagtaattatatctgtcattattgccctgatcacaaacaaaagcctgaatgtactatgtttaaaagacaaaccaaaaattaacccaaacttgcattatttgtctgagctacagaatgttctttccttggagagatatctgatattaaacatcatctgcattttacttgcctagaaaatacacggtaacttttctgccttgcagcatcaaactatagtacagctgagccccagtgctgtgcagtctgactctaattaaaggcaccttctttacagcagggctctggggaactggaaaagggggtttgtttcattatctggttttattaagcagatgaatgcagccagctatatgaagcactttgcagtgaatggcaggtgtcccatatctggttatgttaacctagaaagggctcactctacctctaggcatgtttcatcccaacaatcagactgtgccaaagcaggggactttgtcctttgtggattgcatagctggatacccatcatctgtttctctgattggaagctgctgttgtacagaaagacctgcatttcccccttgtctccagttctctcactactttttcctcctctgtgagtgaccatccaggcagtcaccataactgctggagtgtctgggattggtagctctctccaactgcctgcttgctctttacagcctctctctgtgactggaatctctccacctcatcgtatctaaggataacccagaaacatggggtgtcctaggtatgtttatctcgacactgaaccccctaggcttctgatgaatccagtgattagctaaatttgacatagaaagtaagaaggaatgtctactttgtattgtggtcctaatctaagatcaggagaatcctggaattgttatctgtctcttgctctgagatacagacttgttcataggtgtggggcctgattggaacaggatctgccattggtcacaataggtcaagggcttgttctgaaccctagttagcttcattcagagaaagaaacttcctacctggtcagctttttcagcttctccaacaaatgggagttgaggcagtaggagtgtggggttcttgggaagacgatggggccttgtattaaggagaaataatgaactatcttcttgattcttccattgagaaaagcatatgaatcctaggaaagggctcagcctgtgataggcattcaataaatactccaatgctgtcattcctttgtctacagcatccccaaacaatgtaccagtgatgggctacctgagctcatctagtcgccaagcagtatctcctgcttgctgctgctttactacattccagatgcccacctcatccaatttccagagccactatctctgctgtccactttccttcaggctctgtgaatacttcaacctgctgtgatttggggccgtttgtactctgcatgtattcaataaattcaattcagcaatagtta

SEQ ID NO: 142407 - protein, 1068 aa, Artificial Sequence
  derived and/or modified sequence
MNSIKNVPARVLSRRPGHSLEAEREQFDKTQAISISKAINTQEAPVKEKHARRIILGTHHEKGAFTFWSYAIGLPLPSSSILSWKFCHVLHKVLRDGHPNVLHDCQRYRSNIREIGDLWGHLHDRYGQLVNVYTKLLLTKISFHLKHPQFPAGLEVTDEVLEKAAGTDVNNIFQLTVEMFDYMDCELKLSESVFRQLNTAIAVSQMSSGQCRLAPLIQVIQDCSHLYHYTVKLLFKLHSCLPADTLQGHRDRFHEQFHSLRNFFRRASDMLYFKRLIQIPRLPEGPPNFLRASALAEHIKPVVVIPEEAPEDEEPENLIEISTGPPAGEPVVVADLFDQTFGPPNGSVKDDRDLQIESLKREVEMLRSELEKIKLEAQRYIAQLKSQVNALEGELEEQRKQKQKALVDNEQLRHELAQLRAAQLEGERSQGLREEAERKASATEARYNKLKEKHSELVHVHAELLRKNADTAKQLTVTQQSQEEVARVKEQLAFQVEQVKRESELKLEEKSDQLEKLKRELEAKAGELARAQEALSHTEQSKSELSSRLDTLSAEKDALSGAVRQREADLLAAQSLVRETEAALSREQQRSSQEQGELQGRLAERESQEQGLRQRLLDEQFAVLRGAAAEAAGILQDAVSKLDDPLHLRCTSSPDYLVSRAQEALDAVSTLEEGHAQYLTSLADASALVAALTRFSHLAADTIINGGATSHLAPTDPADRLIDTCRECGARALELMGQLQDQQALRHMQASLVRTPLQGILQLGQELKPKSLDVRQEELGAVVDKEMAATSAAIEDAVRRIEDMMNQARHASSGVKLEVNERILNSCTDLMKAIRLLVTTSTSLQKEIVESGRGAATQQEFYAKNSRWTEGLISASKAVGWGATQLVEAADKVVLHTGKYEELIVCSHEIAASTAQLVAASKVKANKHSPHLSRLQECSRTVNERAANVVASTKSGQEQIEDRDTMDFSGLSLIKLKKQEMETQVRVLELEKTLEAERMRLGELRKQHYVLAGASGSPGEEVAIRPSTAPRSVTTKKPPLAQKPSVAPRQDHQLDKKDGIYPAQLVNY

SEQ ID NO: 142408 - DNA, 3207 bp, Artificial Sequence
  derived and/or modified sequence
atgaattccatcaagaacgtgcccgcacgtgtcttgagtcgacgcccaggccattccctggaggcggagagagagcagttcgacaagacccaggccatctctattagtaaggccattaatacccaagaggcccctgtgaaagaaaagcatgcaaggcgcataatcttaggcacccaccacgaaaagggtgccttcaccttttggagttatgcaatcggactgcccctacccagcagttctatcttgtcatggaaattttgccacgtcctgcataaagtgctgagagacggtcatcctaacgtactgcacgactgccagaggtatcggtctaacatcagggagattggagacctgtggggtcatctccacgacaggtacggccagctggtgaatgtgtacaccaaactcctgctaaccaagatttcttttcacctcaaacacccacagttcccagccggcctggaggtgacagacgaagtgctcgagaaagcagccggaaccgatgtgaacaacatttttcagttaacggtagagatgtttgactacatggattgtgagttgaagctgtccgagagtgtttttaggcaactaaataccgccatcgctgtgtcacagatgagctctggccagtgtcggctcgcacctctaatccaggtgattcaagactgctcacacctttatcattataccgtgaagctgttattcaagttacacagctgcctgcctgcagataccctgcaggggcacagggacaggttccacgagcagtttcactcccttaggaatttcttcagacgggcctcagatatgctgtatttcaaaaggcttatccagataccccggctgccagagggtcccccgaacttcctccgggcctcagccttggctgaacatattaagcctgtagtggtgatccccgaggaggctcctgaggatgaggaacccgagaacctcatcgagatctccaccggaccacctgccggtgagcccgtagtcgtagctgatctattcgaccagacattcggacctcccaatggctccgtgaaggatgacagagacctgcagatcgagtccttgaagcgagaggtcgagatgttgcggtccgagctggagaaaatcaaactcgaggcccaacggtacattgcccagttgaagtcccaggttaatgcacttgaaggggagctggaggagcagcggaagcaaaagcaaaaggccctggtggacaacgaacagttgcgccatgaactggcgcagctgagggcagcccagctggaaggggagaggtcccagggcctccgggaggaggcggaacgaaaggccagtgctacagaagcccggtacaacaaactgaaggagaagcatagcgagctcgtgcacgtgcacgccgagctccttcggaaaaacgctgataccgccaagcaactaaccgttacccagcagtctcaggaggaggtggcacgcgtcaaggaacaactcgctttccaagtcgaacaggtgaaaagagaatcagaactaaagctggaagagaagtctgaccagctggaaaagcttaagcgcgagcttgaggcaaaagccggtgagctggctcgggcacaagaggcactgtctcacacagagcagagcaaatctgagctgtccagcaggctggacaccctatccgccgagaaggatgcactcagcggcgccgtacgccagcgcgaggcagacctgctcgctgcccagagcctggttcgcgagaccgaggccgctttgtccagagagcagcaacggagctctcaggagcagggcgaactacaggggcgccttgcggagcgcgaaagccaggaacagggacttcggcaaagacttcttgatgagcagttcgcagtgctgcgcggcgcagccgcagaggccgcgggaattctgcaggatgccgtgtctaaacttgacgaccctcttcatctgaggtgtaccagctcccccgattatttggtgagtagagctcaggaagcattggacgctgtcagcaccctggaggagggccacgcccagtacttgacttctctggccgacgcctctgcgttagtggcagcgcttacaaggttcagccatttggcagccgacacaatcattaacggtggcgctacttctcatctcgcccccactgaccctgccgacagactgatcgacacctgtcgggagtgcggcgcaagagctctggaactgatggggcagctccaagaccaacaagccctgcgtcacatgcaggcatcactggtgagaactccattgcaaggaattctgcaattgggtcaggaactcaagcccaaatccctcgatgtgcgccaggaagaactgggagcggttgtggacaaagaaatggccgccaccagtgcagcaatagaggatgccgtgcggcgaatcgaagatatgatgaaccaagctcgtcacgccagctccggagttaagctggaagtcaacgagagaatattaaactcttgtactgaccttatgaaggccatccgactactcgtgaccacgtccacgtctctgcagaaggaaattgtggaaagtggcagaggagccgccacgcaacaagaattctacgcgaagaattcaaggtggacagaagggctcataagtgcaagcaaggccgtcggctggggagctactcagcttgttgaggctgccgacaaggtggtactccatactggaaagtacgaggagctgatcgtctgttctcacgaaattgcggcatcaaccgctcaactggttgctgcttctaaagtgaaagccaataagcattctccacacctcagcaggttacaggagtgttcacgcaccgttaacgagcgcgcagctaatgtggtggcttccaccaagagtggccaagagcagatagaagacagagacacaatggatttttcagggctatccctgatcaagctgaagaagcaagagatggagacacaagtcagggtgctcgagctggaaaagaccctcgaggcagagcgtatgcgattaggcgagctgaggaagcagcactatgtgctggctggggcttcaggatctccaggcgaagaggtggcaattcgtccttcaaccgctcccagaagcgttaccaccaagaagccacctttagctcagaagcctagtgtggccccccgacaggaccatcagttagataaaaaggatgggatctacccggcccagctagttaactattag

SEQ ID NO: 142409 - DNA, 4539 bp, Artificial Sequence
  derived and/or modified sequence
ctcctccccggcgggcgggcccgggcgcggcgcggtggcctcgcggtgcctaggctggggctgccggaccgtgaggctgtgagtcgcgcggacggagccggacaaaagcgggcggcggcggcaggatgaacagcatcaagaacgtgccggcgcgggtgctgagccgcaggccgggccacagcctggaggccgagcgcgagcagttcgacaagacccaggccatcagcatcagcaaagccatcaacacccaggaggcccccgtgaaggagaagcacgcccggcgcatcattctgggcacacaccacgagaagggggctttcaccttctggtcctacgccattgggctgccgctgcccagcagctccattctcagctggaagttctgccacgtcctccacaaggtccttcgagacgggcaccccaatgtgctgcatgactgccagcggtaccgcagcaacatccgggagattggagacctgtggggacatttgcatgaccgctacggacagctggtgaatgtctacaccaagctgctgctgaccaagatctccttccacctcaagcatccccagtttcccgcgggcctggaggtgacagatgaggtactggagaaggcagctgggaccgatgtcaacaacatcttccagctcactgtggagatgtttgattacatggattgtgagctgaagctttctgaatcagttttccgacagctcaacacggccatcgccgtatcccagatgtcctcaggccagtgccgcctggcccccctcatccaggtcatccaggactgcagccacctctaccactacacggtcaagctcctgttcaagctacactcttgtctccctgcggacaccctgcaaggccacagggaccggttccacgagcagtttcacagcctcaggaacttcttccgcagagcctccgacatgctgtacttcaagcggctcatccagatcccccggctgcccgagggaccccctaacttcctgcgggcctcagccctggctgagcacatcaagccggtggtggtgatccccgaggaggccccggaagatgaggagccggagaatctcattgagatcagcacagggccccccgcgggggagccagtggtggtggctgacctcttcgatcagacgtttggaccccccaatgggtctgtgaaggacgacagggacctccagattgagagcttgaagagagaggtggaaatgctccgctctgaactggagaagatcaagctggaggcccagcggtacatcgcgcagctgaagagccaggtgaatgcactggagggtgagctggaggagcagcggaagcagaagcagaaggccctggtggataatgagcagctccgccacgagctggcccagctgagggctgcccagctggagggcgagcggagccagggcctgcgtgaggaggctgagaggaaggccagtgccacggaggcgcgctacaacaagctgaaggaaaagcacagtgagctcgtccatgtgcacgcggagctgctcagaaagaacgcggacacagccaagcagctgacggtgacgcagcaaagccaggaggaggtggcgcgggtgaaggagcagctggccttccaggtggagcaggtgaagcgggagtcggagttgaagctagaggagaagagcgaccagctggagaagctcaagagggagctggaggccaaggccggagagctggcccgcgcgcaggaggccctgagccacacagagcagagcaagtcggagctgagctcacggctggacacgctgagtgcggagaaggatgctctgagtggagctgtgcggcagcgggaggcagacctgctggcggcgcagagcctggtgcgcgagacagaggcggcgctgagccgggagcagcagcgcagctcccaggagcagggcgagttgcagggccggctggcagagagggagtctcaggagcaggggctgcggcagaggctgctggacgagcagttcgcagtgttgcggggcgctgctgccgaggccgcgggcatcctgcaggatgccgtgagcaagctggacgaccccctgcacctgcgctgtaccagctccccagactacctggtgagcagggcccaggaggccttggatgccgtgagcaccctggaggagggccacgcccagtacctgacctccttggcagacgcctccgccctggtggcagctctgacccgcttctcccacctggctgcggataccatcatcaatggcggtgccacctcgcacctggctcccaccgaccctgccgaccgcctcatagacacctgcagggagtgcggggcccgggctctggagctcatggggcagctgcaggaccagcaggctctgcggcacatgcaggccagcctggtgcggacacccctgcagggcatccttcagctgggccaggaactgaaacccaagagcctagatgtgcggcaggaggagctgggggccgtggtcgacaaggagatggcggccacatccgcagccattgaagatgctgtgcggaggattgaggacatgatgaaccaggcacgccacgccagctcgggggtgaagctggaggtgaacgagaggatcctcaactcctgcacagacctgatgaaggctatccggctcctggtgacgacatccactagcctgcagaaggagatcgtggagagcggcaggggggcagccacgcagcaggaattttacgccaagaactcgcgctggaccgaaggcctcatctcggcctccaaggctgtgggctggggagccacacagctggtggaggcagctgacaaggtggtgcttcacacgggcaagtatgaggagctcatcgtctgctcccacgagatcgcagccagcacggcccagctggtggcggcctccaaggtgaaggccaacaagcacagcccccacctgagccgcctgcaggaatgttctcgcacagtcaatgagagggctgccaatgtggtggcctccaccaagtcaggccaggagcagattgaggacagagacaccatggatttctccggcctgtccctcatcaagctgaagaagcaggagatggagacccaggtgcgtgtcctggagctggagaagacgctggaggctgaacgcatgcggctgggggagttgcggaagcaacactacgtgctggctggggcatcaggcagccctggagaggaggtggccatccggcccagcactgccccccgaagtgtaaccaccaagaaaccacccctggcccagaagcccagcgtggcccccagacaggaccaccagcttgacaaaaaggatggcatctacccagctcaactcgtgaactactaggccccccaggggtccagcagggtggctggtgacaggcctgggcctctgcaactgccctgacaggaccgagaggccttgcccctccacctggtgcccaagcctcccgccccaccgtctggatcaatgtcctcaaggcccctggcccttactgagcctgcagggtcctgggccatgtgggtggtgcttctggatgtgagtctcttatttatctgcagaaggaactttggggtgcagccaggacccggtaggcctgagcctcaactcttcagaaaatagtgtttttaatattcctcttcagaaaatagtgtttttaatattccgagctagagctcttcttcctacgtttgtagtcagcacactgggaaaccgggccagcgtggggctccctgccttctggactcctgaaggtcgtggatggatggaaggcacacagcccgtgccggctgatgggacgagggtcaggcatcctgtctgtggccttctggggcaccgattctaccaggccctccagctgcgtggtctccgcagaccaggctctgtgtgggctagaggaatgtcgcccattactcctcaggcctggccctcgggcctccgtgatgggagccccccaggaggggtcagatgctggaaggggccgctttctggggagtgaggtgagacatagcggcccgggcgctgccttcactcctggagtgagtttccatttccagctggaatctgcagccacccccatttcctgttttccattcccccgttctggccgcgccccactgcccacctgaaggggtggtttccagccctccggagagtgggcttggccctaggccctccagctcagccagaaaaagcccagaaacccaggtgctggaccagggccctcagggaggggaccctgcggctagagtgggctaggccctggctttgcccgtcagatttgaacgaatgtgtgtcccttgagcccaaggagagcggcaggaggggtgggaccaggctgggaggacagagccagcagctgccatgccctcctgctccccccaccccagccctagccctttagcctttcaccctgtgctctggaaaggctaccaaatactggccaaggtcaggaggagcaaaaatgagccagcaccagcgccttggctttgtgttagcatttcctcctgaagtgttctgttggcaataaaatgcactttgactgtttgttgtc

SEQ ID NO: 142410 - DNA, 3207 bp, Artificial Sequence
  derived and/or modified sequence
atgaacagcatcaagaatgtgcctgcccgggtgctgagccggcggcccggccacagcctggaggccgagcgggagcagtttgacaagacccaggccatcagcatcagcaaggccatcaacacccaggaggcccctgtgaaggagaagcacgcccggcgcatcatcctgggcacccaccacgagaagggggccttcaccttctggagctatgccatcggcctgcccctgcccagcagcagcatcctgtcctggaagttctgccacgtgctgcacaaggtgctgagagatggccaccccaacgtgctgcatgactgccagcgctaccgcagcaacatccgggagattggagacctgtggggccacctgcatgacagatatggccagctggtgaatgtgtacaccaagctgctgctgaccaagatctccttccacctgaagcacccccagtttcctgctggcctggaggtgacagatgaggtgctggagaaggctgctggaacagatgtgaacaacatcttccagctgactgtggagatgtttgactacatggactgtgagctgaagctgtctgagagcgtcttccggcagctgaacacagccatcgctgtgtcccagatgagcagcggccagtgccgcctggcccccctcatccaggtgatccaggactgcagccacctgtaccactacacagtgaagctgctcttcaagctgcacagctgcctgcctgctgacaccctgcagggccaccgggaccgcttccacgagcagttccacagcctgaggaacttcttcagaagagccagtgacatgctgtacttcaagaggctcatccagatcccccggctgcctgagggcccccccaacttcctgcgggccagcgccctggccgagcacatcaagcctgtggtggtgattcctgaggaggccccagaagatgaggagcctgagaacctgattgagatcagcactggacctcctgctggggagcctgtggtggtggccgacctgtttgaccagacctttggacctccaaatggatctgtgaaggatgaccgggacctgcagatcgagagcctgaagcgggaggtggagatgctgcggtctgagctggagaagatcaagctggaggcccagcgctacatcgcccagctgaagagccaggtgaatgccctggagggggagctggaggagcagaggaagcagaagcagaaggccctggtggacaatgagcagctgcggcatgagctggcccagctgcgggccgcccagctggagggggagaggagccagggcctgcgggaggaggccgagaggaaggccagcgccacagaggcccgctacaacaagctgaaggagaagcacagcgagctggtgcacgtgcacgccgagctgctgaggaagaatgctgacacagccaagcagctgactgtgacccagcagagccaggaggaggtggcccgggtgaaggagcagctggccttccaggtggagcaggtgaagcgggagagcgagctgaagctggaggagaagagtgaccagctggagaagctgaagcgggagctggaggccaaggccggggagctggcccgggcccaggaggccctgagccacacagagcagagcaagtctgagctgagcagccggctggacaccctgtctgctgagaaggatgccctgagcggggctgtgcggcagcgggaggccgacctgctggccgcccagagcctggtgcgggagacagaggccgccctgagccgggagcagcagaggagcagccaggagcagggcgagctgcagggccgcctggccgagcgggagagccaggagcagggcctgcggcagaggctgctggatgagcagtttgctgtgctgcggggagctgctgctgaggccgccggcatcctgcaggatgctgtgtccaagctggatgaccccctgcacctgcgctgcaccagcagcccagactacctggtgtcccgggcccaggaggccctggatgctgtgtccaccctggaggagggccacgcccagtacctgaccagcctggctgatgccagcgccctggtggccgccctgacccgcttcagccacctggccgctgacaccatcatcaatggaggagccaccagccacctggcccccacagatcctgctgaccggctgattgacacctgcagagaatgtggggcccgggccctggagctgatgggccagctgcaggaccagcaggccctgcggcacatgcaggccagcctggtgaggacccccctgcagggcatcctgcagctgggccaggagctgaagcccaagagcctggatgtgcggcaggaggagctgggcgctgtggtggacaaggagatggccgccaccagcgctgccattgaagatgctgtgagaagaattgaggacatgatgaaccaggcccggcatgccagcagtggagtgaagctggaggtgaatgaaagaatcctgaacagctgcacagacctgatgaaggccatccggctgctggtgaccaccagcaccagcctgcagaaggagatcgtggagagcggcagaggagctgccacccagcaggagttctacgccaagaacagccgctggacagagggcctcatcagcgccagcaaggctgtgggctggggcgccacccagctggtggaggccgctgacaaggtggtgctgcacacaggcaagtatgaggagctgattgtgtgcagccatgaaattgctgccagcacagcccagctggtggccgccagcaaggtgaaggccaacaagcacagcccccacctgagccggctgcaggagtgcagcaggacagtgaatgaaagagctgccaacgtggtggccagcaccaagagcggccaggagcagattgaagatcgggacaccatggacttcagcggcctgagcctcatcaagctgaagaagcaggagatggagacccaggtgcgggtgctggagctggagaagaccctggaggccgagaggatgaggctgggggagctgaggaagcagcactacgtgctggccggggccagcggcagccctggagaggaggtggccatccggcccagcacagcccccaggtctgtgaccaccaagaagccacccctggcccagaagcccagcgtggccccccggcaggaccaccagctggacaagaaggatggcatctacccagcccagctggtgaactactag

SEQ ID NO: 142411 - DNA, 3207 bp, Artificial Sequence
  derived and/or modified sequence
atgaacagcatcaagaacgtgcccgcccgggtgctgagccggcggccaggtcactcactagaagcggaacgggaacagttcgacaagacccaagcgatctctatcagtaaagccatcaacacccaggaggccccagttaaagaaaaacacgctcgtaggatcatcctggggacccaccacgaaaagggggccttcacattctggtcgtacgcaataggccttcctcttccatcctccagtatcctcagctggaagttttgccatgtgctgcataaggtacttcgtgacggccatcctaatgttctgcacgattgccagaggtaccgctccaatatccgcgagatcggagacctctggggccatctgcatgacaggtacggacaactagtgaacgtgtacaccaagctgctgcttaccaagatatctttccatcttaaacatccacagttcccagccggcctggaggtgaccgacgaggtgctggagaaggctgccggaaccgacgtaaacaatattttccagctcacagttgagatgttcgactacatggattgtgaactaaagttgtccgaatcagtttttcgtcagctgaatactgccatcgccgtcagtcagatgtcctccggtcagtgtcggcttgctcccctgattcaggtgatccaggactgctcccacctctaccattacaccgtaaagctcctcttcaaattacactcctgcctgccggcggacacgttacagggacaccgcgatcggttccacgagcaattccattcactgcgtaatttctttaggagagcttccgatatgttgtattttaaacggctgatccagatcccacgccttcccgaaggtcctcctaactttctgagggcctctgccctagcggagcatataaaacctgtggtcgtaatccccgaagaggctcccgaagacgaggagcccgagaatctcatcgagattagcacagggccaccggccggtgaacctgtcgtggtggctgacctgttcgaccagacattcgggccccctaacggaagtgtgaaagatgatagagacttgcagatcgagtctctcaagcgcgaggtggagatgcttcggagcgagcttgagaaaataaagctggaagcgcagcgttatatcgctcaactgaagtcccaggtgaatgccctggagggagagttggaagaacagcgtaaacaaaaacaaaaggccctggtagataacgagcaactaagacacgagctcgcacagctgcgggcggcccagcttgaaggagagagaagccaaggactgagggaagaggctgagcggaaggcaagtgctaccgaagcccgctataacaaactcaaggagaaacactccgaacttgtgcatgtacatgcggaactgttacgcaaaaatgccgataccgcaaagcaactgaccgtgacgcagcagtcccaagaagaagtcgcgcgggtcaaggagcaattggccttccaggtcgagcaggttaaacgggaatccgaactgaaacttgaggagaaatccgatcagctggagaagctcaagcgcgagctcgaagctaaggcaggagagctggcccgcgcccaggaggctctttcacataccgaacagtcaaaaagcgagctctcgtcaagactcgataccttgagcgctgaaaaagacgcactctccggggccgtccgccagagggaggctgaccttctcgccgcccaatcactcgtaagagagactgaagcagcactgtccagagagcagcagcgaagcagtcaagagcagggcgagcttcagggccgcctggccgagcgggagtctcaagagcaaggactgcggcagagattgctcgatgaacagtttgcggtgctgcgcggagccgccgcagaagctgcaggcatcctgcaggacgcagtgtctaagctggacgacccgttgcatctgcggtgtaccagctcccctgactacctggtttctcgcgctcaggaagcactcgacgcggtgtccacgttggaagagggccacgcgcagtatctcacatcgctcgcagacgcctccgccctagtggctgctcttacccgcttctcccatctggcagctgataccattatcaacggcggcgccactagccacctggccccaactgacccggccgacaggcttatcgatacttgtcgcgaatgcggcgcgcgggctttggagctgatggggcagctgcaggaccaacaggctcttagacacatgcaagcttcactcgtgaggacccccctgcagggaatcctccagctgggtcaagagttgaagcccaagtccctggatgtccggcaggaggagctgggggcagtcgtcgataaagagatggcagccacgtctgcagccattgaagacgctgtccggcggattgaggatatgatgaatcaagcaagacatgcgagctcgggggttaagctcgaagtcaatgaacgaatactcaattcgtgtaccgacttgatgaaagcaatacgtttactcgtcacgacctcgacctcactgcagaaggagatcgtggagagtgggcggggagctgccacacaacaggaattctatgcgaagaattccagatggactgagggattgatttccgccagtaaggccgtgggctggggagccactcagctggtggaggccgccgacaaagtggtattacacacagggaaatacgaggagctcatcgtttgctctcatgaaatcgcggccagcacagcgcagctggtggctgcttcaaaggtcaaggccaataaacattccccacacctctctagattacaggaatgtagcaggaccgtcaatgagcgggcagctaatgttgttgcatcaaccaaaagtggccaggagcagatcgaagatagggatacaatggatttttcaggcctgtccctaatcaagttaaaaaaacaggagatggagactcaggtgagagtcttggaactggagaagaccctggaagctgagagaatgaggttgggcgagttgaggaagcagcattacgtgttggctggagccagcgggtccccgggggaggaagtagcaattaggccctccaccgctcccaggtctgtgacaaccaagaaaccccctttggctcagaaaccaagtgttgcaccacgacaggatcatcagctggataagaaagacggtatttatccggcacagcttgtgaactattag

SEQ ID NO: 142412 - DNA, 3207 bp, Artificial Sequence
  derived and/or modified sequence
atgaacagcatcaagaacgtgcctgcccgagtgctaagtcggagacctggacatagcctggaagccgaaagagaacaatttgataagacccaggccatcagtatttcaaaagcgataaacacccaggaagccccagtaaaagaaaaacacgctaggcgaatcatcctgggcacccaccacgagaaaggcgcattcactttctggagctacgctataggtctaccgttgccctcatcttccattctttcctggaagttttgtcatgttctgcataaggtcctccgcgacggtcatcctaatgtgctgcatgactgtcagagataccgcagcaacatcagggagatcggcgacctgtggggccacctgcacgacaggtatgggcagcttgtaaatgtttacaccaaactgctcctcactaaaatctcctttcaccttaagcatcctcagttccctgctggcctcgaggtgaccgatgaggttttggagaaggctgccggtacagacgtcaacaacatcttccagctaactgttgagatgttcgactacatggactgtgaattgaaattgagcgaaagtgtctttagacagcttaatacggccattgccgtgtcccaaatgtccagcggccagtgccgcctggccccattgatccaggtcattcaggactgtagtcatctgtatcactacacagttaaattactgtttaagctccacagttgcctaccggcagatactctccagggacatagagataggtttcatgagcaattccactctctgcgcaactttttccggcgtgcctctgatatgctgtactttaaacggctcatccagatccccagactgcccgaagggcctcccaactttctgagagcgtctgcgctagccgagcacattaagcccgtggtggtaatacctgaagaggcccctgaagatgaggaacctgaaaacctcatcgagatttcgactggcccacccgcaggcgaacctgttgttgttgctgatctgttcgaccagacgttcggacctccaaatgggtctgtcaaagacgacagagacctccagattgagtctttgaaaagggaagtggagatgctccgtagtgaactggagaagattaagttggaggcacagcgttacattgcacaattgaaaagccaggtaaacgcccttgaaggcgaacttgaagaacagcgcaaacaaaagcaaaaggccctcgtggacaacgaacagctgcgacatgaattggcacagcttagggccgctcaactggaaggtgagcgctcgcaggggttgcgcgaagaggctgagagaaaagcctctgcgaccgaggccaggtacaataaactgaaggaaaagcattcagagttagttcacgtccacgccgagttactgcgaaagaatgcagatactgcaaagcaactgactgtgacccagcagagccaagaagaagtggctagagttaaggaacagttagcgttccaggtcgagcaggtgaaacgggaatcagagctgaagctcgaggaaaaatccgatcagttagagaagctgaaaagggaattggaagctaaagccggtgagctagctcgagcccaagaggccctaagtcacacagagcaatctaaaagcgagctgagctcgagattggatacactgagcgccgagaaagatgccttgtccggcgctgtgcggcagagggaggccgatctccttgccgctcagtccctggtgcgagagactgaggccgctctttctcgggagcagcagaggtctagtcaggaacagggcgagctgcaggggagactggccgaaagagagagccaggagcagggactcaggcagagactccttgacgagcagttcgccgtactgaggggagctgcagctgaggcggctggcatattacaggatgccgtgtccaagctagacgatcctttacatcttcgctgcacttcctcaccagattacttggtctctcgggctcaggaggcgttggacgccgtctcaacattggaggaaggacacgcccaatacctgacctcccttgcagatgcttcagccctggtcgccgcattaacgagattttctcatttggccgcagataccataattaacggcggtgcaactagtcacctggccccaaccgatcccgcagaccgcttaatagacacgtgtagagaatgtggagccagggcattggagctgatgggccagctccaagaccagcaggctctgcgacatatgcaggccagcttggtcagaactccgctgcaggggatcctccagctgggacaggagttaaaacctaagagcctggatgtgaggcaagaggaactcggcgctgtggtggacaaggaaatggcagccacaagtgccgctatagaggatgcggtgcggaggatcgaagatatgatgaatcaagctaggcacgcctcctctggcgtcaaattagaagtgaacgaaaggatcttaaactcttgcaccgacctcatgaaagccattaggctgctagtgacgacatccaccagtttacagaaggagatcgtggagtccggcagaggagcagccacccagcaggaattctatgccaagaactcgagatggacggaggggctcattagcgcaagcaaagcggtgggctggggcgctactcaactcgttgaagccgctgacaaagtagtactgcacaccggcaaatatgaggaactcatcgtctgctcgcacgaaatcgcagctagtacagctcaactagtcgccgcaagcaaggttaaggctaataagcattctccccacctttctaggcttcaggagtgttccaggacggtgaacgagcgggcagctaacgtggtagctagtacgaagagtgggcaggaacagattgaggatcgcgacaccatggacttctccggcctgagtctgattaagttgaaaaaacaagaaatggagactcaggttcgcgtattggagctggaaaagacactggaggcagagagaatgcgtctgggagagctgagaaaacagcactacgtccttgccggagcctcagggtcccctggagaagaggttgcaatcagaccatcaaccgcgcctcgctccgtaacaaccaaaaagccaccattggcccagaagccatctgtggccccacgccaggatcaccagcttgacaaaaaggacggcatatatccagcccagctggtgaactactag

SEQ ID NO: 142413 - DNA, 3207 bp, Artificial Sequence
  derived and/or modified sequence
atgaacagcatcaagaacgtgcccgccagagtgctgagcagaagacccggccacagcctggaggccgagagagagcagttcgacaagacccaggccatcagcatcagcaaggccatcaacacccaggaggcccccgtgaaggagaagcacgccagaagaatcatcctgggcacccaccacgagaagggcgccttcaccttctggagctacgccatcggcctgcccctgcccagcagcagcatcctgagctggaagttctgccacgtgctgcacaaggtgctgagagacggccaccccaacgtgctgcacgactgccagagatacagaagcaacatcagagagatcggcgacctgtggggccacctgcacgacagatacggccagctggtgaacgtgtacaccaagctgctgctgaccaagatcagcttccacctgaagcacccccagttccccgccggcctggaggtgaccgacgaggtgctggagaaggccgccggcaccgacgtgaacaacatcttccagctgaccgtggagatgttcgactacatggactgcgagctgaagctgagcgagagcgtgttcagacagctgaacaccgccatcgccgtgagccagatgagcagcggccagtgcagactggcccccctgatccaggtgatccaggactgcagccacctgtaccactacaccgtgaagctgctgttcaagctgcacagctgcctgcccgccgacaccctgcagggccacagagacagattccacgagcagttccacagcctgagaaacttcttcagaagagccagcgacatgctgtacttcaagagactgatccagatccccagactgcccgagggcccccccaacttcctgagagccagcgccctggccgagcacatcaagcccgtggtggtgatccccgaggaggcccccgaggacgaggagcccgagaacctgatcgagatcagcaccggcccccccgccggcgagcccgtggtggtggccgacctgttcgaccagaccttcggcccccccaacggcagcgtgaaggacgacagagacctgcagatcgagagcctgaagagagaggtggagatgctgagaagcgagctggagaagatcaagctggaggcccagagatacatcgcccagctgaagagccaggtgaacgccctggagggcgagctggaggagcagagaaagcagaagcagaaggccctggtggacaacgagcagctgagacacgagctggcccagctgagagccgcccagctggagggcgagagaagccagggcctgagagaggaggccgagagaaaggccagcgccaccgaggccagatacaacaagctgaaggagaagcacagcgagctggtgcacgtgcacgccgagctgctgagaaagaacgccgacaccgccaagcagctgaccgtgacccagcagagccaggaggaggtggccagagtgaaggagcagctggccttccaggtggagcaggtgaagagagagagcgagctgaagctggaggagaagagcgaccagctggagaagctgaagagagagctggaggccaaggccggcgagctggccagagcccaggaggccctgagccacaccgagcagagcaagagcgagctgagcagcagactggacaccctgagcgccgagaaggacgccctgagcggcgccgtgagacagagagaggccgacctgctggccgcccagagcctggtgagagagaccgaggccgccctgagcagagagcagcagagaagcagccaggagcagggcgagctgcagggcagactggccgagagagagagccaggagcagggcctgagacagagactgctggacgagcagttcgccgtgctgagaggcgccgccgccgaggccgccggcatcctgcaggacgccgtgagcaagctggacgaccccctgcacctgagatgcaccagcagccccgactacctggtgagcagagcccaggaggccctggacgccgtgagcaccctggaggagggccacgcccagtacctgaccagcctggccgacgccagcgccctggtggccgccctgaccagattcagccacctggccgccgacaccatcatcaacggcggcgccaccagccacctggcccccaccgaccccgccgacagactgatcgacacctgcagagagtgcggcgccagagccctggagctgatgggccagctgcaggaccagcaggccctgagacacatgcaggccagcctggtgagaacccccctgcagggcatcctgcagctgggccaggagctgaagcccaagagcctggacgtgagacaggaggagctgggcgccgtggtggacaaggagatggccgccaccagcgccgccatcgaggacgccgtgagaagaatcgaggacatgatgaaccaggccagacacgccagcagcggcgtgaagctggaggtgaacgagagaatcctgaacagctgcaccgacctgatgaaggccatcagactgctggtgaccaccagcaccagcctgcagaaggagatcgtggagagcggcagaggcgccgccacccagcaggagttctacgccaagaacagcagatggaccgagggcctgatcagcgccagcaaggccgtgggctggggcgccacccagctggtggaggccgccgacaaggtggtgctgcacaccggcaagtacgaggagctgatcgtgtgcagccacgagatcgccgccagcaccgcccagctggtggccgccagcaaggtgaaggccaacaagcacagcccccacctgagcagactgcaggagtgcagcagaaccgtgaacgagagagccgccaacgtggtggccagcaccaagagcggccaggagcagatcgaggacagagacaccatggacttcagcggcctgagcctgatcaagctgaagaagcaggagatggagacccaggtgagagtgctggagctggagaagaccctggaggccgagagaatgagactgggcgagctgagaaagcagcactacgtgctggccggcgccagcggcagccccggcgaggaggtggccatcagacccagcaccgcccccagaagcgtgaccaccaagaagccccccctggcccagaagcccagcgtggcccccagacaggaccaccagctggacaagaaggacggcatctaccccgcccagctggtgaactactag

SEQ ID NO: 142414 - protein, 227 aa, Artificial Sequence
  derived and/or modified sequence
MAPCHIRKYQESDRQWVVGLLSRGMAEHAPATFRQLLKLPRTLILLLGGPLALLLVSGSWLLALVFSISLFPALWFLAKKPWTEYVDMTLCTDMSDITKSYLSERGSCFWVAESEEKVVGMVGALPVDDPTLREKRLQLFHLFVDSEHRRQGIAKALVRTVLQFARDQGYSEVILDTGTIQLSAMALYQSMGFKKTGQSFFCVWARLVALHTVHFIYHLPSSKVGSL

SEQ ID NO: 142415 - DNA, 684 bp, Artificial Sequence
  derived and/or modified sequence
atggccccgtgtcacatacggaaatatcaagaatccgatagacagtgggtggtggggctgctgagccgcggaatggccgaacacgcgcccgccacttttcggcaactcctgaagttaccaaggacactcattctgctgctaggggggccactcgcgctgctgctagtgtccggctcctggcttctcgcacttgtcttcagtatatcgctgttcccagccctatggtttctggctaagaaaccttggaccgaatacgtggacatgaccctgtgtacagacatgagcgacattaccaagtcttaccttagcgagagggggtcatgcttctgggtggccgagtctgaggagaaagtggtggggatggttggggccctgccagtcgatgatccaacacttcgcgaaaaacgtctgcagctctttcacctgtttgtcgactctgaacataggagacagggaatcgcgaaggcactcgtccgaactgtcctgcagtttgctcgagaccagggctacagcgaggtaattctggatactggaaccattcagctgtccgcaatggcactttaccaaagcatgggatttaaaaagactgggcagagtttcttttgtgtgtgggcacggttagtcgcactgcacaccgtccacttcatttaccaccttcccagttccaaagttggatctctgtag

SEQ ID NO: 142416 - DNA, 684 bp, Artificial Sequence
  derived and/or modified sequence
atggccccctgccacatcaggaagtaccaggagagtgaccggcagtgggtggtgggcctgctgagccggggcatggccgagcacgccccagccaccttccggcagctgctgaagctgcccaggaccctcatcctgctgctgggcggccccctggccctgctgctggtgtctggctcctggctgctggccctggtgttcagcatcagcctcttccctgccctgtggttcctggccaagaagccctggacagaatatgtggacatgaccctgtgcacagacatgtctgacatcaccaagagctacctgtctgagcggggcagctgcttctgggtggccgagagcgaggagaaggtggtgggcatggtgggcgccctgcctgtggatgaccccaccctgcgggagaagaggctgcagctgttccacctgtttgtggacagcgagcaccggcggcagggcatcgccaaggccctggtgaggacagtgctgcagtttgcccgggaccagggctacagcgaggtgatcctggacaccggcaccatccagctgagcgccatggccctgtaccagagcatgggcttcaagaagacaggccagagcttcttctgtgtgtgggcccggctggtggccctgcacacagtgcacttcatctaccacctgcccagcagcaaggtgggcagcctgtag

SEQ ID NO: 142417 - DNA, 947 bp, Artificial Sequence
  derived and/or modified sequence
agacggtatctcctggatgccagtgagcggctgagagctgaagctccctggacactcaaggctcttgtggtgacagtctgacgtaaaggcgtgcagggaggcctagctctgtctcctggacttagagatttcagacacagaagtctgtccatggctccttgtcacatccgcaaataccaggagagcgaccgccagtgggttgtgggcttgctctcccgggggatggccgagcatgccccagccaccttccggcaattgctgaagctgcctcgaaccctcatactcttacttggggggcccctcgccctactcctggtctctggatcctggcttctagccctcgtgttcagcatcagcctcttccctgccctgtggttccttgccaaaaaaccctggacggagtatgtggacatgacattgtgcacagacatgtctgacattaccaaatcctacctgagtgagcgtggctcctgcttctgggtggctgagtctgaagagaaggtggtgggcatggtaggagctctgcctgttgatgatcccaccttgagggagaagcggttgcagctgtttcatctctttgtggacagtgagcaccgtcgtcaggggatagcaaaagccctggtcaggactgtcctccagtttgcccgggaccagggctacagtgaagttatcctggacaccggcaccatccagctctctgctatggccctctaccagagcatgggcttcaagaagacgggccagtccttcttctgtgtgtgggccaggctagtggctcttcatacagttcatttcatctaccacctcccttcttctaaggtagggagtctgtgatctctttctgtgtgtattggtcagaatagaatccattcagctgtagcagcaagcaatccccaacctttcactgcaatgacctttcaatgcaataaaagcttattgtccattca

SEQ ID NO: 142418 - DNA, 684 bp, Artificial Sequence
  derived and/or modified sequence
atggccccctgccacatccggaagtaccaggagagcgaccggcagtgggttgtaggcctgctttcacggggaatggccgaacatgcgcctgctacatttagacagctcctcaagctgcccaggaccctcatactccttttgggcggtcctctggctctgctgcttgtgtcaggctcctggttgttagccttggttttctccatctcgctctttcctgccctgtggttcctggccaaaaagccctggaccgagtacgtagatatgacactatgtactgacatgagtgacatcacaaaatcgtacctgtctgaaagaggatcatgcttttgggttgctgagtctgaggaaaaagtagtgggaatggtcggcgccctgccagtcgatgatcccacattacgcgagaaaagacttcagctgtttcaccttttcgtggacagcgagcacagaagacaggggatcgccaaggccctggtccgcacggttctacaatttgcaagggaccaaggctactcggaggtcatccttgatacagggaccatccaattatcggcgatggccctgtaccagtctatgggttttaaaaagaccggccagtcatttttctgtgtgtgggcgaggctcgttgccctgcacacggtgcacttcatctaccatctgccatcctccaaagtggggtccctgtag

SEQ ID NO: 142419 - DNA, 684 bp, Artificial Sequence
  derived and/or modified sequence
atggccccatgtcacataagaaagtatcaggagtccgatcgtcagtgggttgtcggcctgctctctcggggtatggccgagcatgcgccagctacattcaggcaactgctgaaactgccacgaacacttatcctgctcctcggtgggcctctggctctccttctcgtaagcgggtcctggctactcgccttggtgttctccattagcctgttccccgctctgtggttcctggctaagaagccctggactgagtacgtggacatgactttgtgtacagatatgtcagacattaccaaatcctacctgagcgaacggggatcctgtttttgggtcgccgagagcgaggagaaggttgtgggtatggtcggcgcacttccagtggacgatcctactctgcgcgagaagaggctgcaactgttccatttgttcgtggactcggaacatcgcaggcagggaattgcaaaggcgttagtgaggacagtgttacagttcgcacgagaccagggttactccgaagtgatccttgataccggcacaattcagctttccgcaatggccctgtaccaatccatgggattcaagaagacaggccaatccttcttctgcgtctgggcgcgattggtcgccctacacaccgtgcatttcatctatcacctacctagttctaaagttggatctctctag

SEQ ID NO: 142420 - DNA, 684 bp, Artificial Sequence
  derived and/or modified sequence
atggccccctgccacatcagaaagtaccaggagagcgacagacagtgggtggtgggcctgctgagcagaggcatggccgagcacgcccccgccaccttcagacagctgctgaagctgcccagaaccctgatcctgctgctgggcggccccctggccctgctgctggtgagcggcagctggctgctggccctggtgttcagcatcagcctgttccccgccctgtggttcctggccaagaagccctggaccgagtacgtggacatgaccctgtgcaccgacatgagcgacatcaccaagagctacctgagcgagagaggcagctgcttctgggtggccgagagcgaggagaaggtggtgggcatggtgggcgccctgcccgtggacgaccccaccctgagagagaagagactgcagctgttccacctgttcgtggacagcgagcacagaagacagggcatcgccaaggccctggtgagaaccgtgctgcagttcgccagagaccagggctacagcgaggtgatcctggacaccggcaccatccagctgagcgccatggccctgtaccagagcatgggcttcaagaagaccggccagagcttcttctgcgtgtgggccagactggtggccctgcacaccgtgcacttcatctaccacctgcccagcagcaaggtgggcagcctgtag

SEQ ID NO: 142421 - protein, 197 aa, Artificial Sequence
  derived and/or modified sequence
MCTGKCARCVGLSLITLCLVCIVANALLLVPNGETSWTNTNHLSLQVWLMGGFIGGGLMVLCPGIAAVRAGGKGCCGAGCCGNRCRMLRSVFSSAFGVLGAIYCLSVSGAGLRNGPRCLMNGEWGYHFEDTAGAYLLNRTLWDRCEAPPRVVPWNVTLFSLLVAASCLEIVLCGIQLVNATIGVFCGDCRKKQDTPH

SEQ ID NO: 142422 - DNA, 594 bp, Artificial Sequence
  derived and/or modified sequence
atgtgcaccggcaagtgcgccagatgcgtgggcctgagcctgatcaccctgtgcctggtgtgcatcgtggccaacgccctgctgctggtgcccaacggcgagaccagctggaccaacaccaaccacctgagcctgcaggtgtggctgatgggcggcttcatcggcggcggcctgatggtgctgtgccccggcatcgccgccgtgagagccggcggcaagggctgctgcggcgccggctgctgcggcaacagatgcagaatgctgagaagcgtgttcagcagcgccttcggcgtgctgggcgccatctactgcctgagcgtgagcggcgccggcctgagaaacggccccagatgcctgatgaacggcgagtggggctaccacttcgaggacaccgccggcgcctacctgctgaacagaaccctgtgggacagatgcgaggccccccccagagtggtgccctggaacgtgaccctgttcagcctgctggtggccgccagctgcctggagatcgtgctgtgcggcatccagctggtgaacgccaccatcggcgtgttctgcggcgactgcagaaagaagcaggacaccccccactag

SEQ ID NO: 142423 - DNA, 594 bp, Artificial Sequence
  derived and/or modified sequence
atgtgtaccggaaagtgcgcaaggtgcgtgggcctgagcctgataacgctgtgtctcgtttgtatcgtggcgaatgcactgctgttggtcccaaacggagaaacctcttggaccaacaccaaccacctgagcctgcaagtttggctgatgggcgggttcataggcggaggtttgatggtgctgtgtccagggatagcagccgttcgtgctggcgggaagggctgttgtggagcaggttgctgtggaaacaggtgcaggatgcttcgttccgtgttttcgagtgcctttggggttcttggcgctatttactgcttgagcgtctctggcgcggggctgcgtaatggtcccaggtgtctgatgaacggagagtggggctaccacttcgaagacacagcaggtgcatacctgctcaatagaaccctgtgggatcggtgcgaagccccaccccgagtcgttccttggaatgttactttgttttccttgcttgtggcggctagctgcctggaaattgtgctttgcggcattcagcttgtcaacgcgacaattggggtgttctgcggtgattgcaggaaaaaacaggacaccccacactag

SEQ ID NO: 142424 - DNA, 594 bp, Artificial Sequence
  derived and/or modified sequence
atgtgcacaggaaaatgtgcccgctgtgtgggcctgagcctcatcaccctgtgcctggtgtgcatcgtggccaatgccctgctgctggtgcccaacggggagacctcctggaccaacaccaaccacctgagcctgcaggtgtggctgatgggcggcttcatcggcggcggcctgatggtgctgtgccccggcattgctgctgtgcgggccggcggcaagggctgctgcggggccggctgctgcggcaaccgctgcaggatgctgcggagcgtcttcagcagcgccttcggcgtgctgggcgccatctactgcctgtctgtgtctggggccggcctgagaaatggcccccgctgcctgatgaatggagagtggggctaccactttgaggacacagctggggcctacctgctgaacagaaccctgtgggacagatgtgaggccccaccccgggtggtgccctggaatgtgaccctcttcagcctgctggtggccgccagctgcctggagatcgtgctgtgtggcatccagctggtgaatgccaccatcggggtcttctgtggggactgcaggaagaagcaggacaccccccactag

SEQ ID NO: 142425 - DNA, 594 bp, Artificial Sequence
  derived and/or modified sequence
atgtgcaccggcaagtgcgcccggtgcgtgggcctgagcctgatcaccctgtgtctggtttgtattgtcgctaatgcactgcttctggttcccaatggggagacctcctggacaaatacaaaccacctgtcactgcaggtgtggctgatgggggggttcattggcggcgggctgatggtgctctgtccaggaatagcagcggtgagagccggaggtaagggatgctgtggtgccggctgctgcggcaatagatgcaggatgttgaggtccgtgttctcctccgccttcggcgtgctgggcgccatttattgtctctctgtgagtggggccggtttaaggaatggcccgaggtgtctgatgaacggggaatgggggtaccattttgaggataccgccggcgcttatctccttaatcgaaccctgtgggacaggtgcgaggcaccaccccgcgtcgtcccttggaacgtcacattattctcactcttggtcgctgcctcatgcttagagatcgtcctgtgtgggatccagcttgtgaacgctacgatcggcgtgttctgtggggactgcaggaagaagcaggatacccctcactag

SEQ ID NO: 142426 - DNA, 594 bp, Artificial Sequence
  derived and/or modified sequence
atgtgtactggtaaatgcgctcggtgtgtgggcttgagcctcatcacactttgcctggtgtgtatcgtggctaatgcccttttgttagtccccaacggcgaaacatcatggactaataccaaccacctctcgttgcaggtgtggctgatgggcggtttcattggagggggactgatggttttatgtcccggaattgcagctgtacgagcaggcggaaagggctgttgtggtgccggatgctgtggtaatagatgccggatgcttcgctctgtattcagttctgcattcggagtcttaggtgctatttactgcctcagtgtgtccggtgccggactcaggaacggaccccgttgcctgatgaatggtgagtggggctatcattttgaagataccgccggtgcttatctgctaaaccgaaccctgtgggatcgatgtgaagccccaccacgggtcgtcccgtggaatgtgacactgtttagcctgctggtggccgcaagttgcttggagatcgttctgtgtgggatccaactggtaaatgccacaattggggtcttctgcggcgactgcagaaaaaagcaggatacgcctcattag

SEQ ID NO: 142427 - DNA, 710 bp, Artificial Sequence
  derived and/or modified sequence
actcaccgcctgtccttcctgacacctcaccatgtgtacgggaaaatgtgcccgctgtgtggggctctccctcattaccctctgcctcgtctgcattgtggccaacgccctcctgctggtacctaatggggagacctcctggaccaacaccaaccatctcagcttgcaagtctggctcatgggcggcttcattggcgggggcctaatggtactgtgtccggggattgcagccgttcgggcagggggcaagggctgctgtggtgctgggtgctgtggaaaccgctgcaggatgctgcgctcggtcttctcctcggcgttcggggtgcttggtgccatctactgcctctcggtgtctggagctgggctccgaaatggacccagatgcttaatgaacggcgagtggggctaccacttcgaagacaccgcgggagcttacttgctcaaccgcactctatgggatcggtgcgaggcgccccctcgcgtggtcccctggaatgtgacgctcttctcgctgctggtggccgcctcctgcctggagatagtactgtgtgggatccagctggtgaacgcgaccattggtgtcttctgcggcgattgcaggaaaaaacaggacacacctcactgaggctccactgaccgccgggttacacctgctccttcctggacgctcactcccttgctcgctagaataaactgctttgcgctctctt

SEQ ID NO: 142428 - DNA, 1035 bp, Artificial Sequence
  derived and/or modified sequence
atggccaattatacgctcgctcctgaggatgaatatgatgtgctcatcgagggcgagcttgaatcagacgaggccgaacagtgcgacaagtatgacgctcaggctctgagtgctcaactcgtacctagcctgtgctctgcagtgtttgtcatcggagtgcttgataatctgctcgtggtgctcatactcgtgaaatacaaggggctgaagagagttgaaaatatatacttgttgaacctggcagtcagcaacctgtgcttcttattgactctgcccttctgggcacacgctggcggtgaccctatgtgcaaaatcttaattgggctttactttgtcggtttgtattctgagaccttttttaattgcctcctgactgtgcagagatacctggtatttctccacaaaggcaatttcttcagcgcccggagacgagtaccctgcgggatcatcaccagcgttttagcatgggttaccgcaatcctagcaactctgccagagtttgtggtctacaaaccacagatggaagatcaaaaatataaatgtgctttctcacgcacacctttcctgcccgcggatgaaacattctggaagcacttcctgacactcaagatgaacatcagcgttctggttctgccactcttcattttcaccttcctgtacgtccagatgaggaagaccctgagatttagagagcaacggtacagcttatttaaactagtttttgcaatcatggtggtcttcctacttatgtgggcaccttacaacatagctttctttctgtccacctttaaagaacacttctccctaagcgattgcaagtcctcatacaacctcgacaaaagcgtgcatataactaagctgatagcaaccacccattgctgcattaatccactgctgtacgccttcttggacggtactttcagcaagtacttgtgcagatgcttccacctccgtagtaacacccctctacagccgagaggtcaatcagcacaagggacatcccgagaggaacctgaccattccactgaagtctag

SEQ ID NO: 142429 - DNA, 1035 bp, Artificial Sequence
  derived and/or modified sequence
atggctaattacaccctggcgcccgaggacgagtacgacgttctcatcgaaggagaactggagtccgacgaggccgagcagtgtgacaagtacgacgcccaggcactgtcagcccagctcgttccttccctctgctccgccgtgtttgtaatcggggtgctagacaatcttctggtggttctgattctagtgaagtacaagggattgaagcgagtggaaaacatatacctgctgaatctcgccgtgtctaacctctgtttcctgctgactctgccattctgggctcacgcaggcggtgatcccatgtgtaaaattctgatcggtctttatttcgtggggttgtatagtgagacattctttaattgcttgcttaccgtgcagcggtatctcgtgtttctgcacaaggggaactttttcagcgcgagaagacgggtgccatgtggtatcattacgtccgttttggcttgggtgaccgcaatcttagcaactttaccagaattcgtggtatacaagccccagatggaagatcagaagtataaatgcgccttttccagaacacctttcttgccggccgatgagacgttttggaagcattttctcaccctgaagatgaatattagcgtgctggtgttgcccctgttcattttcacttttctgtacgtgcagatgcgaaagacactcaggttcagagagcagcggtatagtcttttcaagttagtgtttgcaatcatggtggtgtttctcttaatgtgggcaccgtacaacatcgcatttttccttagtacattcaaagaacatttcagcctttctgattgcaaatcctcatacaacctcgacaagtcagtgcacataacaaagcttatcgccactacccattgctgcataaatccactgctctatgcgttcctggatggtactttctctaagtacctctgcaggtgctttcatctgagaagcaacactcctcttcagccccgcggacagtcagcccaggggacaagcagagaagagcctgaccattctaccgaggtgtag

SEQ ID NO: 142430 - DNA, 1035 bp, Artificial Sequence
  derived and/or modified sequence
atggcaaattataccctggcccccgaggatgaatatgatgtgctcatagagggggagctagaaagtgacgaggccgagcagtgcgataagtatgacgcccaagcgctgagcgcccagttagtcccttccctttgcagcgcggtgttcgtaattggcgtactggacaacttgcttgtggtgctcattctagtgaaatacaagggcttaaagagagtggagaatatatacttgctgaacctagcagtctctaatctgtgctttctgctaacccttccattttgggcccacgcgggcggtgatcccatgtgcaaaatactgatcggcctatatttcgtcggactctatagcgagacatttttcaactgcctcctaaccgtccagcggtatctggtatttctgcataagggcaacttcttctcggcccgacgccgggtgccgtgcgggatcataacaagtgttctggcttgggtcaccgccattcttgctaccctccccgagttcgtagtctataaaccccagatggaagatcagaagtacaaatgtgctttcagtcgaactcccttcttgcccgccgacgaaaccttctggaaacatttcctcaccctgaagatgaatatcagtgtgctcgtcttgcccttatttatatttacctttttatatgtgcaaatgagaaagactcttagattccgtgagcagcgatatagcttatttaaactcgtgtttgccatcatggtggtcttcctgctcatgtgggccccatataacatcgcattttttcttagcaccttcaaagaacatttcagcctgtccgactgtaagagttcctacaatctggataaatccgtccacataaccaagcttatcgccaccacccactgctgcattaaccccctactttacgctttcctggacggaacattttccaaatatctatgcaggtgctttcacctcaggagcaacaccccactgcagcccagagggcaatctgcccagggtacaagccgggaagagcccgaccattcaactgaagtttag

SEQ ID NO: 142431 - DNA, 654 bp, Artificial Sequence
  derived and/or modified sequence
atggcgaactataccttggccccggaggatgagtacgacgtgctgatcgaaggggaacttgagtccgatgaggcagagcagtgcgacaaatacgatgcacaggcgctatctgctcaactggtcccatctctgtgctccgccgtattcgtaataggcgttctggacaatctgctcgtggtgctgattctcgtgaagtataaaggtctgaagcgggtcgaaaatatctacctgctgaacctcgcagtatcaaacctgtgctttcttcttactttaccgttctgggctcatgctggaggagaccccatgtgtaagatactgataggtctctatttcgtcggactgtattctgagacattctttaactgcctgctgactgtgcagcgctatctggtgttcctgcataaggggaacttctttagcgccagacgacgggtcccgtgcgggatcatcacaagtgtgcttgcatgggtgaccgcaatccttgccacattgccagagttcgtggtgtataaaccgcagatggaggaccagaagtataaatgcgcctttagccgtacgccatttctccctgctgacgagactttttggaaacactttctgaccttaaagatgaatataagcgtgcttgtgctgcctctcttcatctttacttag

SEQ ID NO: 142432 - DNA, 1035 bp, Artificial Sequence
  derived and/or modified sequence
atggccaactacaccctggccccagaagatgaatatgatgtgctgattgaaggagagctggagagtgatgaagctgagcagtgtgacaagtatgatgcccaggccctgagcgcccagctggtgcccagcctgtgcagcgctgtgtttgtgattggagtgctggacaacctgctggtggtgctgatcctggtgaagtacaagggcctgaagagggtggagaacatctacctgctgaacctggccgtgagcaacctgtgcttcctgctgaccctgcccttctgggcccatgctggaggagaccccatgtgcaagatcctgattggcctgtactttgtgggcctgtacagcgagaccttcttcaactgcctgctgactgtgcagcgctacctggtgttcctgcacaagggcaacttcttcagcgccaggagaagagtgccctgtggcatcatcacctctgtgctggcctgggtgacagccatcctggccaccctgcctgagtttgtggtgtacaagccccagatggaggaccagaagtacaagtgtgccttcagcaggacccccttcctgcctgcagatgagaccttctggaagcacttcctgaccctgaagatgaacatctctgtgctggtgctgcccctcttcatcttcaccttcctgtatgtgcagatgaggaagaccctgcgcttccgggagcagcgctacagcctcttcaagctggtgtttgccatcatggtggtgttcctgctgatgtgggccccctacaacatcgccttcttcctgagcaccttcaaggagcacttcagcctgagtgactgcaagagcagctacaacctggacaagtctgtgcacatcaccaagctgattgccaccacccactgctgcatcaaccccctgctgtatgccttcctggatggcaccttcagcaagtacctgtgccgctgcttccacctgcggagcaacacccccctgcagccccggggccagagcgcccagggcaccagccgggaggagccagaccacagcacagaggtgtag

SEQ ID NO: 142433 - DNA, 654 bp, Artificial Sequence
  derived and/or modified sequence
atggccaactacaccctggccccagaagatgaatatgatgtgctgattgaaggagagctggagagtgatgaagctgagcagtgtgacaagtatgatgcccaggccctgagcgcccagctggtgcccagcctgtgcagcgctgtgtttgtgattggagtgctggacaacctgctggtggtgctgatcctggtgaagtacaagggcctgaagagggtggagaacatctacctgctgaacctggccgtgagcaacctgtgcttcctgctgaccctgcccttctgggcccatgctggaggagaccccatgtgcaagatcctgattggcctgtactttgtgggcctgtacagcgagaccttcttcaactgcctgctgactgtgcagcgctacctggtgttcctgcacaagggcaacttcttcagcgccaggagaagagtgccctgtggcatcatcacctctgtgctggcctgggtgacagccatcctggccaccctgcctgagtttgtggtgtacaagccccagatggaggaccagaagtacaagtgtgccttcagcaggacccccttcctgcctgcagatgagaccttctggaagcacttcctgaccctgaagatgaacatctctgtgctggtgctgcccctcttcatcttcacctag

SEQ ID NO: 142434 - DNA, 1035 bp, Artificial Sequence
  derived and/or modified sequence
atggccaactacaccctggcccccgaggacgagtacgacgtgctgatcgagggcgagttggagagcgacgaagccgaacagtgtgacaaatatgatgcccaggccctgtccgctcagctggtgcccagcttgtgcagcgccgtcttcgtcatcggcgtcctagataatctacttgtggtgctgatcctggtcaaatacaaaggactgaagagggtagagaacatctatcttctgaatctcgctgtgtccaatttatgttttctactcacgctgcctttttgggctcacgctggtggagatcccatgtgcaagatacttatcggcctctatttcgtgggcttatactcagaaactttctttaactgtctactgaccgtgcagcgctacctggtattcctccacaaaggtaatttcttctccgcccggcgccgagtgccgtgtggtatcattacgagtgtgctggcatgggtgaccgccatacttgcaaccttacctgaatttgtcgtgtacaagccacaaatggaagaccagaaatataaatgcgctttctctagaacgccttttctacctgccgatgagacgttctggaaacattttctcactctgaaaatgaatatctccgtcctggtgctcccactgtttattttcaccttcctgtatgtgcagatgcggaagaccttgcgcttccgcgaacagaggtatagcctgttcaagctggtgttcgccataatggttgtgttcctgttgatgtgggccccttacaatattgcctttttcctaagtaccttcaaggagcacttctctctgagcgattgtaaaagctcctataaccttgataagtcggttcacatcactaaactcatagccacaacccattgctgtatcaatccactgttgtacgctttcctcgacggcaccttttcaaagtatctctgccgctgcttccatcttcgcagcaacactcctcttcaaccacgagggcaatccgcccagggaacctctagagaggagcccgatcactcaacagaagtgtag

SEQ ID NO: 142435 - DNA, 1035 bp, Artificial Sequence
  derived and/or modified sequence
atggccaactacaccctggcccccgaggacgagtacgacgtgctgattgagggggaactcgaatcagacgaggcagagcaatgcgacaaatatgatgcccaggcgctcagtgcccagctggtgccctcgctttgttccgcggtcttcgtgatcggagtgctggacaatctgctggtcgtcttaatcctggtcaagtacaagggactgaagcgggtagaaaatatttacctgctcaacctggctgtgagcaatctgtgcttcctcctgactctgcccttctgggctcacgctgggggcgacccaatgtgtaagattctgatcgggttatacttcgtgggcctctattccgagacgttttttaactgtttactcacagtgcaaaggtatcttgtgtttttacacaagggcaatttctttagcgctcgcaggagggtgccctgcggcatcatcacgagcgtacttgcctgggtgactgcaattctagccacccttcctgagttcgtagtctacaagccccagatggaagaccagaagtataagtgcgccttcagtagaacccccttcctcccggcggatgagaccttctggaagcatttcctgaccctgaaaatgaatatctccgtccttgtgttgcccctattcatctttacctttctctacgtgcagatgcgcaaaaccctcagattcagggaacagcgctattctctctttaagctcgtcttcgctattatggttgtttttctgctgatgtgggcaccgtacaatatcgcattcttcctctcaacctttaaggaacattttagtctctcagactgcaaaagctcctacaacctagataagtcggtacacattacaaagctcatcgccacgacacattgctgtattaacccgctgctttatgcctttttggatggcactttttcaaagtatctgtgtagatgctttcacctcagatccaatacccccctccaacctcgggggcagagcgcccaaggcacctctagggaggagcctgaccattccactgaagtctag

SEQ ID NO: 142436 - DNA, 1035 bp, Artificial Sequence
  derived and/or modified sequence
atggccaactacaccctggcccccgaggacgagtacgacgtgctgattgagggggagttagagtcagacgaagctgagcagtgtgacaaatatgacgcacaagccctttcagcgcaacttgtaccgtcactctgtagcgctgtattcgtgattggggtgctggacaatctcctagtcgtgttaatccttgtgaaatacaaggggctgaagcgagtagagaatatttatcttctaaacctagcagtatccaatctgtgctttctccttaccctgcctttttgggcgcacgcggggggcgatcccatgtgcaagatactgataggactgtacttcgtgggtctgtacagcgaaacattttttaattgcctcctgactgtgcagcggtatcttgtgttcctgcacaagggtaacttcttctctgcccggcgtagggtgccatgtggtatcatcacttcggtgctagcctgggttactgcaattctggcgactctgcccgaatttgtcgtttacaaaccacagatggaggaccagaaatacaaatgtgcatttagtagaaccccatttctgcctgcggacgagacattctggaaacatttcctgacactcaaaatgaacatttcagtgctggtattgccgctgtttatttttacctttctgtacgttcaaatgaggaagacccttaggttcagggagcagcggtactcattgttcaaattggtttttgctattatggtggtctttcttctgatgtgggccccttataacatcgctttttttctgtccacgtttaaggagcatttttctctctccgactgcaagtcatcgtataacctggataagagtgtccatataaccaagctaattgccactacacattgctgtataaacccactcctgtatgcatttctggacgggacattctcaaagtacttgtgcagatgcttccatctgaggtcgaatacccctttacagccacgagggcagagcgcacagggcacgtccagagaagagccagatcactccacagaagtttag

SEQ ID NO: 142437 - DNA, 654 bp, Artificial Sequence
  derived and/or modified sequence
atggccaactacaccctggcccccgaggacgagtacgacgtgctgattgagggtgaactggagtccgacgaggctgagcagtgtgacaagtacgacgcgcaggcactgtcagctcagctagttccaagtctctgctcagctgtgttcgtcataggcgtgctggataacctcctggtggtgctgatactagtgaaatacaagggccttaagcgcgtcgaaaacatttatttgctgaaccttgctgtgtccaacctctgcttcctgctgaccttgcccttttgggctcacgcaggaggcgaccccatgtgtaagatattaattggtctgtacttcgtgggcctctattccgagacattcttcaattgcctcctgactgtccaaaggtacttagtgttcttgcacaagggcaactttttctcagccaggcgaagagtgccctgcgggatcatcacatccgtactggcctgggtgaccgcaatacttgcgaccctgcctgagttcgtggtctacaagccacaaatggaagatcagaagtacaaatgcgcctttagccggactccatttctccctgccgatgaaaccttctggaagcactttctaacattaaaaatgaacattagcgtgctcgtgctgccactttttatctttacctag

SEQ ID NO: 142438 - DNA, 1035 bp, Artificial Sequence
  derived and/or modified sequence
atggcgaactatactttagcacctgaggatgaatacgacgtgttaattgaaggcgagttggagagtgacgaagccgagcaatgtgacaaatacgatgcccaggctttatctgcccaacttgtgccctctctgtgcagcgctgtcttcgtcattggggttttggacaatctgctggtggtgctgattctggtcaaatacaaagggctaaagagagtggaaaacatttatctgcttaatctggctgtgagcaacctatgttttttgttaaccctgcccttctgggcacatgctggcggtgatcctatgtgtaaaatcctgatcggtctgtatttcgtggggctctactcagagacattcttcaactgcctgttgacggtgcagcgttacctggtcttcctgcataagggcaatttctttagcgctagacggagggtgccatgtgggattattacttctgtcctggcctgggtgactgccatccttgctactctgcctgagtttgtcgtctataagccccagatggaggatcagaaatacaaatgcgccttttctagaactccctttctgccggcagatgagactttttggaagcactttctcactctgaagatgaacattagtgtgctcgtgctgccactattcatctttacgttcctgtacgtccagatgcggaagacgcttagattccgggagcaacggtacagcctgtttaaactggtgttcgctattatggtcgttttcctgctcatgtgggcgccttataatattgcctttttcctgtccacgttcaaggaacacttttcactgagcgattgtaagtcaagctacaacctggacaaatcagtgcacattactaaactaatcgcgaccacacattgttgtattaatcctttgctctacgcatttctcgatggaacattctccaagtacctctgcaggtgtttccatctcaggtcgaacactcccctgcagcccaggggacagtctgcccagggaacttcacgggaggaacccgatcacagcacggaagtttag

SEQ ID NO: 142439 - DNA, 1035 bp, Artificial Sequence
  derived and/or modified sequence
atggccaattacaccctggcaccagaggacgagtacgacgtactcatcgagggtgagctcgagtccgacgaagccgagcagtgcgacaagtacgatgcccaggcgctcagcgcccagctggtaccctctctgtgcagtgccgtgttcgtcatcggcgtcctggataacctgctcgtcgtgcttatactcgtgaagtacaagggcctgaaaagagttgagaacatttatctcctgaatctggcggtcagcaatctatgcttcctcttgacactgcccttctgggcccacgccggtggagatccgatgtgtaagatcctgatcggattgtacttcgttggtttgtacagtgaaacatttttcaattgtcttctgacagttcagaggtacctggtttttcttcataaaggtaatttctttagcgcgcgaaggcgggttccctgtggtatcatcacaagtgtattagcctgggtcaccgccatcctggctacattgccagaatttgttgtgtataagccacaaatggaggatcagaagtacaaatgtgccttcagtcgcaccccatttctgcctgctgatgaaaccttttggaagcatttcttgactctcaagatgaacatcagcgtgctggtcctgcccttgtttatcttcaccttcctgtatgtgcagatgcgtaagacactgcgctttcgggaacagcgctacagcctgttcaagttggtgttcgctattatggttgtttttttactgatgtgggccccatataatatcgccttctttctttctaccttcaaagagcacttcagcctttcagattgtaaatcttcctataatctggacaagagcgtccacataaccaagcttatagctacgacccattgttgtatcaatccgctgctctacgcttttcttgacggcacattcagtaagtatctgtgcaggtgttttcacctcaggagcaacacgccgctacaaccaagagggcagtctgcccagggtacctcgcgagaggagcccgaccatagtactgaagtctag

SEQ ID NO: 142440 - DNA, 1035 bp, Artificial Sequence
  derived and/or modified sequence
atggctaactacaccctggcgcctgaagacgagtatgatgttcttatagaaggcgagttagaaagcgatgaggcagagcaatgcgacaagtacgatgctcaggctctgtctgcccagttggttccctccctttgtagtgccgtcttcgtgatcggggtgctcgacaacttactggtcgtcctcattctcgtaaagtataaaggcttaaagagggtggagaacatctacctgctaaacctcgccgtcagcaacctgtgcttcctcctgaccctgccgttctgggcccacgccggtggggacccaatgtgcaagatcctgatcggactgtattttgtggggctctactccgaaaccttctttaactgcctgctgacagttcagcggtacctggtgtttttgcacaaagggaatttcttttccgcccgaagaagagtgccgtgtgggattataacctccgtcctcgcctgggtgacagctattctcgccacattacctgaattcgttgtgtacaaaccacaaatggaagatcagaaatacaagtgtgcgttttcccgtaccccctttctgcctgctgatgagactttttggaaacattttctgactctcaagatgaacatatctgtcctggtattaccactttttatttttacatttttgtacgtgcaaatgaggaagaccttgcgttttagggagcagcgctactcactgttcaagctggtgtttgctattatggtggtctttctgctcatgtgggccccttacaatattgccttttttttgtccacattcaaggagcacttctcactgtccgactgcaagtcttcctataacctcgacaagtcagtgcatatcacgaaactgatcgccaccacacactgctgtattaatccactactttacgcgtttctcgacgggactttctccaagtacctgtgtaggtgcttccatcttcgatctaacaccccactgcaacccagggggcagagcgctcaggggacgtcccgcgaagagccagatcattctaccgaggtgtag

SEQ ID NO: 142441 - DNA, 654 bp, Artificial Sequence
  derived and/or modified sequence
atggcaaattacaccctcgcccctgaagacgaatatgacgtgctgattgagggggagcttgagtccgatgaagccgagcagtgtgacaaatacgacgctcaggctttgagcgctcagctagtgccctccctgtgtagcgccgtcttcgtcattggagttctggacaatttattggtggtgctaatcttagtcaagtataaaggactgaagcgcgtggagaacatctaccttctcaacctggctgtcagcaatttatgttttcttctgaccctcccattctgggcacacgctggcggagacccaatgtgcaaaatcctgattggtctctattttgtggggctgtactccgagacatttttcaattgccttttgacagtgcagcgctacctggtctttttgcacaaagggaactttttttccgccaggcgtcgggtgccctgcggaattatcaccagcgtcttagcttgggtgactgccattctggccacactacctgaatttgtggtgtataagccacaaatggaagaccagaagtacaagtgtgcgttctctaggaccccatttctgcctgctgatgagactttttggaaacacttcttaaccttgaagatgaatatatcagtgctggttttaccactctttatcttcacgtag

SEQ ID NO: 142442 - DNA, 1035 bp, Artificial Sequence
  derived and/or modified sequence
atggccaactacaccctggcccccgaggacgagtacgacgtgctgatcgagggcgagctggagagcgacgaggccgagcagtgcgacaagtacgacgcccaggccctgagcgcccagctggtgcccagcctgtgcagcgccgtgttcgtgatcggcgtgctggacaacctgctggtggtgctgatcctggtgaagtacaagggcctgaagagagtggagaacatctacctgctgaacctggccgtgagcaacctgtgcttcctgctgaccctgcccttctgggcccacgccggcggcgaccccatgtgcaagatcctgatcggcctgtacttcgtgggcctgtacagcgagaccttcttcaactgcctgctgaccgtgcagagatacctggtgttcctgcacaagggcaacttcttcagcgccagaagaagagtgccctgcggcatcatcaccagcgtgctggcctgggtgaccgccatcctggccaccctgcccgagttcgtggtgtacaagccccagatggaggaccagaagtacaagtgcgccttcagcagaacccccttcctgcccgccgacgagaccttctggaagcacttcctgaccctgaagatgaacatcagcgtgctggtgctgcccctgttcatcttcaccttcctgtacgtgcagatgagaaagaccctgagattcagagagcagagatacagcctgttcaagctggtgttcgccatcatggtggtgttcctgctgatgtgggccccctacaacatcgccttcttcctgagcaccttcaaggagcacttcagcctgagcgactgcaagagcagctacaacctggacaagagcgtgcacatcaccaagctgatcgccaccacccactgctgcatcaaccccctgctgtacgccttcctggacggcaccttcagcaagtacctgtgcagatgcttccacctgagaagcaacacccccctgcagcccagaggccagagcgcccagggcaccagcagagaggagcccgaccacagcaccgaggtgtag

SEQ ID NO: 142443 - DNA, 654 bp, Artificial Sequence
  derived and/or modified sequence
atggccaactacaccctggcccccgaggacgagtacgacgtgctgatcgagggcgagctggagagcgacgaggccgagcagtgcgacaagtacgacgcccaggccctgagcgcccagctggtgcccagcctgtgcagcgccgtgttcgtgatcggcgtgctggacaacctgctggtggtgctgatcctggtgaagtacaagggcctgaagagagtggagaacatctacctgctgaacctggccgtgagcaacctgtgcttcctgctgaccctgcccttctgggcccacgccggcggcgaccccatgtgcaagatcctgatcggcctgtacttcgtgggcctgtacagcgagaccttcttcaactgcctgctgaccgtgcagagatacctggtgttcctgcacaagggcaacttcttcagcgccagaagaagagtgccctgcggcatcatcaccagcgtgctggcctgggtgaccgccatcctggccaccctgcccgagttcgtggtgtacaagccccagatggaggaccagaagtacaagtgcgccttcagcagaacccccttcctgcccgccgacgagaccttctggaagcacttcctgaccctgaagatgaacatcagcgtgctggtgctgcccctgttcatcttcacctag

SEQ ID NO: 142444 - protein, 1074 aa, Artificial Sequence
  derived and/or modified sequence
MKGTCVIAWLFSSLGLWRLAHPEAQGTTQCQRTEHPVISYKEIGPWLREFRAKNAVDFSQLTFDPGQKELVVGARNYLFRLQLEDLSLIQAVEWECDEATKKACYSKGKSKEECQNYIRVLLVGGDRLFTCGTNAFTPVCTNRSLSNLTEIHDQISGMARCPYSPQHNSTALLTAGGELYAATAMDFPGRDPAIYRSLGILPPLRTAQYNSKWLNEPNFVSSYDIGNFTYFFFRENAVEHDCGKTVFSRAARVCKNDIGGRFLLEDTWTTFMKARLNCSRPGEVPFYYNELQSTFFLPELDLIYGIFTTNVNSIAASAVCVFNLSAIAQAFSGPFKYQENSRSAWLPYPNPNPHFQCGTVDQGLYVNLTERNLQDAQKFILMHEVVQPVTTVPSFMEDNSRFSHVAVDVVQGREALVHIIYLATDYGTIKKVRVPLNQTSSSCLLEEIELFPERRREPIRSLQILHSQSVLFVGLREHVVKIPLKRCQFYRTRSTCIGAQDPYCGWDVVMKKCTSLEESLSMTQWEQSISACPTRNLTVDGHFGVWSPWTPCTHTDGSAVGSCLCRTRSCDSPAPQCGGWQCEGPGMEIANCSRNGGWTPWTSWSPCSTTCGIGFQVRQRSCSNPTPRHGGRVCVGQNREERYCNEHLLCPPHMFWTGWGPWERCTAQCGGGIQARRRICENGPDCAGCNVEYQSCNTNPCPELKKTTPWTPWTPVNISDNGGHYEQRFRYTCKARLADPNLLEVGRQRIEMRYCSSDGTSGCSTDGLSGDFLRAGRYSAHTVNGAWSAWTSWSQCSRDCSRGIRNRKRVCNNPEPKYGGMPCLGPSLEYQECNILPCPVDGVWSCWSPWTKCSATCGGGHYMRTRSCSNPAPAYGGDICLGLHTEEALCNTQPCPESWSEWSDWSECEASGVQVRARQCILLFPMGSQCSGNTTESRPCVFDSNFIPEVSVARSSSVEEKRCGEFNMFHMIAVGLSSSILGCLLTLLVYTYCQRYQQQSHDATVIHPVSPAPLNTSITNHINKLDKYDSVEAIKAFNKNNLILEERNKYFNPHLTGKTYSNAYFTDLNNYDEY

SEQ ID NO: 142445 - protein, 254 aa, Artificial Sequence
  derived and/or modified sequence
MKGTCVIAWLFSSLGLWRLAHPEAQGTTQCQRTEHPVISYKEIGPWLREFRAKNAVDFSQLTFDPGQKELVVGARNYLFRLQLEDLSLIQAVEWECDEATKKACYSKGKSKEECQNYIRVLLVGGDRLFTCGTNAFTPVCTNRSLSNLTEIHDQISGMARCPYSPQHNSTALLTAGGELYAATAMDFPGRDPAIYRSLGILPPLRTAQYNSKWLNEPNFVSSYDIGNFTYFFFRENAVEHDCGKTVFSRAARVC

SEQ ID NO: 142446 - DNA, 3225 bp, Artificial Sequence
  derived and/or modified sequence
atgaagggcacctgcgttattgcgtggctatttagttccttgggcctttggcgcctggcgcatccagaggctcagggcaccactcaatgtcagcgcactgagcacccagtcatatcgtacaaggagataggcccttggctcagggagtttcgggctaaaaacgccgtagatttttctcaactaacctttgatcccggtcagaaggagttggttgtgggcgcgagaaattaccttttcagactgcaacttgaagacctgagcctcattcaggccgtggagtgggaatgcgacgaggctaccaagaaggcctgttactcaaaaggaaagtccaaggaggagtgccagaactatattagggtgttacttgtgggaggagacaggctgttcacttgtggtaccaacgcatttacgcccgtatgcactaaccgcagtctgtcaaacctcaccgagattcatgatcagatctccggcatggcccgatgtccatactcaccacaacacaacagcaccgctcttttgacagctggcggcgaattgtacgctgccaccgcaatggattttcccggacgagaccctgccatctatcggagccttggaatccttccacctcttcgaactgcccagtacaacagcaagtggctcaacgagcccaattttgtgtccagttatgacattggaaattttacctatttttttttccgggaaaatgccgtcgaacacgactgcggaaaaacagtgttcagccgtgcggcgcgcgtgtgcaagaatgacatcggaggacgttttctgctcgaagatacctggacaacatttatgaaggctagactgaactgttctcggccaggggaggtaccattctattataacgaattacagagcaccttttttctgcctgagctggacctcatctatgggatctttaccacaaatgtgaattctattgcagcctccgctgtctgcgtgtttaatcttagcgctattgcacaggcattcagtgggccttttaaatatcaggagaatagtagaagcgcgtggctaccttacccaaaccccaacccacacttccagtgtggtacggtggatcaggggctgtacgtgaacttaacagaacggaatcttcaggacgcacagaaatttatccttatgcacgaagtggtccagcccgtcactaccgttccgagctttatggaggacaattcgaggttcagccacgtagcagtggatgtggtgcagggacgggaggcactggtacatatcatctacctggcaaccgattatggaaccataaagaaagtgcgtgtccccctgaaccaaaccagtagctcctgcctgctggaggagattgagctgtttccagagcgtaggcgggaaccaattaggagcctgcagatactccattcccaatcagtcctctttgtgggtctgagagaacatgtagtgaagatccccctcaagcgttgccagttctaccgtacaaggtcaacatgcatcggagcccaggatccttactgcgggtgggatgttgtcatgaaaaagtgtacttcactggaagagagtctgtcgatgacgcagtgggagcagtctatatccgcatgccctacccgaaacctgacggtagatggccactttggcgtgtggagcccgtggacaccttgtacacatacagatggttcagccgtaggttcttgcctgtgtagaaccaggagctgtgattcgccagcccctcagtgcggaggctggcagtgcgaaggcccaggcatggaaattgccaactgttctcgcaacggaggatggaccccttggacctcctggtccccatgctctaccacttgtggcatcggctttcaggttcgccagcggagctgtagcaacccaactcccaggcacggcgggagggtatgcgtcggacagaacagagaagagcggtactgcaacgagcacctgctgtgcccgccccacatgttctggacaggctggggtccctgggagaggtgtacagctcagtgcgggggcggcatacaagctaggcgcaggatttgtgaaaatgggcctgactgcgctggttgcaacgttgaataccagtcctgcaacacgaacccctgtccagagctgaaaaaaactactccctggaccccttggacccctgtcaatatctccgataacgggggccactatgaacagcgtttccggtacacttgcaaagctcggttagctgatccaaacttactggaagtcggccggcaacgaatcgaaatgcggtattgtagctccgatggaacaagcgggtgtagtaccgacggcctgtcaggggattttctgcgtgctgggaggtactccgcccacactgttaatggtgcatggagcgcgtggacatcttggagccagtgcagccgcgactgctcgcgcggcattcggaataggaagcgcgtctgtaataaccccgagcctaagtatggcggaatgccctgcctcggaccaagccttgagtaccaagaatgtaacattcttccttgtccagtggatggggtatggtcatgctggtctccctggaccaagtgctctgccacttgtggaggggggcactatatgcgcacaaggagctgctctaatcctgccccggcttacggcggggacatctgtctgggtttacatactgaagaggctctttgtaacacccaaccctgccctgagtcctggtccgagtggtcagattggtcagaatgtgaggcctctggggtgcaggtccgcgccaggcaatgcatcctcctgttccccatgggatctcaatgttccggtaatacaacagagtctagaccatgcgtgttcgatagtaatttcatccctgaggtgtcagtagctaggagctctagcgttgaagagaagcgctgtggcgaattcaacatgttccacatgattgcagtcggcctgtcatccagcatcctcggctgtctcctgaccctgctcgtctacacctattgtcagcgataccagcaacagtcacatgacgccaccgttatacatccagtgtcccccgccccactcaacacctcaatcaccaaccatatcaacaagctggacaaatacgatagcgtggaggccatcaaagccttcaacaagaacaatctgatactcgaagaacgcaataaatattttaacccccatctgacgggaaagacttactcaaatgcatactttaccgatctgaataattacgacgaatattag

SEQ ID NO: 142447 - DNA, 765 bp, Artificial Sequence
  derived and/or modified sequence
atgaagggcacttgcgtgatcgcctggttgttcagctctcttggactttggaggctcgcccatcctgaggcccagggaacgacacagtgccaacgaactgagcatccagtaatttcctacaaggaaatcgggccatggctgagagagtttagagcaaaaaacgcagtagactttagtcagttaacgtttgaccccgggcagaaggaactggtggttggtgcacggaattatttattccggcttcagctcgaggacctctccctcattcaggccgtggagtgggaatgcgacgaggcaaccaaaaaagcttgctacagcaaagggaagtctaaggaggaatgccagaattacatcagggtgcttctggtcgggggcgatagactcttcacgtgcggtacaaacgccttcacacctgtgtgcactaataggtctctgtccaatctgacagaaattcacgatcaaatttctgggatggctcgatgcccctacagtcctcagcacaacagcaccgcactcctcacggcaggcggagagttgtacgccgcaactgcaatggatttccctggccgtgatcccgccatctatcggagcctcggaatcctgccccccctgcggaccgcacagtataatagcaaatggttgaacgagcctaatttcgtctcatcttacgacatcggaaatttcacatactttttcttccgagaaaatgccgtggagcatgattgcggcaagaccgtgttctcccgggctgcgagggtttgctag

SEQ ID NO: 142448 - DNA, 3225 bp, Artificial Sequence
  derived and/or modified sequence
atgaagggcacctgtgtgattgcctggctgttcagcagcctgggcctgtggaggctggcccaccctgaggcccagggcaccacccagtgccagaggacagagcaccctgtgatctcctacaaggagatcggcccctggctgcgggagttccgggccaagaatgctgtggacttcagccagctgacctttgatcctggccagaaggagctggtggtgggcgccaggaactacctgttccggctgcagctggaggacctgagcctcatccaggccgtggagtgggagtgtgatgaggccaccaagaaggcctgctacagcaagggcaagagcaaggaggagtgccagaactacatccgggtgctgctggtgggcggggacaggctcttcacctgtggcaccaatgccttcacccctgtgtgcaccaacagaagcctgagcaacctgacagagatccatgaccagatcagcggcatggcccgctgcccctacagcccccagcacaacagcacagccctgctgacagctggaggagagctgtatgctgccacagccatggacttccctggccgggaccctgccatctaccgcagcctgggcatcctgccccccctgaggacagcccagtacaacagcaagtggctgaatgagcccaactttgtgagcagctatgacatcggcaacttcacctacttcttcttcagagaaaatgctgtggagcatgactgtgggaagacagtgttcagccgggccgcccgggtgtgcaagaatgacatcggcggccgcttcctgctggaggacacctggaccaccttcatgaaggcccggctgaactgcagcaggcctggagaggtgcccttctactacaatgagctgcagagcaccttcttcctgcctgagctggacctgatctacggcatcttcaccaccaacgtgaacagcattgctgccagcgctgtgtgtgtgttcaacctgagcgccatcgcccaggccttcagcggccccttcaagtaccaggagaacagccgcagcgcctggctgccctaccccaaccccaacccccacttccagtgtggcaccgtggaccagggcctgtatgtgaacctgacagaaagaaacctgcaggatgcccagaagttcatcctgatgcatgaggtggtgcagcctgtgaccaccgtgcccagcttcatggaggacaacagccgcttcagccacgtggccgtggatgtggtgcagggccgggaggccctggtgcacatcatctacctggccacagattatggcaccatcaagaaggtgcgggtgcccctgaaccagaccagcagcagctgcctgctggaggagattgagctgtttcctgagaggagaagagagcccatccgcagcctgcagatcctgcacagccagagcgtgctgtttgtgggcctgcgggagcacgtggtgaagatccccctgaagcgctgccagttctaccgcaccaggagcacctgcattggagcccaggacccctactgcggctgggatgtggtgatgaagaagtgcaccagcctggaggagagcctgtccatgacccagtgggagcagagcatcagcgcctgccccaccaggaacctgactgtggatggccactttggagtgtggagcccctggaccccctgcacccacacagatggcagcgctgtgggcagctgcctgtgcaggaccaggagctgtgacagccctgccccccagtgtggcggctggcagtgtgagggccctggcatggagatcgccaactgcagcagaaatggaggctggaccccctggacctcctggagcccctgcagcaccacctgtggcatcggcttccaggtgcggcagaggagctgcagcaaccccacccccaggcatggaggccgggtgtgtgtgggccagaaccgggaggagcgctactgcaatgagcacctgctgtgccccccccacatgttctggacaggctggggcccctgggagcgctgcacagcccagtgtggcggcggcatccaggcccggcggcgcatctgtgaaaatggaccagactgtgccggctgcaatgtggagtaccagagctgcaacaccaacccctgcccagagctgaagaagaccaccccctggaccccctggacccctgtgaacatcagtgacaatggaggccactatgagcagcgcttccgctacacctgcaaggcccggctggccgaccccaacctgctggaggtgggccggcagagaattgagatgagatactgcagcagtgatggcaccagcggctgcagcacagatggcctgagcggggacttcctgcgggccggccgctacagcgcccacacagtgaatggagcctggagcgcctggacctcctggagccagtgcagccgggactgcagccggggcatccggaacaggaagagggtgtgcaacaaccctgagcccaagtatggaggcatgccctgcctgggccccagcctggagtaccaggagtgcaacatcctgccctgccctgtggatggagtgtggagctgctggagcccctggaccaagtgcagcgccacctgtggcggcggccactacatgaggaccaggagctgcagcaacccagccccagcctatggaggagacatctgcctgggcctgcacacagaggaggccctgtgcaacacccagccctgcccagagagctggagcgagtggagcgactggagcgaatgtgaggccagcggcgtgcaggtgcgggcccggcagtgcatcctgctcttccccatgggcagccagtgcagcggcaacaccacagagagccggccctgtgtgtttgacagcaacttcatccctgaggtgtctgtggcccggagcagctctgtggaggagaagagatgtggggagttcaacatgttccacatgattgctgtgggcctgagcagcagcatcctgggctgcctgctgaccctgctggtgtacacctactgccagcgctaccagcagcagagccatgatgccaccgtcatccaccctgtgtccccagcccccctgaacaccagcatcaccaaccacatcaacaagctggacaagtatgacagcgtggaggccatcaaggccttcaacaagaacaacctgatcctggaggagaggaacaagtacttcaacccccacctgaccgggaagacctacagcaatgcctacttcacagacctgaacaactatgatgagtactag

SEQ ID NO: 142449 - DNA, 765 bp, Artificial Sequence
  derived and/or modified sequence
atgaagggcacctgtgtgattgcctggctgttcagcagcctgggcctgtggaggctggcccaccctgaggcccagggcaccacccagtgccagaggacagagcaccctgtgatctcctacaaggagatcggcccctggctgcgggagttccgggccaagaatgctgtggacttcagccagctgacctttgatcctggccagaaggagctggtggtgggcgccaggaactacctgttccggctgcagctggaggacctgagcctcatccaggccgtggagtgggagtgtgatgaggccaccaagaaggcctgctacagcaagggcaagagcaaggaggagtgccagaactacatccgggtgctgctggtgggcggggacaggctcttcacctgtggcaccaatgccttcacccctgtgtgcaccaacagaagcctgagcaacctgacagagatccatgaccagatcagcggcatggcccgctgcccctacagcccccagcacaacagcacagccctgctgacagctggaggagagctgtatgctgccacagccatggacttccctggccgggaccctgccatctaccgcagcctgggcatcctgccccccctgaggacagcccagtacaacagcaagtggctgaatgagcccaactttgtgagcagctatgacatcggcaacttcacctacttcttcttcagagaaaatgctgtggagcatgactgtgggaagacagtgttcagccgggccgcccgggtgtgctag

SEQ ID NO: 142450 - DNA, 3225 bp, Artificial Sequence
  derived and/or modified sequence
atgaagggcacctgcgtgatcgcctggctgttcagcagcctgggcctttggcggctggcacaccctgaagcgcagggcaccacccaatgccagcggactgaacacccagtgataagctataaggaaattggcccatggttacgcgagttccgggctaagaatgcagttgatttctcgcagcttacgtttgacccagggcaaaaggagctggtggtgggggctagaaactatctgttcaggctccagctcgaagacctctctttgattcaagccgtagagtgggagtgcgatgaagctacgaaaaaggcatgttactcaaaaggtaaaagcaaagaggagtgtcagaattacatccgggtgcttctggtgggaggggataggctatttacgtgcggaacaaatgccttcacgcctgtttgcaccaataggtccctctccaacctgacagaaatccacgatcagattagcgggatggctcggtgtccctatagcccacagcacaacagtacagcccttctgactgcaggaggtgaactctatgctgccactgctatggattttccgggcagggacccagccatatacagatctctcgggattctccctccactaaggaccgcccaatataactccaagtggctcaacgagcccaacttcgtgtcgagttatgacatcgggaatttcacttactttttcttcagagaaaacgcagtggagcatgactgtgggaaaacagtcttctctcgagcagcgagagtatgtaaaaacgatatcgggggacgtttcttgctggaagatacatggaccacatttatgaaggcccggcttaattgctcccggccaggcgaagtccctttctattataacgaactgcaatcgacctttttccttcctgagcttgatttaatctatgggatttttacgaccaacgtcaactctatagccgcctctgcagtgtgtgtgttcaacttgtctgctatcgctcaggcgttctccggaccgttcaaataccaggaaaatagccgctcggcctggttaccttatcccaacccaaatccccactttcagtgtggcaccgttgaccagggcctctacgtgaatctcaccgagcggaacctccaggacgcacagaagttcatcctaatgcatgaggtcgtccagccggttaccacagtgccgtcctttatggaagataattctcgttttagccacgtggccgtagatgtagtgcaggggcgagaggccctggtgcatataatctatttagccaccgattatggcactataaagaaagttcgggtccccctgaatcaaacaagcagcagctgcctgcttgaggagatagaactcttccctgaacgcaggagggagcccattcggagccttcaaattctgcactctcaaagtgtgctgttcgtcggactgagagagcatgtggttaagattccgctcaagcgctgccagttctaccgtactcgctcaacctgcattggtgcccaggacccctactgtggatgggacgtggtgatgaagaagtgtacatctctggaggaatctctttcaatgacccaatgggagcaatctatctccgcatgtccaacacgcaatctcacggtggatgggcacttcggcgtgtggtctccctggaccccttgtactcacacggacgggagtgctgtgggcagttgtttgtgcaggacaaggagctgtgactctccagcgcctcagtgcggcggttggcagtgtgagggaccagggatggaaattgcaaattgtagtagaaatggagggtggaccccttggacttcatggagcccatgttcgacaacttgtgggattgggttccaggttagacagcgctcatgctcaaaccccactccgaggcacggaggccgggtgtgtgttggtcagaatcgcgaagagaggtactgcaacgagcacttactctgcccaccccatatgttctggaccggttggggcccttgggaacggtgcaccgctcagtgcgggggtgggatacaggctcgccgccggatatgtgagaacggacctgactgcgcggggtgcaacgtcgagtatcagtcgtgcaacacaaatccttgtcccgagctgaagaaaacaacgccctggacaccctggacaccagttaacatctccgacaatggcgggcactatgagcagcgcttcaggtacacatgcaaggcccgacttgccgatcccaacctgttggaagtgggccgacaacgaatcgaaatgcgttattgcagctccgatggcactagcggctgctccaccgatggccttagcggcgactttctccgagctggccggtacagtgcccacacagttaatggagcctggagcgcctggacctcttggtcccagtgctctcgggattgtagccggggcatccgcaaccgcaagcgcgtgtgtaacaatccggaaccaaaatatggtggaatgccgtgtctcggcccttccctagaataccaggaatgtaacattcttccctgccccgtggacggagtatggtcttgctggagcccatggactaaatgttctgccacctgcggtggcggccattacatgcgcacgaggtcgtgctctaatccagcaccagcctacggtggcgacatttgtctgggccttcacacagaggaggccctctgcaacacgcaaccatgtccagagtcctggagtgagtggagtgattggtctgaatgcgaggcatctggtgtgcaagttcgcgctagacagtgcatccttttatttcctatgggttcacagtgctctggcaataccacagaaagccgaccctgcgtgttcgatagcaacttcattcccgaagtctcagtcgctcgctccagttccgtcgaagaaaagaggtgtggggaattcaacatgttccacatgatcgctgtgggtctgtcaagtagcattcttggctgtctgcttacactgcttgtttacacttactgtcagcgatatcagcagcaatcccacgacgccacagtgatccatcccgtaagccccgccccactgaacaccagtatcacaaatcacatcaataaactggacaagtacgattccgttgaggccataaaagcattcaacaagaataatttgattttggaggagaggaataagtactttaatccacacttaaccggaaagacatattcaaatgcatattttactgatcttaacaactatgatgagtactag

SEQ ID NO: 142451 - DNA, 765 bp, Artificial Sequence
  derived and/or modified sequence
atgaagggcacctgcgtgatcgcctggctgttcagcagcctgggcttgtggaggcttgctcacccggaagcccaggggacgacacagtgccagagaaccgaacatccagttatatcctacaaagagatcggcccttggctcagagagtttcgcgcaaagaacgctgtagatttttcacagctgactttcgaccccgggcagaaggagctggtggtaggggctagaaattacctcttccggttgcagttggaggatctcagcctgatccaggccgtggagtgggagtgtgacgaggccacaaagaaggcttgctactctaaagggaaaagcaaggaagagtgccagaattacattcgcgtgctgctggtcgggggtgaccgcctcttcacctgtgggactaacgctttcacgcccgtctgcactaatcggtcgttgagcaatctgacagagatacacgaccaaattagtgggatggcgcgctgcccatatagcccacaacacaattctacggctttgttgactgcaggtggagagctctacgctgctactgccatggactttccagggagagaccctgctatctacaggtctctaggtatcctgccaccactgcgtaccgcccagtacaattctaagtggctgaatgagccaaacttcgtgtcttcttacgatattggcaatttcacatatttcttctttcgcgagaacgcggtggaacacgactgcggcaagacagtcttttctagggcggcgcgcgtttgttag

SEQ ID NO: 142452 - DNA, 3225 bp, Artificial Sequence
  derived and/or modified sequence
atgaaagggacgtgcgtcattgcatggctcttcagtagtttggggctatggcgcctggcccaccccgaagcacaggggaccacccaatgccagaggaccgaacaccccgtaatcagctataaggaaatcggcccatggctgcgcgagtttagagctaagaacgccgtagatttctcccagctgacctttgatcccggacagaaggaactcgtcgtgggagcgcgaaactatttattccgcttacagttagaggacctctccctcattcaggccgtggaatgggagtgtgacgaggctacaaaaaaggcctgttactcgaaagggaagagtaaagaggaatgtcaaaactacatacgggtcctcctcgttggcggtgacaggctgttcacttgtggaacaaacgccttcactccagtgtgcactaaccgcagcttgagtaacctaaccgagatacatgatcagatatcgggcatggccaggtgcccgtactcgccacaacacaattctacagccctgttgaccgcgggaggcgagttgtatgccgctaccgctatggactttccgggtagggatcctgctatttaccggagcctcggcattctgcccccactgcggaccgcgcagtacaactctaagtggcttaatgagcctaatttcgtaagcagctacgacattggcaattttacctacttctttttcagggagaacgcagtcgagcacgactgtgggaaaaccgtgttctcacgcgctgccagagtttgcaagaacgatatcggcggacggttcctgcttgaagatacatggacaacatttatgaaagcacgcttaaattgttcccgccctggggaggtgccattttactacaacgagctgcagagcacattcttcctacccgagctcgatctgatatacggcatctttaccaccaacgtgaatagcattgccgcttcagctgtgtgcgtctttaatctctcagcaattgctcaggctttcagtgggccatttaaataccaggagaattctcgctccgcctggctgccctaccccaatccgaatcctcactttcagtgtgggacagtcgatcaaggactttacgttaatttgactgagaggaacttgcaagatgcccagaagttcattctcatgcatgaggtggtgcagcctgtgacaaccgttccctcttttatggaagacaactctaggttctcccatgtggccgttgatgtggtgcagggtagagaggccctagtccacattatttacctggccacagactacggaacaattaagaaggtaagggtgcccctaaaccagacatccagctcgtgtttgctggaggaaattgaactgtttcctgaaaggagaagagaacctatcagatcactgcaaattctccattcgcagtcggttctgtttgtgggcttgagagagcacgtggtgaagatccccttgaaacgatgccagttctatagaacgcggtctacttgcatcggggcacaggatccttattgtgggtgggatgtggtgatgaagaaatgtacctcactcgaggagtcgctgagtatgacacagtgggaacagagtattagtgcttgccccacacgaaatctgactgttgacggccacttcggagtgtggagcccctggactccctgtacccatactgatggatcagctgtgggaagttgcctgtgtagaaccaggagctgcgattcccccgctccccagtgcggtggatggcagtgcgaaggccctgggatggagattgccaactgcagccgcaatggtggctggactccatggacctcatggtctccatgtagcaccacctgcggcataggctttcaggtgcgccagaggagttgctccaatcccacccctaggcatgggggacgcgtctgcgttggacagaatagggaggagagatactgcaatgaacacttgctatgcccgcctcatatgttctggacaggctggggtccatgggagcggtgcaccgcacagtgcggtgggggaattcaagccagacgacggatatgcgagaacggtccagactgcgcagggtgcaatgtggaatatcagtcatgtaacaccaatccttgtccggaacttaagaagactacaccctggacaccgtggacccccgtgaatatttccgacaatggcggacactatgaacaacgattccggtacacttgtaaggctagactcgcagacccgaacctcctggaggtggggaggcagcgaatcgaaatgagatattgctcctccgatgggacatcggggtgtagcacagacggcctcagcggcgacttcctcagagcgggtagatactcggcccacaccgtgaacggggcttggagtgcttggacgagctggtcccagtgcagccgcgattgcagccggggaattcggaataggaaaagagtgtgtaacaacccagagccaaagtatggcggaatgccatgcttggggccaagcttggagtatcaggagtgcaatatactgccttgtccagttgacggcgtctggagttgctggtcaccctggaccaagtgtagcgcaacttgtggtggcggtcactacatgagaacaagatcctgtagcaaccctgctccagcctacggcggtgatatttgcctgggccttcacaccgaagaagccttgtgtaatactcaaccctgcccagagtcgtggtccgaatggagtgactggagcgagtgtgaggcatcaggagtccaggtgcgcgctagacagtgtatattactgtttcccatgggttctcagtgctcgggcaatactactgaaagtaggccctgcgtatttgattctaatttcatccccgaagtgtctgtcgcccgaagctcatctgttgaggaaaaacgttgtggcgaatttaatatgtttcacatgatcgccgtgggactgtcttcatcaattctaggatgcctgcttactcttttggtctacacttactgtcaacgttaccagcaacaaagtcatgacgccactgttatccaccccgtatcccccgctccattaaatacatccattaccaatcatatcaacaaactggataagtacgatagcgtagaggccattaaagcgtttaacaaaaacaacctcattttggaagagcgcaacaaatattttaatcctcacctgacgggcaaaacctacagcaatgcttatttcaccgacctgaataactatgacgagtactag

SEQ ID NO: 142453 - DNA, 765 bp, Artificial Sequence
  derived and/or modified sequence
atgaaggggacatgcgttattgcatggctgttttcgagcctcggtttgtggcgcctcgcccaccccgaagcccagggtaccactcagtgccagaggactgagcaccccgtcattagttacaaggagattggcccatggcttcgtgagttcagggctaaaaatgctgtggacttcagtcagctcactttcgatccaggtcaaaaagagttggttgtgggcgcaagaaactacttgttccgtctgcaactcgaagacttgtccctcatccaggccgtggaatgggagtgtgacgaggcgactaagaaggcgtgctatagcaaaggaaagagcaaggaagaatgccaaaactacatccgtgttctcttggtgggcggtgatcgactctttacctgtggaactaacgccttcacacccgtgtgcacaaacagatccttgagtaacctgactgagatccacgatcaaatcagcggcatggcgcgatgtccgtattcgccacagcacaacagcactgcattgcttactgccggtggcgaactctatgccgctactgccatggactttccaggcagggaccctgcaatttacaggtcacttggcatcctacctcccctgaggacggcacagtacaattcgaagtggcttaacgagcccaactttgtgtcatcctacgacataggtaacttcacctacttcttttttagggagaacgccgtggagcacgactgtggtaagactgtattctcccgtgccgctcgggtctgttag

SEQ ID NO: 142454 - DNA, 11762 bp, Artificial Sequence
  derived and/or modified sequence
acttgccgggaaggcggcgccggtggcggctgctctccctgagcccgctcccgagcgctgctttcccgccgcgggtgggcttcgcagcctcaggccagccgcggcccttggcccgctgcagccccggccctccaccttccccgtgcaggggcggcccggccagtgtcgctcatcccgggacgctcccttctcccacccaggactgccccgcggagctggcttggacacccaactttgccacctcgagggtcgtctctgctgggcgcgaacctgcccacccaccggttggccgcgcgctcggggaccgtgctcgtggcccccaagccggtgcccccattctggaactcagcgagtagggggcggctctggggaagtggcagggggcggctgcagctgctgcctccacttccctagccaggtgctgaagaggatcctcggagccgctctggcccccaggcgctggatgactggcaccagcgctcctcgcacctgtgttggtgtgtgagacttgggctggagtgcccacgtggctgtggagtcagtgtgattcatgattgaggaaacgcgtcctccatcctctctctccttggcactttccacacatgaggagaagaagagcttctgtttagaagacacgtgcccagagtcagaggccccttgcccaccatgaagggaacctgtgttatagcatggctgttctcaagcctggggctgtggagactcgcccacccagaggcccagggtacgactcagtgccagagaaccgagcatccagtcatctcctataaagaaattggcccctggttacgggagttcagagcgaagaatgctgtggatttctcgcagttaacatttgacccaggacagaaagaacttgttgtaggagcaagaaactacctcttcaggttacagcttgaggatctgtctcttatccaggctgtggaatgggagtgtgatgaagctaccaaaaaggcctgttacagcaaaggcaaatcaaaggaggaatgtcagaactacatccgggtgcttctggtgggtggcgaccggttattcacctgtgggaccaatgcattcacgcctgtctgcaccaaccgctcgttgagcaacctgactgagatccatgatcagatcagtggcatggcccgctgtccctacagtccccagcacaattccacagcgctcctcacagctggtggggagctctatgctgctacagccatggattttccaggacgtgatcctgccatttaccgaagcctaggcattttacctcctctccgcacggcgcagtacaactccaaatggctcaatgagccaaactttgtgtcatcttatgacatcggaaattttacctacttctttttccgagaaaatgcagtagagcatgactgtgggaaaacagtgttctccagagctgcccgggtgtgcaagaacgatattggtgggcgcttcctgctggaagacacctggaccacattcatgaaggctcgcctgaactgctcccgtcctggggaagtccccttttactacaacgaattgcagagtactttcttcctgcctgagctggatttgatctatggcatctttaccaccaatgtgaacagcattgcggcctcagctgtgtgcgtcttcaacctgagcgccatcgcgcaggccttctctgggcccttcaagtaccaagaaaactcgcgctcggcctggctaccgtatcccaacccaaacccccacttccagtgtggcaccgtggaccagggcctgtacgtgaacctgaccgagagaaatctgcaggatgctcagaagttcattctgatgcatgaggtggtacagccagtgaccacagtgccctccttcatggaggacaatagccgcttttcccacgtggcagtcgacgtggtgcagggcagagaagcgctcgtccacatcatctatttggccacagattacggaaccattaagaaagtgcgggtacccctgaatcagacctcaagcagctgtttgctggaagagattgagctcttccctgagaggcggagggagcccatcaggagcctgcagatcctgcacagccagagtgtcctgttcgtgggcctgcgggagcacgtggtcaagatccccctgaagaggtgccagttctaccgcacacgcagcacctgcattggggcccaggacccttactgtggctgggatgtggtaatgaagaaatgcacaagcctggaggagagcctgagcatgacgcagtgggaacagagcatctctgcgtgtccgaccaggaatctcaccgtggatgggcactttggtgtgtggtctccgtggacgccttgcacgcacacagatggcagcgccgtgggatcctgcctctgtcgaacccgctcctgcgacagcccggccccgcagtgtggtggctggcagtgcgagggccctggcatggagatcgccaactgttccaggaacggaggctggactccctggacctcgtggtctccctgcagcactacctgtgggatcggcttccaggtgcggcagcgctcctgcagcaaccccactcccaggcacgggggccgggtgtgcgtgggacagaaccgcgaggaaagatactgcaatgaacatttgctatgtcccccacacatgttctggacaggctggggtccttgggaacggtgcacagcccaatgcgggggtggcattcaagctcgccgcaggatctgtgagaatgggcctgactgtgcaggctgcaatgtggagtaccagtcttgcaacaccaacccgtgtcctgagctgaagaagaccacgccctggacaccctggacacctgtcaacatctctgacaacggcggccactatgagcaacgattccgatacacatgcaaagcccgcctggctgatccgaatttgctggaagtgggaagacagagaatcgaaatgcggtactgttctagcgacggcaccagtggctgctccacagatgggctttctggggatttcctgcgtgctgggagatactctgcccacacggtcaacggggcttggtcagcctggacgtcgtggtcacagtgcagccgtgactgcagcaggggcattcggaaccggaagcgtgtttgcaacaaccccgaacccaagtatgggggaatgccttgccttggcccatctctggaataccaggaatgcaacattttgccctgcccagtggatggcgtgtggtcttgctggtccccctggacaaaatgttcagcaacatgcggcggtggacactatatgaggacccgctcttgctccaatccagccccggcctatggaggggacatctgcctggggctgcacacagaagaggcactctgcaacacgcagccctgcccagagagctggtcggagtggtcggactggtctgagtgtgaagcctctggcgtccaagtccgcgcccgccagtgcatcctcctgttccccatgggcagccagtgctccgggaacaccacggagagccggccgtgtgtgtttgactctaatttcatcccagaagtatctgtggcaagatccagtagcgtagaagagaaaaggtgtggagagttcaacatgttccacatgatcgccgtggggctgagcagctccatcctcggctgcctcctcaccctgctcgtctatacttactgccagcggtaccagcagcaatcccacgatgcgactgtcatccaccccgtctcacctgccccccttaataccagcataaccaaccacatcaacaaactggacaagtacgactcggtggaggccatcaaggcatttaacaaaaacaacttgatcctagaggaaagaaacaaatacttcaacccacatctcactgggaagacctattctaatgcctactttacagatctcaataattatgatgagtactaacagctttcatgtttttggcttcttgtaaatccccagttcctcaaggcctgtgccccatgactgcccatgtttctgaggcttcagagtcgaagtttggatacatttcaagtgcatttcaagccaccagagtgtcccattgctgccaaaaatacacgtctttaaaagcaacaaaaattgaaataagacatcgtgaaaatcttgaccattgttgaatgagccagggtgtgaagtttttaattgtgttcatcctatttttctgacaagtccattggtttgttttttgagcattattttataaatgtgccacccacattggaaggagtctttctttagaactttggagtgtaaatcttcatgatgttgtaattcaagaaaataggcactttctctgaaagacctgctccttccacaagaagtgcataggtccataatatttcataaaatgaagaaaaagaatgtggccaaacaattattcaccatggattgcccaactttccaaatctggataaagctgtgggattcttggaagcagcttgagtgttttcatcttgcctgggaagcccaggaattccacctggtccacaccggcagaagttacagtagactgtgaggcaccccaccttgctcctgatgcagtttctgtgccattgctggtgctggtggaggcagcggagcagaggctcaggcacaatgaagcgtggatgtgttctgcaggttgctgcaaaactcaccttattctgacttttggatttcatggcattccaggaagctccttgccatgctgttggcctggaagtccacctgtctggtccatagtgacgtcctgaagagccagtctgtaaaataaccaaccacttacttagcgtttggatagactccatgccttctctctccctgcaaagaaaaatcttgaacatttatgatgtcaattagtgaaagtattgaaaatactaaattataactaaaagcaactttttatgttattgaaaatattgaaagaactgatattaatgataatcattttatttttcatctctctgatatacccaatgtgtggcaatcagcccctaccacgagcattaataccatgtaaagctggctttctggagtctgccaggtccacacgaagtgctacccccagtttctgctgttacttgctgcctccaggccaggggagcaggagatgctcagctctggtgccttttcttttatttcagtgctgccttcccacccacccagtccattcaccctcacctctccctgcatggaggcaacagcatttcaagatgtaccttgggaagtcaggatagctggaagtaagggtttttgggatccctgtggtctcttcactgatcatcgataagcatttaagagtgtgctaacaccattcacagaggtccctggaaaaaaatatataattttctcacaaacaaccaatacataacctatggcagttggttgaataattattgaaaaaaagaacacgactgaaaaagttcatctgatgcctctgagcatgtgataaagtcctgggtagacacggaaacgtgttcttacaaatgaaccttcggatctatgaaagaaaatatagtagggggactaaggaacatagaattttattagcatatgtgattttacccttatctttgtttctaatttaaagaaacaatttcagaaagtgttagaagaattctatgtttaataatgaatattgttgagttcaaaatattctcatatacccagatttacagagatgacacagtattgaaatggcaggtgggctctgtaagttattttggattaatgacattcagggtctttgcagtggggacttcatgttgcctctcactcattcctcatatgtcagagtcttctgtctatatgcacatgctcaaagtccatactcagtaggggaaatctagccggatggttctccaattgttcctcggctggattttcatcatcagatatttcaactcatctcatcagtttcttgtaagaaaaaaacattttcactttgtagcacattttagttatttttgagtcttcttccctaatagtttgtaagcttaaagggacattttattttccctggtaaagaggattctaatatttcaagaatgtttcactggaattgatgggaaatggtttctaaatggcatcgaagctggtctttaatgagtcttttgcaatgacttgggaaaaacaccctccctcactacaggatcttcatgttgttaataatataaacaaacctttgaaattagcattgcaaaagaatcccatttttgtttcgtaccacactgttcaaaggaaaattgtttatctctcttcctttctctctctctcttatttgacagaatagcaagtgtttagataatttcagatatattctaagtattttaccagctgtggaataagttgtgtttgtccatcactgtgtagctaccgttcacatgttctggctctgtactccacgcttatcgcgtgaaccctcacatgttggactttcacagtgtgatctctcacctgtcttggaaactccttcataaagccgctcttccttaggcctgggctgtttggaagtcctggtgaaactttgcggttcacattttaaattcctgaatgaccttttcattctctctttctttatctttgtttttgtccttcattccctccttttgttcttccttcctgccttcttttcttctttcctttcttctttctttaattcttcctttcttcctattttcttggtacaagtggaacaaaaaccaacacatagttttaagctacacctttctgcacctgatgtaaaatgacattaatcactatttaacttctaaaattatttctgaatacagttggagataggctggttttcatgaggaagctggcttggctttagtcttacatttaaattctttgaaagtggctcccagtgctattcagggtcctttcttgaggccagactcatcaccatctactattgattttacagtgcactgacagtttacaggaaggagaagaacagaatttctgcacactacacaacatgtgggcttcctgtagctccagggacatgtagctttggtgaaactggggttttgtaacctctgaatgatatggacttagtgaattctaaggaactcagggggcacgtggtcaggctccaccgcacagaagagccacagtctccagactcatggcgttccctccagaactccccattcccctctgagcatatttctatgctgctgcttcttgtgacttacatgaggcatctcagcttcttcatgtttgtagggatggttccctaagcctgttcaagtaggctctcactagagttaccattcatatttgagaagaaaagaacatttaataaatgtatgtgtggggctgaggttctaaaggaattgaaaagagacgataaacattgaatgagggtgagggcatccctgctggggagaaacctctgtccctaggaagagtccgttcatgtcatgtggtttgggatgaaccaggggtctggccccatcgggtcacaggtgatggcaaatagaaaagaagcaaatggaggaaatagtcggataagtaggtgacgtgaaaggcaggacctggtcaccccagcaagtgctatggacagttcccggaaacggttgcccacttcacaggtccatgggtctgacccttggactctgccaggatcaactgcccagagtgccagagttttagccaaaggtgtacttacttccttatttatctgcaaaaggatggaaactgtgggagtcaaagcctattttgctgagtgttcccactggagtctctggtagaattagcaggtcatgctgtcaaaatcatggacaaaggctgggtgcagtggctcatgcctataatcccagcactttgggaggccaaggtgggcggatcacctgagctcaggagtttgagaccagcctgggcaacatggggaaactccatctctacaaaatatacaaaatattagccagccatcgtggtgcgtgcctgtggtcccagtttcttgggaggctgaggcgggagtatcatttgagccaggaggttgaggttgcagtgagctgagatcacatcactgcactccatcctgggtgacagagagagaccctgtctcaaaaaaaaaaaaaaagaacaaagtcttagcggggggtctctatgtccccaagtggctctctaaggggatccattagcgtataattgaatatcaaagggaattttaccttaaacatatatcaagtctatactcagctaatcgttttgtctaaacacagccttgttagcatttgaatttacaaatattcatttgcttatttgcagtgttccttttgcttttagaataaatcataaatatttccccaatactgtcaagatacttcttcaactttgtccctgaaccatcagctttctttagggtccgggtatcctttacacttcaatggggttttcttgtgtgtgtcattgggggtaactccattgacctcagcatttctatctcaagagatggctctggaacacagaaccagaggcaacaggtactaatggttgataaaattaacagcgactgcataaccattttccacatggcagggctgtgcttaagccccacacctccaataatcaatttctatgacggtactaataaccttaactatatgcaaattcttcaccacttatgatatggtacaaactggagtttacagatggccttggccttgcctagcccatttgttcatcctaacttcttcatcacttcctgatgcacttggggaagcatgttgacacaacgttaccaatatttgattacctatggttatctgcaattacctacgcttatcttatcagaccctagatgccatttgagccccttacttctttgggcagtgggtgaaatgggagaacatagagaaatgttcactttgacctaagaaacgcataaaagggaatgccatgcacaatgtaagataaaatgtttggggacaggggatcatcgtgaaatttatttctgctattctgccctattgaggtcattaattataatggatttaaagatttttttttaaactctacaaacactaagccaaggaattcaggttatctgctatgttaacctaataaagcaaaggaaaataagttgctttaatccttgcttgttaacctaataaagcaaaggaaaatatgttgctttaatccttgcttcttttctcttttggtaatagaaaaggtaaataagatgtaatgttgaactgctggtgatgatttctaaaacgactctttaaatactcctttcctatggacttatattaaagatgcattgtacacattgttttagcagatagatcaaagatatactcagtggtcatctgttgcattatcagaaatttgatacatgttacagaagcatgaggaagggaatcctatccacttttgaaaatagagttcacattgcaagcgacatagggcattatcaaaaccaattcagagcctggcacaaaatgtatacttcctagtgaaagctgtctcaaaacacagcctttttgatggatcatattagctcatatctgccatagaaaggcaatcaagcttactccctgcaatcggagtcaatatcaattcttgctcaagcaaacatgttttacagtgttggcgcaatggcaggaactagtcaagggcactttcagatctggaaagaggaaagaggaggtagaaaatcactcttttgtgtttcttaaactgtcaatcaagcaagaaaatttattccaccccttcatatttgctctaaaatctggggccagtagttgaaatgtgatcttgttctttctcagccttttggcaatttaatgccaaatattccaaatgttagatgaatggcagtaataaaatgattcaaatgtttgataaatacaagctgagagcaaaatctggactctgaaaaatcggaactattttatcatgttgctaaaatgagagcatcattttcttccctctctgtaagtgcggtagtttaatttcctagaaaaagttgctagtgccttgtttaagatgatcatttatcatttcatgtggatattattggtctaattagaaggagaagattgattggatttactttaaagaaaattattctcctatgtctctttgaactcaggaatagaaaatgaccaagaagcacatcatcttcagatgtgatttttgccctcactggggatgtagaaccagaataggtacaacatatgctcagaagagaggtgacttcagtattagccttctagaaactaacatcactttaatttttacatgttccaaaaaaaatcatagtgattgttctgtaataagaatgttaacgtgatgcctatagaagttagaggtttttgtttctgtttctcttcaggcaagtccatagatagaggaaaatcagacacaggctggtgacaactggtatagatacagtgagcatggaatgagaaccacctacaacattgcctgattatttttaagtttatatcaaaactgcttcacaagttcacaaaagttgtcactcttaatttgggttaagaaaagtaatagtattatctctgctgaagttgattgtttttctcttttaccatgactgttggccaaaagcaagctgaacctctgcactttgaaacaaagcacagtatgaatctttaacccaagcacttagtttcaccactgagattctacatcatctgcaagaaaatgcacaaacttttggtccaatgttggattcttcaaaagtgcatagcaaaacttttgtgctatgccgcttgatgtaacttttaaagatgttatcaaatgttaaatgcctcattctgcgttaatttgctgttggctgttttgtgaacacaaaataaacttgagatttttttttttttttttttttgtgaaactcctccaaagccaatttcagcccttggtaagcttgcagacagttactgatcttaaatttaattttaaaagacaatgtatcttaattataatttagctttttaaaacaatgagatagctttacatttcccctttgtttgaatgagaaaatggatcttgggttgctatgctagaacacttgtagattgctgggtcctttgtaagggggccatggacacaccacactttctttcaatccttacatttgaagcattgatattcttcaaaaccttcttgttacatgtgcgcaatagaaatttctaatgttcatgacttttatctttcctgtccatcaattcactggttgtaaatgcttcctgagagctgtctaggtctgtatcccagattgttgcttaatgacatctgacagatgcattgttttctgaaatcagcttaagacaccaattgtggcaactggaaactcattacctgctgcattggatcaactatggaagttggagcaggggtgggcggaggtcacctaaccaatcaatggaaggcaactcacacctgctccaagcctcagctttgagaaacaaacacgtttataagaaaaaatatatagctattattacagaagtgaatatgttgtgctctcttactgctcttggtgcattgacagtttctgtatctcaaccctattcatctttatgaaaaagcattctgaagatctatcctcagcactgctgagtgtgcagtcacactttcctaccaacccccttcttaccatctctagctgccatttgtggggggaacaaaacaagggaatcctgattgtgtacagtataaattgtattatattttttgtacttatgttttatgtaaatagtttgtctcattcaattgtatgtgagcattgaaataaatcctaccatttaggggacaattta

SEQ ID NO: 142455 - DNA, 935 bp, Artificial Sequence
  derived and/or modified sequence
attcatacacacacacgacctgggatatgactagaaaaatatgctgctctaagccctccaagctctcctctatctccacaaagtgtaaccttaaagcactttccacacatgaggagaagaagagcttctgtttagaagacacgtgcccagagtcagaggccccttgcccaccatgaagggaacctgtgttatagcatggctgttctcaagcctggggctgtggagactcgcccacccagaggcccagggtacgactcagtgccagagaaccgagcatccagtcatctcctataaagaaattggcccctggttacgggagttcagagcgaagaatgctgtggatttctcgcagttaacatttgacccaggacagaaagaacttgttgtaggagcaagaaactacctcttcaggttacagcttgaggatctgtctcttatccaggctgtggaatgggagtgtgatgaagctaccaaaaaggcctgttacagcaaaggcaaatcaaaggaggaatgtcagaactacatccgggtgcttctggtgggtggcgaccggttattcacctgtgggaccaatgcattcacgcctgtctgcaccaaccgctcgttgagcaacctgactgagatccatgatcagatcagtggcatggcccgctgtccctacagtccccagcacaattccacagcgctcctcacagctggtggggagctctatgctgctacagccatggattttccaggacgtgatcctgccatttaccgaagcctaggcattttacctcctctccgcacggcgcagtacaactccaaatggctcaatgagccaaactttgtgtcatcttatgacatcggaaattttacctacttctttttccgagaaaatgcagtagagcatgactgtgggaaaacagtgttctccagagctgcccgggtgtgca

SEQ ID NO: 142456 - DNA, 3225 bp, Artificial Sequence
  derived and/or modified sequence
atgaagggcacctgcgtgatcgcctggctgttcagcagcctgggcctgtggagactggcccaccccgaggcccagggcaccacccagtgccagagaaccgagcaccccgtgatcagctacaaggagatcggcccctggctgagagagttcagagccaagaacgccgtggacttcagccagctgaccttcgaccccggccagaaggagctggtggtgggcgccagaaactacctgttcagactgcagctggaggacctgagcctgatccaggccgtggagtgggagtgcgacgaggccaccaagaaggcctgctacagcaagggcaagagcaaggaggagtgccagaactacatcagagtgctgctggtgggcggcgacagactgttcacctgcggcaccaacgccttcacccccgtgtgcaccaacagaagcctgagcaacctgaccgagatccacgaccagatcagcggcatggccagatgcccctacagcccccagcacaacagcaccgccctgctgaccgccggcggcgagctgtacgccgccaccgccatggacttccccggcagagaccccgccatctacagaagcctgggcatcctgccccccctgagaaccgcccagtacaacagcaagtggctgaacgagcccaacttcgtgagcagctacgacatcggcaacttcacctacttcttcttcagagagaacgccgtggagcacgactgcggcaagaccgtgttcagcagagccgccagagtgtgcaagaacgacatcggcggcagattcctgctggaggacacctggaccaccttcatgaaggccagactgaactgcagcagacccggcgaggtgcccttctactacaacgagctgcagagcaccttcttcctgcccgagctggacctgatctacggcatcttcaccaccaacgtgaacagcatcgccgccagcgccgtgtgcgtgttcaacctgagcgccatcgcccaggccttcagcggccccttcaagtaccaggagaacagcagaagcgcctggctgccctaccccaaccccaacccccacttccagtgcggcaccgtggaccagggcctgtacgtgaacctgaccgagagaaacctgcaggacgcccagaagttcatcctgatgcacgaggtggtgcagcccgtgaccaccgtgcccagcttcatggaggacaacagcagattcagccacgtggccgtggacgtggtgcagggcagagaggccctggtgcacatcatctacctggccaccgactacggcaccatcaagaaggtgagagtgcccctgaaccagaccagcagcagctgcctgctggaggagatcgagctgttccccgagagaagaagagagcccatcagaagcctgcagatcctgcacagccagagcgtgctgttcgtgggcctgagagagcacgtggtgaagatccccctgaagagatgccagttctacagaaccagaagcacctgcatcggcgcccaggacccctactgcggctgggacgtggtgatgaagaagtgcaccagcctggaggagagcctgagcatgacccagtgggagcagagcatcagcgcctgccccaccagaaacctgaccgtggacggccacttcggcgtgtggagcccctggaccccctgcacccacaccgacggcagcgccgtgggcagctgcctgtgcagaaccagaagctgcgacagccccgccccccagtgcggcggctggcagtgcgagggccccggcatggagatcgccaactgcagcagaaacggcggctggaccccctggaccagctggagcccctgcagcaccacctgcggcatcggcttccaggtgagacagagaagctgcagcaaccccacccccagacacggcggcagagtgtgcgtgggccagaacagagaggagagatactgcaacgagcacctgctgtgccccccccacatgttctggaccggctggggcccctgggagagatgcaccgcccagtgcggcggcggcatccaggccagaagaagaatctgcgagaacggccccgactgcgccggctgcaacgtggagtaccagagctgcaacaccaacccctgccccgagctgaagaagaccaccccctggaccccctggacccccgtgaacatcagcgacaacggcggccactacgagcagagattcagatacacctgcaaggccagactggccgaccccaacctgctggaggtgggcagacagagaatcgagatgagatactgcagcagcgacggcaccagcggctgcagcaccgacggcctgagcggcgacttcctgagagccggcagatacagcgcccacaccgtgaacggcgcctggagcgcctggaccagctggagccagtgcagcagagactgcagcagaggcatcagaaacagaaagagagtgtgcaacaaccccgagcccaagtacggcggcatgccctgcctgggccccagcctggagtaccaggagtgcaacatcctgccctgccccgtggacggcgtgtggagctgctggagcccctggaccaagtgcagcgccacctgcggcggcggccactacatgagaaccagaagctgcagcaaccccgcccccgcctacggcggcgacatctgcctgggcctgcacaccgaggaggccctgtgcaacacccagccctgccccgagagctggagcgagtggagcgactggagcgagtgcgaggccagcggcgtgcaggtgagagccagacagtgcatcctgctgttccccatgggcagccagtgcagcggcaacaccaccgagagcagaccctgcgtgttcgacagcaacttcatccccgaggtgagcgtggccagaagcagcagcgtggaggagaagagatgcggcgagttcaacatgttccacatgatcgccgtgggcctgagcagcagcatcctgggctgcctgctgaccctgctggtgtacacctactgccagagataccagcagcagagccacgacgccaccgtgatccaccccgtgagccccgcccccctgaacaccagcatcaccaaccacatcaacaagctggacaagtacgacagcgtggaggccatcaaggccttcaacaagaacaacctgatcctggaggagagaaacaagtacttcaacccccacctgaccggcaagacctacagcaacgcctacttcaccgacctgaacaactacgacgagtactag

SEQ ID NO: 142457 - DNA, 765 bp, Artificial Sequence
  derived and/or modified sequence
atgaagggcacctgcgtgatcgcctggctgttcagcagcctgggcctgtggagactggcccaccccgaggcccagggcaccacccagtgccagagaaccgagcaccccgtgatcagctacaaggagatcggcccctggctgagagagttcagagccaagaacgccgtggacttcagccagctgaccttcgaccccggccagaaggagctggtggtgggcgccagaaactacctgttcagactgcagctggaggacctgagcctgatccaggccgtggagtgggagtgcgacgaggccaccaagaaggcctgctacagcaagggcaagagcaaggaggagtgccagaactacatcagagtgctgctggtgggcggcgacagactgttcacctgcggcaccaacgccttcacccccgtgtgcaccaacagaagcctgagcaacctgaccgagatccacgaccagatcagcggcatggccagatgcccctacagcccccagcacaacagcaccgccctgctgaccgccggcggcgagctgtacgccgccaccgccatggacttccccggcagagaccccgccatctacagaagcctgggcatcctgccccccctgagaaccgcccagtacaacagcaagtggctgaacgagcccaacttcgtgagcagctacgacatcggcaacttcacctacttcttcttcagagagaacgccgtggagcacgactgcggcaagaccgtgttcagcagagccgccagagtgtgctag

SEQ ID NO: 142458 - protein, 337 aa, Artificial Sequence
  derived and/or modified sequence
MRAVFIQGAEEHPAAFCYQVNGSCPRTVHTLGIQLVIYLACAAGMLIIVLGNVFVAFAVSYFKALHTPTNFLLLSLALADMFLGLLVLPLSTIRSVESCWFFGDFLCRLHTYLDTLFCLTSIFHLCFISIDRHCAICDPLLYPSKFTVRVALRYILAGWGVPAAYTSLFLYTDVVETRLSQWLEEMPCVGSCQLLLNKFWGWLNFPLFFVPCLIMISLYVKIFVVATRQAQQITTLSKSLAGAAKHERKAAKTLGIAVGIYLLCWLPFTIDTMVDSLLHFITPPLVFDIFIWFAYFNSACNPIIYVFSYQWFRKALKLTLSQKVFSPQTRTVDLYQE

SEQ ID NO: 142459 - DNA, 1014 bp, Artificial Sequence
  derived and/or modified sequence
atgagagccgtgttcatccagggcgccgaggagcaccccgccgccttctgctaccaggtgaacggcagctgccccagaaccgtgcacaccctgggcatccagctggtgatctacctggcctgcgccgccggcatgctgatcatcgtgctgggcaacgtgttcgtggccttcgccgtgagctacttcaaggccctgcacacccccaccaacttcctgctgctgagcctggccctggccgacatgttcctgggcctgctggtgctgcccctgagcaccatcagaagcgtggagagctgctggttcttcggcgacttcctgtgcagactgcacacctacctggacaccctgttctgcctgaccagcatcttccacctgtgcttcatcagcatcgacagacactgcgccatctgcgaccccctgctgtaccccagcaagttcaccgtgagagtggccctgagatacatcctggccggctggggcgtgcccgccgcctacaccagcctgttcctgtacaccgacgtggtggagaccagactgagccagtggctggaggagatgccctgcgtgggcagctgccagctgctgctgaacaagttctggggctggctgaacttccccctgttcttcgtgccctgcctgatcatgatcagcctgtacgtgaagatcttcgtggtggccaccagacaggcccagcagatcaccaccctgagcaagagcctggccggcgccgccaagcacgagagaaaggccgccaagaccctgggcatcgccgtgggcatctacctgctgtgctggctgcccttcaccatcgacaccatggtggacagcctgctgcacttcatcaccccccccctggtgttcgacatcttcatctggttcgcctacttcaacagcgcctgcaaccccatcatctacgtgttcagctaccagtggttcagaaaggccctgaagctgaccctgagccagaaggtgttcagcccccagaccagaaccgtggacctgtaccaggagtag

SEQ ID NO: 142460 - DNA, 1014 bp, Artificial Sequence
  derived and/or modified sequence
atgcgggccgtgttcatccagggagccgaggaacatccagctgctttttgctatcaggtgaatggatcctgtcctcggactgtgcacacactaggcatccagttggttatctaccttgcttgcgcagcaggcatgttgatcattgtcctgggcaacgtgtttgtggccttcgctgtgtcatattttaaggccctccatacacctaccaattttttgctcttaagcctagccctggcggacatgttcctgggactgctcgtgttgcccttatcaactatccgctctgtcgagtcttgttggttttttggcgacttcctctgtaggcttcatacctacctggatacacttttttgtttaacgtccatctttcatctctgttttatctccatcgataggcactgcgccatttgcgaccctctcttatatccttccaaattcacagtgagagtggccttgcgctacatcctggctggatggggggttcccgctgcctacacatccctattcctctatacagacgtcgtggaaacaagactctcccagtggctggaggagatgccttgtgtgggcagctgtcagctgctgctgaacaagttctggggatggcttaacttccccctgttctttgtgccttgtctgataatgatttccctctacgttaagatttttgtggtggcaactaggcaggcccagcaaatcaccaccctctctaaatcccttgctggagcagccaagcacgagcgcaaagctgcgaaaactttaggcatcgccgtgggcatctatctcctgtgttggttacctttcacgatcgatacgatggtggactctcttttgcatttcatcacgccgccgctcgttttcgacatattcatttggttcgcatacttcaacagtgcctgcaacccaataatctatgtgttttcttaccagtggttccggaaggccctgaagctgacgctgagtcagaaagttttctctcctcagacccggacggttgacctctaccaggagtag

SEQ ID NO: 142461 - DNA, 1014 bp, Artificial Sequence
  derived and/or modified sequence
atgagagctgtgttcatccagggcgctgaggagcaccctgctgccttctgctaccaggtgaatggcagctgccccaggacagtgcacaccctgggcatccagctggtgatctacctggcctgtgccgccggcatgctgatcatcgtgctgggcaatgtgtttgtggcctttgctgtgtcctacttcaaggccctgcacacccccaccaacttcctgctgctgagcctggccctggccgacatgttcctgggcctgctggtgctgcccctgagcaccatccgctctgtggagagctgctggttcttcggggacttcctgtgccgcctgcacacctacctggacaccctcttctgcctgaccagcatcttccacctgtgcttcatcagcattgacagacactgtgccatctgtgaccccctgctgtaccccagcaagttcaccgtgcgggtggccctgcgctacatcctggccggctggggcgtgcctgctgcctacaccagcctcttcctgtacacagatgtggtggagacccggctgagccagtggctggaggagatgccctgtgtgggcagctgccagctgctgctgaacaagttctggggctggctgaacttccccctcttctttgtgccctgcctgatcatgatcagcctgtatgtgaagatctttgtggtggccacccggcaggcccagcagatcaccaccctgagcaagagcctggccggggccgccaagcatgagaggaaggccgccaagaccctgggcattgctgtgggcatctacctgctgtgctggctgcccttcaccatcgacaccatggtggacagcctgctgcacttcatcaccccacccctggtgtttgacatcttcatctggtttgcctacttcaacagcgcctgcaaccccatcatctacgtgttctcctaccagtggttcaggaaggccctgaagctgaccctgagccagaaggtgttcagcccccagaccaggacagtggacctgtaccaggagtag

SEQ ID NO: 142462 - DNA, 1014 bp, Artificial Sequence
  derived and/or modified sequence
atgcgggccgtgttcatccagggcgccgaggagcaccccgccgccttctgctaccaagtcaatggaagctgtccacgcactgtgcatacgttgggaatccaattagtgatctatctggcctgtgcagctggaatgctgatcatcgtgttaggtaatgtcttcgtagcttttgcggtgtcatatttcaaggccctgcacacccctaccaacttcttactgctgtcactggccttggccgacatgtttctgggcctcttagtgttgcccctcagtaccatcagatccgtggagagctgttggttttttggagacttcttgtgtcggctgcatacttacttggacactctgttctgtctgacaagtatatttcacctgtgttttatctctatcgatagacactgcgccatctgtgaccccttattgtacccttcaaagttcactgtccgggtggcactgagatatatcttagctggctggggggtacctgccgcatacactagcctcttcctttatactgatgtggtggagacgagactgtcccagtggctcgaggagatgccttgtgtgggttcctgccagctgctgctgaacaagttttggggctggcttaattttccactgttcttcgtcccgtgtcttatcatgatctctctgtacgttaaaatctttgttgtggccactcgtcaggcgcagcagataaccactttgtcaaaatcactggctggcgcagcaaaacacgagcggaaggcggccaaaaccttgggcattgccgttgggatatatctgctgtgctggctgcccttcacgattgacacaatggtggacagcctcctgcatttcataacccccccacttgtctttgacatctttatttggttcgcgtattttaattctgcatgtaaccctatcatttatgtctttagttaccagtggttcaggaaggcgctcaagctcactctgtcgcagaaagtgttctcaccacagacccgcactgtggacctttaccaggaatag

SEQ ID NO: 142463 - DNA, 1014 bp, Artificial Sequence
  derived and/or modified sequence
atgcgcgctgtttttattcagggggcagaagagcatcccgctgccttttgctaccaagtgaacggaagctgtccccgaacagtacatactctgggaattcaacttgtcatttaccttgcttgcgctgctggcatgctgattatcgtactcggaaacgtattcgtggcatttgctgtcagttatttcaaggccctccacacacctacaaattttcttcttttaagcctagccctggctgatatgttcctcggacttttagttctacccctgagcactatccgttcagtcgagtcctgttggtttttcggcgacttcctttgtagacttcacacatacctagatactctgttctgcctgaccagtatttttcatttgtgttttatctccatagatcggcactgcgcgatatgtgatccactgctgtatccatctaaattcacagtgagggttgcgctaaggtacatccttgctggttggggcgtccccgctgcttatacatctttatttttgtacaccgatgttgttgagacccgactatctcagtggttagaggagatgccgtgcgtgggtagttgccagttacttttaaacaaattctggggatggctgaattttccattgtttttcgttccttgccttatcatgatcagcctttatgtgaaaatctttgtggttgctactagacaggcccagcagataacgacactctccaagtctctggctggtgccgctaagcacgagagaaaagccgctaaaactctgggtattgcagtggggatttatttgctgtgctggctacccttcacaattgacacgatggtcgacagtctgcttcattttatcactccacctctggtgttcgacatattcatctggtttgcctacttcaacagcgcatgcaatcctatcatttacgtcttctcttatcagtggttcaggaaagctctcaagctgacattgtcccagaaggttttttccccgcaaactcgtacagtggacctgtatcaagaatag

SEQ ID NO: 142464 - DNA, 1147 bp, Artificial Sequence
  derived and/or modified sequence
tccagtggagaaggtggccagttctcagacagaggaagagtagaaatcataaatgagagctgtcttcatccaaggtgctgaagagcaccctgcggcattctgctaccaggtgaatgggtcttgccccaggacagtacatactctgggcatccagttggtcatctacctggcctgtgcagcaggcatgctgattatcgtgctagggaatgtatttgtggcatttgctgtgtcctacttcaaagcgcttcacacgcccaccaacttcctgctgctctccctggccctggctgacatgtttctgggtctgctggtgctgcccctcagcaccattcgctcagtggagagctgctggttcttcggggacttcctctgccgcctgcacacctacctggacaccctcttctgcctcacctccatcttccatctctgtttcatttccattgaccgccactgtgccatctgtgaccccctgctctatccctccaagttcacagtgagggtggctctcaggtacatcctggcaggatggggggtgcccgcagcatacacttcgttattcctctacacagatgtggtagagacaaggctcagccagtggctggaagagatgccttgtgtgggcagttgccagctgctgctcaataaattttggggctggttaaacttccctttgttctttgtcccctgcctcattatgatcagcttgtatgtgaagatctttgtggttgctaccagacaggctcagcagattaccacattgagcaaaagcctggctggggctgccaagcatgagagaaaagctgccaagaccctgggcattgctgtgggcatatacctcttgtgctggctgcccttcaccatagacacgatggtcgacagcctccttcactttatcacacccccactggtctttgacatctttatctggtttgcttacttcaactcagcctgcaaccccatcatctatgtcttttcctaccagtggtttcggaaggcactgaaactcacactgagccagaaggtcttctcaccgcagacacgcactgttgatttgtaccaagaatgattccttctactaaatgcaggcaaggagtaggacctcacaggaaagataagtggcactgtgaccgtgggctgtgtggtgttg

SEQ ID NO: 142465 - protein, 463 aa, Artificial Sequence
  derived and/or modified sequence
MADGEEPEKKRRRIEELLAEKMAVDGGCGDTGDWEGRWNHVKKFLERSGPFTHPDFEPSTESLQFLLDTCKVLVIGAGGLGCELLKNLALSGFRQIHVIDMDTIDVSNLNRQFLFRPKDIGRPKAEVAAEFLNDRVPNCNVVPHFNKIQDFNDTFYRQFHIIVCGLDSIIARRWINGMLISLLNYEDGVLDPSSIVPLIDGGTEGFKGNARVILPGMTACIECTLELYPPQVNFPMCTIASMPRLPEHCIEYVRMLQWPKEQPFGEGVPLDGDDPEHIQWIFQKSLERASQYNIRGVTYRLTQGVVKRIIPAVASTNAVIAAVCATEVFKIATSAYIPLNNYLVFNDVDGLYTYTFEAERKENCPACSQLPQNIQFSPSAKLQEVLDYLTNSASLQMKSPAITATLEGKNRTLYLQSVTSIEERTRPNLSKTLKELGLVDGQELAVADVTTPQTVLFKLHFTS

SEQ ID NO: 142466 - DNA, 1392 bp, Artificial Sequence
  derived and/or modified sequence
atggctgatggtgaggagcctgaaaaaaagaggcgcagaatcgaggaactgctggcagagaaaatggccgtggacgggggatgtggggatactggggattgggaagggcggtggaaccacgtcaagaaatttctagagcgctctggaccctttacacacccggatttcgaacctagtactgaatcattacagttcctgctggacacttgcaaggtgttggtgataggcgctggcggcctgggttgtgaactcctgaaaaatttggccttgtctggtttccgccagatccacgtaatcgacatggacacaattgatgtaagcaatttgaatcggcaatttttgtttaggccaaaggacatcgggaggccgaaagcagaggttgcagccgagttcctgaacgacagggtgcccaattgtaatgttgtccctcactttaataagatccaggatttcaacgacactttctacaggcagttccatatcattgtgtgtgggctggatagcattatcgcacggaggtggatcaacggtatgcttatcagtctcctgaactacgaagatggcgtgctcgatccatcctctattgtgcctctgatcgatggtggcaccgaagggttcaaggggaacgcccgtgttatactcccgggtatgaccgcttgtatcgaatgtacactggagttgtatcctccacaagtcaatttccccatgtgtactatcgcctccatgcctcggctgcctgagcactgcattgagtatgtgcgcatgctgcagtggcccaaggagcagcccttcggggaaggggtgccattagatggggatgaccctgagcacatccagtggatcttccagaagtccctcgaaagagcctcccagtacaatattagaggagtcacatacaggctaactcagggcgtggtcaagaggattataccagctgttgcctccactaatgcagtcatcgcagcagtgtgtgccacagaggtgtttaagattgctacctctgcctacatccctttgaataattacctcgtattcaatgatgtggacggcttgtatacctatacttttgaggctgagagaaaggagaactgtcccgcatgctcacagctacctcagaacatacagttcagtcctagcgcaaaactgcaagaggtgctcgactacctcaccaactcagcctcacttcagatgaaatccccggcaatcacagccacgctagagggcaagaacagaaccttatatctgcagagtgtgacatctatcgaggagcggacacgcccaaacttgagcaagacattgaaggagttgggcctggtggatggccaggaactcgctgttgctgacgttacaacacctcagacagtactgttcaaactgcacttcacctcatag

SEQ ID NO: 142467 - DNA, 1392 bp, Artificial Sequence
  derived and/or modified sequence
atggctgatggagaggagcctgagaagaagagaagacgcatcgaggagctgctggccgagaagatggctgtggatggcggctgtggggacacaggagactgggagggccgctggaaccacgtgaagaagttcctggagaggagcggccccttcacccacccagactttgagcccagcacagagagcctgcagttcctgctggacacctgcaaggtgctggtgattggagctgggggcctgggctgtgagctgctgaagaacctggccctgagcggcttccggcagatccacgtgattgacatggacaccattgatgtgagcaacctgaaccggcagttcctgttccggcccaaggacatcggccggcccaaggccgaggtggccgctgagttcctgaatgacagagtgcccaactgcaatgtggtgccccacttcaacaagatccaggacttcaatgacaccttctaccggcagttccacatcatcgtgtgtggcctggacagcatcatcgcccggcgctggatcaatggcatgctgatcagcctgctgaactatgaagatggagtgctggaccccagcagcatcgtgcccctgattgatggcggcacagagggcttcaagggaaatgcccgggtcatcctgcccggcatgacagcctgcatcgagtgcaccctggagctgtacccaccccaggtgaacttccccatgtgcaccatcgcctccatgccccggctgcctgagcactgcatcgagtatgtgaggatgctgcagtggcccaaggagcagccctttggagaaggagtgcccctggatggagatgatcctgagcacatccagtggatcttccagaagagcctggagcgggccagccagtacaacatccggggcgtgacctaccgcctgacccagggcgtggtgaagaggatcatcccagctgtggccagcaccaatgctgtgattgctgctgtgtgtgccacagaggtgttcaagatcgccaccagcgcctacatccccctgaacaactacctggtgttcaatgatgtggatggcctgtacacctacacctttgaggccgagaggaaggagaactgcccagcctgcagccagctgccccagaacatccagttcagccccagcgccaagctgcaggaggtgctggactacctgaccaacagcgccagcctgcagatgaagagccctgccatcacagccaccctggagggcaagaacagaaccctgtacctgcagagcgtgaccagcattgaggagaggacccggcccaacctgagcaagaccctgaaggagctgggcctggtggatggccaggagctggccgtggctgatgtgaccaccccccagacagtgctcttcaagctgcacttcaccagctag

SEQ ID NO: 142468 - DNA, 1392 bp, Artificial Sequence
  derived and/or modified sequence
atggccgacggcgaggagcccgagaagaagcggcggcggatcgaggaactgctcgcagagaaaatggccgtggatgggggctgcggggatacaggtgattgggaaggtcgatggaatcacgtaaagaagttcctggagcgttccgggccattcacccatcccgatttcgagcctagcactgagagcctgcaatttcttctggacacatgcaaggtcctggtgatcggggcagggggtctcggctgcgagcttttaaaaaacttggccctcagcggatttaggcagattcacgttattgacatggacaccatcgacgttagtaatcttaatagacagttcctgttccgtcctaaggacattggacgacccaaagccgaagttgccgcagagttcctgaacgacagggtgcctaattgtaatgttgttccacactttaataagattcaggacttcaacgataccttctatcgacagttccatataattgtctgcggcttggatagcatcattgcccgccgttggattaatggcatgctgatcagcctgctcaattacgaggatggtgtcctagacccctccagtatcgtgccactcattgatggagggacagaaggattcaagggaaatgccagggtgatactccctggaatgaccgcctgcattgagtgtaccttggaactttatcccccacaggtcaacttcccgatgtgtactattgccagcatgcccaggctgcccgagcattgcatcgagtatgtaaggatgctgcagtggcccaaggagcagcctttcggggaaggcgtaccgctagacggggacgatccagaacacatccagtggattttccagaagagtctcgagcgtgcaagccagtataacatcaggggagtgacctaccggctgacccagggcgtcgtgaagagaattatacccgccgtggcaagcaccaacgctgtgatcgccgctgtttgtgccacagaagtctttaagatcgccacttccgcctacatacctttgaataactacctggtctttaatgacgtggacggcttgtatacttatacattcgaggccgaacgaaaagaaaattgtccggcctgttcacaacttccgcagaatatacagttttctcctagcgcaaaactacaggaggtgttggattacctcacaaattctgccagtcttcagatgaagagccccgcgatcaccgccacattggaaggtaagaaccgtaccctctatttacaatcggtgacaagtattgaggagcgcactcggcccaacctcagtaaaacattaaaggaattaggattagtggacggacaggagctcgcagtcgccgatgttacaacccctcaaactgtactcttcaagctccattttaccagttag

SEQ ID NO: 142469 - DNA, 1392 bp, Artificial Sequence
  derived and/or modified sequence
atggctgacggagaggagccagaaaaaaagaggcggaggatagaggagttgctggccgaaaaaatggccgtggatggaggatgtggggacaccggcgactgggagggccgatggaatcacgtgaaaaagtttctcgaacgctccggcccatttacccatcccgatttcgaaccttcgaccgagtctctgcaattcttactggacacctgcaaagtcctggtgatcggggcaggcggtctgggatgtgagctgcttaagaatctggcactctctggctttcggcagattcacgtgatcgatatggacactatagatgtcagcaaccttaacaggcagttcctgttccggcctaaggacataggcaggccaaaggcagaagtcgcggctgagttcttaaatgaccgtgtgccaaattgcaacgttgtgccgcactttaacaaaattcaggactttaatgacaccttttacagacagttccacatcatcgtttgtgggcttgacagcatcattgcgaggcgatggattaatggtatgctgatatccctcctgaactacgaggacggggtgttggatccttcaagtatagtccccctcatcgacggaggtacagaagggttcaaaggtaacgcgagagtgatacttcccggaatgactgcctgtatcgaatgcacactggaattgtacccaccccaggtgaatttcccaatgtgtacaatcgcgagtatgccgcgactgcctgagcattgtattgagtatgtgcgcatgctgcaatggcccaaggaacaaccctttggcgagggagtgcccctcgatggcgatgatccagagcacatccagtggatctttcagaagtcgctcgaaagagcatctcagtataatatcaggggcgtgacttatagactgacacaaggagtggtcaagaggattattccagctgttgccagcactaatgccgtgatcgctgctgtgtgcgccactgaagtcttcaagatagctacttccgcctatataccgctgaacaattatctggtgtttaacgacgtcgatgggctctatacttacacgtttgaggcggagcgaaaagagaactgcccagcttgcagccagttaccccagaatattcaattcagcccttcggccaagctccaagaggtgctggattatctgactaacagtgccagcttgcagatgaagtccccagccatcactgcaacgctggagggaaagaataggaccctctaccttcagtctgttacatcaatcgaagaaaggaccagacccaatctctccaagacgttaaaggagctgggcctggtggatggtcaagagctcgcagtcgctgatgttaccacgccacaaaccgtgctttttaagctgcacttcacatcctag

SEQ ID NO: 142470 - DNA, 2154 bp, Artificial Sequence
  derived and/or modified sequence
cccgctcctccccgccctgccgcgcgtgggcacctgggaagaggcggagaacaatatggcggatggcgaggagccggagaagaaaagaaggagaatagaggagctgctggctgagaaaatggctgttgatggtgggtgtggggacactggagactgggaaggtcgctggaaccatgtaaagaagttcctcgagcgatctggacccttcacacaccctgatttcgaaccgagcactgaatctctccagttcttgttagatacatgtaaagttctagtcattggagctggcggcttaggatgtgagctcctgaaaaatctggccttgtctggttttagacagattcatgttatagatatggacactatagatgtttccaatctaaataggcagtttttatttaggcctaaagatattggaagacctaaggctgaagttgctgcagaatttctaaatgacagagttcctaattgcaatgtagttccacatttcaacaagattcaagattttaacgacactttctatcgacaatttcatattattgtatgtggactggactctatcatcgccagaagatggataaatggcatgctgatatctcttctaaattatgaagatggtgtcttagatccaagctccattgtccctttgatagatggggggacagaaggttttaaaggaaatgcccgggtgattctgcctggaatgactgcttgtatcgaatgcacgctggaactttatccaccacaggttaattttcccatgtgcaccattgcatctatgcccaggctaccagaacactgtattgagtatgtaaggatgttgcagtggcctaaggagcagccttttggagaaggggttccattagatggagatgatcctgaacatatacaatggattttccaaaaatccctagagagagcatcacaatataatattaggggtgttacgtataggctcactcaaggggtagtaaaaagaatcattcctgcagtagcttccacaaatgcagtcattgcagctgtgtgtgccactgaggtttttaaaatagccacaagtgcatacattcccttgaataattacttggtgtttaatgatgtagatgggctgtatacatacacatttgaagcagaaagaaaggaaaactgcccagcttgtagccagcttcctcaaaatattcagttttctccatcagctaaactacaggaggttttggattatctaaccaatagtgcttctctgcaaatgaaatctccagccatcacagccaccctagagggaaaaaatagaacactttacttacagtcggtaacctctattgaagaacgaacaaggccaaatctctccaaaacattgaaagaattggggcttgttgatggacaagaactggcggttgctgatgtcaccaccccacagactgtactattcaaacttcattttacttcttaaggaaaatctccacataatagaaaactcatggaaataatatactttgtggatgctaagaagttgaatcgatgtcatttttagcaatagtgttgccacgatttgtctttttttatataatgaaccactcttttttaactttgtaaccttcccttgaagacagaattttggtgttggtgcttgtaagcattttcattaataatatgagaaatgatacctggagagagagattatgagcaaatgtattgcttcttttagaggaggaagcatacaacctcttttgtgtgaattttgttattatggtcaaagaatgcattcctaagttttcatttgagtacccaaatacacaaaaggtgtccctttaaggaaaataaagaattaagttttaaataacattacattttacaatctgacatctggagtatattgaacataggctatttcttgatataacactcatttaattgtggccatccaaatgaatattattgcagaatttatcttgttcataatgatttgtaaatggtgttatagctgaatacctgtgcatgaaaatgggcaatattttcatctgtttacttgtagtgccatagaggccaatatgcacaatattaactaatgccaagacatggctgtttaaaaaatttaatgttcaaacagttatcactgatgcttttgcactatttattaataaaatcatatattgtgta

SEQ ID NO: 142471 - DNA, 1392 bp, Artificial Sequence
  derived and/or modified sequence
atggccgacggcgaggagcccgagaagaagagaagaagaatcgaggagctgctggccgagaagatggccgtggacggcggctgcggcgacaccggcgactgggagggcagatggaaccacgtgaagaagttcctggagagaagcggccccttcacccaccccgacttcgagcccagcaccgagagcctgcagttcctgctggacacctgcaaggtgctggtgatcggcgccggcggcctgggctgcgagctgctgaagaacctggccctgagcggcttcagacagatccacgtgatcgacatggacaccatcgacgtgagcaacctgaacagacagttcctgttcagacccaaggacatcggcagacccaaggccgaggtggccgccgagttcctgaacgacagagtgcccaactgcaacgtggtgccccacttcaacaagatccaggacttcaacgacaccttctacagacagttccacatcatcgtgtgcggcctggacagcatcatcgccagaagatggatcaacggcatgctgatcagcctgctgaactacgaggacggcgtgctggaccccagcagcatcgtgcccctgatcgacggcggcaccgagggcttcaagggcaacgccagagtgatcctgcccggcatgaccgcctgcatcgagtgcaccctggagctgtaccccccccaggtgaacttccccatgtgcaccatcgccagcatgcccagactgcccgagcactgcatcgagtacgtgagaatgctgcagtggcccaaggagcagcccttcggcgagggcgtgcccctggacggcgacgaccccgagcacatccagtggatcttccagaagagcctggagagagccagccagtacaacatcagaggcgtgacctacagactgacccagggcgtggtgaagagaatcatccccgccgtggccagcaccaacgccgtgatcgccgccgtgtgcgccaccgaggtgttcaagatcgccaccagcgcctacatccccctgaacaactacctggtgttcaacgacgtggacggcctgtacacctacaccttcgaggccgagagaaaggagaactgccccgcctgcagccagctgccccagaacatccagttcagccccagcgccaagctgcaggaggtgctggactacctgaccaacagcgccagcctgcagatgaagagccccgccatcaccgccaccctggagggcaagaacagaaccctgtacctgcagagcgtgaccagcatcgaggagagaaccagacccaacctgagcaagaccctgaaggagctgggcctggtggacggccaggagctggccgtggccgacgtgaccaccccccagaccgtgctgttcaagctgcacttcaccagctag

SEQ ID NO: 142472 - protein, 183 aa, Artificial Sequence
  derived and/or modified sequence
MIKLFSLKQQKKEEESAGGTKGSSKKASAAQLRIQKDINELNLPKTCDISFSDPDDLLNFKLVICPDEGFYKSGKFVFSFKVGQGYPHDPPKVKCETMVYHPNIDLEGNVCLNILREDWKPVLTINSIIYGLQYLFLEPNPEDPLNKEAAEVLQNNRRLFEQNVQRSMRGGYIGSTYFERCLK

SEQ ID NO: 142473 - DNA, 552 bp, Artificial Sequence
  derived and/or modified sequence
atgatcaagctgttcagcctgaagcagcagaagaaggaggaggagagcgccggcggcaccaagggcagcagcaagaaggccagcgccgcccagctgagaatccagaaggacatcaacgagctgaacctgcccaagacctgcgacatcagcttcagcgaccccgacgacctgctgaacttcaagctggtgatctgccccgacgagggcttctacaagagcggcaagttcgtgttcagcttcaaggtgggccagggctacccccacgacccccccaaggtgaagtgcgagaccatggtgtaccaccccaacatcgacctggagggcaacgtgtgcctgaacatcctgagagaggactggaagcccgtgctgaccatcaacagcatcatctacggcctgcagtacctgttcctggagcccaaccccgaggaccccctgaacaaggaggccgccgaggtgctgcagaacaacagaagactgttcgagcagaacgtgcagagaagcatgagaggcggctacatcggcagcacctacttcgagagatgcctgaagtag

SEQ ID NO: 142474 - DNA, 552 bp, Artificial Sequence
  derived and/or modified sequence
atgatcaaactgttctcactgaagcagcagaaaaaagaagaggagagcgctggggggacaaagggctctagcaagaaggcctctgccgcacaactccggattcagaaagatattaatgagctgaaccttcccaagacttgtgacatctctttctctgacccagacgacctgctcaatttcaaacttgtgatttgccctgacgagggcttttataagtccggcaaatttgttttcagttttaaggtgggacagggatatccccacgatccccccaaggtgaagtgcgaaacaatggtctatcatcccaacatcgaccttgagggcaatgtgtgcctgaatattctgcgcgaggactggaagcccgtgctgacaattaattcaataatctatggcctgcaatacctctttctggagccgaatcccgaggatcctttaaacaaggaggccgcagaggtgcttcagaacaaccgcagacttttcgaacagaacgtccaacgctcaatgaggggtggatacattggatccacgtacttcgagagatgcctcaaatag

SEQ ID NO: 142475 - DNA, 552 bp, Artificial Sequence
  derived and/or modified sequence
atgatcaagctgttcagcctgaagcagcagaagaaggaggaggagagcgctgggggcaccaagggcagcagcaagaaggccagcgctgcccagctgcgcatccagaaggacatcaatgagctgaacctgcccaagacctgtgacatctccttcagtgaccctgatgacctgctgaacttcaagctggtgatctgcccagatgagggcttctacaagagcggcaagtttgtgttctccttcaaggtgggccagggctacccccatgacccccccaaggtgaagtgtgagaccatggtgtaccaccccaacatcgacctggagggcaatgtgtgcctgaacatcctgcgggaggactggaagcctgtgctgaccatcaacagcatcatctacggcctgcagtacctgttcctggagcccaaccctgaggaccccctgaacaaggaggccgctgaggtgctgcagaacaacagaagactctttgagcagaatgtgcagaggtccatgaggggcggctacatcggcagcacctactttgagcgctgcctgaagtag

SEQ ID NO: 142476 - DNA, 552 bp, Artificial Sequence
  derived and/or modified sequence
atgatcaagctgttcagcctgaagcagcagaagaaggaggaggagtctgccgggggcactaaggggagttccaagaaagcgtccgctgctcagctgagaatacagaaagacattaacgagctgaacctgcctaagacctgtgacatctccttcagcgaccctgacgacttattaaactttaagctggtaatctgtccagatgaaggcttctacaagtcaggcaaattcgtcttttcatttaaggttggccagggctacccacatgacccaccaaaggtcaagtgcgaaacgatggtttatcatccaaacatcgacttagagggcaacgtctgtctgaacattcttcgggaagactggaagcctgtactgaccatcaatagcatcatttacggcctgcaatatctgttcctggaaccaaacccagaggaccccctgaacaaggaagcagccgaggtgctccagaacaatcgtagactgttcgaacagaacgtccagcgcagcatgcgcggagggtacataggctccacttacttcgagaggtgtctgaagtag

SEQ ID NO: 142477 - DNA, 552 bp, Artificial Sequence
  derived and/or modified sequence
atgattaaactgtttagcttaaagcagcagaaaaaagaagaggaaagtgccggaggcaccaaaggctcgtccaagaaggcaagcgctgctcagcttaggatccagaaggacattaacgagctaaacctacctaagacttgcgatatttcatttagtgaccccgatgatttactgaacttcaagctcgtgatatgcccagacgagggattctacaagtccggcaaatttgtatttagctttaaggtgggtcaggggtatccacatgacccacccaaggtgaaatgtgaaacgatggtttaccaccctaatatagacttagaaggtaatgtctgcctgaacatactgcgggaagattggaagcccgtgctcacaatcaactccatcatttatggactgcagtacttgttccttgagccaaacccggaggatcctctgaacaaagaggctgccgaggtcctgcagaataataggcgcctgtttgaacagaacgtgcagcgatccatgagaggaggctatatcggcagcacttatttcgaacgatgcttgaagtag

SEQ ID NO: 142478 - DNA, 1523 bp, Artificial Sequence
  derived and/or modified sequence
aggcgcacaacgcaggccgggcgggaagagccaaagcgggcaggcggcggaaatatccgaagcggcggggcgcccgaggccgttgccgacctccgcgctaaagccgctgctgccgcggaagacgatcctccagtacccgcccgccgtcaccgcagctgccgtgtcctcctcccacccctagccgcaccccctcgcggagggatcagctgagcggccaaacggcacggtcgggggagccccgagtccgcagctgcagcggggcctgagaccagagttggcgagggcaaggaaggagcggccccgggcagtgggggcggggccgggcgggcccgagaacagccgaatttggccgagcgctgccgagcgagtccgaggcgctgggccaggccggagccggactacgggagccgaggcgggccgcgcggtgggcgcggagaggagcggagcggcgcggcaggccgggcgggtggcggcagcagcggaggaggccgcagctgcgggtccgaggagcggaggcgacgcgggcggcggcggggggccgggtggccggggtcccgggccccgcggcggcggcagcggcggcggcggcggcaggatgatcaagctgttctcgctgaagcagcagaagaaggaggaggagtcggcgggcggcaccaagggcagcagcaagaaggcgtcggcggcgcagctgcggatccagaaggacataaacgagctgaacctgcccaagacgtgtgatatcagcttctcagatccagacgacctcctcaacttcaagctggtcatctgtcctgatgagggcttctacaagagtgggaagtttgtgttcagttttaaggtgggccagggttacccgcatgatccccccaaggtgaagtgtgagacaatggtctatcaccccaacattgacctcgagggcaacgtctgcctcaacatcctcagagaggactggaagccagtccttacgataaactccataatttatggcctgcagtatctcttcttggagcccaaccccgaggacccactgaacaaggaggccgcagaggtcctgcagaacaaccggcggctgtttgagcagaacgtgcagcgctccatgcggggtggctacatcggctccacctactttgagcgctgcctgaaatagggttggcgcatacccacccccgccacggccacaagccctggcatcccctgcaaatatttattgggggccatgggtaggggtttggggggcggccggtgggggaatcccctgccttggccttgcctccccttcctgccacgtgcccctagttatttttttttttttaacaccatgtgattaaggtcggcgctgcctcccccgacccactcagcgatgggaaatgaattggcttgtctagcccccctgctgggtgcttgttcagcccccactctgggctgtggagtgggtgggcaacgggcctgggtagctgggcccaggcaacccacccctccacctctggaggtcccaccaggctattaaaggggaatgttactgc

SEQ ID NO: 142479 - protein, 1465 aa, Artificial Sequence
  derived and/or modified sequence
MSLVTVPFYQKRHRHFDQSYRNIQTRYLLDEYASKKRASTQASSQKSLSQRSSSQRASSQTSLGGTICRVCAKRVSTQEDEEQENRSRYQSLVAAYGEAKRQRFLSELAHLEEDVHLARSQARDKLDKYAIQQMMEDKLAWERHTFEERISRAPEILVRLRSHTVWERMSVKLCFTVQGFPTPVVQWYKDGSLICQAAEPGKYRIESNYGVHTLEINRADFDDTATYSAVATNAHGQVSTNAAVVVRRFRGDEEPFRSVGLPIGLPLSSMIPYTHFDVQFLEKFGVTFRREGETVTLKCTMLVTPDLKRVQPRAEWYRDDVLLKESKWTKMFFGEGQASLSFSHLHKDDEGLYTLRIVSRGGVSDHSAFLFVRDADPLVTGAPGAPMDLQCHDANRDYVIVTWKPPNTTTESPVMGYFVDRCEVGTNNWVQCNDAPVKICKYPVTGLFEGRSYIFRVRAVNSAGISRPSRVSDAVAALDPLDLRRLQAVHLEGEKEIAIYQDDLEGDAQVPGPPTGVHASEISRNYVVLSWEPPTPRGKDPLMYFIEKSVVGSGSWQRVNAQTAVRSPRYAVFDLMEGKSYVFRVLSANRHGLSEPSEITSPIQAQDVTVVPSAPGRVLASRNTKTSVVVQWDRPKHEEDLLGYYVDCCVAGTNLWEPCNHKPIGYNRFVVHGLTTGEQYIFRVKAVNAVGMSENSQESDVIKVQAALTVPSHPYGITLLNCDGHSMTLGWKVPKFSGGSPILGYYLDKREVHHKNWHEVNSSPSKPTILTVDGLTEGSLYEFKIAAVNLAGIGEPSDPSEHFKCEAWTMPEPGPAYDLTFCEVRDTSLVMLWKAPVYSGSSPVSGYFVDFREEDAGEWITVNQTTTANRYLKVSDLQQGKTYVFRVRAVNANGVGKPSDTSEPVLVEARPGTKEISAGVDEQGNIYLGFDCQEMTDASQFTWCKSYEEISDDERFKIETVGDHSKLYLKNPDKEDLGTYSVSVSDTDGVSSSFVLDPEELERLMALSNEIKNPTIPLKSELAYEIFDKGRVRFWLQAEHLSPDASYRFIINDREVSDSEIHRIKCDKATGIIEMVMDRFSIENEGTYTVQIHDGKAKSQSSLVLIGDAFKTVLEEAEFQRKEFLRKQGPHFAEYLHWDVTEECEVRLVCKVANTKKETVFKWLKDDVLYETETLPNLERGICELLIPKLSKKDHGEYKATLKDDRGQDVSILEIAGKVYDDMILAMSRVCGKSASPLKVLCTPEGIRLQCFMKYFTDEMKVNWCHKDAKISSSEHMRIGGSEEMAWLQICEPTEKDKGKYTFEIFDGKDNHQRSLDLSGQAFDEAFAEFQQFKAAAFAEKNRGRLIGGLPDVVTIMEGKTLNLTCTVFGNPDPEVIWFKNDQDIQLSEHFSVKVEQAKYVSMTIKGVTSEDSGKYSINIKNKYGGEKIDVTVSVYKHGEKIPDMAPPQQAKPKLIPASASAAGQ

SEQ ID NO: 142480 - DNA, 4398 bp, Artificial Sequence
  derived and/or modified sequence
atgtctctggtgacagtgcctttctatcaaaagcgtcaccgccactttgaccaaagctataggaatatccagacgcgctatctgctggacgaatatgcctctaagaagcgcgcatccacgcaggccagcagtcagaagagcttgagtcaacggtcttcaagccagagggccagctctcaaacttctctggggggcactatttgtagagtctgcgccaagcgggtgagcacacaagaggatgaggagcaagagaacaggtccaggtatcagtctctcgttgctgcttacggagaggccaaaagacagaggtttctgagtgaattagcccacctggaggaagatgtgcatctggccagatctcaagcccgggacaagctggacaaatatgcaatccagcagatgatggaggataaactcgcctgggaaagacatactttcgaagagcgtattagccgggctccggagatccttgtccggctgagatctcatactgtctgggaacgcatgtccgtgaaactgtgtttcacagttcaaggcttcccgactccagtcgtgcaatggtacaaagacggatcactgatctgtcaggcagctgagcccggtaagtataggatagagtctaattatggtgtccacactcttgagataaaccgggcggactttgacgacaccgccacctattctgctgtggccaccaatgcgcatggccaagtttctacgaatgctgctgtggtggtacggcgatttcgcggagacgaagaacctttccgaagcgtcggccttcctatcggacttcccctgagctctatgattccctacacacacttcgacgtccagttcctcgaaaaattcggcgtcaccttccgccgggagggggaaaccgttaccctcaagtgtacgatgctggtgacacctgatctgaaacgggtgcagccgagagccgagtggtacagggacgacgtcctcctgaaggagtccaagtggaccaagatgttctttggagaaggccaggcgtcccttagtttctcccacctccataaggacgatgagggattgtacaccctgaggatagtatcccgcggcggagttagtgaccactccgcctttctgtttgttcgcgacgccgacccattggtgaccggagcccctggcgcacccatggatcttcagtgccacgacgcaaacagggactacgttattgttacctggaagcctccaaacacgacaacagagtcccccgtgatggggtactttgtagatcgctgcgaagtcggcaccaataactgggttcagtgtaacgatgcccccgtgaagatttgcaaatacccggtcactggtctgtttgagggaagatcatatatcttccgggtccgcgctgtcaactctgcaggaatctccagaccctcccgagtgagtgacgccgttgccgccttggacccattggatcttagacgccttcaggcagtccatctggagggggaaaaggaaatagctatatatcaggatgatctcgaaggagacgcccaggtgcccggcccgccgactggcgtgcatgcgtctgagatcagtcgcaactacgtagtgctgtcttgggagcctcctactcctcgcggaaaagaccctttaatgtattttatagaaaagtccgtggtcgggtccggttcgtggcaacgcgttaacgctcagacggccgttagaagcccgcgctatgctgttttcgacttaatggagggaaaatcttatgtgtttcgcgttctctccgctaataggcacgggctgagcgaaccctccgagatcacatccccaattcaagcacaggacgtcacagttgttccatcagcccccggtagagtcctggcatccaggaacaccaaaaccagcgtcgtggtgcagtgggaccgcccgaagcacgaagaggatctcctgggctattatgtggactgctgtgtcgctgggaccaatttatgggagccttgtaatcacaagccaattggatacaacaggttcgttgtccatggtctgaccacgggcgagcaatatatcttccgtgtcaaggccgtcaacgccgtaggcatgagtgaaaacagccaggagtctgacgtaattaaggtgcaggcagccttgacagtgccatctcacccctatgggataactttgttaaactgcgacggacattctatgacattggggtggaaagtgcccaaatttagcggaggatcaccaatcctggggtattatctggacaagagagaggtgcaccacaaaaattggcacgaggtgaattcaagcccttcaaaaccaacaatactgactgttgacgggcttacagagggctctctttatgagtttaaaattgcggccgtgaatctggctggtattggggaaccttccgatcctagcgaacatttcaaatgcgaggcatggactatgcctgagcccggacctgcctatgacctgacgttctgcgaggtgcgcgacaccagcctggtgatgctgtggaaagcccccgtgtactcggggtctagcccggtaagcggttattttgtggatttcagggaagaggatgctggcgaatggatcaccgtcaaccagactacaactgctaaccgatatctcaaggtgtcagacttacagcagggaaaaacttacgtgtttcgggttagagccgtgaatgcgaatggagtggggaaaccatcggacacttccgaaccagtcttagttgaagcccgtccaggaaccaaagagattagcgctggagtggatgagcaggggaatatttacctcggattcgactgccaagaaatgacggacgcctcccagtttacatggtgtaagagttacgaggagatttctgacgacgaaagattcaaaattgagactgtcggcgaccactccaaattgtatctcaaaaaccctgacaaggaggacctgggcacatactctgtctccgtctccgatacagatggggtgtcgtctagtttcgtgttggatcccgaggaattggaaaggctgatggccttatccaatgagatcaaaaaccccacaattccgctgaagagcgagctggcctacgaaatcttcgataagggtagggtgcggttctggctccaggcagaacatctgtctccagacgctagctacaggtttattatcaacgatcgcgaggtgagtgactctgaaattcaccgtatcaaatgtgacaaggctaccggcatcatagagatggttatggatcgcttcagcattgagaacgaaggcacctacaccgtccagatacatgacggaaaagctaaaagtcagtcaagtctggtacttatcggcgatgcattcaagactgttctcgaggaggccgaattccagcgcaaggagttcctgagaaaacagggcccccactttgcagagtatttgcactgggatgtgaccgaggagtgtgaggtgaggctggtgtgcaaggtggctaacacgaaaaaagagacagtgtttaaatggctcaaggacgatgtgctgtacgagacggagactctgccaaacttggagaggggcatctgcgagctgctaatccccaagctgtccaagaaggatcatggggaatacaaggctacacttaaagatgataggggacaggacgtctcaatcctggagatcgccgggaaagtgtacgatgatatgatcctcgctatgtctcgggtgtgcggcaagtccgcttcccctctgaaggtgctttgtacccccgaaggtattagactccagtgcttcatgaagtacttcacagatgagatgaaggtcaactggtgtcataaggacgccaaaatttcatcatccgagcatatgaggattggaggaagtgaggaaatggcttggctgcagatttgtgaacccactgaaaaggacaagggaaagtatactttcgagatttttgatgggaaagataaccaccaacggtctcttgacctcagtggacaggcttttgatgaggcttttgccgaattccagcagttcaaagccgctgcatttgccgaaaaaaacagggggaggttgattgggggattgcccgacgtcgtgactattatggaaggcaagacgttaaacttaacctgtacggtattcggaaatccagatccggaagtgatatggttcaaaaatgatcaggacattcagcttagtgaacattttagcgtgaaagttgagcaggcaaaatacgtatccatgacaatcaaaggggtcacttccgaggacagcgggaagtactctatcaacatcaaaaataaatacggaggggaaaagatcgatgtgaccgtcagcgtctacaaacacggggaaaagattccagacatggcaccaccacaacaggctaagcccaaactgatccccgcttcggcaagcgcagcaggccaatag

SEQ ID NO: 142481 - DNA, 4398 bp, Artificial Sequence
  derived and/or modified sequence
atgagcctggtgacagtgcccttctaccagaagaggcaccgccactttgaccagagctacagaaacatccagacccgctacctgctggatgaatatgccagcaagaagagggccagcacccaggccagcagccagaagagcctgagccagaggagcagcagccagagggccagcagccagaccagcctgggcggcaccatctgccgggtgtgtgccaagagggtgtccacccaggaggatgaggagcaggagaacagaagccgctaccagagcctggtggccgcctacggggaggccaagaggcagcgcttcctgtctgagctggcccacctggaggaggatgtgcacctggcccggagccaggcccgggacaagctggacaagtatgccatccagcagatgatggaggacaagctggcctgggagcggcacacctttgaggagcgcatcagccgggcccctgagatcctggtgcggctgcggagccacacagtgtgggagaggatgtctgtgaagctgtgcttcaccgtgcagggcttccccacccctgtggtgcagtggtacaaggatggcagcctcatctgccaggccgctgagcccgggaagtacagaattgagagcaactatggagtgcacaccctggagatcaacagagctgactttgatgacacagccacctacagcgctgtggccaccaatgcccacggccaggtgtccaccaatgctgctgtggtggtgcggcgcttcagaggagatgaggagcccttccgctctgtgggcctgcccatcggcctgcccctgagctccatgatcccctacacccactttgatgtgcagttcctggagaagtttggagtgaccttcagaagagaaggagagaccgtgaccctgaagtgcaccatgctggtgaccccagacctgaagagggtgcagcccagggctgagtggtacagagatgatgtgctgctgaaggagagcaagtggaccaagatgttctttggagagggccaggccagcctgtccttcagccacctgcacaaggatgatgagggcctgtacaccctgagaattgtgtccagaggaggagtgtctgaccacagcgccttcctgtttgtgagagatgctgaccccctggtgactggagcccctggggcccccatggacctgcagtgccatgatgccaacagagattatgtgattgtgacctggaagccacccaacaccaccacagagagccctgtgatgggctactttgtggacagatgtgaggtgggcaccaacaactgggtgcagtgcaatgatgcccctgtgaagatctgcaagtaccctgtgacaggcctgtttgagggccgcagctacatcttccgggtgcgggctgtgaacagcgctggcatcagccggcccagccgggtgtctgatgctgtggccgccctggaccccctggacctgcggcggctgcaggccgtgcacctggagggggagaaggagatcgccatctaccaggatgacctggagggagatgcccaggtgcccggccccccaactggagtgcacgccagcgagatcagcaggaactacgtggtgctgtcctgggagccccccaccccccggggcaaggaccccctgatgtacttcatcgagaagtctgtggtgggcagcggctcctggcagagggtgaatgcccagacagctgtgcgcagccccaggtatgctgtgtttgacctgatggagggcaagagctatgtgttccgggtgctgagcgccaacagacatggcctgtctgagcccagcgagatcaccagccccatccaggcccaggatgtgacagtggtgcccagcgcccctggccgggtgctggccagcaggaacaccaagacctctgtggtggtgcagtgggaccggcccaagcatgaggaggacctgctgggctactacgtggactgctgcgtggccggcaccaacctgtgggagccctgcaaccacaagcccatcggctacaacagatttgtggtgcacggcctgaccaccggggagcagtacatcttccgggtgaaggctgtgaatgctgtgggcatgtctgagaacagccaggagagtgatgtgatcaaggtgcaggccgccctgactgtgcccagccacccctacggcatcaccctgctgaactgtgatggccacagcatgaccctgggctggaaggtgcccaagttcagcggcggcagccccatcctgggctactacctggacaagcgggaggtgcaccacaagaactggcatgaggtgaacagcagccccagcaagcccaccatcctgactgtggatggcctgacagagggcagcctgtatgagttcaagattgctgctgtgaacctggccggcattggagagcccagcgaccccagcgagcacttcaagtgtgaggcctggaccatgcctgagcccggccctgcctatgacctgaccttctgtgaggtgcgggacaccagcctggtgatgctgtggaaggcccctgtgtacagcggcagcagccctgtgtctggctactttgtggacttccgggaggaggatgctggggagtggatcaccgtgaaccagaccaccacagccaaccgctacctgaaggtgtctgacctgcagcagggcaagacctacgtgttccgggtgcgggctgtgaatgccaatggagtgggcaagcccagcgacaccagcgagcctgtgctggtggaggcccggcccggcaccaaggagatctctgctggggtggatgagcagggcaacatctacctgggctttgactgccaggagatgacagatgccagccagttcacctggtgcaagagctatgaggagatcagtgatgatgagcgcttcaagattgagaccgtgggggaccacagcaagctgtacctgaagaacccagacaaggaggacctgggcacctacagcgtgtctgtgtctgacacagatggagtgagcagcagctttgtgctggaccctgaggagctggagcggctgatggccctgagcaatgagatcaagaaccccaccatccccctgaagtctgagctggcctatgagatctttgataaaggccgggtgcgcttctggctgcaggccgagcacctgagcccagatgccagctaccgcttcatcatcaatgaccgggaggtgtctgattctgagatccaccgcatcaagtgtgacaaggccaccggcatcatcgagatggtgatggaccgcttcagcattgaaaatgaaggcacctacacagtgcagatccatgatggcaaggccaagagccagagcagcctggtgctgattggagatgccttcaagacagtgctggaggaggccgagttccagaggaaggagttcctgaggaagcagggcccccactttgctgagtacctgcactgggatgtgacagaagaatgtgaggtgcggctggtgtgcaaggtggccaacaccaagaaggagaccgtcttcaagtggctgaaggatgatgtgctgtatgaaacagagaccctgcccaacctggagcggggcatctgtgagctgctgatccccaagctgagcaagaaggaccatggagagtacaaggccaccctgaaggatgaccggggccaggatgtgtccatcctggagattgctgggaaggtgtatgatgacatgatcctggccatgagccgggtgtgtgggaagagcgccagccccctgaaggtgctgtgcaccccagagggcatccggctgcagtgcttcatgaagtacttcacagatgagatgaaggtgaactggtgccacaaggatgccaagatcagcagcagcgagcacatgagaattggaggcagcgaggagatggcctggctgcagatctgtgagcccacagagaaggacaagggcaagtacacctttgagatctttgatggcaaggacaaccaccagaggagcctggacctgagcggccaggcctttgatgaggcctttgctgagttccagcagttcaaggccgccgcctttgctgagaagaacagaggccgcctgattggaggcctgcctgatgtggtgaccatcatggagggcaagaccctgaacctgacctgcaccgtgtttggaaatccagaccctgaggtgatctggttcaagaatgaccaggacatccagctgtctgagcacttctctgtgaaggtggagcaggccaagtatgtgtccatgaccatcaagggcgtgaccagtgaagattctgggaagtacagcatcaacatcaagaacaagtatggaggagagaagattgatgtgacagtgtctgtgtacaagcacggggagaagatcccagacatggccccaccccagcaggccaagcccaagctgatcccagccagcgccagcgctgctggccagtag

SEQ ID NO: 142482 - DNA, 5014 bp, Artificial Sequence
  derived and/or modified sequence
aacgggagggaggcacaggcgcttgctttgcaggagtcagctctgccttcctcggctggagtgtgggtggcttggtgagccggtggtcaggaattctctctcctccttgcaattttcctttctgtctgggagcacgccaagatgtcccttgtgactgtccccttctaccagaagagacataggcacttcgaccagtcctaccgtaatattcaaacacggtacctgctggacgaatatgcgtcaaaaaagcgagcttccacccaggcatcttcccagaagtccttgagtcagcggtcgtcttcacagagagcctccagccagacgtccctgggaggaaccatctgcagggtctgtgcgaagcgagtgagcacgcaggaagatgaggagcaggagaacagaagcaggtaccagtccctggtggccgcctatggtgaggccaagcgacagcgcttcctcagcgagctggcccacttggaggaggatgtccacctggcacgctcccaggcccgcgacaagctggacaaatacgccattcagcagatgatggaggacaagctggcctgggagagacacacatttgaagagcggataagcagggctcctgagatcctggtgcggctgcgatcccacaccgtctgggagaggatgtctgtgaaactctgcttcaccgtgcaaggatttcccacgcccgtggtgcagtggtacaaagatggcagtctgatttgccaggcggctgaaccgggaaagtacaggattgagagcaactatggcgtacacacactggagatcaacagggcagactttgacgacactgcgacatactcagcagtggccaccaatgcccacggacaagtgtccaccaacgcggcggtggtggtgagaaggttccggggagacgaggaaccattccgttcggtgggactcccgattggattgcccctgtcatcgatgattccgtacacgcacttcgacgtccagtttttggagaagtttggggtcaccttcaggagggaaggcgagacggtcactctcaagtgcaccatgctggtgacgccggacctgaagcgggtgcagccgcgcgccgagtggtaccgcgatgacgtgctgttgaaagagtccaagtggacgaagatgttctttggagaaggccaggcctccctgtccttcagccacctgcacaaggacgacgagggcctgtacaccctgcgcatcgtgtctcggggcggcgtcagcgaccacagcgccttcctgtttgtcagagatgctgacccgctggtcacaggggcccccggtgcacccatggacttgcagtgccacgacgccaaccgggactacgtcatcgtgacctggaagccgcccaacaccaccactgagagccccgtcatgggctattttgtggaccgatgtgaagtaggaacgaataattgggtgcagtgcaatgatgcaccggtgaaaatctgcaaatacccggtcacagggctttttgaaggaaggtcttacatattccgagtgagggcagtgaacagtgcgggcatcagccgaccctccagggtctctgatgcggtggctgcacttgaccccttggacctcagaaggttacaagccgttcatttggagggagagaaggagattgccatttatcaggatgaccttgaaggtgacgcccaggttccagggcctcccaccggtgtgcacgcttccgagatcagcagaaactatgtcgtcctcagctgggagccacccactccccgtggcaaggacccgctcatgtacttcattgagaagtcggtggtggggagcggcagctggcagagagtcaacgcccagacggctgtgagatccccgagatatgccgtgtttgacctcatggaagggaagtcttatgtgttccgagtgctgtcagcaaaccggcatggcctgagcgaaccttcggagataacgtcccccattcaggcccaggatgtgaccgttgtcccttctgctccgggtcgggttcttgcttcccgaaacaccaagacgtcggtggtggtgcagtgggaccgacctaagcatgaggaggacctgctgggctactacgtggactgctgtgtggccggaaccaacctctgggagccctgcaaccacaagcccattggatacaacaggttcgtggtgcacggcttaaccacgggagagcagtacatcttccgagtcaaggcggtcaatgctgtggggatgagtgaaaattcccaggaatcagacgtcataaaagtgcaggccgcactcaccgtcccgtcccatccttatgggattacgctcctcaactgtgacggccactccatgaccctcggctggaaggtcccgaaattcagtggtggctcgcccatcctgggctactacctggacaagcgtgaagttcaccataaaaactggcacgaggtcaattcctcacccagcaaaccgacaatcctaacggtggacggcttgacggaaggctcactctacgagttcaaaatcgccgccgtcaacctggccggcatcggggagccctcagatcccagtgagcacttcaagtgtgaggcctggaccatgccggagcccggtcctgcctacgacttgacgttctgtgaggtcagggacacgtccttggtcatgctgtggaaggcccctgtgtactccggcagcagccctgtttctggatatttcgtggacttcagggaggaggatgctggagagtggatcactgtaaatcagacgacaacagccaaccgttatttaaaggtctctgacctgcagcaaggtaagacctatgtcttcagggtccgggcagtcaatgcaaatggcgtggggaagccctcagacacgtcggagcctgtgctggtagaggcgagaccaggcaccaaggaaatcagtgctggtgtcgatgaacaaggcaacatctatctgggcttcgactgccaggaaatgacagacgcgtctcagttcacctggtgtaaatcctacgaggagatttcagatgatgagaggtttaaaatcgaaaccgtgggggatcactccaagctgtacttaaagaatccggataaggaggatttagggacttactccgtgtctgtaagtgatacagacggagtgtcctccagttttgttctggacccagaagagctcgagcgtttgatggcattgagcaatgaaataaagaaccccacaattcctctgaaatcggaattagcttatgagatttttgataaggggcgggttcgcttctggctccaggctgagcacttatcaccagatgccagctaccgatttattattaacgacagagaagtctctgacagcgagatacacagaattaaatgtgacaaagctactggcattattgagatggtgatggatcgatttagtattgaaaatgaggggacctacactgtgcagattcatgatgggaaagccaaaagtcagtcttctctagttcttattggagatgcattcaagactgtgctggaagaggctgagtttcaaaggaaagaatttctcaggaaacaaggccctcattttgctgagtacttgcactgggatgtcacggaagaatgtgaagttcgacttgtttgcaaggttgcaaacaccaagaaagaaaccgttttcaaatggctcaaggatgatgttctgtatgaaacggagacactgcctaacctggagaggggaatctgtgagctcctcatcccaaagttgtcaaagaaggaccacggtgaatacaaggcaaccttgaaagatgacagaggccaagatgtgtccatccttgaaatagctggcaaagtgtatgatgatatgattttggcaatgagtagagtctgtgggaaatctgcttcgccactgaaggtactctgcaccccagaaggaatacgacttcagtgtttcatgaagtattttacagacgaaatgaaagtgaactggtgtcacaaagatgctaagatctcatccagtgagcatatgagaatcggggggagtgaagagatggcttggctgcagatatgtgagccgactgagaaggataaaggaaaatacacttttgagattttcgatggcaaagacaaccatcaacgctcccttgacctgtccggacaagcttttgatgaagcatttgcagaattccagcaattcaaagctgctgcttttgcagagaagaatcgtggcaggttgatcggcggcttgcctgacgtggtgaccatcatggaagggaagaccttgaatctgacctgcacggtgtttggaaaccctgaccccgaagtgatttggttcaagaacgaccaggacatccagctcagcgagcacttctcggtgaaggtggagcaggccaagtacgtcagcatgaccatcaaaggcgtgacctccgaggactcgggcaagtacagcatcaacatcaagaataagtatggcggggagaagatcgacgtgacagtgagcgtgtacaaacacggggagaagatcccggacatggccccgccccagcaagccaagcccaagctcatccccgcgtctgcctcagcggcaggccagtgaaggcgttttcctagcctggagatgggaaaatatgcttggcagagacaggaatgctgtgtgcttgttccaaatgagcagctggcatccgagtggtgtcctgtgtgggctgatagttgatcacacattgtgcttttgatttttgcatttggtgatgaatattttatacccgtctaagggagaaagctaatgttttccacaagactgaacaacgtgtatttacacgagggtagacggcagatgcctgacagagagtgggttggcagacaacacactagcattttcacgggtgtgggcacatgggtgtggcacctggacgtgtgcagcatgtggcggtctgtgtgaagccaccgtgcttctctttggggggccgcgagatctagcatctctgaaatcctggctgtcgaggctttgaagcatgtgttacctggttaagcttgttttctcttgctttaggcaaataaaagtttaaaaatca

SEQ ID NO: 142483 - DNA, 4398 bp, Artificial Sequence
  derived and/or modified sequence
atgagcctggtgaccgtgcccttctaccagaagcggcaccggcactttgatcaatcttaccggaatatacagactagatatcttttggacgagtacgcttcaaagaagcgggcctctacgcaggcttcctcacaaaagagtctgtcccagcgtagctctagccagagagcttcctctcagacgtcgttgggtgggactatatgcagagtttgtgccaaacgtgtcagcactcaagaggatgaggaacaggaaaacagatccagatatcagagtctggtggctgcatacggcgaggccaaaagacaaagattcctgtctgagttagcgcacctagaagaagatgtacacctcgcacgatcgcaggccagggacaagttggacaagtacgctatacagcagatgatggaagacaaactggcctgggaacgccacacattcgaagaacgcatcagcagggccccggagattcttgtccgcttgagatcacacaccgtgtgggaaagaatgagcgtgaagctgtgcttcactgtgcagggctttccgactcccgttgtgcagtggtataaggatggttcactaatctgtcaggccgcggaaccaggcaaataccggattgagtctaattatggcgtccacacgctagaaattaatagagctgatttcgatgacacagcaacctactcggccgtcgccaccaatgcccacggccaggtgagtaccaatgctgccgtcgtggttcgtaggttccggggcgacgaagagccgttcaggagcgtcggtctgcccataggcctccctctcagctctatgatcccatatacccatttcgatgtgcagtttctggagaagtttggcgtgacatttcggcgagagggggagacggtcacattgaagtgtaccatgctggtgacgcctgacttaaagagggtgcagccgagggccgagtggtacagagatgatgtgctcttgaaagaatcaaaatggaccaaaatgtttttcggagagggacaagcttcactctccttcagtcatctccacaaggacgacgaggggttgtatactctgcggatagttagtaggggtggtgtctctgaccactctgcttttctctttgtccgggatgccgatccgttggttactggagcaccaggcgctcctatggatctccagtgccatgatgctaatcgggattacgtaatcgtgacctggaagccgcccaacaccaccaccgagagccccgttatgggctatttcgtcgacaggtgtgaagtagggaccaataattgggtgcagtgtaatgatgctcccgtgaaaatctgtaaataccctgtcacaggtctgttcgagggtagatcctatatctttagggttcgcgccgttaattctgctggaatatcccgcccttctcgagtctcagacgccgtggccgcccttgacccactggatctcagaaggttgcaagcggtgcacctcgaaggcgagaaagaaattgcgatctaccaagacgacctggaaggtgacgctcaggtgcctggaccacccacaggagtgcatgcttctgagatttccaggaattatgtcgtactgagttgggaaccaccgacaccacgtggtaaggaccccctgatgtacttcattgagaagagtgtagttggatctggcagttggcagcgtgtgaatgcccagactgccgtgaggtcacccaggtacgccgtctttgatctgatggaaggtaaatcctatgtgtttcgggtcctgtccgcgaatagacatggtctgtccgagccttctgagataacttcacccatacaagcacaggacgtgactgttgttccatcagctcccggacgagttctagcctcaaggaataccaagacatccgtcgtggtgcagtgggaccgacctaagcacgaggaggatctcctgggctattatgttgactgctgtgttgcaggaaccaatctgtgggaaccgtgtaatcataaaccaatcggttacaataggtttgtggtgcacggcctgactacaggtgaacagtacatcttccgcgtaaaagccgtgaacgcagtggggatgagtgaaaatagccaggaatccgatgtgatcaaagtgcaagcggcgcttactgttcctagccacccttatggaataactctccttaattgtgatgggcactccatgaccctgggttggaaggtccctaaattctccgggggatctcccattctcggatattacctggacaagcgggaagttcatcataagaattggcacgaggttaactcctcacccagtaaacccaccatattgactgtcgacggcctaacggagggatccttatacgagttcaagatcgctgctgtgaatttggccggaattggcgagccaagcgatccgtccgagcactttaaatgcgaagcctggaccatgcccgaaccgggaccggcctacgacctaactttttgcgaagtgcgtgatacttccctcgtgatgttatggaaagccccggtgtacagtgggtcatcacccgtctcaggctattttgtggactttcgtgaagaggacgccggagagtggattacagtgaatcagaccacaaccgccaatcgttacctgaaggtgtcagacctgcagcagggaaaaacatatgttttccgtgtccgcgcagtcaatgccaatggtgtaggaaaaccttctgacaccagtgagcctgttctggtcgaggcacgacctgggacaaaggagataagtgccggggtggacgaacaggggaatatatacctgggattcgactgtcaggaaatgaccgacgcttcccaattcacgtggtgtaagtcttacgaagagatctccgatgatgagaggtttaagatcgagaccgtgggcgaccacagtaaactttatctgaagaacccagataaggaggacctgggcacctatagcgtgtctgtgagtgacactgatggagtgtcttcctcatttgtgctggaccctgaagagctcgaacgtttaatggccctttctaatgagattaagaacccaacaattcctctcaagtccgagctcgcatatgaaatttttgataaagggcgggtccggttttggctgcaagcagaacatttaagccccgacgcctcttatcggttcatcataaacgaccgggaggtgtctgactcagaaattcaccgcatcaagtgtgacaaagcgaccggaattatcgagatggtgatggatcgcttcagtatagagaatgagggcacttataccgttcaaatccacgacggaaaggctaagagccagtccagcctggtgctgatcggtgatgccttcaagaccgtccttgaagaagccgaattccagagaaaggaatttctcaggaagcaggggccccatttcgcagaatacctgcactgggatgtcacagaagagtgcgaggtacgtttagtttgcaaggtcgccaatactaaaaaggaaactgtgtttaaatggctgaaggatgatgtgctgtatgagactgagacactgccgaacctggagcgcggcatttgtgagctcctgattcccaaactgtcgaagaaagaccacggagagtataaggccacgttgaaggatgaccggggtcaggacgtatctattctcgaaattgcggggaaagtctacgatgacatgatcttggcgatgtccagagtgtgtggtaaatctgcttccccgctgaaagttctgtgtaccccggaggggattcggctgcagtgctttatgaaatactttaccgacgaaatgaaagttaactggtgccataaagatgcaaaaatctcaagcagtgagcacatgaggattggcgggtcagaggaaatggcgtggctccagatctgtgagccaactgagaaagataaagggaagtatactttcgaaatctttgacggcaaagacaatcatcagcgcagcctagatttgagcggccaagcctttgatgaagccttcgctgaatttcaacaattcaaggccgcagcatttgccgaaaaaaatagaggccggcttattggcggcttgcccgatgtggttaccatcatggagggtaagacgttgaaccttacttgtactgttttcggaaatcctgaccctgaggtaatttggttcaagaatgatcaagatatccagctgagcgagcacttctcagtgaaggtagagcaggcaaagtatgtttcaatgaccattaagggggtgacaagcgaagactccggaaagtacagcatcaacatcaaaaataaatatggaggcgagaagatcgacgttactgtatcagtctataaacacggcgagaaaataccagatatggcacctccacagcaggccaaacctaagctgatccccgcaagcgcgtcagcagctgggcagtag

SEQ ID NO: 142484 - DNA, 4398 bp, Artificial Sequence
  derived and/or modified sequence
atgtcgctggtgacagtacccttttatcagaagaggcaccgccattttgatcaaagctaccgcaacattcagactagataccttttggatgaatacgcatccaaaaaacgggcaagcacgcaagccagctcccagaagtcactgagccaacgatcttcatcgcagcgcgctagttcacagactagtctggggggtacaatctgtcgcgtctgcgcgaagcgcgtgagcacgcaggaggatgaggagcaggagaatcggtcaagatatcagtccttggttgctgcttacggagaggccaaacggcaaagatttttgtccgagttggctcacctggaagaagacgtgcacctggctcgatcccaggctcgcgacaaattagataaatatgctatacagcaaatgatggaagataaactggcatgggaaagacacacatttgaagaacgtattagtagagcaccggagattctcgtccggctccggtcccataccgtgtgggaacggatgagcgtgaaactgtgtttcactgtgcaagggtttcccacgcccgttgtacaatggtacaaggatggatccctcatctgccaggccgctgagccgggaaaatatagaatcgaaagtaactatggagtgcacacccttgaaattaaccgcgctgacttcgacgacaccgccacttatagcgctgtggcaactaacgcacatgggcaggtctcgactaatgccgctgttgtggtgcgaagatttcgcggagatgaagaacctttccggagcgtgggactgcccatcggcctcccgctgagctctatgatcccttatacacacttcgacgtgcagttcctggaaaaatttggggttacttttcgcagagaaggggagactgtgacactcaaatgtacgatgttagtgacacccgatctgaagagggtccaaccgagagcagaatggtatcgcgatgacgtgctactgaaggagtccaagtggaccaagatgttttttggcgaggggcaggcctcactgtctttcagtcacctccacaaggatgacgagggactctacacattaaggatcgtcagcaggggaggcgtttctgaccacagtgccttcttgttcgtgagagacgccgaccccctggttactggtgctcccggagctccaatggacctgcagtgccatgatgctaacagggattatgtaattgttacatggaaacctcctaacacgacaaccgagagccctgttatgggatatttcgtcgacagatgtgaggtgggtacaaacaattgggtccaatgcaacgacgctccagtcaagatatgcaagtatccagtgacaggacttttcgaggggcgaagttatattttccgcgtgcgagctgtgaatagcgccggtatctctagaccgagccgcgtgtccgacgcagtggctgctctcgatcctctggatctgagacggttgcaggcagtccaccttgagggcgagaaggaaattgcaatttaccaggatgatctggagggggatgctcaggtaccaggaccacctactggagtccacgctagtgaaatctcccgcaattatgtggtgctctcatgggagccacccacgcctaggggtaaggacccacttatgtatttcatcgagaagagtgtcgttggttctggtagttggcaacgggtgaatgcccagactgctgtgcgttcccctcgctatgccgtgttcgatttgatggaggggaagtcctacgtttttcgggtattgagcgccaatcggcacggcctctccgaaccatcggaaattactagccctatccaggcacaggacgtcacagtcgtgcccagtgccccagggcgagtcctggcctcaagaaatactaaaacgtcggtcgtcgtgcagtgggacaggcctaagcatgaagaggacctgctaggttactacgtcgactgttgcgtagctggcaccaacctgtgggaaccatgcaatcataagcctattggatacaaccgctttgttgtccacgggttgaccacaggggagcagtatatatttagggtgaaggcagtgaatgcggtgggcatgagtgaaaactcccaggagtctgatgtgataaaggtgcaagctgccctgaccgtgccaagccatccatatggcattaccctcctgaattgcgacggacacagtatgactctggggtggaaggtacccaaattttccggcggaagccccattctgggctactacctggataaaagagaggttcatcataagaattggcacgaggtgaattcttcaccctccaaaccaactattctgacagttgatggactgacggaaggcagcctgtatgaattcaaaattgccgctgtaaacctagccggaatcggagagccttccgacccctcagaacacttcaagtgcgaagcttggaccatgcctgagcccggaccagcttacgacctgacattttgcgaggtcagagacacaagccttgtgatgctgtggaaagcacctgtctactccgggtcgagtcccgttagtgggtacttcgtggacttccgcgaagaggatgccggtgagtggatcacggtcaatcagacaaccacagcaaaccgatatctgaaggtctctgacctgcagcagggtaagacctatgtgttccgggtgcgtgcggttaacgccaacggggtgggaaaacccagcgacacctcagagcctgtgcttgtcgaggctcgccctggaaccaaagagattagcgcaggcgtggacgaacagggaaacatttacctgggttttgattgccaggagatgaccgacgcgtctcaattcacctggtgcaaatcatacgaagaaatttctgacgatgaacgctttaaaatcgagaccgtgggggaccattcaaagttgtatcttaaaaatcctgataaggaagatctaggcacctactcggtgtctgtgtcagacacagatggagtgagcagcagctttgttcttgatccagaagagctggagcgtctaatggctctctccaatgagatcaaaaatcccaccattccgctgaaatcagaacttgcatatgagatcttcgacaagggacgcgtaaggttttggctccaggctgaacatctcagccccgatgcatcctacagatttatcatcaacgatagagaagtcagtgacagtgaaatccacaggataaagtgcgacaaagccaccggaattattgagatggtgatggaccgtttcagcattgaaaatgaggggacgtataccgtccagatccacgacggtaaggcaaagtcgcagagctcactcgttcttatcggcgatgcctttaagacagtgttggaggaggccgagttccagagaaaagagtttctccgcaaacaggggcctcatttcgctgagtacctccattgggacgtcaccgaggaatgtgaagttaggctcgtttgtaaggttgcgaatactaaaaaagagaccgtcttcaaatggctcaaggacgatgttctttatgaaaccgagaccctccctaatctcgaacggggaatttgcgagctcctaattcctaagctgtctaaaaaggaccatggagaatacaaagcgacactcaaagacgaccgcggacaagatgtatcaatcctggaaattgccggtaaagtctacgacgatatgattctggcaatgtcccgcgtttgtggaaagagtgccagcccgttgaaggttctctgtacaccagagggaatcaggctgcagtgtttcatgaagtactttacagatgaaatgaaggtgaactggtgtcataaagacgcaaaaatcagcagctccgagcacatgaggatagggggtagtgaggaaatggcctggctccagatttgcgagcctacagaaaaggacaaagggaagtacactttcgagatcttcgacggcaaggataaccatcagagaagcctggacctgtccggacaagctttcgatgaggcatttgctgagtttcagcagttcaaagccgcagcttttgccgaaaagaatcggggtagactgattggcggacttccagacgtggtgacaattatggaaggaaagacattgaacttgacatgtacagtgtttggaaacccagacccagaagtaatttggtttaagaatgaccaggacattcagctgtccgaacacttctctgtgaaggtggaacaggcaaaatacgtatccatgacaattaagggagtgactagcgaggactctggtaaatactccatcaacattaagaacaaatatggcggtgagaaaattgatgttacagtgtccgtatataaacatggggagaagattcccgatatggctccacctcagcaagcgaagcctaagctcatccctgcatctgccagtgcagccggacagtag

SEQ ID NO: 142485 - DNA, 4398 bp, Artificial Sequence
  derived and/or modified sequence
atgagcctggtgaccgtgcccttctaccagaagagacacagacacttcgaccagagctacagaaacatccagaccagatacctgctggacgagtacgccagcaagaagagagccagcacccaggccagcagccagaagagcctgagccagagaagcagcagccagagagccagcagccagaccagcctgggcggcaccatctgcagagtgtgcgccaagagagtgagcacccaggaggacgaggagcaggagaacagaagcagataccagagcctggtggccgcctacggcgaggccaagagacagagattcctgagcgagctggcccacctggaggaggacgtgcacctggccagaagccaggccagagacaagctggacaagtacgccatccagcagatgatggaggacaagctggcctgggagagacacaccttcgaggagagaatcagcagagcccccgagatcctggtgagactgagaagccacaccgtgtgggagagaatgagcgtgaagctgtgcttcaccgtgcagggcttccccacccccgtggtgcagtggtacaaggacggcagcctgatctgccaggccgccgagcccggcaagtacagaatcgagagcaactacggcgtgcacaccctggagatcaacagagccgacttcgacgacaccgccacctacagcgccgtggccaccaacgcccacggccaggtgagcaccaacgccgccgtggtggtgagaagattcagaggcgacgaggagcccttcagaagcgtgggcctgcccatcggcctgcccctgagcagcatgatcccctacacccacttcgacgtgcagttcctggagaagttcggcgtgaccttcagaagagagggcgagaccgtgaccctgaagtgcaccatgctggtgacccccgacctgaagagagtgcagcccagagccgagtggtacagagacgacgtgctgctgaaggagagcaagtggaccaagatgttcttcggcgagggccaggccagcctgagcttcagccacctgcacaaggacgacgagggcctgtacaccctgagaatcgtgagcagaggcggcgtgagcgaccacagcgccttcctgttcgtgagagacgccgaccccctggtgaccggcgcccccggcgcccccatggacctgcagtgccacgacgccaacagagactacgtgatcgtgacctggaagccccccaacaccaccaccgagagccccgtgatgggctacttcgtggacagatgcgaggtgggcaccaacaactgggtgcagtgcaacgacgcccccgtgaagatctgcaagtaccccgtgaccggcctgttcgagggcagaagctacatcttcagagtgagagccgtgaacagcgccggcatcagcagacccagcagagtgagcgacgccgtggccgccctggaccccctggacctgagaagactgcaggccgtgcacctggagggcgagaaggagatcgccatctaccaggacgacctggagggcgacgcccaggtgcccggcccccccaccggcgtgcacgccagcgagatcagcagaaactacgtggtgctgagctgggagccccccacccccagaggcaaggaccccctgatgtacttcatcgagaagagcgtggtgggcagcggcagctggcagagagtgaacgcccagaccgccgtgagaagccccagatacgccgtgttcgacctgatggagggcaagagctacgtgttcagagtgctgagcgccaacagacacggcctgagcgagcccagcgagatcaccagccccatccaggcccaggacgtgaccgtggtgcccagcgcccccggcagagtgctggccagcagaaacaccaagaccagcgtggtggtgcagtgggacagacccaagcacgaggaggacctgctgggctactacgtggactgctgcgtggccggcaccaacctgtgggagccctgcaaccacaagcccatcggctacaacagattcgtggtgcacggcctgaccaccggcgagcagtacatcttcagagtgaaggccgtgaacgccgtgggcatgagcgagaacagccaggagagcgacgtgatcaaggtgcaggccgccctgaccgtgcccagccacccctacggcatcaccctgctgaactgcgacggccacagcatgaccctgggctggaaggtgcccaagttcagcggcggcagccccatcctgggctactacctggacaagagagaggtgcaccacaagaactggcacgaggtgaacagcagccccagcaagcccaccatcctgaccgtggacggcctgaccgagggcagcctgtacgagttcaagatcgccgccgtgaacctggccggcatcggcgagcccagcgaccccagcgagcacttcaagtgcgaggcctggaccatgcccgagcccggccccgcctacgacctgaccttctgcgaggtgagagacaccagcctggtgatgctgtggaaggcccccgtgtacagcggcagcagccccgtgagcggctacttcgtggacttcagagaggaggacgccggcgagtggatcaccgtgaaccagaccaccaccgccaacagatacctgaaggtgagcgacctgcagcagggcaagacctacgtgttcagagtgagagccgtgaacgccaacggcgtgggcaagcccagcgacaccagcgagcccgtgctggtggaggccagacccggcaccaaggagatcagcgccggcgtggacgagcagggcaacatctacctgggcttcgactgccaggagatgaccgacgccagccagttcacctggtgcaagagctacgaggagatcagcgacgacgagagattcaagatcgagaccgtgggcgaccacagcaagctgtacctgaagaaccccgacaaggaggacctgggcacctacagcgtgagcgtgagcgacaccgacggcgtgagcagcagcttcgtgctggaccccgaggagctggagagactgatggccctgagcaacgagatcaagaaccccaccatccccctgaagagcgagctggcctacgagatcttcgacaagggcagagtgagattctggctgcaggccgagcacctgagccccgacgccagctacagattcatcatcaacgacagagaggtgagcgacagcgagatccacagaatcaagtgcgacaaggccaccggcatcatcgagatggtgatggacagattcagcatcgagaacgagggcacctacaccgtgcagatccacgacggcaaggccaagagccagagcagcctggtgctgatcggcgacgccttcaagaccgtgctggaggaggccgagttccagagaaaggagttcctgagaaagcagggcccccacttcgccgagtacctgcactgggacgtgaccgaggagtgcgaggtgagactggtgtgcaaggtggccaacaccaagaaggagaccgtgttcaagtggctgaaggacgacgtgctgtacgagaccgagaccctgcccaacctggagagaggcatctgcgagctgctgatccccaagctgagcaagaaggaccacggcgagtacaaggccaccctgaaggacgacagaggccaggacgtgagcatcctggagatcgccggcaaggtgtacgacgacatgatcctggccatgagcagagtgtgcggcaagagcgccagccccctgaaggtgctgtgcacccccgagggcatcagactgcagtgcttcatgaagtacttcaccgacgagatgaaggtgaactggtgccacaaggacgccaagatcagcagcagcgagcacatgagaatcggcggcagcgaggagatggcctggctgcagatctgcgagcccaccgagaaggacaagggcaagtacaccttcgagatcttcgacggcaaggacaaccaccagagaagcctggacctgagcggccaggccttcgacgaggccttcgccgagttccagcagttcaaggccgccgccttcgccgagaagaacagaggcagactgatcggcggcctgcccgacgtggtgaccatcatggagggcaagaccctgaacctgacctgcaccgtgttcggcaaccccgaccccgaggtgatctggttcaagaacgaccaggacatccagctgagcgagcacttcagcgtgaaggtggagcaggccaagtacgtgagcatgaccatcaagggcgtgaccagcgaggacagcggcaagtacagcatcaacatcaagaacaagtacggcggcgagaagatcgacgtgaccgtgagcgtgtacaagcacggcgagaagatccccgacatggcccccccccagcaggccaagcccaagctgatccccgccagcgccagcgccgccggccagtag

SEQ ID NO: 142486 - protein, 1307 aa, Artificial Sequence
  derived and/or modified sequence
MELEDGVVYQEEPGGSGAVMSERVSGLAGSIYREFERLIGRYDEEVVKELMPLVVAVLENLDSVFAQDQEHQVELELLRDDNEQLITQYEREKALRKHAEEKFIEFEDSQEQEKKDLQTRVESLESQTRQLELKAKNYADQISRLEEREAELKKEYNALHQRHTEMIHNYMEHLERTKLHQLSGSDQLESTAHSRIRKERPISLGIFPLPAGDGLLTPDAQKGGETPGSEQWKFQELSQPRSHTSLKDELSDVSQGGSKATTPASTANSDVATIPTDTPLKEENEGFVKVTDAPNKSEISKHIEVQVAQETRNVSTGSAENEEKSEVQAIIESTPELDMDKDLSGYKGSSTPTKGIENKAFDRNTESLFEELSSAGSGLIGDVDEGADLLGMGREVENLILENTQLLETKNALNIVKNDLIAKVDELTCEKDVLQGELEAVKQAKLKLEEKNRELEEELRKARAEAEDARQKAKDDDDSDIPTAQRKRFTRVEMARVLMERNQYKERLMELQEAVRWTEMIRASRENPAMQEKKRSSIWQFFSRLFSSSSNTTKKPEPPVNLKYNAPTSHVTPSVKKRSSTLSQLPGDKSKAFDFLSEETEASLASRREQKREQYRQVKAHVQKEDGRVQAFGWSLPQKYKQVTNGQGENKMKNLPVPVYLRPLDEKDTSMKLWCAVGVNLSGGKTRDGGSVVGASVFYKDVAGLDTEGSKQRSASQSSLDKLDQELKEQQKELKNQEELSSLVWICTSTHSATKVLIIDAVQPGNILDSFTVCNSHVLCIASVPGARETDYPAGEDLSESGQVDKASLCGSMTSNSSAETDSLLGGITVVGCSAEGVTGAATSPSTNGASPVMDKPPEMEAENSEVDENVPTAEEATEATEGNAGSAEDTVDISQTGVYTEHVFTDPLGVQIPEDLSPVYQSSNDSDAYKDQISVLPNEQDLVREEAQKMSSLLPTMWLGAQNGCLYVHSSVAQWRKCLHSIKLKDSILSIVHVKGIVLVALADGTLAIFHRGVDGQWDLSNYHLLDLGRPHHSIRCMTVVHDKVWCGYRNKIYVVQPKAMKIEKSFDAHPRKESQVRQLAWVGDGVWVSIRLDSTLRLYHAHTYQHLQDVDIEPYVSKMLGTGKLGFSFVRITALMVSCNRLWVGTGNGVIISIPLTETNKTSGVPGNRPGSVIRVYGDENSDKVTPGTFIPYCSMAHAQLCFHGHRDAVKFFVAVPGQVISPQSSSSGTDLTGDKAGPSAQEPGSQTPLKSMLVISGGEGYIDFRMGDEGGESELLGEDLPLEPSVTKAERSHLIVWQVMYGNE

SEQ ID NO: 142487 - DNA, 3924 bp, Artificial Sequence
  derived and/or modified sequence
atggagctggaggacggcgtggtgtaccaggaggagcccggcggcagcggcgccgtgatgagcgagagagtgagcggcctggccggcagcatctacagagagttcgagagactgatcggcagatacgacgaggaggtggtgaaggagctgatgcccctggtggtggccgtgctggagaacctggacagcgtgttcgcccaggaccaggagcaccaggtggagctggagctgctgagagacgacaacgagcagctgatcacccagtacgagagagagaaggccctgagaaagcacgccgaggagaagttcatcgagttcgaggacagccaggagcaggagaagaaggacctgcagaccagagtggagagcctggagagccagaccagacagctggagctgaaggccaagaactacgccgaccagatcagcagactggaggagagagaggccgagctgaagaaggagtacaacgccctgcaccagagacacaccgagatgatccacaactacatggagcacctggagagaaccaagctgcaccagctgagcggcagcgaccagctggagagcaccgcccacagcagaatcagaaaggagagacccatcagcctgggcatcttccccctgcccgccggcgacggcctgctgacccccgacgcccagaagggcggcgagacccccggcagcgagcagtggaagttccaggagctgagccagcccagaagccacaccagcctgaaggacgagctgagcgacgtgagccagggcggcagcaaggccaccacccccgccagcaccgccaacagcgacgtggccaccatccccaccgacacccccctgaaggaggagaacgagggcttcgtgaaggtgaccgacgcccccaacaagagcgagatcagcaagcacatcgaggtgcaggtggcccaggagaccagaaacgtgagcaccggcagcgccgagaacgaggagaagagcgaggtgcaggccatcatcgagagcacccccgagctggacatggacaaggacctgagcggctacaagggcagcagcacccccaccaagggcatcgagaacaaggccttcgacagaaacaccgagagcctgttcgaggagctgagcagcgccggcagcggcctgatcggcgacgtggacgagggcgccgacctgctgggcatgggcagagaggtggagaacctgatcctggagaacacccagctgctggagaccaagaacgccctgaacatcgtgaagaacgacctgatcgccaaggtggacgagctgacctgcgagaaggacgtgctgcagggcgagctggaggccgtgaagcaggccaagctgaagctggaggagaagaacagagagctggaggaggagctgagaaaggccagagccgaggccgaggacgccagacagaaggccaaggacgacgacgacagcgacatccccaccgcccagagaaagagattcaccagagtggagatggccagagtgctgatggagagaaaccagtacaaggagagactgatggagctgcaggaggccgtgagatggaccgagatgatcagagccagcagagagaaccccgccatgcaggagaagaagagaagcagcatctggcagttcttcagcagactgttcagcagcagcagcaacaccaccaagaagcccgagccccccgtgaacctgaagtacaacgcccccaccagccacgtgacccccagcgtgaagaagagaagcagcaccctgagccagctgcccggcgacaagagcaaggccttcgacttcctgagcgaggagaccgaggccagcctggccagcagaagagagcagaagagagagcagtacagacaggtgaaggcccacgtgcagaaggaggacggcagagtgcaggccttcggctggagcctgccccagaagtacaagcaggtgaccaacggccagggcgagaacaagatgaagaacctgcccgtgcccgtgtacctgagacccctggacgagaaggacaccagcatgaagctgtggtgcgccgtgggcgtgaacctgagcggcggcaagaccagagacggcggcagcgtggtgggcgccagcgtgttctacaaggacgtggccggcctggacaccgagggcagcaagcagagaagcgccagccagagcagcctggacaagctggaccaggagctgaaggagcagcagaaggagctgaagaaccaggaggagctgagcagcctggtgtggatctgcaccagcacccacagcgccaccaaggtgctgatcatcgacgccgtgcagcccggcaacatcctggacagcttcaccgtgtgcaacagccacgtgctgtgcatcgccagcgtgcccggcgccagagagaccgactaccccgccggcgaggacctgagcgagagcggccaggtggacaaggccagcctgtgcggcagcatgaccagcaacagcagcgccgagaccgacagcctgctgggcggcatcaccgtggtgggctgcagcgccgagggcgtgaccggcgccgccaccagccccagcaccaacggcgccagccccgtgatggacaagccccccgagatggaggccgagaacagcgaggtggacgagaacgtgcccaccgccgaggaggccaccgaggccaccgagggcaacgccggcagcgccgaggacaccgtggacatcagccagaccggcgtgtacaccgagcacgtgttcaccgaccccctgggcgtgcagatccccgaggacctgagccccgtgtaccagagcagcaacgacagcgacgcctacaaggaccagatcagcgtgctgcccaacgagcaggacctggtgagagaggaggcccagaagatgagcagcctgctgcccaccatgtggctgggcgcccagaacggctgcctgtacgtgcacagcagcgtggcccagtggagaaagtgcctgcacagcatcaagctgaaggacagcatcctgagcatcgtgcacgtgaagggcatcgtgctggtggccctggccgacggcaccctggccatcttccacagaggcgtggacggccagtgggacctgagcaactaccacctgctggacctgggcagaccccaccacagcatcagatgcatgaccgtggtgcacgacaaggtgtggtgcggctacagaaacaagatctacgtggtgcagcccaaggccatgaagatcgagaagagcttcgacgcccaccccagaaaggagagccaggtgagacagctggcctgggtgggcgacggcgtgtgggtgagcatcagactggacagcaccctgagactgtaccacgcccacacctaccagcacctgcaggacgtggacatcgagccctacgtgagcaagatgctgggcaccggcaagctgggcttcagcttcgtgagaatcaccgccctgatggtgagctgcaacagactgtgggtgggcaccggcaacggcgtgatcatcagcatccccctgaccgagaccaacaagaccagcggcgtgcccggcaacagacccggcagcgtgatcagagtgtacggcgacgagaacagcgacaaggtgacccccggcaccttcatcccctactgcagcatggcccacgcccagctgtgcttccacggccacagagacgccgtgaagttcttcgtggccgtgcccggccaggtgatcagcccccagagcagcagcagcggcaccgacctgaccggcgacaaggccggccccagcgcccaggagcccggcagccagacccccctgaagagcatgctggtgatcagcggcggcgagggctacatcgacttcagaatgggcgacgagggcggcgagagcgagctgctgggcgaggacctgcccctggagcccagcgtgaccaaggccgagagaagccacctgatcgtgtggcaggtgatgtacggcaacgagtag

SEQ ID NO: 142488 - DNA, 3924 bp, Artificial Sequence
  derived and/or modified sequence
atggagctcgaagacggcgtggtgtaccaagaagaacccggaggcagcggggccgtgatgagtgagagagtgagcggcctcgctgggtccatttaccgtgaattcgagaggctgatcggaagatacgatgaggaggtcgtcaaagagctgatgcctctggtcgttgcggtgctggaaaatctggacagtgtatttgcccaggatcaggaacatcaggtggagctggagctgctgagggatgataacgagcagttaatcactcagtatgagagggagaaggccctgagaaaacacgctgaggagaagtttattgaattcgaagactcccaagagcaggagaagaaggacctgcagactagggttgagagccttgaatcccagacaaggcagttagagctgaaagcgaaaaactacgccgatcagattagccgcctggaagagagagaagcagaattgaaaaaagagtacaacgctctacaccagcggcataccgaaatgatccacaactatatggagcacctcgaaaggaccaaactccaccagctcagcggcagtgatcagcttgagtccaccgcacactcacggatccgcaaggaacgcccgatttccctgggtatcttccctctgccagccggcgatggactgctcactcccgacgctcagaaaggcggcgagacccccggtagcgaacagtggaagttccaagaactaagtcagcctagaagccatactagcctcaaggatgagctgagcgatgtttcccagggtggctccaaagcaaccacccccgcgagcaccgcaaattccgatgtggccacaattccgacagatacccctctgaaagaggagaacgaggggtttgttaaagtgactgacgcccccaacaagtccgagatttctaaacatatagaggtgcaggtggctcaggaaacgcgcaacgtgagcacagggtccgcggaaaacgaggaaaagagtgaagtgcaggctatcattgagtctactccggagttggacatggacaaggatttgtctggctataagggttcttctactcccaccaagggtatcgagaacaaagcttttgaccggaatacagagagtctgtttgaagagctgtcctcagcaggatccggtctcataggagatgtcgacgagggggctgatctgctggggatgggcagggaagtcgagaacctcatcttggagaatacgcagcttctggagactaagaatgcccttaacatcgtgaaaaacgaccttattgcaaaggtagacgaattgacctgcgaaaaggacgtgcttcagggcgagctggaagcagtgaagcaagctaagctgaagctggaagaaaagaacagagagctggaggaggaacttcggaaagctcgtgcagaagccgaggacgccagacaaaaggccaaagatgacgacgatagcgatatacctaccgcccagaggaagagattcacgcgtgtcgagatggcaagagtactaatggagcgtaatcagtacaaggagagattaatggagctacaagaggcggtgaggtggaccgaaatgatccgcgcctcacgtgagaaccctgcaatgcaggagaaaaaacgttccagcatatggcagttctttagcagattattttccagctcctctaatactacgaaaaagcccgaaccaccagtgaacctgaaatacaatgctccgacgtcccacgtgacccctagcgtaaagaaaaggagctcgaccctgagccagttgcccggcgacaaaagcaaggcattcgacttcctgagcgaggaaaccgaggcctccctagcttcgcgccgggaacagaagagagaacaatatagacaagtgaaagcacacgtccagaaagaggatggccgcgttcaggccttcggatggagcttgccccagaaatacaagcaggttacgaatggccagggagaaaacaaaatgaagaacctcccggtaccagtatacctccgtccgctggatgagaaggatactagtatgaaattgtggtgtgccgtgggtgtgaacctctctgggggaaagaccagagatgggggcagcgtggtgggcgcatcagtgttctacaaagatgtggcaggattggataccgaaggaagcaagcagcgttctgcctcccagtcgtccctggataagctggaccaagagttgaaggaacagcagaaggagctgaagaatcaagaggagctatctagcctggtctggatatgtacctccacgcactcggcaacaaaagtcctcattattgacgcggtgcagcctggcaatattctggacagctttacagtgtgtaattctcatgttctttgcattgcaagcgtccccggagcaagagaaacggattacccggccggagaagatcttagcgagagcggacaagtagataaggccagcctatgcggatctatgactagcaactcgagcgcagagaccgactcactactggggggcatcactgtggtgggatgctccgccgagggagtgaccggggcggcaacctctccatccactaatggcgctagccctgtgatggataaaccaccggaaatggaagctgagaactctgaagtggatgagaacgtgcctaccgcagaagaggctacggaggcaaccgaggggaatgccgggtcagcggaagacacagtagacatatctcagacaggagtttataccgaacacgtattcaccgaccccctgggtgtgcagatcccagaagatctttcccctgtgtaccagagcagcaatgactcagatgcctataaagaccagattagtgttttgcctaacgagcaggacttagtgcgagaagaagcccagaaaatgagcagtttactgccgacgatgtggctgggtgctcagaacgggtgtttgtacgtgcactcaagtgtcgctcagtggagaaagtgtttacacagcatcaagctcaaggatagtattttgagtatcgtgcacgtcaaaggaatcgtgctggtggcattggctgacggcacactagccatctttcatagaggggtagatggccagtgggacctctctaattatcacttgctcgacttaggtcggcctcatcactcaattaggtgtatgacagtggtgcatgacaaagtgtggtgcgggtatcggaacaagatctacgttgtgcagccaaaagcgatgaaaattgagaaaagtttcgatgcacaccctaggaaggagagccaggtgagacagttggcctgggtcggcgatggggtgtgggtcagcattagactcgattctactctacgcttatatcacgcgcatacataccagcatctgcaggatgtcgatatcgagccttatgttagcaaaatgcttggaacaggcaagttgggattcagcttcgttcgaatcacagctcttatggtgagctgtaaccgcctatgggtgggaacgggcaacggcgtgattatctccatcccgctgacggaaaccaataagacctccggtgttcctggaaatcggcccggttcagtcatcagggtctacggggatgagaattccgataaagtcactcccggaacatttatcccgtattgctctatggctcacgctcaattgtgttttcatgggcatcgggacgccgttaaatttttcgtcgctgtgcctggacaggtgatctcgccgcagtccagttcaagcgggacagaccttaccggggacaaggctgggccgtctgctcaggaacccggatctcaaactccacttaagtctatgctggtgatcagtggcggcgagggatacatagacttccgaatgggcgacgaaggcggagagtctgagcttttgggtgaagacctaccattggaaccttcagtcacaaaggcagagcgctcacacctcatcgtgtggcaggtgatgtatggcaacgagtag

SEQ ID NO: 142489 - DNA, 3924 bp, Artificial Sequence
  derived and/or modified sequence
atggagctggaggatggagtggtgtaccaggaggagcccggcggcagcggggctgtgatgtctgagcgggtgtctggcctggccggcagcatctaccgggagtttgagcggctgattggccgctatgatgaggaggtggtgaaggagctgatgcccctggtggtggccgtgctggagaacctggacagcgtgtttgcccaggaccaggagcaccaggtggagctggagctgctgagagatgacaatgagcagctgatcacccagtatgagcgggagaaggccctgaggaagcatgctgaggagaagttcatcgagtttgaggacagccaggagcaggagaagaaggacctgcagaccagggtggagagcctggagagccagacccggcagctggagctgaaggccaagaactatgctgaccagatcagccggctggaggagcgggaggccgagctgaagaaggagtacaatgccctgcaccagaggcacacagagatgatccacaactacatggagcacctggagaggaccaagctgcaccagctgagcggcagtgaccagctggagagcacagcccacagccgcatcaggaaggagcggcccatcagcctgggcatcttccccctgcctgctggagatggcctgctgaccccagatgcccagaagggcggggagaccccaggcagcgagcagtggaagttccaggagctgagccagcccaggagccacaccagcctgaaggatgagctgagtgatgtgtcccagggcggcagcaaggccaccaccccagccagcacagccaacagtgatgtggccaccatccccacagacacccccctgaaggaggagaatgaaggatttgtgaaggtgacagatgcccccaacaagtctgagatcagcaagcacatcgaggtgcaggtggcccaggagaccagaaatgtgtccacaggcagcgcagaaaatgaggagaagtctgaggtgcaggccatcatcgagagcaccccagagctggacatggacaaggacctgagcggctacaagggcagcagcacccccaccaagggcatcgagaacaaggcctttgacaggaacacagagagcctgtttgaggagctgagcagcgctggcagcggcctgattggagatgtggatgagggcgctgacctgctgggcatgggccgggaggtggagaacctgatcctggagaacacccagctgctggagaccaagaatgccctgaacatcgtgaagaatgacctgattgccaaggtggatgagctgacctgtgagaaggatgtgctgcagggcgagctggaggccgtgaagcaggccaagctgaagctggaggagaagaaccgggagctggaggaggagctgaggaaggcccgggcagaggctgaagatgcccggcagaaggccaaggatgatgatgacagcgacatccccacagcccagaggaagcgcttcaccagggtggagatggcccgggtgctgatggagaggaaccagtacaaggagcggctgatggagctgcaggaggccgtgcgctggacagagatgatccgggccagccgggagaacccagccatgcaggagaagaagaggagcagcatctggcagttcttcagccgcctcttcagcagcagcagcaacaccaccaagaagccagagccccctgtgaacctgaagtacaatgcccccaccagccacgtgacccccagcgtgaagaagaggagcagcaccctgagccagctgcccggggacaagagcaaggcctttgacttcctgtctgaggagacagaggccagcctggccagcagaagagagcagaagcgggagcagtaccggcaggtgaaggcccacgtgcagaaggaggatggccgggtgcaggccttcggctggagcctgccccagaagtacaagcaggtgaccaacggccagggcgagaacaagatgaagaacctgcctgtgcctgtgtacctgcggcccctggatgagaaggacacctccatgaagctgtggtgtgctgtgggcgtgaacctgagcggcggcaagaccagagatggcggctctgtggtgggcgccagcgtcttctacaaggatgtggccggcctggacacagagggcagcaagcagaggtctgccagccagagcagcctggacaagctggaccaggagctgaaggagcagcagaaggagctgaagaaccaggaggagctgagcagcctggtgtggatctgcaccagcacccacagcgccaccaaggtgctgatcattgatgctgtgcagcccggcaacatcctggacagcttcaccgtgtgcaacagccacgtgctgtgcatcgcctctgtgcctggggcccgggagacagactacccagctggggaggacctgtctgagagcggccaggtggacaaggccagcctgtgtggctccatgaccagcaacagcagcgctgagacagacagcctgctgggcggcatcaccgtggtgggctgcagcgctgagggcgtgactggagctgccaccagccccagcaccaacggggccagccctgtgatggacaagcccccagagatggaggctgaaaattctgaggtggatgaaaatgtgcccacagctgaggaggccacagaggccacagagggcaatgccggcagcgcagaagatactgtggacatcagccagacaggagtgtacacagaacatgtgttcacagaccccctgggcgtgcagatccctgaggacctgagccctgtgtaccagagcagcaatgacagtgatgcctacaaggaccagatctctgtgctgcccaatgagcaggacctggtgcgggaggaggcccagaagatgagcagcctgctgcccaccatgtggctgggcgcccagaatggctgcctgtatgtgcacagctctgtggcccagtggaggaagtgcctgcacagcatcaagctgaaggacagcatcctgagcatcgtgcacgtgaagggcatcgtgctggtggccctggctgatggcaccctggccatcttccaccggggcgtggatggccagtgggacctgagcaactaccacctgctggacctgggccggccccaccacagcatccgctgcatgacagtggtgcatgacaaggtgtggtgtggctacagaaacaagatctacgtggtgcagcccaaggccatgaagattgagaagagctttgatgcccaccccaggaaggagagccaggtgcggcagctggcctgggtgggagatggagtgtgggtgtccatccggctggacagcaccctgcggctgtaccacgcccacacctaccagcacctgcaggatgtggacatcgagccctacgtgtccaagatgctgggcaccgggaagctgggcttctcctttgtgcgcatcacagccctgatggtgtcctgcaaccggctgtgggtgggcactggaaatggagtcatcatcagcatccccctgacagagaccaacaagaccagcggcgtgcccggcaaccggcccggcagcgtcatccgggtgtatggagatgagaacagcgacaaggtgaccccaggcaccttcatcccctactgcagcatggcccacgcccagctgtgcttccacggccacagagatgctgtgaagttctttgtggccgtgcccggccaggtgatcagcccccagagcagcagcagcggcacagacctgactggagacaaggccggccccagcgcccaggagcccggcagccagacccccctgaagtccatgctggtgatctctggaggagagggctacatcgacttcaggatgggagatgaaggaggagagagcgagctgctgggggaggacctgcccctggagcccagcgtgaccaaggccgagaggagccacctgattgtgtggcaggtgatgtatggaaatgaatag

SEQ ID NO: 142490 - DNA, 3924 bp, Artificial Sequence
  derived and/or modified sequence
atggagctggaggacggcgtggtgtaccaggaggagcccggcggctctggtgctgttatgtcagagagagtgagcggactcgccggcagcatctatcgggagttcgaaagactgatcgggcggtacgatgaggaggttgtcaaggaactgatgcctctggtggtagcggtgctggaaaatttggatagcgtgtttgcccaggatcaggaacatcaggttgagctggaattgctgagggacgataacgagcagctgattacacagtacgaaagagaaaaggccctgaggaagcatgcagaagaaaaattcatcgagttcgaggactcacaggagcaggaaaagaaagatttgcagacaagagtcgaaagtctggagtcccagaccagacagttggagctgaaggctaaaaactacgccgatcaaattagcagacttgaagagcgagaggctgaactcaaaaaggaatataatgcattgcatcaacggcatacagaaatgattcacaactatatggaacatctcgaacgcaccaagcttcaccaactatcaggcagcgatcagctcgagtccaccgctcacagccgcattagaaaagaacgccccattagcttgggcatcttccctttgcctgcaggggacggcctcctgacaccagatgctcagaaaggcggtgagacaccaggctctgagcagtggaaattccaggagctctcccagcctcggagccatacgtctctgaaggacgagctgtctgatgtgtctcagggtggcagcaaggccacaactccagcttccaccgcaaactctgacgtggcaacaatcccgaccgacactcccctgaaagaggagaacgaaggattcgtgaaagtgaccgacgctccaaataagtccgagatctcaaagcatattgaagttcaggtcgcacaagagacgaggaatgtaagcaccggcagcgccgagaacgaagagaaatccgaggtccaagcaattattgagtcaacacctgagctggatatggacaaagacctcagcgggtataagggctctagtacccccacgaagggaatcgagaacaaggccttcgatcgcaacaccgaatctttgtttgaggaattaagctctgccggctcaggccttattggtgatgtagacgagggagcagacctgcttggcatgggccgtgaggtcgagaatttaatactggaaaacacccagcttcttgaaacaaaaaatgccttaaatatcgtgaaaaacgatttgattgccaaagtggacgagctcacatgcgaaaaggatgttttgcagggggaattggaggcggtgaaacaggcaaagctgaagctggaggagaaaaatcgggagttggaagaggagctgaggaaagccagggcggaggccgaagatgcaaggcagaaggcgaaagatgatgatgactcagatatccccactgcacaaaggaaacgattcacccgcgtggaaatggcccgcgttctgatggagcgcaatcagtataaagagagactgatggagttgcaggaggcagtgcgctggaccgagatgatccgggcgtcccgcgagaatccagcgatgcaggaaaagaaaaggagctcgatctggcagttcttctccagactatttagtagttcatccaatacaaccaagaaacctgagcctcccgtgaacctgaaatacaatgcaccgacatctcacgtaacacccagcgtcaagaagcgctcttcaaccctttcacaattacccggcgataaaagtaaggcgttcgactttctgtccgaagaaacagaggcatcattagccagtagaagagagcagaagagagaacaatacaggcaggtgaaggcccacgtgcagaaagaggacgggcgcgtgcaagccttcggatggagtctccctcagaagtataagcaggtgaccaacggccagggggagaataaaatgaagaacctgccagtgccagtttacttacgtcccctggacgaaaaggacacctctatgaaactgtggtgcgctgttggcgtcaaccttagcggcggcaaaacacgagacggaggctctgtagtaggcgcttcagtattttacaaagacgtcgcgggcctcgacaccgaagggtccaagcaaaggtcagcatctcagtcctcccttgacaaattagatcaagagcttaaggaacagcaaaaggaactgaagaaccaggaggagctgtcctcgttggtctggatttgtacctcgacacacagcgccacaaaggttctgatcattgatgccgtccagccaggaaatattctggactcttttactgtgtgtaattcccatgttttgtgtattgccagtgtgcctggagcgagagagacagattacccggctggggaggacctgagcgaatccggccaggtcgacaaagcctctttgtgtggatctatgacctctaattcttctgcagaaacggatagtctgctgggcgggatcactgtggtgggatgcagcgccgagggcgtgaccggcgctgccacatcgcccagtacaaacggtgcctctcccgtgatggataagccacccgaaatggaagccgagaactcagaggtggatgaaaacgtgcctactgccgaggaggcaaccgaggcgaccgagggtaacgctggctcagccgaggacaccgtggatatctcccagaccggcgtttatactgagcatgtattcacggatcctcttggtgtgcaaattcctgaagatctgtctcccgtgtatcagagtagcaatgacagcgacgcttataaggatcagatatctgttttgcctaacgaacaggacttagtcagggaggaagctcagaaaatgagtagtctgctccccacaatgtggctgggtgcacagaacggttgcctttatgtgcattcgtctgtggcccagtggcgaaagtgtttgcattcaatcaagttgaaagattccattttaagcatagtgcacgttaaggggatagtgttagtcgccctagcagatggcacacttgctatcttccataggggagttgatggccaatgggacctttcaaactatcatcttttggacttgggaagaccccatcacagtattcgatgcatgactgtcgtccatgataaagtgtggtgtggctatcgcaataaaatttatgtagtgcagcccaaggccatgaaaattgaaaaatcattcgacgcgcatccaagaaaggagagccaggtacggcagctcgcctgggtcggggacggcgtctgggtgagcatacggctggacagtaccttacgcctgtaccatgctcatacttatcagcacttacaggacgtggatatagagccgtacgtgtcaaagatgctgggcacaggcaagctcggcttctcattcgttcgtatcacagctctgatggtgtcttgcaatcgtttgtgggtaggaaccggcaacggagtgattatttctatccctctgacggaaaccaacaagacatctggagtgccaggtaatcgccctggttctgtcatacgcgtatacggggacgaaaacagcgacaaagtgacaccagggaccttcataccctactgtagtatggctcatgcacaactgtgcttccacggacacagagacgccgttaagttcttcgttgccgtcccgggccaagtgattagtccccagtcaagctccagtggaacagacttgactggcgacaaggcgggacccagcgcacaggaaccagggagccagaccccccttaaatcaatgctcgtgatctcagggggcgaaggttatatcgacttccggatgggggatgagggcggggagtcagaactgcttggcgaggacctgcccctagaaccatccgtgacaaaggccgagcgatcacatctcattgtgtggcaagtaatgtacggcaacgagtag

SEQ ID NO: 142491 - DNA, 3924 bp, Artificial Sequence
  derived and/or modified sequence
atggaactcgaagatggagtagtgtatcaagaggagccaggcggaagtggcgctgtcatgtcagaacgcgtcagcgggctcgccggatcgatttaccgcgaatttgaaagacttattggcagatacgatgaagaggtcgtcaaggagctgatgcccctcgtggtggccgttctggagaatttggacagcgtgttcgcacaagatcaggaacaccaggtggagctcgaacttttgagagatgataatgagcagctgataacacagtatgagcgggaaaaagcgctgcgcaaacacgcggaagaaaaattcattgaatttgaagactctcaggaacaggagaaaaaagacttgcagactcgcgtcgagtccctagagagccagacccggcaattggagttgaaggcaaaaaactacgccgaccagataagcaggcttgaggaacgtgaagcagagttgaagaaggaatataacgccctgcaccagagacacactgaaatgatccataactacatggaacacctcgaacgcactaagctgcaccaactgagcggaagtgatcagctcgaaagtaccgctcactcccgcatcaggaaagagcgcccaattagcctaggtatttttcctctcccagcaggcgatggacttctgacgcccgatgctcagaagggaggcgagacccccggttcagagcagtggaagtttcaggagctctctcaaccgcgaagccacacaagtctaaaggacgaactctcagacgtgagtcaagggggtagcaaagccaccacacctgcatctaccgcaaactctgacgttgccacgattcctaccgacacaccactgaaagaagagaatgagggatttgtgaaagtcaccgacgcgccaaataaatcggagatcagtaagcacattgaggtgcaggtggctcaggaaaccagaaacgttagcacaggtagtgcggaaaatgaggaaaagtccgaagtgcaagctataatcgagagcacgccagagctggatatggataaagacctcagcgggtacaaggggagctctacccctacaaaggggattgaaaataaggccttcgaccgcaatacagagtctctgttcgaggagttgtcgtccgccggaagcggtctgatcggcgatgtagacgagggtgctgaccttctggggatgggcagggaggtggagaaccttattctcgagaacacccagcttctagaaacaaagaacgcactcaacatcgttaaaaacgacctgattgcaaaggtagatgagctgacctgcgagaaggacgttctgcagggcgaactggaagccgtgaaacaagcaaagctgaagcttgaagagaaaaatcgcgagcttgaagaggagttacgtaaggcacgggcagaggccgaagatgccaggcagaaggccaaggacgatgatgacagcgacatacctactgcacagagaaagagattcacccgggttgagatggcaagggttctcatggagcggaatcaatataaagagagactgatggaactacaagaggccgtgaggtggactgagatgatcagggcttcaagggagaaccccgctatgcaggagaagaagcggagcagtatttggcagtttttttctaggctttttagtagttcttcaaacaccaccaaaaaacctgaacctcccgttaatctcaagtacaatgctccgacgagtcatgtgacaccttcggtgaagaagcgcagttccactttaagccagttgccaggagataaatcaaaagcattcgatttcctttccgaagagactgaagcctcacttgcctcccgcagggagcagaaaagggaacagtacagacaagtgaaggcccacgtacagaaagaggacggacgggttcaggcgtttggctggtccttaccacagaaatataaacaggtgacaaacggacagggggaaaacaagatgaaaaacctacctgtgccggtgtacctccgaccattggacgaaaaagatacaagcatgaaactatggtgcgcggtgggggtaaatttaagtggagggaaaacacgcgacggcggatcagtagtgggggcatcagtgttctataaagatgtggccggactggacactgaggggtcaaagcagaggtccgcctcccagtccagcctggataagttagaccaggaactcaaagaacagcagaaggaactcaagaatcaagaagagcttagctccctggtgtggatatgcaccagcacgcacagcgctacaaaggtactgattattgacgcagtacagcctgggaacattcttgacagctttactgtatgtaattctcacgttttatgtatcgccagcgttcctggggctagggaaaccgactatcctgctggtgaggatctgtccgagtcaggacaggtggataaggcctctctgtgtggctctatgacctctaatagctccgctgaaacagatagcctgctcggaggaattaccgtggtgggctgtagcgcagaaggcgttaccggcgcagcaacctcaccttctaccaacggcgcatcccctgtgatggacaaaccccctgaaatggaagccgagaattcagaagttgacgagaatgtgccaaccgccgaggaggctactgaagccaccgagggcaatgcgggtagtgcggaagacaccgtggatatcagtcaaaccggagtttatacggagcacgtcttcactgatcccctcggagtccaaatcccagaggacttgtcacctgtgtaccagtcttccaacgattcagatgcttacaaagaccagatttcagtgcttcctaacgaacaggatctggtgcgcgaagaggcccagaaaatgagctcacttctgcccacaatgtggctgggcgctcagaatggttgcctgtatgtgcattcttcagtcgcacaatggcgaaagtgcctgcactctattaagttaaaggattctatcctatctattgttcacgtgaaaggaatcgtgcttgttgctctggctgatggcactttagccatttttcaccggggagttgacggacaatgggatctgtctaactaccatcttctagacctgggaaggcctcatcattctatacggtgtatgacagtggtgcatgataaagtttggtgcggttataggaataaaatctatgtcgtccagccaaaggcgatgaagattgaaaaatcattcgatgctcatcccagaaaggagtcgcaggtcaggcaactcgcttgggtcggggatggggtatgggtgtcaatccggctggattctactctgagactgtaccacgcccacacctaccagcacttacaagatgtggatattgagccctacgtttcaaagatgctggggaccggcaagttaggcttttcattcgttcgtataacagcactgatggtaagctgtaatcgactatgggttgggactggcaacggggtgatcatcagcatcccccttacagagaccaacaagacgtccggagtgcccggtaaccgaccaggctctgtgatcagagtgtacggggacgagaacagtgacaaggtaacacccggtacatttatcccgtattgctccatggctcacgctcagctgtgtttccatggtcaccgcgatgccgtgaagtttttcgtggctgtgcccggtcaagtgatctccccacagtcatcttcatccggtacagacctgacgggcgacaaagccggtccatccgcccaagaacccggatcccaaactcctcttaaatcgatgttggtcatctctggcggtgaaggctatatcgattttcgcatgggcgacgagggaggggagtctgagcttcttggggaggacctgcccttggagccttccgtgactaaagcagagagatcacaccttatcgtttggcaagtcatgtatgggaatgaatag

SEQ ID NO: 142492 - DNA, 4761 bp, Artificial Sequence
  derived and/or modified sequence
agttggtgcagcggcggttggggtgagagcgcctacgccacccctcccctcctccggccccggcccccaccccgccgggcccagccccagccccggcccgggctccagccctagtacccgtcccagcccgagtcgggtccgtcccgtgcgggcaggtgccgcccctctgccggcgacgccccgggccgcccgcccgtccgcttgccaccatggagctggaggacggtgtggtgtatcaggaggagcccggcggctccggggccgtgatgtcggagcgggtgtccggcctggccggctccatctaccgcgagttcgagcggcttatcgggcgctatgacgaggaggtggtcaaagagctgatgccgctggtggtggctgtgctggagaacctggactcggtgttcgcgcaggaccaggagcaccaggtggagctggagctgctgcgggacgacaacgagcagctcatcacccagtacgagcgggagaaggcgctgcgcaagcacgctgaggagaaattcattgaatttgaagactctcaagaacaggaaaaaaaggacttacagacccgagtggaatctttagaatctcaaacaagacaacttgagctgaaagcgaaaaactatgctgaccagattagcagacttgaagaaagagaagcagaactgaagaaggaatataatgcattacatcaaagacacactgagatgatccataattatatggaacatttagaaagaacaaaacttcatcagctctcagggagtgatcaactagaatccacagctcatagtagaattagaaaagaacgccctatatcattaggaattttcccattacctgctggagatggattgcttacacctgatgctcagaaaggaggagagacccctggatctgagcaatggaaatttcaggaattaagtcaaccacgttctcataccagcctgaaggatgagctttctgatgttagccaaggcggatctaaagctaccactccagcatcaacagctaattcagatgtggcaacaattcctactgatactcccttaaaggaagaaaacgaaggatttgtgaaggttacagatgcgccaaataaatcagagataagcaaacacattgaagtacaggtagcccaggaaactagaaatgtatctactggctctgctgaaaatgaagaaaagtcagaagttcaagcaatcatcgaatctactcctgagctggatatggacaaagatctcagtggatataaaggttcaagcactcccaccaaaggcatagagaacaaagcttttgatcgcaatacagaatctctctttgaagaactgtcttcagctggctcaggcctaataggagatgtggatgaaggagcagatttactaggaatgggtcgggaagttgagaatcttatattagaaaatacacaactgttggaaaccaaaaatgctttgaacatagtgaagaatgatttgatagcaaaagtggatgaactgacctgtgagaaagatgtgctgcaaggggaattggaggctgtgaagcaagccaaactgaaactagaggaaaagaacagagaattggaggaagagcttaggaaagctcgggcagaagctgaagatgcaaggcaaaaagcaaaagatgacgatgatagtgatattcccacagcccagaggaaacggtttactagagtagaaatggcccgtgttctcatggagcgaaaccagtataaagagagattgatggagcttcaggaagctgttcgatggacagagatgattcgggcatcacgagaaaatccagccatgcaggaaaaaaaaaggtcaagcatttggcagtttttcagccgacttttcagctcctcaagtaacacgactaagaagcctgaaccacctgttaatctgaagtacaatgcacccacgtctcatgttactccgtccgtcaagaaaagaagcagcaccttatctcagctccctggggataagtccaaagcctttgatttccttagtgaagaaactgaagctagtttagcctcacgcagagaacaaaagagagagcagtatcgtcaggtaaaagcacatgttcagaaggaagacggtagagtgcaggcttttggctggagtctgcctcagaagtacaaacaggtaaccaatggtcaaggtgaaaataagatgaaaaatttacctgtgcctgtctatctcagacctctggatgaaaaagatacatcaatgaagctgtggtgtgctgttggagtcaatttatctggtgggaagaccagagatggtggttctgttgttggagcaagtgtattttacaaggatgttgctggtttggatacagaaggcagtaaacagcgaagtgcctctcagagtagtttagataagttagatcaggaacttaaggaacagcagaaggagttaaaaaatcaagaagaattatccagtctagtttggatctgtaccagcactcattcggctacaaaagttcttattattgatgctgttcaacctggcaacatcctagacagtttcactgtttgcaactctcatgttctgtgcattgcaagtgtgccaggtgcacgagaaacagactaccctgcaggagaagatctttcagaatctggtcaggtagacaaagcatctttatgtggaagtatgacaagcaacagctcagcagagacagacagcctgttaggaggcatcacagtggttggttgttctgcagaaggtgtgacgggagctgccacttcccctagtacaaatggtgcttctccagtgatggataaaccaccagaaatggaagcagaaaatagtgaggttgatgaaaatgttccaacagcagaagaagcaactgaagctacagaagggaatgcggggtcagctgaagacacagtggacatctcccaaactggcgtctacacagagcatgtctttacagatcctttgggagttcagatcccagaagacctctccccagtgtatcagtcgagcaatgactcagatgcatataaagatcaaatatcagtactgccaaatgaacaagacttggtgagagaagaagcccagaaaatgagtagtcttttaccaactatgtggcttggagctcaaaatggctgtttgtatgtccattcatctgtagcccagtggaggaaatgtctccattccattaaacttaaagattcgattctcagtattgtacacgtgaagggaatcgtgttagtagccctggctgacggcacccttgcaatctttcacagaggagtggatgggcagtgggatttgtcaaactatcacctcttagaccttggacggcctcatcattccatccgttgcatgactgtggtacatgacaaagtctggtgtggctataggaacaaaatctatgtggtgcagccaaaggccatgaaaatagagaaatcttttgatgcacatcccaggaaggagagccaagtgcgacagcttgcgtgggtgggggatggcgtgtgggtctccattcgcttggattctacgctccgtctctatcatgcacacacttatcaacatctacaggatgtggacattgagccttatgtaagcaaaatgttaggtactggaaaactgggcttctcttttgtgagaattacagctcttatggtgtcttgtaatcgtttgtgggtggggacaggaaatggtgtcattatctccatcccattgacagaaacaaataaaacctcaggtgtaccaggaaatcgtcctggaagtgtaatccgtgtatatggtgatgaaaacagtgataaagtgactccagggacatttataccctattgttcaatggcacatgcacagctttgcttccatgggcaccgggatgctgtgaaattctttgtggcagtcccaggtcaagtcatcagcccacaaagtagcagtagtggcacggatctgacgggtgacaaagcagggccatctgcacaggagcctggtagtcagacgcccttgaagtctatgcttgtcatcagtggaggagagggctacatcgacttccgaatgggtgatgaaggtggagaatcagaacttcttggagaggatcttccacttgaaccttctgtcaccaaagcagaaaggagtcacttgatagtgtggcaagtgatgtatggcaatgagtgagcccatgggaaacaggtggagatggggaagccgtctcttctgcatggtttattttccctctatccttttatttaatgctcttttgtgagataagtttcaccacataatgtgtgagcattttttcctgttaactttatattacaaaatccgttctaccataacaatacagaggaactagctgtgttactgcaccagtgttataggtaacttcagtatattatgaacaaatcaaagaatgtttacttcctgcaaactggtgaattatagaaagcaatccagatgtggtttactctgccacagtctaatgtcattcacttcatttgatggggtcacttgttagctgtcactaataatggaattaatgggaaacacttgataaatgaaactgtaccgttaaatacaatagctgagttttccccagtgtattgtaaaattgacacacactaatacaagatggattatcaggatgtatctaaatgtcccgagagggttaaaagctaactgtaaattactttaactttcactttcaaatctgacaaatcttgtttatatggtatataaaactttgttttcatcagatttgggggggttttatattaaagaaattaagactacactatttaaataa

SEQ ID NO: 142493 - protein, 412 aa, Artificial Sequence
  derived and/or modified sequence
MGDGAVKQGFLYLQQQQTFGKKWRRFGASLYGGSDCALARLELQEGPEKPRRCEAARKVIRLSDCLRVAEAGGEASSPRDTSAFFLETKERLYLLAAPAAERGDWVQAICLLAFPGQRKELSGPEGKQSRPCMEENELYSSAVTVGPHKEFAVTMRPTEASERCHLRGSYTLRAGESALELWGGPEPGTQLYDWPYRFLRRFGRDKVTFSFEAGRRCVSGEGNFEFETRQGNEIFLALEEAISAQKNAAPATPQPQPATIPASLPRPDSPYSRPHDSLPPPSPTTPVPAPRPRGQEGEYAVPFDAVARSLGKNFRGILAVPPQLLADPLYDSIEETLPPRPDHIYDEPEGVAALSLYDSPQEPRGEAWRRQATADRDPAGLQHVQPAGQDFSASGWQPGTEYDNVVLKKGPK

SEQ ID NO: 142494 - protein, 258 aa, Artificial Sequence
  derived and/or modified sequence
MRPTEASERCHLRGSYTLRAGESALELWGGPEPGTQLYDWPYRFLRRFGRDKVTFSFEAGRRCVSGEGNFEFETRQGNEIFLALEEAISAQKNAAPATPQPQPATIPASLPRPDSPYSRPHDSLPPPSPTTPVPAPRPRGQEGEYAVPFDAVARSLGKNFRGILAVPPQLLADPLYDSIEETLPPRPDHIYDEPEGVAALSLYDSPQEPRGEAWRRQATADRDPAGLQHVQPAGQDFSASGWQPGTEYDNVVLKKGPK

SEQ ID NO: 142495 - DNA, 1239 bp, Artificial Sequence
  derived and/or modified sequence
atgggagatggagctgtgaagcaggggtttctatacctgcagcagcagcagacgttcggtaagaagtggcgccggtttggagcttcactgtacggcggcagtgactgtgccctggctagactagaactccaagaaggcccggagaaacctcgccggtgcgaggccgcacggaaggtcatcagattatccgattgtcttcgcgtagccgaggccgggggcgaagcgtcaagtcctagagatactagcgctttcttcctagagaccaaagaaaggttatatctcctggccgctccagctgcggagcggggtgattgggtacaagccatctgtctgctggcctttcccggccagcgtaaagagctttcaggcccggaggggaagcaatcacgtccatgcatggaggaaaatgaactgtatagttctgctgtcacagtcggccctcataaagagttcgcagtgaccatgcgccctactgaagcttccgagcgatgtcacttaagaggctcttatactctgcgcgcgggtgaatctgccctcgaactctggggcggcccagaaccaggaactcagctgtacgactggccttatcgtttcctccgacggttcggtagagacaaagtgactttcagctttgaagctggacggagatgtgtgtcgggcgagggcaattttgagtttgaaacccggcagggcaatgagatcttcctcgcccttgaagaagctatttccgctcagaaaaatgccgccccagcgaccccccagcctcaacccgcaacaatccccgccagcttgccccgcccagacagcccttacagccgacctcacgactccctgcctcccccgtccccaacaacccctgtgcccgcccctaggccccgaggtcaagagggcgagtacgctgtaccatttgacgcggtggcaagatcactggggaaaaactttcgcggcatcttggccgtcccaccgcagctcctggccgatccactctatgatagtatcgaagagacacttcccccacgacctgatcacatttatgatgaacccgagggggttgcggctctttctttgtacgattcaccccaagagcctcggggggaggcttggcggcggcaggccaccgcagaccgggaccccgccggccttcagcacgtacagcctgccggacaagacttttccgcgtccggctggcaacctggcacagagtacgacaacgtcgtcctgaaaaagggcccaaagtag

SEQ ID NO: 142496 - DNA, 1239 bp, Artificial Sequence
  derived and/or modified sequence
atgggagatggagctgtgaagcagggcttcctgtacctgcagcagcagcagaccttcggcaagaagtggaggagatttggagccagcctgtatggaggcagtgactgtgccctggcccggctggagctgcaggagggccctgagaagccccggcgctgtgaggccgccaggaaggtgatccggctgagtgactgcctgcgggtggccgaggccggcggggaggccagcagcccccgggacaccagcgccttcttcctggagaccaaggagcggctgtacctgctggccgccccagctgctgagcggggggactgggtgcaggccatctgcctgctggccttccctggccagaggaaggagctgagcggccctgagggcaagcagagccggccctgcatggaggagaatgagctgtacagcagcgctgtgacagtgggcccccacaaggagtttgctgtgaccatgaggcccacagaggccagcgagcgctgccacctgcggggcagctacaccctgcgggccggggagagcgccctggagctgtggggcggccctgagcccggcacccagctgtatgactggccctaccgcttcctgcggcgcttcggccgggacaaggtgaccttctcctttgaagctggaagaagatgtgtgtctggagagggcaactttgaatttgagacccggcagggcaatgagatcttcctggccctggaggaggccatcagcgcccagaagaatgctgccccagccaccccccagccccagcctgccaccatcccagccagcctgcccaggccagacagcccctacagccggccccatgacagcctgcccccacccagccccaccacccctgtgcctgccccccggccccggggccaggagggggagtatgctgtgccctttgatgctgtggcccggagcctgggcaagaacttccggggcatcctggccgtgcccccccagctgctggccgaccccctgtatgacagcattgaggagaccctgccccccaggccagaccacatctatgatgagcctgagggcgtggccgccctgagcctgtatgacagcccccaggagcccagaggagaggcctggaggcggcaggccacagctgaccgggaccctgctggcctgcagcacgtgcagcctgctggccaggacttcagcgccagcggctggcagcccggcacagaatatgacaacgtggtgctgaagaagggccccaagtag

SEQ ID NO: 142497 - DNA, 1239 bp, Artificial Sequence
  derived and/or modified sequence
atgggcgacggcgccgtgaagcagggcttcctgtacctgcagcagcagcagacctttggcaaaaagtggagacggtttggggcctccctgtatgggggcagtgactgtgcgctggcgcgcttggagttgcaggaggggcctgaaaagcctagacgctgcgaggcagctcgtaaggtcatccgcctaagcgattgcctccgggtcgctgaggccggcggagaggcatcatcccctagggacaccagtgcgttttttctggaaactaaggaaaggctctatctgttggcggcccctgccgccgaacgaggggactgggttcaggccatatgtctgcttgcctttccgggtcagagaaaggagctgtcagggccagagggaaaacagagcaggccttgtatggaagaaaatgaattgtattcctcagcagtcaccgtgggcccccacaaagagtttgccgtcactatgcgccctactgaggcttctgagaggtgccatctgagaggaagttacacccttcgggctggagaatccgcgttggagctctggggtgggcccgaaccgggcacccagctctatgactggccatacaggtttctgaggagatttgggcgagataaggtgaccttctcattcgaagcgggccggcgttgcgtgagcggagagggaaacttcgagtttgagactaggcaaggcaatgagatcttcctggcccttgaggaggccatctcagcccagaaaaacgccgctcctgccaccccccagccacagccagcaaccatcccagcctccctcccccggccagattcgccttatagtagacctcatgattctctgccgccgcctagcccaaccactcctgtgcctgccccaagacccaggggccaggagggagaatacgccgtacccttcgatgccgtggccagatctctcggcaagaatttcagaggcatcctagccgtgcccccgcagttactagcggatccactctatgatagcatagaggagacactcccgccaaggccagaccacatctatgacgaaccagagggagtggccgcattgtcgttatacgactcgccccaggagcccagaggcgaagcctggcggcgccaggctaccgctgaccgggatccagctggtcttcagcacgtccaacctgctggccaggacttctccgcctccggttggcaaccaggtactgagtacgacaatgtcgtgttgaagaaggggcctaaatag

SEQ ID NO: 142498 - DNA, 1239 bp, Artificial Sequence
  derived and/or modified sequence
atgggtgatggcgctgttaagcagggttttctgtacctccagcaacagcagacttttggaaagaaatggagaaggtttggagccagtttgtacggaggatcggactgcgccttagctagactggagcttcaggaaggacccgagaagcctagaaggtgcgaagcagctaggaaggtcatccggctgagtgactgtctcagagtggccgaagccggtggggaagcttcaagtccaagggacacatcagccttcttcctcgaaacgaaagaaaggctatacctgctcgccgcacctgcagctgagagaggagactgggtccaggcaatctgcttgttggcctttccaggtcagcggaaggaactgtccgggccagagggaaagcagtctcggccttgcatggaagagaacgagttgtattcaagtgccgtcacagttggccctcataaggaattcgccgtcactatgcgcccaacagaggcatccgagaggtgccacctcagggggtcatataccctacgggcaggggaaagcgctctcgagctctggggcggtcccgaaccaggtactcagctttacgattggccctacaggttcctccggcgatttggcagagataaggttacattttcatttgaagcgggacggaggtgtgtcagtggtgagggcaactttgagttcgagacacggcaggggaacgagatctttctggccctggaggaagccatttctgcgcagaagaacgctgcccctgccactccccagccccagcccgcaacaatccctgcttctttacccagacctgacagcccatatagtagaccccacgacagcctgcccccacctagccctaccaccccggtgccagctcccaggccacggggtcaggagggcgaatacgccgttccattcgacgctgtcgccaggtctctgggcaagaacttccgcggtattttggctgtgccacctcagttgctggccgatccactctatgatagtattgaggaaactctccccccaagacctgatcacatctacgacgaacctgaaggcgtggccgctctgagtctatacgactcccctcaggagcccagaggagaggcatggagaaggcaggccacagctgatagagatccagccggactgcagcacgtgcagccagctggacaggacttttcggccagtggttggcaaccgggtacagaatatgataatgtcgttctcaagaagggtcccaaatag

SEQ ID NO: 142499 - DNA, 1239 bp, Artificial Sequence
  derived and/or modified sequence
atgggcgacggcgccgtgaagcagggcttcctgtacctgcagcagcagcagaccttcggcaagaagtggagaagattcggcgccagcctgtacggcggcagcgactgcgccctggccagactggagctgcaggagggccccgagaagcccagaagatgcgaggccgccagaaaggtgatcagactgagcgactgcctgagagtggccgaggccggcggcgaggccagcagccccagagacaccagcgccttcttcctggagaccaaggagagactgtacctgctggccgcccccgccgccgagagaggcgactgggtgcaggccatctgcctgctggccttccccggccagagaaaggagctgagcggccccgagggcaagcagagcagaccctgcatggaggagaacgagctgtacagcagcgccgtgaccgtgggcccccacaaggagttcgccgtgaccatgagacccaccgaggccagcgagagatgccacctgagaggcagctacaccctgagagccggcgagagcgccctggagctgtggggcggccccgagcccggcacccagctgtacgactggccctacagattcctgagaagattcggcagagacaaggtgaccttcagcttcgaggccggcagaagatgcgtgagcggcgagggcaacttcgagttcgagaccagacagggcaacgagatcttcctggccctggaggaggccatcagcgcccagaagaacgccgcccccgccaccccccagccccagcccgccaccatccccgccagcctgcccagacccgacagcccctacagcagaccccacgacagcctgcccccccccagccccaccacccccgtgcccgcccccagacccagaggccaggagggcgagtacgccgtgcccttcgacgccgtggccagaagcctgggcaagaacttcagaggcatcctggccgtgcccccccagctgctggccgaccccctgtacgacagcatcgaggagaccctgccccccagacccgaccacatctacgacgagcccgagggcgtggccgccctgagcctgtacgacagcccccaggagcccagaggcgaggcctggagaagacaggccaccgccgacagagaccccgccggcctgcagcacgtgcagcccgccggccaggacttcagcgccagcggctggcagcccggcaccgagtacgacaacgtggtgctgaagaagggccccaagtag

SEQ ID NO: 142500 - DNA, 1936 bp, Artificial Sequence
  derived and/or modified sequence
ctaactcactggaaatgcaggaagcttgagtataaaactcactcagaaaaaaaaaaaaaaaagaaaaaaaagaacacacactcagaagaaaccgcagggcctatcagcctgtcgtcatcgagcagactagaatagtatagaaaaccctaggcagagaggaaatgaacttcagagaagggaaacacacggctaagaagagagaggcaagggcaggagtgaaggagagagctgaagcctggggctccgagatggtcagaggatgggagacggggcagtgaaacaaggcttcttgtatcttcagcagcagcagacgtttggaaagaaatggcgccgcttcggcgcctcactgtatggagggtcggactgcgccttggcccggctggagctgcaggagggcccggagaagcctcgtcggtgtgaggctgcccggaaggtcatccgcctcagtgactgcctgcgggtggccgaggccggcggagaggccagcagcccccgggacaccagtgccttcttcctggagaccaaggagcgcctgtacctcctggcggcccctgcagcggagcgcggcgactgggtgcaggccatctgcctcctggccttccccgggcagaggaaggagctctcggggccagagggaaagcagagccggccctgcatggaggaaaatgaattgtacagcagcgcagtcacagtcggcccccacaaggaatttgctgtgaccatgagacctacagaagccagtgagaggtgccacctgcgggggtcctataccctccgggctggggagagtgccctggagctgtggggtgggcccgagccagggacccagctgtacgactggccctacaggtttctgcggcgctttgggcgggacaaggtaaccttttcctttgaggcaggccgtcgctgcgtctctggagagggcaactttgagttcgaaacccggcaaggcaatgagatcttcttggccctggaagaggccatctctgcccagaagaatgctgcacccgctacaccccaaccgcagccagccacaatccccgcgtcgctgccccggcctgatagcccctactctcggccgcatgactcactgccgccgccttcacccaccacaccggtgcctgctccacggcctcggggccaggagggggagtatgccgtgcccttcgatgcggtggcccgttccttggggaagaacttcaggggcatcttggcagtccctcctcagctcctggccgaccctctgtacgacagcattgaggagaccctgccccctcgacctgaccacatatacgatgagcccgagggagtggctgccctgtccctctatgacagcccgcaggagccccggggtgaggcatggaggaggcaggcgacagctgacagggaccctgctggcctccagcatgtccagccagccgggcaggatttctctgcttctggctggcagccaggaactgagtatgacaatgttgtactaaagaaaggcccaaagtgacagaggcagcagagggatggtccaccgccccttggcttctgctggtgactcctcctggccactgcatcagaagaacctcctctgccccttctggagcccgaggcctggcctgtcttcgttggggctgataaattgcctctcccagggcctgctgggtgagtcaccatcccaaagcaggaagggtgccctggagagaaccaccctcctcctactctttttccacttcctcctctttctttccccagctgaggaggaacctggggcatttagggcagaggacaaaaggatgtcagcaattgcttgggctgcttggctatgcaagcctcctgcctgctgatggccacttcagggacagcctgggcccaggcacccagggggatggcggcagcttcctgcacctttcagatttcttggtggcattaaagcattttcagaaca

SEQ ID NO: 142501 - DNA, 1677 bp, Artificial Sequence
  derived and/or modified sequence
agagaagggaaacacacggctaagaagagagaggcaagggcaggagtgaaggagagagctgaagcctggggctccgagatggtcagaggatgggagacggggcagtgaaacaaggcttcttgtatcttcagcagcagcagacgtttggaaagaaatggcgccgcttcggcgcctcactgtatggagggtcggactgcgccttggcccggctggagctgcaggagggcccggagaagcctcgtcggtgtgaggctgcccggaaggtcatccgcctcagtgactgcctgcgggtggccgaggccggcggagaggccagcagcccccgggacaccagtgccttcttcctggagaccaaggagcgcctgtacctcctggcggcccctgcagcggagcgcggcgactgggtgcaggccatctgcctcctggccttcccctcggcccccacaaggaatttgctgtgaccatgagacctacagaagccagtgagaggtgccacctgcgggggtcctataccctccgggctggggagagtgccctggagctgtggggtgggcccgagccagggacccagctgtacgactggccctacaggtttctgcggcgctttgggcgggacaaggtaaccttttcctttgaggcaggccgtcgctgcgtctctggagagggcaactttgagttcgaaacccggcaaggcaatgagatcttcttggccctggaagaggccatctctgcccagaagaatgctgcacccgctacaccccaaccgcagccagccacaatccccgcgtcgctgccccggcctgatagcccctactctcggccgcatgactcactgccgccgccttcacccaccacaccggtgcctgctccacggcctcggggccaggagggggagtatgccgtgcccttcgatgcggtggcccgttccttggggaagaacttcaggggcatcttggcagtccctcctcagctcctggccgaccctctgtacgacagcattgaggagaccctgccccctcgacctgaccacatatacgatgagcccgagggagtggctgccctgtccctctatgacagcccgcaggagccccggggtgaggcatggaggaggcaggcgacagctgacagggaccctgctggcctccagcatgtccagccagccgggcaggatttctctgcttctggctggcagccaggaactgagtatgacaatgttgtactaaagaaaggcccaaagtgacagaggcagcagagggatggtccaccgccccttggcttctgctggtgactcctcctggccactgcatcagaagaacctcctctgccccttctggagcccgaggcctggcctgtcttcgttggggctgataaattgcctctcccagggcctgctgggtgagtcaccatcccaaagcaggaagggtgccctggagagaaccaccctcctcctactctttttccacttcctcctctttctttccccagctgaggaggaacctggggcatttagggcagaggacaaaaggatgtcagcaattgcttgggctgcttggctatgcaagcctcctgcctgctgatggccacttcagggacagcctgggcccaggcacccagggggatggcggcagcttcctgcacctttcagatttcttggtggcattaaagcattttcagaac

SEQ ID NO: 142502 - protein, 389 aa, Artificial Sequence
  derived and/or modified sequence
MEFPLAQICPQGSHEAPIPTFSTFQITDMTRRSCQNLGYTAASPQAPEAASNTGNAERAEEVPGEGSLFLQAETRAWFQKTQAHWLLQHGAAPAWFHGFITRREAERLLEPKPQGCYLVRFSESAVTFVLTYRSRTCCRHFLLAQLRDGRHVVLGEDSAHARLQDLLLHYTAHPLSPYGETLTEPLARQTPEPAGLSLRTEESNFGSKSQDPNPQYSPIIKQGQAPVPMQKEGAGEKEPSQLLRPKPPIPAKPQLPPEVYTIPVPRHRPAPRPKPSNPIYNEPDEPIAFYAMGRGSPGEAPSNIYVEVEDEGLPATLGHPVLRKSWSRPVPGGQNTGGSQLHSENSVIGQGPPLPHQPPPAWRHTLPHNLSRQVLQDRGQAWLPLGPPQ

SEQ ID NO: 142503 - DNA, 1170 bp, Artificial Sequence
  derived and/or modified sequence
atggagttccccctggcccagatctgcccccagggcagccacgaggcccccatccccaccttcagcaccttccagatcaccgacatgaccagaagaagctgccagaacctgggctacaccgccgccagcccccaggcccccgaggccgccagcaacaccggcaacgccgagagagccgaggaggtgcccggcgagggcagcctgttcctgcaggccgagaccagagcctggttccagaagacccaggcccactggctgctgcagcacggcgccgcccccgcctggttccacggcttcatcaccagaagagaggccgagagactgctggagcccaagccccagggctgctacctggtgagattcagcgagagcgccgtgaccttcgtgctgacctacagaagcagaacctgctgcagacacttcctgctggcccagctgagagacggcagacacgtggtgctgggcgaggacagcgcccacgccagactgcaggacctgctgctgcactacaccgcccaccccctgagcccctacggcgagaccctgaccgagcccctggccagacagacccccgagcccgccggcctgagcctgagaaccgaggagagcaacttcggcagcaagagccaggaccccaacccccagtacagccccatcatcaagcagggccaggcccccgtgcccatgcagaaggagggcgccggcgagaaggagcccagccagctgctgagacccaagccccccatccccgccaagccccagctgccccccgaggtgtacaccatccccgtgcccagacacagacccgcccccagacccaagcccagcaaccccatctacaacgagcccgacgagcccatcgccttctacgccatgggcagaggcagccccggcgaggcccccagcaacatctacgtggaggtggaggacgagggcctgcccgccaccctgggccaccccgtgctgagaaagagctggagcagacccgtgcccggcggccagaacaccggcggcagccagctgcacagcgagaacagcgtgatcggccagggcccccccctgccccaccagcccccccccgcctggagacacaccctgccccacaacctgagcagacaggtgctgcaggacagaggccaggcctggctgcccctgggccccccccagtag

SEQ ID NO: 142504 - DNA, 1170 bp, Artificial Sequence
  derived and/or modified sequence
atggagttcccactagcccagatttgcccccaaggctctcatgaggctccaattcctaccttttctacatttcaaatcacggacatgacacggaggtcctgtcagaacctcggttataccgctgcaagccctcaggccccagaggccgcaagtaacacaggcaacgcagagagggccgaagaagtgcctggggagggctccttgtttctgcaggccgagacaagggcctggttccagaagacccaggcccactggctgctgcaacacggggcggctcctgcatggtttcacggatttatcacccggcgagaagctgaacggctgttggaacctaagccacaaggctgctaccttgtgcgcttttccgaatccgctgtgaccttcgtgttgacttaccggtcacggacttgttgccggcatttcttgctggcacaattgagggatgggcgtcatgtcgtcctgggcgaggactccgcacatgccaggcttcaggatctcctgttacattatacagctcacccactgtcaccctacggagaaactcttaccgaaccactggctcgacagacacctgaacctgccgggttgtcactccggacagaggagagcaattttggcagcaagagtcaggaccctaacccccagtattcacccataattaaacaggggcaggcaccagtccctatgcaaaaggagggcgcgggggagaaggaaccttcacagctcctgcggcctaaacccccaattcccgctaaacctcaactgccaccggaagtctacacaatccccgtaccgaggcatcggcctgctcctcgccctaaaccaagtaatcccatctacaatgagcccgacgagccaatcgcattctacgctatgggcaggggttccccaggcgaggcgccctctaatatttatgtcgaggtggaggacgaaggcttgcctgccaccctggggcatccggttttgcgcaaatcgtggtctcgtcccgttccaggcggccaaaatacaggtggctctcagctgcacagcgagaactcagtgataggccaggggccccccctcccccaccaaccccctccagcctggagacatactttaccccacaacctttcaaggcaggtcctgcaggataggggacaggcctggctgccactgggaccacctcagtag

SEQ ID NO: 142505 - DNA, 1170 bp, Artificial Sequence
  derived and/or modified sequence
atggagttccccctggcccagatctgcccccagggcagccatgaggcccccatccccaccttcagcaccttccagatcacagacatgaccaggaggagctgccagaacctgggctacacagctgccagcccccaggcccctgaggccgccagcaacacaggaaatgctgagagagctgaggaggtgcctggagagggcagcctcttcctgcaggccgagacccgggcctggttccagaagacccaggcccactggctgctgcagcacggggccgccccagcctggttccacggcttcatcacccggcgggaggccgagcggctgctggagcccaagccccagggctgctacctggtgcgcttcagcgagagcgctgtgacctttgtgctgacctaccgcagcaggacctgctgccgccacttcctgctggcccagctgagagatggaagacatgtggtgctgggggaggacagcgcccacgcccggctgcaggacctgctgctgcactacacagcccaccccctgagcccctacggggagaccctgacagagcccctggcccggcagaccccagagcccgccggcctgagcctgaggacagaggagagcaactttggcagcaagagccaggaccccaacccccagtacagccccatcatcaagcagggccaggcccctgtgcccatgcagaaggagggcgctggggagaaggagcccagccagctgctgcggcccaagccacccatcccagccaagccccagctgcccccagaggtgtacaccatccctgtgcccaggcacaggcctgccccccggcccaagcccagcaaccccatctacaatgaaccagatgagcccatcgccttctacgccatgggccggggcagccctggagaggcccccagcaacatctacgtggaggtggaggatgagggcctgcctgccaccctgggccaccctgtgctgaggaagtcctggagcaggcctgtgcctgggggccagaacacaggaggcagccagctgcacagcgagaacagcgtcatcggccagggcccccccctgccccaccagcccccaccagcctggaggcacaccctgccccacaacctgagccggcaggtgctgcaggaccggggccaggcctggctgcccctgggccccccccagtag

SEQ ID NO: 142506 - DNA, 1170 bp, Artificial Sequence
  derived and/or modified sequence
atggagttccccctggcccagatctgcccccagggcagccacgaggcaccaattccaacgttcagcacgtttcagattacagacatgacccggcggagctgtcagaatctaggttataccgcagctagccctcaagcccccgaagctgcatctaacaccggcaatgctgagcgcgccgaagaggtacctggagagggaagcttattcctccaagccgaaacgcgcgcgtggtttcagaagactcaggcacactggctcctgcagcatggcgcagctccagcttggtttcacggtttcattaccaggagggaggcagaaagattgctggaacctaaaccacagggctgctacttagtgaggttcagcgagtctgccgttaccttcgtcctcacttaccggtctaggacatgctgcagacattttttgttggctcagctcagagatgggcgtcatgttgtgcttggggaagattctgcacacgctcgtcttcaggatctgcttctgcattacactgcccatccattatcgccctacggcgaaaccctgacagaacccctggcgcgccaaactcctgaacctgcaggcctatcgctgcgcacagaggagtctaatttcggcagcaagagccaagacccaaatcctcaatatagtcctatcatcaagcagggtcaagctcctgtcccgatgcaaaaggaaggtgccggcgaaaaagagccctcacagttgctccggcctaaaccccccatcccagcaaagcctcagctgcccccagaagtgtacaccatccccgtcccccgacatagacctgctcctcgtccaaaacccagcaatccaatctataacgaacctgacgaacctattgccttttacgctatgggtagggggtcccccggcgaggccccaagcaacatatatgtggaagtcgaggacgaaggcctgcccgccacactggggcatccggtgttacggaagtcgtggagcaggccagttccaggaggtcagaatactggggggtctcagctgcattccgagaacagcgtgatcggtcaggggcccccgcttccacatcagccaccacccgcttggaggcacaccttacctcataacttgagtcgccaggtactgcaggaccgcggtcaggcctggcttcctctggggccccctcagtag

SEQ ID NO: 142507 - DNA, 1170 bp, Artificial Sequence
  derived and/or modified sequence
atggagttccctctggcccaaatctgtccgcagggctcgcatgaggccccaattccaacattcagcacgtttcaaataaccgacatgacaaggagatcctgtcaaaacctgggctatactgctgcgtcacctcaagctcccgaggctgcatctaatacgggcaatgctgagcgagccgaggaggtgcctggggagggcagcttatttctacaggctgaaacacgagcgtggttccagaaaacccaggcccactggctgctccaacacggagctgcgcctgcctggttccatgggtttattactagaagggaggccgagcgcctgctggagccaaaaccccaggggtgctaccttgtgcgcttctctgagagcgccgtgacttttgtactcacttatagatcaaggacttgttgcagacactttctcttggcacagctcagagatggcaggcacgtcgtcctgggagaggattccgctcacgctagactacaggatttgctcttgcactatactgcccatcccctcagcccatatggggaaactctgacggaaccccttgcacgccagactcccgagcctgccggtctgagcctgaggaccgaggagagtaactttggttccaagagccaggaccctaacccccaatactccccaattattaaacaggggcaagctcctgtcccgatgcaaaaggagggagccggtgaaaaggagccctcccagttgttgcgtcctaagcccccaatcccagctaagcctcaacttcctccagaagtgtacaccatcccggtcccaagacaccggcctgccccacggcctaagccaagcaatcccatctacaacgaaccggatgagcctatcgccttctatgctatgggccgagggagccctggagaggccccaagcaacatttatgtcgaagtcgaagacgagggtcttccagccacgctggggcacccagtgctccggaagtcctggtcccggcctgttccaggcggacaaaacaccggaggcagtcagctgcactcggaaaactcagtgataggccaagggcctcccttaccccaccagcctccccctgcatggcgccacaccctacctcacaatcttagccgacaagtgctgcaagatagggggcaggcttggttgcctctaggaccaccccagtag

SEQ ID NO: 142508 - DNA, 1658 bp, Artificial Sequence
  derived and/or modified sequence
cgtgagtcctcgccagaactaaggctgtgggtaaggcgacatttcctgcccccggggccagggtgagaggagagatgatgagttgctgagtgtgcacacctttccggaacacatacacacaccctgctctgggatcccttgtgaggctgccctcatggagttccccctggcccagatatgtccccaagggagtcacgaagcccccatcccaaccttcagcaccttccagatcacagacatgacccgcaggagctgccagaacctgggctacactgcggcatctccccaggccccggaggctgcctccaacacagggaatgctgagagggcagaggaggtgcctggagaaggaagcctgttcctgcaggccgagacccgggcttggttccagaagacccaggcccactggctcctgcagcacggggcagcccctgcctggttccatggcttcatcacccggagggaggcagagaggctgctggagcccaagcctcaggggtgctacttggtgcggttcagcgagagcgcggtgaccttcgtgctgacttacaggagccggacttgctgccgccacttcctgctggcccagctcagggacgggcgccacgtggtgctgggcgaggacagcgcccacgcgcggctgcaggacctgctgctgcactacaccgcgcacccgctcagcccctacggggagacgctcaccgagcccctcgcccgacagactcctgagcctgcaggactttccctgaggaccgaagaatcaaactttggaagcaaaagccaggacccaaacccccagtacagcccaatcatcaaacaggggcaagccccagtcccgatgcagaaagagggggccggggagaaggagccctcccagctgctcaggcccaagcctcccatccccgccaaacctcagctgcccccagaagtctacacaatccctgttccacgacaccgcccggccccacgccccaagccctccaatcctatctacaatgagcctgatgaacccatagctttctatgccatgggccggggcagccctggggaagcccccagcaacatctatgtggaagtggaagatgagggcctacccgccacccttgggcaccctgtcctacggaagagctggtccaggcctgtcccaggaggccagaatacaggtggctcccagctgcattctgagaactctgtgattgggcaaggccctcccctgccccaccagcccccacccgcctggagacacaccctcccccacaatctttctagacaggtgcttcaggacagaggacaggcatggcttccccttgggcctcctcagtaggcggtctggcctgacccccaacaaagaagcctggaggtcagagaagcaaatgcggagcctgctccctcctaagaagatcccaagaatccaatggctcagtccttggtgatctaagacagcaaagaagtgtgcaaggagggccctgttagctcccactgtcctggtttctcctcctggagtctaatttccttggccctctgagccttttgagtctgggccctggtccaatgctgctgttgtctgaggaatggtttggtgagaacagatgttagaacttgtttgttgattcttgtctggctaataaatcatcaccaactgccttctcctacaggga

SEQ ID NO: 142509 - protein, 330 aa, Artificial Sequence
  derived and/or modified sequence
MADIIARLREDGIQKRVIQEGRGELPDFQDGTKATFHYRTLHSDDEGTVLDDSRARGKPMELIIGKKFKLPVWETIVCTMREGEIAQFLCDIKHVVLYPLVAKSLRNIAVGKDPLEGQRHCCGVAQMREHSSLGHADLDALQQNPQPLIFHMEMLKVESPGTYQQDPWAMTDEEKAKAVPLIHQEGNRLYREGHVKEAAAKYYDAIACLKNLQMKEQPGSPEWIQLDQQITPLLLNYCQCKLVVEEYYEVLDHCSSILNKYDDNVKAYFKRGKAHAAVWNAQEAQADFAKVLELDPALAPVVSRELQALEARIRQKDEEDKARFRGIFSH

SEQ ID NO: 142510 - DNA, 993 bp, Artificial Sequence
  derived and/or modified sequence
atggccgacattattgcacggctccgggaagacggcattcagaagcgagttatccaggagggccgaggagaactgcctgactttcaagacggaaccaaggccacttttcactaccggacattgcacagtgacgacgaggggaccgtgctcgacgatagcagagcgagaggaaagccaatggagctgatcattggaaagaaatttaaactgcccgtctgggagaccattgtttgcaccatgagggagggcgagatagcccagttcctttgcgatattaagcatgttgttctgtatcccttggtcgctaaatcactgcgaaatattgcggtcggaaaggatcccttggagggccagcggcattgctgtggcgtggcacagatgagggaacactcttcactggggcatgccgaccttgatgctctccaacaaaaccctcagcctctgatttttcacatggaaatgcttaaggttgagtcccctgggacttatcagcaagacccatgggccatgacagatgaagagaaagctaaagccgttcccctcattcaccaagaggggaatcgtctctaccgggagggtcatgtgaaagaggccgcagctaaatattacgacgcgatagcctgtctgaagaatctgcaaatgaaggagcaacccggatcacctgagtggatccagctcgaccagcagattactcccctgctgttgaattactgccagtgcaagctcgttgtcgaggaatactatgaggtgctggaccactgctcgtctattcttaacaagtacgatgataatgtcaaagcttacttcaaacgtggaaaggctcacgcggcagtgtggaacgcccaggaggcccaggcggacttcgcgaaagtcctggaattagacccagctcttgcccctgtagtaagtcgggagctgcaggcgcttgaagccaggatcaggcagaaggacgaagaggacaaggcccgatttagaggcatctttagccactag

SEQ ID NO: 142511 - DNA, 993 bp, Artificial Sequence
  derived and/or modified sequence
atggctgacatcatcgcccggctgcgggaggatggcatccagaagagggtcatccaggagggccgcggggagctgcctgacttccaggacggcaccaaggccaccttccactaccgcaccctgcacagtgatgatgagggcaccgtgctggatgacagccgggcccggggcaagcccatggagctgatcatcggcaagaagttcaagctgcctgtgtgggagaccatcgtgtgcaccatgagggagggggagatcgcccagttcctgtgtgacatcaagcacgtggtgctgtaccccctggtggccaagagcctgaggaacattgctgtgggcaaggaccccctggagggccagaggcactgctgcggcgtggcccagatgagggagcacagcagcctgggccacgccgacctggatgccctgcagcagaacccccagcccctcatcttccacatggagatgctgaaggtggagagccctggcacctaccagcaggacccctgggccatgacagatgaggagaaggccaaggctgtgcccctcatccaccaggagggcaacagactctaccgggagggccacgtgaaggaggccgccgccaagtactatgatgccatcgcctgcctgaagaacctgcagatgaaggagcagcccggcagccctgagtggatccagctggaccagcagatcacccccctgctgctgaactactgccagtgcaagctggtggtggaggagtactatgaggtgctggaccactgcagcagcatcctgaacaagtatgatgacaacgtgaaggcctacttcaagaggggcaaggcccacgccgctgtgtggaatgcccaggaggcccaggccgactttgccaaggtgctggagctggaccctgccctggcccctgtggtgtcccgggagctgcaggccctggaggcccgcatccggcagaaggatgaggaggacaaggcccgcttccggggcatcttcagccactag

SEQ ID NO: 142512 - DNA, 993 bp, Artificial Sequence
  derived and/or modified sequence
atggccgacatcatcgcccggctgcgggaggacggcatccagaagagagtgatccaggaaggaagaggagagctccctgattttcaggatggtacaaaagctaccttccactaccgcactctgcattccgatgacgagggcacagtactggacgactcacgggctcgcggaaagcccatggaactgatcatcggaaagaagtttaagctgcctgtttgggagaccatcgtctgcaccatgagagagggcgaaatagcccagttcttatgtgatatcaagcacgtggtgctgtacccgttggtggccaaatcccttaggaacattgctgtgggtaaggacccactggagggtcagaggcattgctgtggggtagcacagatgcgggagcattcgagcttgggacacgccgacctagacgcactgcagcagaatccgcaacccctgatctttcatatggaaatgctcaaggtggaatcaccaggcacttatcagcaggatccctgggccatgacagacgaagagaaagctaaagcagtgcctctgattcaccaagaaggaaaccggctgtaccgggagggtcatgttaaggaagccgctgccaaatattatgatgctatagcttgcctcaagaatctgcaaatgaaggaacagcctggctccccagagtggattcagctggaccagcaaataactccactactgctcaactactgccaatgtaaacttgtcgttgaggaatattacgaagtgctggatcactgctcatctattttaaacaagtacgacgacaacgtcaaggcctactttaaaagaggaaaggctcatgctgccgtctggaacgcccaggaagcccaggctgattttgccaaggtccttgagctggacccagctcttgccccggtcgtaagccgggagctgcaggcactggaagcccggatccgtcagaaggatgaagaagataaagcaaggtttagggggatcttcagtcattag

SEQ ID NO: 142513 - DNA, 993 bp, Artificial Sequence
  derived and/or modified sequence
atggctgatattatagccagactcagggaagacggaatccagaagcgggtcatccaggaaggacggggtgagctgcccgattttcaggacggtaccaaggcaacgtttcactatcgaacgctgcacagcgatgacgaaggtacggtgctggatgattccagagcgagaggaaagccgatggagttaatcattgggaaaaaattcaagctgccagtttgggaaaccatcgtgtgtaccatgagggagggagaaattgctcagttcctgtgcgacatcaagcatgtggtcctgtatccactggtggctaaaagcctgcgcaatatcgctgtgggcaaagaccccctcgagggccaacggcactgctgcggggtcgcccagatgagggaacactcttcgctcgggcacgccgacctcgacgctttacagcagaaccctcagcctctgattttccacatggagatgttgaaggtcgaatcacccggaacgtaccaacaggacccttgggccatgacagacgaagagaaagctaaggccgtccctctaatccaccaagaaggaaatcggttatatagggaaggccacgtgaaagaagcagccgctaagtattacgacgccattgcctgcctgaagaacctccagatgaaagaacagcccggatcccccgaatggattcagcttgaccagcagattacccccctgctgctaaactactgccaatgtaagttggtggtcgaagaatattacgaggttctcgaccactgtagctctattctcaacaaatatgatgacaacgtcaaggcctacttcaagcgcggtaaagcccatgcagctgtttggaacgcgcaggaagcccaagcagatttcgcaaaagttctggaacttgaccctgctctggctcccgttgtcagtcgtgaactccaggcactggaggcgagaatccgacagaaggacgaagaggataaggcccgttttaggggaattttttctcattag

SEQ ID NO: 142514 - DNA, 1221 bp, Artificial Sequence
  derived and/or modified sequence
ccctcaaccaaaatggcgctagctcggaagctgccgaggtgctaggagttgccgaagcaagtccggaagctaccgagcgagtccggaagttgccgaaagggagcagcggggaaggaggatggcggatatcatcgcaagactccgggaggacgggatccaaaaacgtgtgatacaggaaggccgaggagagctcccggactttcaagatgggaccaaggccacgttccactaccggacgctgcacagtgacgacgagggcaccgtgctggacgacagccgggctcgtggcaagcccatggagctcatcattggcaagaagttcaagctgcctgtgtgggagaccatcgtgtgcaccatgcgagaaggggagattgcccagttcctctgtgacatcaagcatgtggtcctgtacccgctggtggccaagagtctccgcaacatcgcggtgggcaaggaccccctggagggccagcggcactgctgcggtgttgcacagatgcgtgaacacagctccctgggccatgctgacctggacgccctgcagcagaacccccagcccctcatcttccacatggagatgctgaaggtggagagccctggcacgtaccagcaggacccatgggccatgacagacgaagagaaggcaaaggcagtgccacttatccaccaggagggcaaccggttgtaccgcgaggggcatgtgaaggaggctgctgccaagtactacgatgccattgcctgcctcaagaacctgcagatgaaggaacagcctgggtcccctgaatggatccagctggaccagcagatcacgccgctgctgctcaactactgccagtgcaagctggtggtcgaggagtactacgaggtgctggaccactgctcttccatcctcaacaagtacgacgacaacgtcaaggcctacttcaagcggggcaaggcccacgcggccgtgtggaatgcccaggaggcccaggctgactttgccaaagtgctggagctggacccagccctggcgcctgtggtgagccgagagctgcaggccctggaggcacggatccggcagaaggacgaagaggacaaagcccggttccgggggatcttctcccattgacaggagcacttggccctgccttacctgccaagcccactgctgcagctgccagcccccctgcccgtgctgcgtcatgcttctgtgtatataaaggcctttatttatctctc

SEQ ID NO: 142515 - DNA, 993 bp, Artificial Sequence
  derived and/or modified sequence
atggccgacatcatcgccagactgagagaggacggcatccagaagagagtgatccaggagggcagaggcgagctgcccgacttccaggacggcaccaaggccaccttccactacagaaccctgcacagcgacgacgagggcaccgtgctggacgacagcagagccagaggcaagcccatggagctgatcatcggcaagaagttcaagctgcccgtgtgggagaccatcgtgtgcaccatgagagagggcgagatcgcccagttcctgtgcgacatcaagcacgtggtgctgtaccccctggtggccaagagcctgagaaacatcgccgtgggcaaggaccccctggagggccagagacactgctgcggcgtggcccagatgagagagcacagcagcctgggccacgccgacctggacgccctgcagcagaacccccagcccctgatcttccacatggagatgctgaaggtggagagccccggcacctaccagcaggacccctgggccatgaccgacgaggagaaggccaaggccgtgcccctgatccaccaggagggcaacagactgtacagagagggccacgtgaaggaggccgccgccaagtactacgacgccatcgcctgcctgaagaacctgcagatgaaggagcagcccggcagccccgagtggatccagctggaccagcagatcacccccctgctgctgaactactgccagtgcaagctggtggtggaggagtactacgaggtgctggaccactgcagcagcatcctgaacaagtacgacgacaacgtgaaggcctacttcaagagaggcaaggcccacgccgccgtgtggaacgcccaggaggcccaggccgacttcgccaaggtgctggagctggaccccgccctggcccccgtggtgagcagagagctgcaggccctggaggccagaatcagacagaaggacgaggaggacaaggccagattcagaggcatcttcagccactag

SEQ ID NO: 142516 - protein, 396 aa, Artificial Sequence
  derived and/or modified sequence
MPQLQFKDAFWCRDFTAHTGYEVLLQRLLDGRKMCKDMEELLRQRAQAEERYGKELVQIARKAGGQTEINSLRASFDSLKQQMENVGSSHIQLALTLREELRSLEEFRERQKEQRKKYEAVMDRVQKSKLSLYKKAMESKKTYEQKCRDADDAEQAFERISANGHQKQVEKSQNKARQCKDSATEAERVYRQSIAQLEKVRAEWEQEHRTTCEAFQLQEFDRLTILRNALWVHSNQLSMQCVKDDELYEEVRLTLEGCSIDADIDSFIQAKSTGTEPPGEVRLADSAASRFSGLLHGSPKTTSLAASAASTETLTPTPERNEGVYTAIAVQEIQGNPASPAQEYRALYDYTAQNPDELDLSAGDILEVILEGEDGWWTVERNGQRGFVPGSYLEKL

SEQ ID NO: 142517 - protein, 416 aa, Artificial Sequence
  derived and/or modified sequence
MMPQLQFKDAFWCRDFTAHTGYEVLLQRLLDGRKMCKDMEELLRQRAQAEERYGKELVQIARKAGGQTEINSLRASFDSLKQQMENVGSSHIQLALTLREELRSLEEFRERQKEQRKKYEAVMDRVQKSKLSLYKKAMESKKTYEQKCRDADDAEQAFERISANGHQKQVEKSQNKARQCKDSATEAERVYRQSIAQLEKVRAEWEQEHRTTCEAFQLQEFDRLTILRNALWVHSNQLSMQCVKDDELYEEVRLTLEGCSIDADIDSFIQAKSTGTEPPAPVPYQNYYDREVTPLTSSPGIQPSCGMIKRFSGLLHGSPKTTSLAASAASTETLTPTPERNEGVYTAIAVQEIQGNPASPAQEYRALYDYTAQNPDELDLSAGDILEVILEGEDGWWTVERNGQRGFVPGSYLEKL

SEQ ID NO: 142518 - DNA, 1191 bp, Artificial Sequence
  derived and/or modified sequence
atgccacaactgcagttcaaagacgccttctggtgccgtgatttcacggctcacaccggctacgaagtcctgctccagcgtttgcttgacggacgtaagatgtgcaaagacatggaagagctgcttcgccagcgggcccaggctgaagaacggtatggtaaggagctcgtgcagattgccaggaaggccgggggccagaccgagatcaacagcctcagagcatcttttgacagtttaaagcagcagatggaaaacgtgggtagctcacatatccaactggcactcacccttagagaggaacttaggtccttggaggagttcagagagaggcaaaaggaacagagaaagaagtacgaggccgtaatggaccgggttcagaaaagcaagctgagcctctataagaaggcgatggagtcgaagaagacctacgagcaaaagtgtagagacgctgacgacgcagaacaggccttcgaaagaatcagcgcaaacggccaccaaaaacaagtggagaagtctcagaacaaggcgcgacagtgtaaagatagcgccacagaggcagagagggtttaccggcaaagtatagcgcaactggaaaaggtacgagctgaatgggaacaggaacaccgaacgacttgtgaggctttccagctccaggagttcgaccgactgacaattctgcggaatgcgctttgggtgcacagcaatcaactgagcatgcagtgtgtgaaggatgatgagctttatgaggaagtcaggcttaccctagaggggtgctcaatcgacgctgacatagattcattcatccaggccaagtccactggaacggagccaccaggcgaggtgcgccttgcagactcggccgcttctcgtttttctggactgctgcacgggagccctaaaaccacctcattggccgcctccgcagccagtacggagacactgactcctaccccggagaggaatgaaggggtgtacactgccatagcagtgcaggagatccagggcaaccccgctagtcccgctcaggagtacagggccttgtacgactacaccgctcaaaacccagatgagttggacctttcagcaggagatatcctggaggtgatactggagggtgaggatggatggtggaccgtagaacggaacggacagcgggggttcgtgcctgggtcttatttagagaagctctag

SEQ ID NO: 142519 - DNA, 1251 bp, Artificial Sequence
  derived and/or modified sequence
atgatgccccagctgcagttcaaagacgccttttggtgtagagatttcacggctcatacaggctatgaggtgttgttgcagcgcttgctcgacgggcgcaaaatgtgcaaagatatggaggagctgctgaggcagcgtgctcaggcggaagagcgctacggaaaggagctggtccaaattgctcgcaaggctggcggccagacggaaatcaactccctacgcgcctctttcgattcccttaaacagcagatggagaacgtcggttcaagtcatatccagctggccctgacccttcgcgaagaactccgtagtctggaggagttcagagaaagacagaaggaacagagaaagaagtacgaggctgtgatggatagagtacagaagagtaaactttctttgtataagaaagcaatggagagcaaaaagacctatgagcagaaatgcagagatgccgacgacgcagaacaagcctttgagagaatcagcgccaatggccatcagaagcaagtcgagaagtcccaaaacaaggccagacagtgtaaagactctgcaacagaagctgagagggtatatcgtcagtccatagcacagctggagaaggttagggctgagtgggaacaggagcatcgcactacatgtgaggcctttcagctgcaggagttcgatagactgacaatccttcgtaacgctttgtgggtccatagtaaccagctgtcaatgcaatgcgttaaggacgacgagctatacgaagaggttagactcactctggagggctgctcaatcgatgcagatattgatagctttatacaagccaagtcaaccggcacagaaccccctgctccggttccttatcagaactactacgacagggaggtcacacctctcacatcaagtcccggtattcaaccgtcctgtggcatgataaagagattttccggactgttgcacgggagtcctaagactaccagcttggctgcgtctgccgccagcacagaaacattgacgccaacacctgagcggaacgagggcgtctatactgctattgccgtgcaggagatccaaggaaacccagcatcgccagcgcaggaataccgcgcactctacgattacaccgcccaaaacccagacgagcttgatctgagtgccggggatatactggaagttatcctggaaggtgaagatggctggtggaccgtcgagcggaatggacagaggggattcgtacccggttcatatctcgagaagttgtag

SEQ ID NO: 142520 - DNA, 1191 bp, Artificial Sequence
  derived and/or modified sequence
atgccccagctgcagttcaaggatgccttctggtgccgggacttcaccgcccacacaggctatgaggtgctgctgcagaggctgctggatggcaggaagatgtgcaaggacatggaggagctgctgcggcagagggcccaggccgaggagagatatggcaaggagctggtgcagatcgccaggaaggccggcggccagacagagatcaacagcctgcgggccagctttgacagcctgaagcagcagatggagaatgtgggcagcagccacatccagctggccctgaccctgcgggaggagctgcggagcctggaggagttccgggagcggcagaaggagcagaggaagaagtatgaggccgtgatggacagagtgcagaagagcaagctgagcctgtacaagaaggccatggagagcaagaagacctatgagcagaagtgcagagatgctgatgatgctgagcaggcctttgagcgcatcagcgccaacggccaccagaagcaggtggagaagagccagaacaaggcccggcagtgcaaggacagcgccacagaggccgagcgggtgtaccggcagagcatcgcccagctggagaaggtgcgggcagagtgggagcaggagcacaggaccacctgtgaggccttccagctgcaggagtttgaccggctgaccatcctgagaaatgccctgtgggtgcacagcaaccagctgtccatgcagtgtgtgaaggatgatgagctgtatgaggaggtgcggctgaccctggagggctgcagcattgatgctgacatcgacagcttcatccaggccaagagcactggaacagagcccccaggagaggtgcggctggccgacagcgctgccagccgcttcagcggcctgctgcacggcagccccaagaccaccagcctggccgccagcgctgccagcacagagaccctgacccccaccccagagagaaatgaaggagtgtacacagccatcgctgtgcaggagatccagggcaacccagccagccctgcccaggagtaccgggccctgtatgactacacagcccagaacccagatgagctggacctgtctgctggggacatcctggaggtgatcctggagggagaagatggctggtggacagtggagagaaatggccagaggggctttgtgcccggcagctacctggagaagctgtag

SEQ ID NO: 142521 - DNA, 1251 bp, Artificial Sequence
  derived and/or modified sequence
atgatgccccagctgcagttcaaggatgccttctggtgccgggacttcaccgcccacacaggctatgaggtgctgctgcagaggctgctggatggcaggaagatgtgcaaggacatggaggagctgctgcggcagagggcccaggccgaggagagatatggcaaggagctggtgcagatcgccaggaaggccggcggccagacagagatcaacagcctgcgggccagctttgacagcctgaagcagcagatggagaatgtgggcagcagccacatccagctggccctgaccctgcgggaggagctgcggagcctggaggagttccgggagcggcagaaggagcagaggaagaagtatgaagctgtgatggacagagtgcagaagagcaagctgagcctgtacaagaaggccatggagagcaagaagacctatgagcagaagtgcagagatgctgatgatgctgagcaggcctttgagcgcatcagcgccaacggccaccagaagcaggtggagaagagccagaacaaggcccggcagtgcaaggacagcgccacagaagctgagcgggtgtaccggcagagcatcgcccagctggagaaggtgcgggcagagtgggagcaggagcacaggaccacctgtgaggccttccagctgcaggagtttgaccggctgaccatcctgagaaatgccctgtgggtgcacagcaaccagctgtccatgcagtgtgtgaaggatgatgagctgtatgaggaggtgcggctgaccctggagggctgcagcattgatgctgacatcgacagcttcatccaggccaagagcactggaacagagcccccagcccctgtgccctaccagaactactatgaccgggaggtgacccccctgaccagcagccctggcatccagcccagctgtggcatgatcaagcgcttcagcggcctgctgcacggcagccccaagaccaccagcctggccgccagcgctgccagcacagagaccctgacccccaccccagagagaaatgaaggagtgtacacagccatcgctgtgcaggagatccagggcaacccagccagccctgcccaggagtaccgggccctgtatgactacacagcccagaacccagatgagctggacctgtctgctggggacatcctggaggtgatcctggagggagaagatggctggtggacagtggagagaaatggccagaggggctttgtgcccggcagctacctggagaagctgtag

SEQ ID NO: 142522 - DNA, 1191 bp, Artificial Sequence
  derived and/or modified sequence
atgccccagctgcagttcaaggacgccttctggtgccgggacttcactgcccatactggttacgaggtcttactgcaacgactattggacggcagaaaaatgtgcaaagatatggaggagcttcttaggcagagggcccaggccgaagagaggtacggcaaagagctggtgcagatcgcgcggaaggctggcgggcagacagagatcaatagccttcgagccagcttcgattcacttaaacagcaaatggaaaacgtggggagcagccatattcagttggcgcttactctgcgagaagagctgagatctctggaggaatttagggagcggcagaaagaacaacggaaaaaatatgaagcagtgatggaccgggtccagaagtccaagctctcgctttacaagaaagccatggaatctaagaagacttacgaacagaagtgccgtgacgccgatgatgccgagcaggctttcgaaagaataagcgcaaacggacaccagaaacaagtggagaaatcccagaacaaggccaggcagtgtaaggatagcgctactgaggccgagagagtctacagacagtctattgctcaattagaaaaagtgagagccgagtgggagcaggagcacaggaccacctgcgaggcctttcagctacaggaatttgatcgccttacgatactacgcaatgctctgtgggttcactcaaaccaattgagtatgcagtgcgtcaaagatgacgagctgtacgaggaggtgcggctgaccttggagggctgttccatagatgctgatatagactccttcatccaggccaaatctaccggtacagagccacccggcgaggtcaggctcgctgactcagcggctagccgcttcagcggccttctccacggaagtcctaaaactacgtccctggctgccagcgccgcttctacagaaacactgactccaacccccgagcgcaacgagggcgtctatacagccattgcagttcaagaaatccagggcaaccccgcttctcctgctcaagaatacagggctctatatgattacaccgcccagaacccagatgagctggacttgtccgctggtgacatcctggaagtgattctggaaggggaggatggttggtggaccgttgaaaggaacggacagagggggttcgtgccaggcagttacctggaaaaactctag

SEQ ID NO: 142523 - DNA, 1251 bp, Artificial Sequence
  derived and/or modified sequence
atgatgccccagctgcagttcaaggacgccttctggtgccgggacttcactgctcatacaggctatgaagtcctcctgcaaaggctccttgatggccgcaaaatgtgcaaggacatggaggagctccttaggcagcgcgcccaggctgaggagagatacggtaaagagctggtgcaaattgctaggaaggccggcggccaaaccgagatcaacagcttaagggcatcgtttgacagcctgaaacaacaaatggagaatgtcggcagctcgcacatccagctagcacttactcttcgcgaggagttgagatccctggaagagtttagggaacgccagaaggagcaacgcaaaaagtatgaggcggtgatggaccgcgtgcagaagtccaaactgtcactgtataaaaaggccatggagtctaagaagacctacgaacagaagtgcagagatgccgatgacgcagaacaggctttcgagagaatatcggccaacggacaccagaagcaggttgaaaaaagtcaaaataaagcccgacagtgtaaggactctgctacagaggcggaacgtgtgtaccgacagtccattgcacagttggaaaaagttagagcagaatgggagcaagaacatcgcacaacttgtgaagccttccagctacaggaatttgatcgcttgaccattctaagaaatgctctctgggtgcactctaaccaactgagcatgcagtgcgtcaaggacgacgaattgtacgaggaggtgcggttgactctcgaaggatgtagcattgacgcagatatcgacagttttatacaggccaagagcactgggaccgagcctccagctccggtaccgtaccagaattactacgaccgcgaggtgacgccactaactagctcccccggcattcaaccttcgtgtgggatgattaagcggttttcgggactcctgcatgggtctccaaaaactacctcgttagccgcgagtgcggcaagtacagaaacactgactcccaccccagaacgaaacgagggggtgtatacagccattgctgtgcaggaaatccaggggaatccagctagcccggctcaggagtacagggctctctatgattataccgcacaaaatccagatgagcttgatctcagtgcgggggacatcctcgaagtgattctggagggcgaagatggctggtggacagtcgagaggaacgggcagcgcggcttcgtccccgggtcctatctagaaaaactttag

SEQ ID NO: 142524 - DNA, 1191 bp, Artificial Sequence
  derived and/or modified sequence
atgcctcagctgcagttcaaggatgcgttctggtgccgcgattttactgcccatactggttatgaagtcctgctgcaacgcctgctagacggcagaaaaatgtgtaaagatatggaggagctcctgcggcagcgagcgcaggctgaagaacgctatgggaaggaacttgtccagatcgcacgtaaggccggtgggcagacagagatcaactccctgcgagccagctttgattcgctgaagcagcagatggagaacgtaggtagcagccacatccagctggctctgacattacgggaggaactccgtagtttagaagagtttcgtgaaaggcaaaaggaacagcggaaaaagtatgaagctgttatggatagagtacagaaatccaaactgtccttgtataaaaaggcgatggagtcaaagaagacgtatgaacagaagtgccgggatgcagacgacgctgagcaggcatttgaacgaatttccgccaatgggcatcagaagcaggtggagaagagccagaacaaggctcggcagtgcaaggattcagctacagaggctgagcgcgtgtatcgccagtccatagcccagctagagaaagtccgagctgaatgggagcaagaacataggacgacctgtgaggccttccagctccaggagtttgaccgactcactatcctacgcaatgcgctttgggtgcattctaaccaactgtctatgcagtgcgtcaaggatgacgagctgtacgaggaagtgcggttaacgctggaaggatgcagtatcgatgctgacatcgactccttcatccaggctaaatcaaccggtaccgagccacctggcgaggtgagactggcagactctgcagcgtcacggttttccgggctccttcacggcagcccaaaaacaacatctcttgcagccagcgctgctagcaccgaaactctaactcccactcctgagcgcaatgagggtgtctataccgccatcgctgtgcaggagatacaggggaaccccgctagtcctgcgcaagaatacagagccctttacgactatacggcccagaaccccgatgagttagacctctcagccggagatatcctggaggtcatcctggaaggagaggacggctggtggacagttgagcgtaacggccagcgtggcttcgtcccaggttcttacctggaaaaattatag

SEQ ID NO: 142525 - DNA, 1251 bp, Artificial Sequence
  derived and/or modified sequence
atgatgcctcaattacagtttaaggatgctttttggtgtcgcgacttcacagcccacactggttatgaggttctgctacagagacttctcgacggtaggaagatgtgcaaagatatggaagaactgctgagacagagggcacaggcagaagaacgctacggtaaggagttggttcagatagccagaaaggcaggagggcagaccgagattaattcacttcgcgcatccttcgatagcctgaagcaacagatggaaaacgtgggatcctctcatatccagctggcactgacccttagggaggagctgaggagcctggaagagttcagagaaagacagaaggagcagaggaaaaaatacgaggcagtcatggatagggtccagaaatccaagttgagcctgtataaaaaagctatggagagtaaaaagacatacgagcagaagtgtcgagacgccgacgacgctgagcaagctttcgagcgtatttctgccaacggacaccagaagcaagtcgaaaaatcacagaataaggctcgtcagtgtaaagatagtgccactgaggctgaaagggtttaccgccagagcatagcacagctggagaaagtgcgagccgagtgggaacaggagcatcggactacctgcgaggcctttcagctccaggagttcgaccgcctaacaatcttgaggaatgctttgtgggttcacagcaatcagttgtccatgcagtgcgtgaaggacgacgagttgtacgaagaagtgcgcctgaccttggaagggtgttccattgacgccgatatcgactcattcatccaggcgaaatccaccggcacagagcctcctgcacccgtgccataccagaactattatgaccgagaagtgacgcctctcacgtcttctcctggcatccagcccagttgtggaatgataaagcgcttctcgggtcttcttcacggcagcccaaaaactacgagcctcgctgcctctgcggcatcaacagagacactgacccctactccggagcgcaacgagggagtgtacactgctattgctgtgcaggagatccagggcaatcctgcttcaccggctcaagagtatagagcactgtatgactacactgcacaaaatccagatgagctggatctgtccgcgggtgatatcctcgaggtgatcctggagggtgaggatgggtggtggaccgtggagcgtaacggccaacgcggttttgtgcccggatcgtatttagagaaattgtag

SEQ ID NO: 142526 - DNA, 1798 bp, Artificial Sequence
  derived and/or modified sequence
acaaaccttcctgcgcaggcctcgggctgcctgcctgcctgcctgcctggcccggcccgagctccagcctgcctcttccactggccactgcctcccacccagggctggcatccctgctccctgccctgggtcccagactgtgtcctccatcaccgcagggtcggtgaggggctgggctggacaccagggcccgccctcccatcactgagctccactccttcctcattttgctgctgattctagccccaaacaaaacaggttgagctttttcctcccctcagaagctcctctctggctcgtggctgccttctgagtgttgcagacggcgccggccgggaaggggggcctgggccagccctgccaggactgggacgctgctgctggcgcctggccctccatcaggccagcctgtggcaggagagtgagctttgccgcggcagacgcctgaggatgatgccccagctgcagttcaaagatgccttttggtgcagggacttcacagcccacacgggctacgaggtgctgctgcagcggcttctggatggcaggaagatgtgcaaagacatggaggagctactgaggcagagggcccaggcggaggagcggtacgggaaggagctggtgcagatcgcacggaaggcaggtggccagacggagatcaactccctgagggcctcctttgactccttgaagcagcaaatggagaatgtgggcagctcacacatccagctggccctgaccctgcgtgaggagctgcggagtctcgaggagtttcgtgagaggcagaaggagcagaggaagaagtatgaggccgtcatggaccgggtccagaagagcaagctgtcgctctacaagaaggccatggagtccaagaagacatacgagcagaagtgccgggacgcggacgacgcggagcaggccttcgagcgcattagcgccaacggccaccagaagcaggtggagaagagtcagaacaaagccaggcagtgcaaggactcggccaccgaggcagagcgggtatacaggcagagcattgcgcagctggagaaggtccgggctgagtgggagcaggagcaccggaccacctgtgaggcctttcagctgcaagagtttgaccggctgaccattctccgcaacgccctgtgggtgcacagcaaccagctctccatgcagtgtgtcaaggatgatgagctctacgaggaagtgcggctgacgctggaaggctgcagcatagacgccgacatcgacagtttcatccaggccaagagcacgggcacagagccccccggtgaggtccggcttgcggacagcgcagcctctaggttctctggactgctgcacggaagtcccaagaccacttcgttggcagcttctgctgcgtccacagagaccctgacccccacccccgagcggaatgagggtgtctacacagccatcgcagtgcaggagatacagggaaacccggcctcaccagcccaggagtaccgggcgctctacgattatacagcgcagaacccagatgagctggacctgtccgcgggagacatcctggaggtgatcctggaaggggaggatggctggtggactgtggagaggaacgggcagcgtggcttcgtccctggttcctacctggagaagctttgaggaagggccaggagccccttcggacctgccctgccagtggagccagcagtgcccccagcactgtccccaccttgctagggcccagaaccaagcgtcccccagccccgagagggagcctgtcgtctcccagggaataaaggagtgcgttctgttc

SEQ ID NO: 142527 - DNA, 1896 bp, Artificial Sequence
  derived and/or modified sequence
tgtgggcgagggccctgtgcctgccccgggggaggttgcacaaaccttcctgcgcaggcctcgggctgcctgcctgcctgcctgcctggcccggcccgagctccagcctgcctcttccactggccactgcctcccacccagggctggcatccctgctccctgccctgggtcccagactgtgtcctccatcaccgcagggtcggtgaggggctgggctggacaccagggcccgccctcccatcactgagctccactccttcctcattttgctgctgattctagccccaaacaaaacaggttgagctttttcctcccctcagaagctcctctctggctcgtggctgccttctgagtgttgcagacggcgccggccgggaaggggggcctgggccagccctgccaggactgggacgctgctgctggcgcctggccctccatcaggccagcctgtggcaggagagtgagctttgccgcggcagacgcctgaggatgatgccccagctgcagttcaaagatgccttttggtgcagggacttcacagcccacacgggctacgaggtgctgctgcagcggcttctggatggcaggaagatgtgcaaagacatggaggagctactgaggcagagggcccaggcggaggagcggtacgggaaggagctggtgcagatcgcacggaaggcaggtggccagacggagatcaactccctgagggcctcctttgactccttgaagcagcaaatggagaatgtgggcagctcacacatccagctggccctgaccctgcgtgaggagctgcggagtctcgaggagtttcgtgagaggcagaaggagcagaggaagaagtatgaggccgtcatggaccgggtccagaagagcaagctgtcgctctacaagaaggccatggagtccaagaagacatacgagcagaagtgccgggacgcggacgacgcggagcaggccttcgagcgcattagcgccaacggccaccagaagcaggtggagaagagtcagaacaaagccaggcagtgcaaggactcggccaccgaggcagagcgggtatacaggcagagcattgcgcagctggagaaggtccgggctgagtgggagcaggagcaccggaccacctgtgaggcctttcagctgcaagagtttgaccggctgaccattctccgcaacgccctgtgggtgcacagcaaccagctctccatgcagtgtgtcaaggatgatgagctctacgaggaagtgcggctgacgctggaaggctgcagcatagacgccgacatcgacagtttcatccaggccaagagcacgggcacagagccccccgctccggtgccctaccagaactattacgatcgggaggtcaccccgctgaccagcagccctggcatacagccgtcctgcggcatgataaagaggttctctggactgctgcacggaagtcccaagaccacttcgttggcagcttctgctgcgtccacagagaccctgacccccacccccgagcggaatgagggtgtctacacagccatcgcagtgcaggagatacagggaaacccggcctcaccagcccaggagtaccgggcgctctacgattatacagcgcagaacccagatgagctggacctgtccgcgggagacatcctggaggtgatcctggaaggggaggatggctggtggactgtggagaggaacgggcagcgtggcttcgtccctggttcctacctggagaagctttgaggaagggccaggagccccttcggacctgccctgccagtggagccagcagtgcccccagcactgtccccaccttgctagggcccagaaccaagcgtcccccagccccgagagggagcctgtcgtctcccagggaataaaggagtgcgttctgttctc

SEQ ID NO: 142528 - DNA, 1191 bp, Artificial Sequence
  derived and/or modified sequence
atgccccagctgcagttcaaggacgccttctggtgcagagacttcaccgcccacaccggctacgaggtgctgctgcagagactgctggacggcagaaagatgtgcaaggacatggaggagctgctgagacagagagcccaggccgaggagagatacggcaaggagctggtgcagatcgccagaaaggccggcggccagaccgagatcaacagcctgagagccagcttcgacagcctgaagcagcagatggagaacgtgggcagcagccacatccagctggccctgaccctgagagaggagctgagaagcctggaggagttcagagagagacagaaggagcagagaaagaagtacgaggccgtgatggacagagtgcagaagagcaagctgagcctgtacaagaaggccatggagagcaagaagacctacgagcagaagtgcagagacgccgacgacgccgagcaggccttcgagagaatcagcgccaacggccaccagaagcaggtggagaagagccagaacaaggccagacagtgcaaggacagcgccaccgaggccgagagagtgtacagacagagcatcgcccagctggagaaggtgagagccgagtgggagcaggagcacagaaccacctgcgaggccttccagctgcaggagttcgacagactgaccatcctgagaaacgccctgtgggtgcacagcaaccagctgagcatgcagtgcgtgaaggacgacgagctgtacgaggaggtgagactgaccctggagggctgcagcatcgacgccgacatcgacagcttcatccaggccaagagcaccggcaccgagccccccggcgaggtgagactggccgacagcgccgccagcagattcagcggcctgctgcacggcagccccaagaccaccagcctggccgccagcgccgccagcaccgagaccctgacccccacccccgagagaaacgagggcgtgtacaccgccatcgccgtgcaggagatccagggcaaccccgccagccccgcccaggagtacagagccctgtacgactacaccgcccagaaccccgacgagctggacctgagcgccggcgacatcctggaggtgatcctggagggcgaggacggctggtggaccgtggagagaaacggccagagaggcttcgtgcccggcagctacctggagaagctgtag

SEQ ID NO: 142529 - DNA, 1251 bp, Artificial Sequence
  derived and/or modified sequence
atgatgccccagctgcagttcaaggacgccttctggtgcagagacttcaccgcccacaccggctacgaggtgctgctgcagagactgctggacggcagaaagatgtgcaaggacatggaggagctgctgagacagagagcccaggccgaggagagatacggcaaggagctggtgcagatcgccagaaaggccggcggccagaccgagatcaacagcctgagagccagcttcgacagcctgaagcagcagatggagaacgtgggcagcagccacatccagctggccctgaccctgagagaggagctgagaagcctggaggagttcagagagagacagaaggagcagagaaagaagtacgaggccgtgatggacagagtgcagaagagcaagctgagcctgtacaagaaggccatggagagcaagaagacctacgagcagaagtgcagagacgccgacgacgccgagcaggccttcgagagaatcagcgccaacggccaccagaagcaggtggagaagagccagaacaaggccagacagtgcaaggacagcgccaccgaggccgagagagtgtacagacagagcatcgcccagctggagaaggtgagagccgagtgggagcaggagcacagaaccacctgcgaggccttccagctgcaggagttcgacagactgaccatcctgagaaacgccctgtgggtgcacagcaaccagctgagcatgcagtgcgtgaaggacgacgagctgtacgaggaggtgagactgaccctggagggctgcagcatcgacgccgacatcgacagcttcatccaggccaagagcaccggcaccgagccccccgcccccgtgccctaccagaactactacgacagagaggtgacccccctgaccagcagccccggcatccagcccagctgcggcatgatcaagagattcagcggcctgctgcacggcagccccaagaccaccagcctggccgccagcgccgccagcaccgagaccctgacccccacccccgagagaaacgagggcgtgtacaccgccatcgccgtgcaggagatccagggcaaccccgccagccccgcccaggagtacagagccctgtacgactacaccgcccagaaccccgacgagctggacctgagcgccggcgacatcctggaggtgatcctggagggcgaggacggctggtggaccgtggagagaaacggccagagaggcttcgtgcccggcagctacctggagaagctgtag

SEQ ID NO: 142530 - protein, 357 aa, Artificial Sequence
  derived and/or modified sequence
MATTVPDGCRNGLKSKYYRLCDKAEAWGIVLETVATAGVVTSVAFMLTLPILVCKVQDSNRRKMLPTQFLFLLGVLGIFGLTFAFIIGLDGSTGPTRFFLFGILFSICFSCLLAHAVSLTKLVRGRKPLSLLVILGLAVGFSLVQDVIAIEYIVLTMNRTNVNVFSELSAPRRNEDFVLLLTYVLFLMALTFLMSSFTFCGSFTGWKRHGAHIYLTMLLSIAIWVAWITLLMLPDFDRRWDDTILSSALAANGWVFLLAYVSPEFWLLTKQRNPMDYPVEDAFCKPQLVKKSYGVENRAYSQEEITQGFEETGDTLYAPYSTHFQLQNQPPQKEFSIPRAHAWPSPYKDYEVKKEGS

SEQ ID NO: 142531 - protein, 274 aa, Artificial Sequence
  derived and/or modified sequence
MATTVPDGCRNGLKSKYYRLCDKAEAWGIVLETVATAGVVTSVAFMLTLPILVCKVQDSNRRKMLPTQFLFLLGVLGIFGLTFAFIIGLDGSTGPTRFFLFGILFSICFSCLLAHAVSLTKLVRGRKPLSLLVILGLAVGFSLVQDVIAIEYIVLTMNRTNVNVFSELSAPRRNEDFVLLLTYVLFLMALTFLMSSFTFCGSFTGWKRHGAHIYLTMLLSIAIWVAWITLLMLPDFDRRWDDTILSSALAANGWVFLLAYVSPEFWLLTKQRNP

SEQ ID NO: 142532 - DNA, 1074 bp, Artificial Sequence
  derived and/or modified sequence
atggccaccaccgtgcccgacggctgcagaaacggcctgaagagcaagtactacagactgtgcgacaaggccgaggcctggggcatcgtgctggagaccgtggccaccgccggcgtggtgaccagcgtggccttcatgctgaccctgcccatcctggtgtgcaaggtgcaggacagcaacagaagaaagatgctgcccacccagttcctgttcctgctgggcgtgctgggcatcttcggcctgaccttcgccttcatcatcggcctggacggcagcaccggccccaccagattcttcctgttcggcatcctgttcagcatctgcttcagctgcctgctggcccacgccgtgagcctgaccaagctggtgagaggcagaaagcccctgagcctgctggtgatcctgggcctggccgtgggcttcagcctggtgcaggacgtgatcgccatcgagtacatcgtgctgaccatgaacagaaccaacgtgaacgtgttcagcgagctgagcgcccccagaagaaacgaggacttcgtgctgctgctgacctacgtgctgttcctgatggccctgaccttcctgatgagcagcttcaccttctgcggcagcttcaccggctggaagagacacggcgcccacatctacctgaccatgctgctgagcatcgccatctgggtggcctggatcaccctgctgatgctgcccgacttcgacagaagatgggacgacaccatcctgagcagcgccctggccgccaacggctgggtgttcctgctggcctacgtgagccccgagttctggctgctgaccaagcagagaaaccccatggactaccccgtggaggacgccttctgcaagccccagctggtgaagaagagctacggcgtggagaacagagcctacagccaggaggagatcacccagggcttcgaggagaccggcgacaccctgtacgccccctacagcacccacttccagctgcagaaccagcccccccagaaggagttcagcatccccagagcccacgcctggcccagcccctacaaggactacgaggtgaagaaggagggcagctag

SEQ ID NO: 142533 - DNA, 825 bp, Artificial Sequence
  derived and/or modified sequence
atggccaccaccgtgcccgacggctgcagaaacggcctgaagagcaagtactacagactgtgcgacaaggccgaggcctggggcatcgtgctggagaccgtggccaccgccggcgtggtgaccagcgtggccttcatgctgaccctgcccatcctggtgtgcaaggtgcaggacagcaacagaagaaagatgctgcccacccagttcctgttcctgctgggcgtgctgggcatcttcggcctgaccttcgccttcatcatcggcctggacggcagcaccggccccaccagattcttcctgttcggcatcctgttcagcatctgcttcagctgcctgctggcccacgccgtgagcctgaccaagctggtgagaggcagaaagcccctgagcctgctggtgatcctgggcctggccgtgggcttcagcctggtgcaggacgtgatcgccatcgagtacatcgtgctgaccatgaacagaaccaacgtgaacgtgttcagcgagctgagcgcccccagaagaaacgaggacttcgtgctgctgctgacctacgtgctgttcctgatggccctgaccttcctgatgagcagcttcaccttctgcggcagcttcaccggctggaagagacacggcgcccacatctacctgaccatgctgctgagcatcgccatctgggtggcctggatcaccctgctgatgctgcccgacttcgacagaagatgggacgacaccatcctgagcagcgccctggccgccaacggctgggtgttcctgctggcctacgtgagccccgagttctggctgctgaccaagcagagaaacccctag

SEQ ID NO: 142534 - DNA, 7362 bp, Artificial Sequence
  derived and/or modified sequence
aatttcatctggcgcccccgttcaatcagcctgcattgtcgaggctttaggagaggcagttaggaaaggagagatactgatctctcagccccagggcagcactaatggtgcctgtctagactctgacaggtggagctgctgagctaactacggacctggtgggggaagttttccttggctttcacgtggctttggctggggagccctgagaaggtggctgcctcctttttctgaagcctggcttcccatacggcagtggctgggggagagtgatggagagaaaggctaagctaaggtcaaagaaagtggaggaaggctggcttgtcccgctggacttgacggcggagctgctgcaatctcgcgggctgggcccttgccccgggtggacccgagtgcctgcggggaggcgggtgtggctcccccgggaggtgacagctggcggggcccgtaaggagctggtctgctccggctcccctctcgtagccggcgccctgggaccagcgcgtgagcacgtctcggaggagtccgatgcgctgggcagggccgggtggtcacccccgcccagcttccaggggtgactgtgcctctgacgtcagacggtttttgggtcattccctggcacggggactttattttcataacagcatgaagtgccgtggaactggaataggcgtgtcctctccctcgaccctccccctccttgtccctctgctcacccctcgctcgttccctccctccggcgagggccgcctttataacaactgctcagagtgcgagggcgggatagctgtccaaggtctcccccagcactgaggagctcgcctgctgccctcttgcgcgcgggaagcagcaccaagttcacggccaacgccttggcactagggtccagaatggctacaacagtccctgatggttgccgcaatggcctgaaatccaagtactacagactttgtgataaggctgaagcttggggcatcgtcctagaaacggtggccacagccggggttgtgacctcggtggccttcatgctcactctcccgatcctcgtctgcaaggtgcaggactccaacaggcgaaaaatgctgcctactcagtttctcttcctcctgggtgtgttgggcatctttggcctcaccttcgccttcatcatcggactggacgggagcacagggcccacacgcttcttcctctttgggatcctcttttccatctgcttctcctgcctgctggctcatgctgtcagtctgaccaagctcgtccgggggaggaagcccctttccctgttggtgattctgggtctggccgtgggcttcagcctagtccaggatgttatcgctattgaatatattgtcctgaccatgaataggaccaacgtcaatgtcttttctgagctttccgctcctcgtcgcaatgaagactttgtcctcctgctcacctacgtcctcttcttgatggcgctgaccttcctcatgtcctccttcaccttctgtggttccttcacgggctggaagagacatggggcccacatctacctcacgatgctcctctccattgccatctgggtggcctggatcaccctgctcatgcttcctgactttgaccgcaggtgggatgacaccatcctcagctccgccttggctgccaatggctgggtgttcctgttggcttatgttagtcccgagttttggctgctcacaaagcaacgaaaccccatggattatcctgttgaggatgctttctgtaaacctcaactcgtgaagaagagctatggtgtggagaacagagcctactctcaagaggaaatcactcaaggttttgaagagacaggggacacgctctatgccccctattccacacattttcagctgcagaaccagcctccccaaaaggaattctccatcccacgggcccacgcttggccgagcccttacaaagactatgaagtaaagaaagagggcagctaactctgtcctgaagagtgggacaaatgcagccgggcggcagatctagcgggagctcaaagggatgtgggcgaaatcttgagtcttctgagaaaactgtacaagacactacgggaacagtttgcctccctcccagcctcaaccacaattcttccatgctggggctgatgtgggctagtaagactccagttcttagaggcgctgtagtatttttttttttttgtctcatcctttggatacttcttttaagtgggagtctcaggcaactcaagtttagacccttactctttttgtttgttttttgaaacaggatcttgctctgtcacccaggcttgagtgcagtggtgcgatcacagcccagtgcagcctcgaccacctgtgctcaagcaatcctcccatctccatctcccaaagtgctgggatgacaggcgtgagccacagctcccagcctaggcccttaatcttgctgttattttccatggactaaaggtctggtcatctgagctcacgctggctcacacagctctaggggcctgctcctctaactcacagtgggttttgtgaggctctgtggcccagagcagacctgcatatctgagcaaaaatagcaaaagcctctctcagcccactggcctgaatctacactggaagccaacttgctggcacccccgctccccaacccttcttgcctgggtaggagaggctaaagatcaccctaaatttactcatctctctagtgctgcctcacattgggcctcagcagctccccagcaccaattcacaggtcacccctctcttcttgcactgtccccaaacttgctgtcaattccgagatctaatctccccctacgctctgccaggaattctttcagacctcactagcacaagcccggttgctccttgtcaggagaatttgtagatcattctcacttcaaattcctggggctgatacttctctcatcttgcaccccaacctctgtaaatagatttaccgcatttacggctgcattctgtaagtgggcatggtctcctaatggaggagtgttcattgtataataagttattcacctgagtatgcaataaagatgtggtggccactctttcatggtggtggcagcagttaccagtaatgagcattagactctgggggatagaacacgggctgccctgagagcttcatgttggagctgaagttcaaggttcacttcctttgggtttgtacttgacccttcttcatgtgtctctcccgttccctctaaaacaagtgtgtttcccctcatttttgaggctgtcaatggtgtgagagccaggatcatcacggggcctgaggttttactccagaaaagcagaggagtggcaaccttggcttggggtttggcagcccaggaaaggcagggaggagagctcaaagccggtttcatgtttcacccaaggtctaattgtgggagaggacaaatccagatcccctgtttgacagaattagttcacaaatgtctcttggcaaaaacatgtgacacctaaccatgataattgacttaatccaagaaagagctctgtagggcagagcaataggaaatctctctttcgttatggaaaaaaaataatccctctacatagaaactgagtgacatgtaaaaatgtgtagctaagtcagggagttacttcctaagagcctgacgctctgcttttcatcaaaaggaaaaaccagcgtgaggcagaggcgagggaggtggaggtgagtggatgatgtgctgagttagggatgtttatatgccgcaaaggtttggttggtaggcttcgcgctaagattagcctggctttgtactgaaaagggggaaggacacatagtgacacagatccttctggtctttcccaggaggtgtgacctaatgaggtttgttgtgagaataaagcaatgtggtttcacatatattatctatcataggctagggactcaagaaatgcatattccccccccactttctttctctctttccttccttccttcctttcttctttctttctttctttctttctttctttctttctttctttctttctctctctctctctctctctctttctttctttctttttgagatagagtctcactctgtcatccaggctggagtgcagtggcatgatctcagctcactgcagcctccgcatcctgggttcaagcgattttcgtgcctcggccttctgagtagctgggattacaggcgtgcgtgcgccaccacgcctggctaatttttgtatttttagtacagacgaggtttcaccatgttgaccaggctggtcttgaactcctgatcttaagtgatctgcccgccttggcctcccaaagtgctgggattacgggtgggaatcaccatgcccagcctcctttccatcttttctttccttctctggtcttcatactaccaaccaagcaagggaggaggagtaaaaggtaaaatcacaaaatactctggatcggcatttttttttttttttttttttgagacagggtctagctctatggcccaggctggagtgcagtggcacaatcatagctcactgcagcctcaactttctgtgctcgagtgattctcctgcctcagtctcctgagtagctgggaccacagacgtgcactaccacacttggctaattttattttttcagagatcacatgtggtttgagggaggatagagaggacagggtgtcaagaacagcatttttaccaagttgatataaaaatgaaacaggatccaggcatgggtctttacactgatagttacagtaagttttaaaatctgagcagcaatttgaatcacttgttgaaaaacacacaaaatatattttttgtagaggtgggggtcttgctctgttgcccaggctggtcttgaactcgagattctcctgctttggcctcccacaagtgctgggattacaggcgtgagctactgcacccggcctgctttctttttagtgaaaaggatctgtgggagcttttattcccatggctgccttcctcaagtcaacctctttccccggaaatggcatcatctctggactgttgtttctccttcttccttctcctccttctcctcctcctcctcctccaccatgcccggctgatttttgtatttttagtagagacagggtttcactatatgggccaggcagatctcgaactccaaacctcgtgatccacctaccttggcctctgaaagtgctgggataccgtggcctctgaaagtgctgggattacaggcatgagccaccgcgcccggccccgttgtttcccttctaagaaacgcagtggtctctgaagcctgcaggggcaggccagccctgcactgaacgcctgttcttgccaggtggcagaaggttgctgctcatttgagcagtacctgtcacccctcctcccactgctgcggctgttaactcatcttcaggtctcacaccttctgcacataaataagctatttttaaaagttattatttttttactctttcttttctttggagagggtaccaaaggatagctgttctgtttaagtagggacctctcatggcctacaggctttgacatctgagaatcaaactggagaacattccgaagccgttcttataagtgtctccatctctacctgggctgaaatggaatgtgcaaatgtagcccagcctggtccttgggtgttgccagttgattgatgactgggagccaaagtggcatctcctttgacctaaacgggcgatgatgaaataaaactcaacagcctttctctcatcttgcattgtgagatgcgaaatagagcgtgtctctctgcctctcattttaggctgaggccgtccaaagcggccatgccccatgtttccactagatggcgctgacacttcaggcatcaaccctcatggcctctcagccttgcaaaggcagccacttaaagtcggtgtcctgtgtggggcaccaagctgagctgcagacacccagtaggcgcgaggcaaatgcgtcccattttaagaggcttgtatttatgagctctttgcttcctccctcccactaactttaaagaattgctctccatctcctttggcaaagttcctttgccctttgtcttatttttgtgaaaccctccaaggtatttccagtccatttgcatccaatctggcatctttacggagagcggtctcatatgctattgttgttaacgtggactagtatttatgtgttgagaacactggctgtttgtcaggaaaagtgtgccaaaacaaagagtacggccggccctggaaatgcatcagcaaaacccatttcccccgtgcactcattctgagcttccttccttcatttctgtcattactgctgagaactggactgtgcccagctgacctttcccttccttgccctcatcttgctgccagggtctgcaggtttgccaccgtcccggccccagtctgaaacatgggattatttcagaattggaggtggcagcttcagaaaaaaatccttctcgtgtgttgactgctgagatccaggaactgggaaatcaacccccagtttgtagattgctctctttggaaattctgtggcccaacctcgtggctgttttctggaattccttctatcggggcagacagtgctgtgcctttcttgacttcaggatgttccaaggatgctgctggatctgtgtgtgtgtgtgtgtgtgtgtgtgtgtgtgtgtgtgtgcgtgcgtgcgtgtatgtgcgcctgaccctgatttctgcaacctccagatttctttcttgacccttcaaagtggaacagtccagtgccaaaaattttagagtttgagaaggtcacagaaatcctctagttggtgcctccacagtcttcattttacagaggaactcagggctaatggagttaatgcaactagatcagggttttgggtctgtgttctttctaccgtcagcacctgtgtggtcaattctggacacttcccagagaagtctttgagtagagaatcctactcaaatttcactgtatattttaagcattcctctcctttccctttgcctcccctgttgccttttcttcccctgatttctcctctggtcatctcctctcccttctgcgtgtaagccatgggaaagggatgagggaggacagcttctggttaaacacaggtccctcttccacatcaaatgaacattggcttcctgggacagaaggccttcaaaggagggattgcaaagcaaggcaaagcgttctgtcttcattttccccatccccatgagacaagactgatggaaagggtggtggggcaacactgcttaatggatgccttttcacatcatttcagtttttagccctcatgactgtattttctaatcagagacaataacattttaaataaaacaacgacaaagaa

SEQ ID NO: 142535 - DNA, 897 bp, Artificial Sequence
  derived and/or modified sequence
gaggtgagcagctctgggatcactctgcaggaaaagaatagagggagaaagatctcagaggacccgaaggtccagaatggctacaacagtccctgatggttgccgcaatggcctgaaatccaagtactacagactttgtgataaggctgaagcttggggcatcgtcctagaaacggtggccacagccggggttgtgacctcggtggccttcatgctcactctcccgatcctcgtctgcaaggtgcaggactccaacaggcgaaaaatgctgcctactcagtttctcttcctcctgggtgtgttgggcatctttggcctcaccttcgccttcatcatcggactggacgggagcacagggcccacacgcttcttcctctttgggatcctcttttccatctgcttctcctgcctgctggctcatgctgtcagtctgaccaagctcgtccgggggaggaagcccctttccctgttggtgattctgggtctggccgtgggcttcagcctagtccaggatgttatcgctattgaatatattgtcctgaccatgaataggaccaacgtcaatgtcttttctgagctttccgctcctcgtcgcaatgaagactttgtcctcctgctcacctacgtcctcttcttgatggcgctgaccttcctcatgtcctccttcaccttctgtggttccttcacgggctggaagagacatggggcccacatctacctcacgatgctcctctccattgccatctgggtggcctggatcaccctgctcatgcttcctgactttgaccgcaggtgggatgacaccatcctcagctccgccttggctgccaatggctgggtgttcctgttggcttatgttagtcccgagttttggctgctcacaaagcaacgaaaccc

SEQ ID NO: 142536 - DNA, 1074 bp, Artificial Sequence
  derived and/or modified sequence
atggccacaacggtgccagatggatgcagaaacgggctcaaaagtaagtattaccggctatgtgacaaggccgaggcttggggaattgtgctggagacagttgccactgctggcgtggtgacgtccgtcgcatttatgttgaccttaccaatcctggtgtgtaaagttcaagacagcaatagaaggaagatgcttcctacacagttcctcttcctgctgggcgtactaggcatcttcggcttgacctttgcctttatcatcggactggacgggagcactgggcccactaggtttttcctgttcggaatccttttctctatttgtttttcttgcctgttggcccacgccgtgagtcttaccaaactggtcagagggagaaaacccctctctcttcttgtaatactgggactggcagtgggattctctttggtgcaggatgtcattgctatcgagtacatagtacttaccatgaatcgcaccaacgtaaacgtcttttcagaactcagcgctcccaggagaaatgaggactttgtgttattattaacctacgtcctttttctgatggctttgactttccttatgtcttcattcacgttctgtgggagttttacaggctggaaacgccatggagctcatatttatctgaccatgctccttagcatcgccatctgggttgcatggataactctcctgatgctaccagacttcgataggagatgggacgacaccatcttgtccagcgccttggccgccaacggttgggtcttcctcctggcatatgtgagccccgagttttggctactgaccaagcagcgaaatcccatggattatccagtggaagatgctttctgtaaaccacagctcgttaagaagtcctatggcgtagagaatcgtgcctacagccaggaggaaattacccagggattcgaggagaccggggataccctatatgccccctactccacacactttcagctgcagaaccagcctcctcagaaggagttttctatcccaagagcacacgcctggccaagtccatacaaggactacgaggttaagaaagaggggtcatag

SEQ ID NO: 142537 - DNA, 825 bp, Artificial Sequence
  derived and/or modified sequence
atggccacaaccgtgcccgatgggtgtagaaatggactcaaatccaagtattacaggttatgtgataaggcagaagcctggggaatagtgctggagacggtggctacagctggcgtggtgacatccgtcgcattcatgctgacactgcccatactcgtatgcaaggtccaggattccaatcgccggaagatgctgcctacacagtttctgttcctgttgggggtcctgggcatcttcggcctgacttttgcttttattatcggtttggacggcagtactggaccaactaggtttttcctgtttggcattctgttctccatttgtttttcgtgcctgttggctcacgccgtttccttgactaaactggttagaggccggaagcctctgagtttgctggtgatactcggtctggcggtaggcttcagtctggtgcaggacgtgattgcaattgaatatatcgtacttaccatgaatcggacaaacgtgaatgtgtttagtgagctgagcgcgccacgccggaacgaagacttcgtccttctgctgacttacgttcttttcctgatggcactcacatttctaatgtctagttttactttctgcgggagctttacagggtggaagcgccacggtgctcacatatacttgaccatgcttctgtcgatagctatttgggtcgcctggataacgctactaatgttgccagactttgacagaagatgggatgacactatactttcaagtgccttggctgcaaacggttgggtgttcttgctggcctacgtgtcccccgagttttggctgctcacaaaacagcgcaatccatag

SEQ ID NO: 142538 - DNA, 1074 bp, Artificial Sequence
  derived and/or modified sequence
atggccaccaccgtgcctgatggctgcagaaatggcctgaagagcaagtactaccgcctgtgtgacaaggccgaggcctggggcatcgtgctggagaccgtggccacagctggggtggtgacctctgtggccttcatgctgaccctgcccatcctggtgtgcaaggtgcaggacagcaacagaaggaagatgctgcccacccagttcctgttcctgctgggcgtgctgggcatcttcggcctgacctttgccttcatcatcggcctggatggcagcacaggccccacccgcttcttcctgtttggcatcctcttcagcatctgcttcagctgcctgctggcccatgctgtgtccctgaccaagctggtgcggggcaggaagcccctgagcctgctggtgatcctgggcctggccgtgggcttcagcctggtgcaggacgtcatcgccatcgagtacatcgtgctgaccatgaacagaacaaatgtgaatgtgttcagcgagctgagcgcccccaggagaaatgaagattttgtgctgctgctgacctacgtgctcttcctgatggccctgaccttcctgatgagcagcttcaccttctgtggcagcttcaccggctggaagagacatggagcccacatctacctgaccatgctgctgagcatcgccatctgggtggcctggatcaccctgctgatgctgcctgactttgaccggcgctgggatgacaccatcctgagcagcgccctggccgccaacggctgggtgttcctgctggcctacgtgtccccagagttctggctgctgaccaagcagaggaaccccatggactaccctgtggaggatgccttctgcaagccccagctggtgaagaagagctatggagtggagaacagagcctacagccaggaggagatcacccagggctttgaggagaccggggacaccctgtatgccccctacagcacccacttccagctgcagaaccagcccccccagaaggagttcagcatcccccgggcccacgcctggcccagcccctacaaggactatgaggtgaagaaggagggcagctag

SEQ ID NO: 142539 - DNA, 825 bp, Artificial Sequence
  derived and/or modified sequence
atggccaccaccgtgcctgatggctgcagaaatggcctgaagagcaagtactaccgcctgtgtgacaaggccgaggcctggggcatcgtgctggagaccgtggccacagctggggtggtgacctctgtggccttcatgctgaccctgcccatcctggtgtgcaaggtgcaggacagcaacagaaggaagatgctgcccacccagttcctgttcctgctgggcgtgctgggcatcttcggcctgacctttgccttcatcatcggcctggatggcagcacaggccccacccgcttcttcctgtttggcatcctcttcagcatctgcttcagctgcctgctggcccatgctgtgtccctgaccaagctggtgcggggcaggaagcccctgagcctgctggtgatcctgggcctggccgtgggcttcagcctggtgcaggacgtcatcgccatcgagtacatcgtgctgaccatgaacagaacaaatgtgaatgtgttcagcgagctgagcgcccccaggagaaatgaagattttgtgctgctgctgacctacgtgctcttcctgatggccctgaccttcctgatgagcagcttcaccttctgtggcagcttcaccggctggaagagacatggagcccacatctacctgaccatgctgctgagcatcgccatctgggtggcctggatcaccctgctgatgctgcctgactttgaccggcgctgggatgacaccatcctgagcagcgccctggccgccaacggctgggtgttcctgctggcctacgtgtccccagagttctggctgctgaccaagcagaggaacccctag

SEQ ID NO: 142540 - DNA, 1074 bp, Artificial Sequence
  derived and/or modified sequence
atggccaccaccgtgcccgacggctgccggaacggcctgaagagcaagtattacaggctgtgtgacaaggcagaagcttggggcattgtgctggagactgttgctacagctggggtcgtaactagtgttgcatttatgctgacactcccgattcttgtctgcaaagtacaggatagcaaccgcagaaagatgctgcctacccagttcctgtttcttctcggcgtactcgggatattcggcctgactttcgcctttattattggcctcgatgggtctaccggtccaacacgttttttcctgtttggcattttattctccatttgtttttcctgtcttctggcacacgccgtcagcttgactaagttagtaaggggaagaaagcccttatcactcctagtgatcctcggcctggccgtgggattttccctcgtccaggacgtgattgccatagagtatattgtgcttaccatgaaccgtaccaacgtgaacgtgttttcagaactctccgcacccagaaggaatgaggacttcgttctcctgctgacttacgtgctttttctgatggcacttacgtttcttatgtccagcttcacattctgtggctcattcaccgggtggaaacgtcatggcgcccatatctatctgacaatgttactgtccattgctatctgggtggcctggattacattgcttatgctaccggacttcgacaggcgatgggacgatacgatactcagctccgcacttgcggccaacggctgggtgttcctgctggcatacgtgagtcccgaattctggttgctcaccaaacagaggaatccaatggactatcccgtggaagatgccttctgtaagccccagttggtgaagaaaagctacggagtggaaaacagagcctactcccaagaggaaattacccagggtttcgaagagaccggagataccctgtacgctccatatagcacacatttccagctgcagaaccagccaccccagaaagagttctcaatcccacgtgcccacgcatggccatctccttataaagactatgaggtcaagaaggaaggcagctag

SEQ ID NO: 142541 - DNA, 825 bp, Artificial Sequence
  derived and/or modified sequence
atggccaccaccgtgcccgacggctgccggaacggcctgaagagcaaatactaccggctgtgcgacaaagcggaggcctggggcatcgtgctggaaaccgtggccacagcaggggtagtcaccagcgtggcattcatgctgaccctgcctatccttgtgtgcaaggtgcaagattccaatcggagaaaaatgctccctacacagtttctgtttctgctaggtgttcttggcatattcggacttacatttgcctttattataggactggatgggagcaccggtccaactagattctttctgttcggtatactctttagtatctgcttctcctgtctcttagctcacgccgtgtccctgactaagttggtgcgaggacgaaaacctctgagtctgctggtgatcctcggcctggccgtcggcttctcactcgtgcaggacgtcatagctatcgagtacatcgtgctcacgatgaatcgaacaaatgtgaatgttttctcagagctaagcgctccccggcgtaatgaagatttcgtgttattgttaacatacgtgctgtttctgatggccctgacatttctcatgtccagcttcaccttttgtggatccttcacgggctggaagcggcatggagctcacatttacctcaccatgcttctcagtatcgcaatctgggtcgcttggattactctcttgatgcttcctgacttcgaccggcgatgggacgacaccattctgagttccgcactcgctgcaaatggctgggtattcttgctcgcctacgtgagcccagagttttggttactgactaagcagaggaacccttag

SEQ ID NO: 142542 - DNA, 1074 bp, Artificial Sequence
  derived and/or modified sequence
atggctactactgttccagacggctgccgaaacgggctgaagagcaagtactatcgtttatgcgataaggcggaggcatggggcatcgtgctggaaacggtggcaacagccggagtcgtcactagcgtcgcgtttatgctaaccctgcctatactggtgtgtaaggtgcaagacagcaaccgcagaaagatgctgccaacacagtttctgtttctcttgggcgtgttagggattttcggactaacattcgcttttatcatcggtctagatggatccacaggtccaacccgtttcttcctatttgggatattattcagcatttgcttctcctgtctattggcccacgctgtcagcctgacaaaactggttagggggaggaaacccctgagtttgctggtgatactgggcctggccgttggctttagtctggtgcaggacgtcatcgccatcgagtacattgtgctgacaatgaatcgcaccaatgtgaatgtgttctctgagttatctgcccctcgaagaaatgaggatttcgttcttctcctgacttacgttctgtttctgatggcgctcacattcctgatgtcctcgtttaccttttgtggcagcttcacaggatggaagagacacggcgcacacatctatctgaccatgctgctgtccatcgctatatgggtcgcttggatcactctgctgatgctgcccgatttcgatcggaggtgggacgacactattctttccagcgctttagcggctaacggctgggtattcctccttgcctacgtctcgcctgagttttggctgctcacaaaacagagaaatcctatggactatccagtcgaggatgccttctgcaagccgcagctggtgaagaaatcctacggcgtggaaaatagggcttattcccaagaggaaataacacaagggtttgaagaaactggcgacacactctacgccccttatagtacccacttccagctgcagaatcagcctcctcagaaagaattcagtattccaagggcccatgcgtggcccagtccatacaaagattatgaggtcaagaaagaggggagttag

SEQ ID NO: 142543 - DNA, 825 bp, Artificial Sequence
  derived and/or modified sequence
atggcgactaccgtcccagacggatgcaggaacggactgaaaagtaaatactatagactttgtgacaaggccgaggcctgggggattgtgctggagactgtggccactgccggagtcgtgacaagtgtggcctttatgctaacgctgccaattcttgtatgtaaggttcaggactcaaataggcggaaaatgcttcccactcagtttctcttcctgctcggcgtgctggggattttcggccttacatttgcatttatcatagggctggatggttctactggacccactcgcttttttctttttgggattttattcagcatatgctttagttgccttctggcccacgctgtttctttgactaagctggtcaggggcagaaagccactttccctcctcgtcatactgggcctggctgtcggctttagcctcgtacaagacgtgatcgcaatcgagtacatcgtgctgaccatgaaccgcactaacgtgaatgtctttagtgagttgagcgctcctaggcggaacgaggatttcgttctgttgcttacatacgtactgttccttatggccttgacttttctgatgagcagcttcacattctgtggaagcttcactgggtggaagagacacggggctcatatctacctgaccatgctcttgagtatcgcgatatgggtcgcatggattacattgctcatgctgccagacttcgatcggagatgggacgacacgattctctcttctgccctcgccgctaacggatgggtgtttctgctggcctatgtgtcccctgagttctggctcctcacaaagcagaggaatccctag

SEQ ID NO: 142544 - DNA, 1074 bp, Artificial Sequence
  derived and/or modified sequence
atggcaacaaccgtgcctgatggctgtaggaacgggctaaaatcgaaatattatcgcctgtgtgataaagcagaggcctgggggattgtactagaaacagtagcgactgccggcgtcgtgacaagcgtagctttcatgttgacactgccaattttggtatgtaaggtgcaagacagtaacaggcgcaagatgttacccacccagtttctgttccttctaggggtgctcgggatcttcggcctcaccttcgcttttatcatcggcctggatggatcaactggacctactaggttcttcttgttcgggatcctgttttcaatctgcttctcatgcctcctcgcccacgccgttagtctaactaagctggtccgggggcggaaacccctgagtcttcttgtgatcctaggacttgcggtgggctttagcctcgtacaggacgttattgcaatagaatacatcgtgctgaccatgaatcgaactaatgtaaatgtgttctccgagcttagtgccccaagacgaaatgaagattttgtcctacttttaacatacgtcctattcttaatggccctgaccttcctaatgagttcgttcacattttgtggatcgtttactgggtggaaaagacacggagctcacatctaccttaccatgcttctttcaattgctatctgggtcgcatggatcacactcctcatgttgcctgatttcgatcggagatgggatgatactatactgagctctgccctcgccgcaaacgggtgggtgtttctcttggcgtacgtgtcgccagagttttggctgctcacaaagcagcgtaatcccatggactaccctgttgaagacgccttttgcaaaccgcagctggtcaaaaagtcatatggcgtggaaaatagagcctactcccaggaggaaataacccaaggcttcgaagagacaggcgataccctctatgctccctactccacgcattttcagctccagaatcagcctccacagaaggaattctccatcccgcgcgcacatgcctggcccagtccgtacaaggattatgaggttaaaaaagaaggatcctag

SEQ ID NO: 142545 - DNA, 1074 bp, Artificial Sequence
  derived and/or modified sequence
atggcaacaactgtgcctgacgggtgccgaaacggattgaagagcaaatactaccggctgtgtgataaggctgaagcttggggaatcgtgctcgaaacagtggcaactgctggagtcgtaacatcagtggcatttatgctgaccctaccaatacttgtttgcaaagtacaggactccaatcgacgcaaaatgcttccgacgcagttcctgttcctcctcggcgttcttggcatctttggacttaccttcgcatttattatcggacttgatggcagtactggccctaccaggttcttcctgtttggtatactcttctcaatttgtttttcttgcttactggcacatgctgtctccttgaccaagttagttcggggtcggaagcccttatcactcctggtgattctcggtcttgcagtcgggttttctctcgtccaggacgttatcgccatagagtacattgtcctcactatgaatcgcacgaacgttaacgttttctccgagctcagcgcccccaggcgtaatgaagatttcgtccttcttttaacttatgtgctattcctaatggcactcacatttcttatgagctctttcactttttgtgggtcattcacaggctggaaaagacacggggcccatatctacttgacgatgctgttgagcattgctatctgggttgcttggatcactctgctcatgctccctgacttcgatcggcgctgggacgataccattctgtcttccgccctggccgcgaatggatgggtgttcctgttggcatatgtctctcctgaattctggcttttgactaaacagaggaaccccatggattatcctgtggaggacgctttctgtaaaccgcaactggtcaaaaagtcatacggcgtggaaaatcgtgcctactcccaggaagagattacccagggctttgaagagacaggcgacacgttatacgctccttactcgactcacttccagctgcagaaccagcctccacaaaaagaatttagtattcctcgtgcacacgcctggccatccccctataaggattatgaggttaaaaaggaaggcagttag

SEQ ID NO: 142546 - RNA, 1074 nt, Artificial Sequence
  derived and/or modified sequence
auggcaacaaccgugccugauggcuguaggaacgggcuaaaaucgaaauauuaucgccugugugauaaagcagaggccugggggauuguacuagaaacaguagcgacugccggcgucgugacaagcguagcuuucauguugacacugccaauuuugguauguaaggugcaagacaguaacaggcgcaagauguuacccacccaguuucuguuccuucuaggggugcucgggaucuucggccucaccuucgcuuuuaucaucggccuggauggaucaacuggaccuacuagguucuucuuguucgggauccuguuuucaaucugcuucucaugccuccucgcccacgccguuagucuaacuaagcugguccgggggcggaaaccccugagucuucuugugauccuaggacuugcggugggcuuuagccucguacaggacguuauugcaauagaauacaucgugcugaccaugaaucgaacuaauguaaauguguucuccgagcuuagugccccaagacgaaaugaagauuuuguccuacuuuuaacauacguccuauucuuaauggcccugaccuuccuaaugaguucguucacauuuuguggaucguuuacuggguggaaaagacacggagcucacaucuaccuuaccaugcuucuuucaauugcuaucugggucgcauggaucacacuccucauguugccugauuucgaucggagaugggaugauacuauacugagcucugcccucgccgcaaacggguggguguuucucuuggcguacgugucgccagaguuuuggcugcucacaaagcagcguaaucccauggacuacccuguugaagacgccuuuugcaaaccgcagcuggucaaaaagucauauggcguggaaaauagagccuacucccaggaggaaauaacccaaggcuucgaagagacaggcgauacccucuaugcucccuacuccacgcauuuucagcuccagaaucagccuccacagaaggaauucuccaucccgcgcgcacaugccuggcccaguccguacaaggauuaugagguuaaaaaagaaggauccuag

SEQ ID NO: 142547 - RNA, 1074 nt, Artificial Sequence
  derived and/or modified sequence
auggcaacaacugugccugacgggugccgaaacggauugaagagcaaauacuaccggcugugugauaaggcugaagcuuggggaaucgugcucgaaacaguggcaacugcuggagucguaacaucaguggcauuuaugcugacccuaccaauacuuguuugcaaaguacaggacuccaaucgacgcaaaaugcuuccgacgcaguuccuguuccuccucggcguucuuggcaucuuuggacuuaccuucgcauuuauuaucggacuugauggcaguacuggcccuaccagguucuuccuguuugguauacucuucucaauuuguuuuucuugcuuacuggcacaugcugucuccuugaccaaguuaguucggggucggaagcccuuaucacuccuggugauucucggucuugcagucggguuuucucucguccaggacguuaucgccauagaguacauuguccucacuaugaaucgcacgaacguuaacguuuucuccgagcucagcgcccccaggcguaaugaagauuucguccuucuuuuaacuuaugugcuauuccuaauggcacucacauuucuuaugagcucuuucacuuuuugugggucauucacaggcuggaaaagacacggggcccauaucuacuugacgaugcuguugagcauugcuaucuggguugcuuggaucacucugcucaugcucccugacuucgaucggcgcugggacgauaccauucugucuuccgcccuggccgcgaauggauggguguuccuguuggcauaugucucuccugaauucuggcuuuugacuaaacagaggaaccccauggauuauccuguggaggacgcuuucuguaaaccgcaacuggucaaaaagucauacggcguggaaaaucgugccuacucccaggaagagauuacccagggcuuugaagagacaggcgacacguuauacgcuccuuacucgacucacuuccagcugcagaaccagccuccacaaaaagaauuuaguauuccucgugcacacgccuggccaucccccuauaaggauuaugagguuaaaaaggaaggcaguuag

SEQ ID NO: 142548 - protein, 749 aa, Artificial Sequence
  derived and/or modified sequence
MAELGAGGDGHRGGDGAVRSETAPDSYKVQDKKNASSRPASAISGQNNNHSGNKPDPPPVLRVDDRQRLARERREEREKQLAAREIVWLEREERARQHYEKHLEERKKRLEEQRQKEERRRAAVEEKRRQRLEEDKERHEAVVRRTMERSQKPKQKHNRWSWGGSLHGSPSIHSADPDRRSVSTMNLSKYVDPVISKRLSSSSATLLNSPDRARRLQLSPWESSVVNRLLTPTHSFLARSKSTAALSGEAASCSPIIMPYKAAHSRNSMDRPKLFVTPPEGSSRRRIIHGTASYKKERERENVLFLTSGTRRAVSPSNPKARQPARSRLWLPSKSLPHLPGTPRPTSSLPPGSVKAAPAQVRPPSPGNIRPVKREVKVEPEKKDPEKEPQKVANEPSLKGRAPLVKVEEATVEERTPAEPEVGPAAPAMAPAPASAPAPASAPAPAPVPTPAMVSAPSSTVNASASVKTSAGTTDPEEATRLLAEKRRLAREQREKEERERREQEELERQKREELAQRVAEERTTRREEESRRLEAEQAREKEEQLQRQAEERALREREEAERAQRQKEEEARVREEAERVRQEREKHFQREEQERLERKKRLEEIMKRTRRTEATDKKTSDQRNGDIAKGALTGGTEVSALPCTTNAPGNGKPVGSPHVVTSHQSKVTVESTPDLEKQPNENGVSVQNENFEEIINLPIGSKPSRLDVTNSESPEIPLNPILAFDDEGTLGPLPQVDGVQTQQTAEVI

SEQ ID NO: 142549 - DNA, 2250 bp, Artificial Sequence
  derived and/or modified sequence
atggccgagctgggcgccggcggcgacggccacagaggcggcgacggcgccgtgagaagcgagaccgcccccgacagctacaaggtgcaggacaagaagaacgccagcagcagacccgccagcgccatcagcggccagaacaacaaccacagcggcaacaagcccgaccccccccccgtgctgagagtggacgacagacagagactggccagagagagaagagaggagagagagaagcagctggccgccagagagatcgtgtggctggagagagaggagagagccagacagcactacgagaagcacctggaggagagaaagaagagactggaggagcagagacagaaggaggagagaagaagagccgccgtggaggagaagagaagacagagactggaggaggacaaggagagacacgaggccgtggtgagaagaaccatggagagaagccagaagcccaagcagaagcacaacagatggagctggggcggcagcctgcacggcagccccagcatccacagcgccgaccccgacagaagaagcgtgagcaccatgaacctgagcaagtacgtggaccccgtgatcagcaagagactgagcagcagcagcgccaccctgctgaacagccccgacagagccagaagactgcagctgagcccctgggagagcagcgtggtgaacagactgctgacccccacccacagcttcctggccagaagcaagagcaccgccgccctgagcggcgaggccgccagctgcagccccatcatcatgccctacaaggccgcccacagcagaaacagcatggacagacccaagctgttcgtgaccccccccgagggcagcagcagaagaagaatcatccacggcaccgccagctacaagaaggagagagagagagagaacgtgctgttcctgaccagcggcaccagaagagccgtgagccccagcaaccccaaggccagacagcccgccagaagcagactgtggctgcccagcaagagcctgccccacctgcccggcacccccagacccaccagcagcctgccccccggcagcgtgaaggccgcccccgcccaggtgagaccccccagccccggcaacatcagacccgtgaagagagaggtgaaggtggagcccgagaagaaggaccccgagaaggagccccagaaggtggccaacgagcccagcctgaagggcagagcccccctggtgaaggtggaggaggccaccgtggaggagagaacccccgccgagcccgaggtgggccccgccgcccccgccatggcccccgcccccgccagcgcccccgcccccgccagcgcccccgcccccgcccccgtgcccacccccgccatggtgagcgcccccagcagcaccgtgaacgccagcgccagcgtgaagaccagcgccggcaccaccgaccccgaggaggccaccagactgctggccgagaagagaagactggccagagagcagagagagaaggaggagagagagagaagagagcaggaggagctggagagacagaagagagaggagctggcccagagagtggccgaggagagaaccaccagaagagaggaggagagcagaagactggaggccgagcaggccagagagaaggaggagcagctgcagagacaggccgaggagagagccctgagagagagagaggaggccgagagagcccagagacagaaggaggaggaggccagagtgagagaggaggccgagagagtgagacaggagagagagaagcacttccagagagaggagcaggagagactggagagaaagaagagactggaggagatcatgaagagaaccagaagaaccgaggccaccgacaagaagaccagcgaccagagaaacggcgacatcgccaagggcgccctgaccggcggcaccgaggtgagcgccctgccctgcaccaccaacgcccccggcaacggcaagcccgtgggcagcccccacgtggtgaccagccaccagagcaaggtgaccgtggagagcacccccgacctggagaagcagcccaacgagaacggcgtgagcgtgcagaacgagaacttcgaggagatcatcaacctgcccatcggcagcaagcccagcagactggacgtgaccaacagcgagagccccgagatccccctgaaccccatcctggccttcgacgacgagggcaccctgggccccctgccccaggtggacggcgtgcagacccagcagaccgccgaggtgatctag

SEQ ID NO: 142550 - DNA, 2250 bp, Artificial Sequence
  derived and/or modified sequence
atggcagaactgggcgccggaggggacggtcacagagggggcgacggcgccgtaagatctgagacggcacctgactcatacaaagtgcaggataaaaaaaatgctagcagccgccctgccagtgcgataagtggccagaacaacaatcacagcgggaacaaaccggacccccccccggtgctcagagtcgatgataggcagcgactggcacgcgagcggagggaagagcgcgagaaacagttagcggctagggagattgtctggttagagcgggaggaacgagcccgccagcactatgaaaagcacctggaagaaagaaagaagagattggaggaacagcgtcagaaagaagaacgaagacgggccgccgttgaggaaaagcgccgtcagcggctggaggaagataaggagcgccacgaggcagttgtccgccggacgatggaacgaagccagaaaccgaaacaaaaacacaaccgctggagctggggcggcagcctacatgggtctccgagtatccactcggcagaccctgaccgacgctcagtgtcaaccatgaatctgtctaaatatgtggaccccgtgatttcaaaaagactgtcgtctagctcggccactttgctgaattcaccagatagggcacgccggttacagctgtccccctgggagtcctcagtagtgaaccgcctgctgactcctacccatagcttcctggcccggtcaaagtctaccgccgccttgtccggggaggcagccagttgttctcccatcattatgccttataaggccgctcacagcaggaacagtatggaccgaccaaaactgtttgtgacaccacctgaagggagcagtaggcgccgaatcatccatggcactgccagctacaagaaagagcgagaaagagaaaatgtgctcttcctgacctctggcaccaggagggctgtgagcccatccaatcccaaggctcggcagcccgcacgcagcaggctttggctccctagcaaatccctgccgcacctaccaggcaccccacggcctactagttcgttgccacctgggagcgtgaaggccgcgccagctcaggttaggccccccagccccggtaatatcaggccagtaaaacgggaagtcaaggtcgaaccagaaaagaaggaccctgagaaggagccgcaaaaagtggccaatgagccatctctgaaaggtcgagctcccctggtgaaggtcgaggaagctactgttgaagaaagaactcccgccgagccagaagttggccccgctgctcctgccatggcgccggcccccgcttccgccccagcccctgccagtgcacctgccccagctcccgtgcccactccagccatggtgtccgcgccatcatctactgtaaatgcatctgccagtgttaaaacaagtgcagggacaacagacccggaagaggccacaagactgttggctgagaaaaggaggctcgcccgggaacagagagaaaaggaagagagggagagaagagaacaggaggaattggaacggcagaagcgggaggagttggcccagagggtggccgaagaacgtactacaaggcgcgaggaagagtcaagaagattggaagcggaacaggcgcgggaaaaagaggaacagcttcaacggcaagcagaggaacgagctctccgggaacgggaagaagcagagcgggcacaaagacagaaagaagaggaggcacgagtccgggaagaggcggagcgagtgaggcaggagcgggagaaacattttcagcgagaggagcaggaacggctcgagcgaaagaaacggctggaagagattatgaaaaggacacgaaggaccgaagctaccgacaaaaagacttcagatcagagaaatggtgacattgccaagggggctctcacaggcggaactgaagtcagcgcgctgccatgcacaaccaacgccccaggcaacggaaagccagttggttctccccatgtggtaactagccatcagagtaaagtgacagtggaatctactccagacctggaaaagcagcccaacgagaatggcgtgtccgtacagaacgaaaattttgaagagattataaaccttcccatcggttcaaagcccagcagactagatgtgacaaattcagagtccccagaaatccctctgaatcctattttggcctttgatgacgagggcacgttggggccactgccacaagtggacggggtccaaacacaacaaaccgccgaagtgatatag

SEQ ID NO: 142551 - DNA, 2250 bp, Artificial Sequence
  derived and/or modified sequence
atggccgagctgggcgctggaggagatggccacagaggaggagatggagctgtgcgctcagaaacagccccagacagctacaaggtgcaggacaagaagaatgccagcagcaggcctgccagcgccatcagcggccagaacaacaaccacagcggcaacaagccagaccccccacctgtgctgcgggtggatgaccggcagaggctggcccgggagcggcgggaggagcgggagaagcagctggccgcccgggagatcgtgtggctggagcgggaggagcgggcccggcagcactatgagaagcacctggaggagaggaagaagaggctggaggagcagaggcagaaggaggagcggcggcgggctgctgtggaggagaagaggcggcagaggctggaggaggacaaggagagacatgaagctgtggtgcggaggaccatggagaggagccagaagcccaagcagaagcacaaccgctggagctggggcggcagcctgcacggcagccccagcatccacagcgctgaccctgacagaagatctgtgtccaccatgaacctgagcaaatatgtggaccctgtgatcagcaagaggctgagcagcagcagcgccaccctgctgaacagcccagaccgggcccggcggctgcagctgagcccctgggagagctctgtggtgaaccggctgctgacccccacccacagcttcctggcccggagcaagagcacagctgccctgtctggagaggccgccagctgcagccccatcatcatgccctacaaggccgcccacagcaggaacagcatggaccggcccaagctgtttgtgaccccacctgagggcagcagcagaagacgcatcatccatggaacagccagctacaagaaggagcgggagagagaaaatgtgctcttcctgaccagcggcaccaggagagctgtgagccccagcaaccccaaggcccggcagcctgcccggagccggctgtggctgcccagcaagagcctgccccacctgcccggcaccccccggcccaccagcagcctgcccccaggctctgtgaaggccgccccagcccaggtgcggccccccagccctggcaacatccggcctgtgaagcgggaggtgaaggtggagcctgagaagaaggaccctgagaaggagccccagaaggtggccaatgagcccagcctgaagggccgggcccccctggtgaaggtggaggaggccaccgtggaggagaggaccccagctgagcctgaggtgggccctgctgccccagccatggccccagccccagccagcgccccagccccagccagcgccccagccccagcccctgtgcccaccccagccatggtgtctgcccccagcagcacagtgaatgccagcgcctctgtgaagaccagcgctggcaccacagatcctgaggaggccacccggctgctggccgagaagaggcggctggcccgggagcagcgggagaaggaggagcgggagcggcgggagcaggaggagctggagcggcagaagcgggaggagctggcccagagggtggccgaggagaggaccacccggcgggaggaggagagccggcggctggaggccgagcaggcccgggagaaggaggagcagctgcagaggcaggccgaggagcgggccctgcgggagcgggaggaggccgagcgggcccagaggcagaaggaggaggaggcccgggtgcgggaggaggccgagcgggtgcggcaggagcgggagaagcacttccagcgggaggagcaggagcggctggagaggaagaagaggctggaggagatcatgaagaggaccaggagaacagaggccacagacaagaagaccagtgaccagagaaatggagacatcgccaagggggccctgaccggcggcacagaggtgtctgccctgccctgcaccaccaatgcccctggaaatggcaagcctgtgggcagcccccacgtggtgaccagccaccagagcaaggtgacagtggagagcaccccagacctggagaagcagcccaatgaaaatggagtgtctgtgcagaatgaaaattttgaggagatcatcaacctgcccatcggcagcaagcccagccggctggatgtgaccaacagcgagagccctgagatccccctgaaccccatcctggcctttgatgatgagggcaccctgggccccctgccccaggtggatggagtgcagacccagcagacagctgaggtgatctag

SEQ ID NO: 142552 - DNA, 3841 bp, Artificial Sequence
  derived and/or modified sequence
gcgctcacctgtctgggccgctggcctgggaggcgggggccggcgggagccaagccgaggaaagggcggagcggctctccgggcgcgtcatcggagcaccatggcggagctaggagctggcggcgacggccacaggggcggcgacggcgcagtgcgaagcgaaacagcacccgacagctacaaagtgcaagataagaaaaatgcctccagccgccctgcctctgcaatttcaggacaaaataacaaccactcaggaaataaaccagaccctccgcctgtgttacgtgttgatgaccggcagcggctggcccgggagcgacgtgaggaacgggagaaacagctagctgcaagagaaatagtgtggttagaaagagaagagcgagccaggcagcactacgagaagcacctggaagagcggaagaagaggttggaggagcagaggcagaaggaggagcggaggagggctgctgtggaggagaagcggaggcagagacttgaggaggacaaagaacgccacgaagctgttgtacggcgcacaatggaaaggagccagaagccaaaacagaagcataaccgttggtcgtggggaggctctctccatgggagccctagcatccacagtgcagatccagacaggcggtcagtttccaccatgaatctttcgaaatatgttgatcccgtcattagcaagcggctctcctcttcatctgcaactttactaaattctccagatagagctcgccgcctgcagctcagcccatgggagagcagcgttgttaacagactcctgacgcccacacattcgttcctggccagaagtaaaagcacagctgccttgtctggagaagcagcatcttgcagccccatcatcatgccctacaaagctgcacactctagaaattcgatggatcgaccaaaactctttgtaacaccacctgagggctcttctcgcaggaggatcattcatggcacagcgagctataaaaaagaaagagagagagaaaatgtactcttcctcacatctggcacccgaagggctgtatctccatctaatcccaaagcaagacaaccagctcgctcccgactttggcttccgtccaagtctcttcctcatttgcctggcacacccagaccgacatcctccttgccacccggctcagtcaaagctgctcctgctcaggtccggcccccatcccccggcaacatccgccctgtcaagagggaagtcaaagtggagcctgagaagaaagatcctgagaaggaacctcagaaagttgccaatgagccctcactaaagggcagagcacctttagtgaaggtagaagaagccacagttgaagagcggacacctgctgaaccagaagttggccctgctgctccagccatggccccagctccagcctcggccccagctccagcctcggccccagctccagccccggtccccaccccagccatggtctcagccccgtcatccactgtgaatgccagtgcttctgttaagacttctgcaggcaccaccgacccagaggaggccacaaggcttctagctgagaagaggcggctggcccgagagcagagagaaaaggaagaaagggagaggagggagcaggaagagcttgaaagacaaaagagagaggaattggctcaacgtgtggctgaagagaggacgactcgccgtgaggaggagtcgcgcaggctggaagccgagcaggcccgggagaaggaggagcagctgcagcggcaggcggaggagcgggcgctgcgcgagcgggaggaggcagagcgcgcccagaggcagaaagaagaagaagctcgcgttcgtgaagaagcagagagggtccggcaggaacgagagaagcatttccagagagaagagcaagagcgcctggagagaaagaagcgacttgaggagattatgaaaagaaccaggagaacagaagctacagataagaaaaccagtgatcagagaaacggtgatatagccaagggagctctcactggaggaacagaggtgtctgcacttccatgtacaacaaacgctccgggaaatggaaagccagttggcagcccacatgtggttacctcacaccagtcaaaagtgacagtggagagcactcccgatttggaaaaacaaccaaatgaaaatggtgtatctgttcagaatgaaaattttgaagaaattataaacttacccattggatctaaaccatccagattagatgtcaccaacagtgagagcccagaaattcctttgaatccaattttggcctttgatgatgaagggacacttgggcccctgcctcaggtagatggtgttcagacacagcagactgcagaagttatatgagtgtttcttctgaagaaccaaagctgaaatttaatgagaatttctacaattaatggaattcctttcctgctataaaggagcatcccctccacccgttttctagagttcttgaccatcattttgaaaagatttattaaaactagctaaagacaacagactggatagcttttctaataattttcatcaataggaaaaaagaaatacgtctcattcttcaatactttaaaatggctttttccagtgtgctccttcttagcaatcaatatttttctgcattctttaaaagacaagagaatttggttataaaagaaatgggctgactaggcatgatttttttggtcttaaaagcttaacatgtaaaattggcaaaaaaaattttttaccttttataatacttgaaaaataagtacctctttgttctacaagtagaatgaataggagaagagtttaagcctgtttttttaaaatattattgcaaagagctctatttgtagaagcaaattataggcagattaccaggttcttataaatacagcttgtacatggacattctgcaaacccagctgtcacatttttcttgcaactccttttgcaaaagcagactaaaatgttttaaaatgtgaaaaaacattattttttcaaagcaagaaaataatttactgccctcttacataatgtatttataaagtttttccagataaactaatcaaataaattagaataatgtgacaacattacaaatttaatttgttagctgcattccttctgatgttaccacgatagaatgttactgatgattcagggctatttctgaagtctgtatgttgctgctgtccccagtgatggtggacttatctttgccttacctgatcacaaattatgttggggaaaataaagatttaatatttctttaaatagaaaaagaatttggttttgctcgtttaagagcaatgagaaaatgatggaatgttgactgtgtttggcacacaggacacggaccttcatggaagtccttgctctgcgtggcatctgtcagcttttcacctttcattcttattcttcacttttgctgctgagcctagctgtacaaacttgcactttcatttgctaatataaattcagttttattttaccattttagagactactaatgattaaatgtagaaggagagggtgcacatgtttttatgtggagtgtttaaaagataaatttataccactgtaatgtgcagcttttattaaaagagaaattggttgaactgctaggttgaatgagagacttcatctattggactattttttttaatccaggcatatggtctttagtaatggcttgtaatttgtgaaaacattaatttgggggttttccctgttttcagttgtccatgtacacatagtcattatattagaaaagaaatctgttcaacaaacttgtttaatttgtttaaatcaacatagcatgaaacaccaaataaaatgtttgacatagtt

SEQ ID NO: 142553 - DNA, 2795 bp, Artificial Sequence
  derived and/or modified sequence
gtaaccctctgctggtgagttcccagaacccagcatcctgcaagctgccgcttctcagctggggagatggagccgctctgggcccttcttgattaggatatgttagggttgtcagggcaactgttaacggcagcatatcatattttcccctctctgctgtgggctgaatattttactgtgtggtagcaggaagaagattggaaaaaggtgctgcagcaggaagaagctgggatctgattgaacagcacccgacagctacaaagtgcaagataagaaaaatgcctccagccgccctgcctctgcaatttcaggacaaaataacaaccactcaggaaataaaccagaccctccgcctgtgttacgtgttgatgaccggcagcggctggcccgggagcgacgtgaggaacgggagaaacagctagctgcaagagaaatagtgtggttagaaagagaagagcgagccaggcagcactacgagaagcacctggaagagcggaagaagaggttggaggagcagaggcagaaggaggagcggaggagggctgctgtggaggagaagcggaggcagagacttgaggaggacaaagaacgccacgaagctgttgtacggcgcacaatggaaaggagccagaagccaaaacagaagcataaccgttggtcgtggggaggctctctccatgggagccctagcatccacagtgcagatccagacaggcggtcagtttccaccatgaatctttcgaaatatgttgatcccgtcattagcaagcggctctcctcttcatctgcaactttactaaattctccagatagagctcgccgcctgcagctcagcccatgggagagcagcgttgttaacagactcctgacgcccacacattcgttcctggccagaagtaaaagcacagctgccttgtctggagaagcagcatcttgcagccccatcatcatgccctacaaagctgcacactctagaaattcgatggatcgaccaaaactctttgtaacaccacctgagggctcttctcgcaggaggatcattcatggcacagcgagctataaaaaagaaagagagagagaaaatgtactcttcctcacatctggcacccgaagggctgtatctccatctaatcccaaagcaagacaaccagctcgctcccgactttggcttccgtccaagtctcttcctcatttgcctggcacacccagaccgacatcctccttgccacccggctcagtcaaagctgctcctgctcaggtccggcccccatcccccggcaacatccgccctgtcaagagggaagtcaaagtggagcctgagaagaaagatcctgagaaggaacctcagaaagttgccaatgagccctcactaaagggcagagcacctttagtgaaggtagaagaagccacagttgaagagcggacacctgctgaaccagaagttggccctgctgctccagccatggccccagctccagcctcggccccagctccagcctcggccccagctccagccccggtccccaccccagccatggtctcagccccgtcatccactgtgaatgccagtgcttctgttaagacttctgcaggcaccaccgacccagaggaggccacaaggcttctagctgagaagaggcggctggcccgagagcagagagaaaaggaagaaagggagaggagggagcaggaagagcttgaaagacaaaagagagaggaattggctcaacgtgtggctgaagagaggacgactcgccgtgaggaggagtcgcgcaggctggaagccgagcaggcccgggagaaggaggagcagctgcagcggcaggcggaggagcgggcgctgcgcgagcgggaggaggcagagcgcgcccagaggcagaaagaagaagaagctcgcgttcgtgaagaagcagagagggtccggcaggaacgagagaagcatttccagagagaagagcaagagcgcctggagagaaagaagcgacttgaggagattatgaaaagaaccaggagaacagaagctacagataagaaaaccagtgatcagagaaacggtgatatagccaagggagctctcactggaggaacagaggtgtctgcacttccatgtacaacaaacgctccgggaaatggaaagccagttggcagcccacatgtggttacctcacaccagtcaaaagtgacagtggagagcactcccgatttggaaaaacaaccaaatgaaaatggtgtatctgttcagaatgaaaattttgaagaaattataaacttacccattggatctaaaccatccagattagatgtcaccaacagtgagagcccagaaattcctttgaatccaattttggcctttgatgatgaagggacacttgggcccctgcctcaggtagatggtgttcagacacagcagactgcagaagttatatgagtgtttcttctgaagaaccaaagctgaaatttaatgagaatttctacaattaatggaattcctttcctgctataaaggagcatcccctccacccgttttctagagttcttgaccatcattttgaaaagatttattaaaactagctaaagacaacagactggatagcttttctaataattttcatcaataggaaaaaagaaatacgtctcattcttcaatactttaaaatggctttttccagtgtgctccttcttagcaatcaatatttttctgcattctttaaaagacaagagaatttggttataaaagaaatgggctgactaggcatgatttttttggtcttaaaagcttaacatgtaaaattggc

SEQ ID NO: 142554 - DNA, 2250 bp, Artificial Sequence
  derived and/or modified sequence
atggccgagctgggcgccggcggcgacggccaccggggcggcgacggagccgtcaggagtgaaacggctcccgactcctataaagtgcaggataagaagaacgcatcaagtcggccagcctctgctattagtggacagaacaataaccactcaggaaacaaacccgaccctcctccagttctgcgcgtcgatgaccgacaaagactggccagagagcgacgggaagagcgggagaagcagctggcggcccgagagatcgtgtggctggaacgggaggagcgtgccagacagcactacgagaagcatctggaggagcgaaaaaaaaggctggaggagcagcggcagaaggaagagaggcggcgcgccgcagtggaggagaaacggcgccagcgcctggaggaagacaaagagcgccacgaagcagtcgtgcgccgaactatggagcgatcacagaaacctaagcaaaaacacaataggtggtcttggggaggcagcttgcacgggtctccaagtatccattccgccgatcctgaccgcaggtccgtgtccaccatgaacctgtccaagtatgtcgatccagtgatttccaaacggctcagcagctcctcagccaccctgctgaactcacctgaccgcgccagaaggctccagctgagcccttgggagtctagcgtggtgaaccgtctcctgactccgactcacagcttcctggctcgctccaagagcaccgccgcactgtctggggaagcagcctcatgtagccctattattatgccttataaggctgcacactcacgcaacagtatggacaggcctaagctcttcgtgacgcccccagaggggtcatcacgccgcagaatcatccacggcacagcaagctataagaaagaaagggagcgagaaaacgtcctctttctcacatctgggacaagaagggccgtttccccctcgaatccgaaggcccgtcagccagcccggtcacggctgtggctgccctcaaaatcattgccccatctgccaggcacgccgcgcccaacgagcagcctgccacccggctctgtgaaagccgcgcccgcacaggtgcggcccccctcacccgggaatattcgcccagtaaagagggaggtgaaggtggagcccgaaaaaaaagaccctgagaaggaaccccaaaaggtggccaatgagccctccctgaagggccgcgccccgctggtcaaagtggaggaggcaacagtcgaggagaggactcctgctgagcccgaagtcgggccagccgctcctgccatggcccccgcccctgctagcgcacccgcaccggccagcgcccctgccccagcccccgtccctacccccgccatggtgtccgcgccctcgtccacagtgaacgctagtgcatccgtgaagacctcagcagggacaactgatccagaagaggctaccagactgttggccgagaaacgcaggctcgctcgggaacagcgcgagaaagaagaaagagaaaggcgcgaacaggaggaactcgaacgacagaaacgcgaggagcttgcccagagggtcgccgaagagcggactacgagacgggaggaagaaagccggcgtctcgaagctgaacaagctcgcgaaaaagaggaacagctccagcgccaggccgaggagcgggctttaagggagcgcgaggaagcagaacgcgcacagcgccagaaagaagaggaagcgcgcgttagagaagaggccgagagagtgcggcaggagcgggagaagcatttccaacgtgaggaacaggagcgcttggagaggaaaaagagactggaagaaatcatgaagcgtaccaggcggactgaagcaactgataagaagacttcagaccaaaggaatggcgatatcgctaagggggcacttacggggggcaccgaagtatccgcgctgccttgtacaacaaacgctccaggcaacggcaaacctgtaggttctccacacgtggtcacttcccaccagagcaaggtaaccgtggagagcaccccagatctggaaaagcagcctaatgaaaacggagtttctgtacagaacgaaaatttcgaagagattataaatctgccgattggctcaaaaccctcccgtctggacgtgacaaactctgaatcccccgagatacccctcaatcctatcctggcgttcgacgacgaaggaacccttggcccgctgcctcaagtcgacggagtccaaactcagcaaaccgccgaagtaatatag

SEQ ID NO: 142555 - DNA, 2250 bp, Artificial Sequence
  derived and/or modified sequence
atggcagaactgggcgcaggcggagatggtcatcggggtggcgatggcgctgtccgctccgagacagcccctgactcatataaggtgcaggataaaaagaacgctagctcgcgcccagcgagtgcgatttcaggacagaacaacaaccactcagggaataaaccagatcccccaccggtcctccgtgtggatgacaggcaacgcctagcacgcgagaggcgcgaggagagggagaaacagctggcagccagagagatcgtctggctggaacgtgaagagagggccagacagcactacgaaaagcacctggaagagagaaagaagagactcgaggaacagcgccagaaggaggagcggcgtagggctgctgtggaagagaaacgacgccagcgcctggaggaagataaggaacggcacgaagccgtcgtccggcgaactatggagagatcgcagaaacctaaacagaagcataaccgttggtcatggggcggtagcctgcacggaagcccttcgatccattctgctgaccccgaccgacggagcgtgtccaccatgaacctgagtaaatacgtcgaccctgtgatcagcaagagactgtctagctccagcgcgacccttctgaatagccccgatcgtgcaagacggcttcagctgagtccatgggagtcctctgtcgtcaaccgacttttaacccctacacactctttcttagcgagatcgaagtccactgccgctctcagtggcgaggcggcatcttgttcccctattattatgccgtacaaagccgcacactcgaggaatagcatggataggcccaagctgttcgtgacaccacctgaaggatcatcccgcagaaggataatacacggcaccgccagttacaaaaaggaacgagaacgcgaaaatgtactgtttctaactagcgggacgaggagagccgtaagcccatccaacccgaaggccagacagcctgccaggtctcggctgtggttaccatctaagtcactgccccatctccccggaactccccgacccacaagtagcctacctccaggttccgtcaaggccgctcccgcacaagtgcgacccccttcccctggtaacattcggcctgtgaaaagagaggtaaaggtggagcccgaaaaaaaggacccagagaaggagccccagaaagtggcaaatgagcccagcctcaaggggagggctccactggtgaaagttgaggaagctacggtggaagagcgcacccccgctgaaccagaagtcggtccagctgctcctgccatggctcccgcacctgcctctgctcctgccccagcctctgcgcctgcccctgctccagtccctactcccgctatggtgtccgcgccatcctcaacagtaaatgccagtgcttccgtgaaaactagcgctggcacgaccgacccagaagaagcaacgcgacttctcgccgagaaaaggaggttggcccgtgagcagagggagaaggaggaacgcgagagacgtgagcaggaagagctcgaacgacagaagagggaagaattggcccaacgagtggctgaggagagaacgacgcggagagaggaggagtcccggcgattggaggcggagcaagcgagggaaaaagaggaacaactccagcgacaggccgaagaacgggcactgagagaacgggaggaagctgagagggcccaacgtcaaaaggaggaagaagccagggtccgagaggaggccgaacgcgtccgtcaggaacgtgagaagcactttcagcgggaagagcaggaaaggctagaaaggaagaagaggctagaagagatcatgaagcgtaccagacgcaccgaggcgacagacaagaagaccagtgaccagcgcaatggcgacatagcaaagggagcattgacaggcggtactgaggtgagtgctctcccctgtacaacgaacgcaccagggaatgggaagccggtgggatcccctcacgtggtaacgtcacaccagtcaaaagtgactgttgagtcaacccccgatctcgaaaaacagccaaatgaaaatggcgtctcggtccagaatgaaaattttgaggaaatcattaacctgccaattgggtccaaaccgtcacggcttgacgtgaccaactccgaaagcccggaaattcccctcaatcctatcctcgcttttgacgacgaggggactctaggccctctgccccaggtggacggagtgcagacgcagcagaccgcagaagtgatttag

SEQ ID NO: 142556 - protein, 620 aa, Artificial Sequence
  derived and/or modified sequence
MRRSEVLAEESIVCLQKALNHLREIWELIGIPEDQRLQRTEVVKKHIKELLDMMIAEEESLKERLIKSISVCQKELNTLCSELHVEPFQEEGETTILQLEKDLRTQVELMRKQKKERKQELKLLQEQDQELCEILCMPHYDIDSASVPSLEELNQFRQHVTTLRETKASRREEFVSIKRQIILCMEALDHTPDTSFERDVVCEDEDAFCLSLENIATLQKLLRQLEMQKSQNEAVCEGLRTQIRELWDRLQIPEEEREAVATIMSGSKAKVRKALQLEVDRLEELKMQNMKKVIEAIRVELVQYWDQCFYSQEQRQAFAPFCAEDYTESLLQLHDAEIVRLKNYYEVHKELFEGVQKWEETWRLFLEFERKASDPNRFTNRGGNLLKEEKQRAKLQKMLPKLEEELKARIELWEQEHSKAFMVNGQKFMEYVAEQWEMHRLEKERAKQERQLKNKKQTETEMLYGSAPRTPSKRRGLAPNTPGKARKLNTTTMSNATANSSIRPIFGGTVYHSPVSRLPPSGSKPVAASTCSGKKTPRTGRHGANKENLELNGSILSGGYPGSAPLQRNFSINSVASTYSEFAKDPSLSDSSTVGLQRELSKASKSDATSGILNSTNIQS

SEQ ID NO: 142557 - DNA, 1863 bp, Artificial Sequence
  derived and/or modified sequence
atgcgccgatccgaggtccttgcagaagaatctatcgtgtgtctgcaaaaggcccttaaccaccttagagagatttgggagcttatcggcatccctgaggaccagcgtctgcaaagaactgaagtcgtcaagaaacatataaaagagctcctcgacatgatgattgctgaagaagagagcctgaaggaacgccttataaaaagtatctcagtatgccagaaagagctgaacaccttgtgttctgaactgcacgtagaacctttccaggaggagggcgagaccacaattctgcaactggagaaggacttaagaacccaagtggagctgatgagaaaacagaagaaggagcgcaaacaggagctaaagttactgcaagaacaggaccaggaactctgtgagatcctttgcatgccccactacgacattgacagcgcatccgtgccttccttggaggagctgaaccagttccggcagcatgtgactaccttgcgtgagacgaaagcatcccgaagggaggagttcgtctctatcaagcgacaaatcattctctgtatggaggccctcgaccacacaccagatacaagctttgagagagacgtggtctgcgaggacgaggacgcattctgcttaagtctggaaaacatcgcaacactacagaagctgcttcggcagctggaaatgcagaaatcacagaacgaggccgtgtgcgagggacttagaacccaaatccgtgaactatgggatagactgcagattccagaggaggaacgggaagccgtggcaactattatgtctggctccaaagccaaagtcagaaaggcactgcaactggaggtggaccgcctcgaagaactaaaaatgcagaacatgaagaaagtcatagaagccattcgggtcgaactggtgcagtattgggatcagtgtttttactcccaggaacagaggcaagccttcgcccctttttgtgctgaggactacacagagagtcttctccagctccacgatgcagagatagtgaggttgaagaattattacgaggtacacaaagagttgtttgagggcgtgcagaagtgggaggaaacgtggcgcctcttcctggagtttgaacggaaggcttcagaccctaaccggttcacgaatagaggagggaatttgctgaaagaggagaagcaaagggccaagcttcaaaaaatgctacccaagctggaagaagagctgaaagccagaattgagctctgggagcaagagcatagtaaagcctttatggtgaacggtcaaaagttcatggagtacgtggccgagcagtgggaaatgcacaggcttgaaaaagagcgagcaaaacaggaaagacagttgaaaaacaagaaacagaccgagaccgaaatgctctatgggtctgccccccggactccaagcaaaaggaggggtctggcccccaatacaccaggaaaggccaggaagctcaataccacaaccatgtctaatgccactgctaactccagcatccgacccatcttcggaggcacagtgtaccatagccccgtttctcgattgcccccttccggatcaaaaccagtagccgcctcaacctgttccggaaagaagactccaaggaccggccgccatggcgccaataaagagaacctcgagttgaacggtagcatcctgagcggcgggtaccctgggagtgcaccccttcagcgcaacttctctatcaactctgtggcttccacatactccgaatttgccaaggacccatccctgagtgactcgtctacggtggggcttcaaagggagctcagtaaggcatcgaagtccgatgcaacctcaggtatcctaaattcaacgaacatacaaagctag

SEQ ID NO: 142558 - DNA, 1863 bp, Artificial Sequence
  derived and/or modified sequence
atgagaagaagtgaggtgctggccgaggagagcatcgtgtgcctgcagaaggccctgaaccacctgcgggagatctgggagctgattggcatccctgaggaccagaggctgcagaggacagaggtggtgaagaagcacatcaaggagctgctggacatgatgattgctgaggaggagagcctgaaggagcggctcatcaagagcatctctgtgtgccagaaggagctgaacaccctgtgcagcgagctgcacgtggagcccttccaggaggagggggagaccaccatcctgcagctggagaaggacctgcggacccaggtggagctgatgaggaagcagaagaaggagaggaagcaggagctgaagctgctgcaggagcaggaccaggagctgtgtgagatcctgtgcatgccccactatgacatcgacagcgcctctgtgcccagcctggaggagctgaaccagttccggcagcacgtgaccaccctgcgggagaccaaggccagccggcgggaggagtttgtgtccatcaagaggcagatcatcctgtgcatggaggccctggaccacaccccagacaccagctttgaaagagatgtggtgtgtgaagatgaagatgccttctgcctgagcctggagaacatcgccaccctgcagaagctgctgcggcagctggagatgcagaagagccagaatgaggccgtgtgtgagggcctgcggacccagatccgggagctgtgggaccggctgcagatccctgaggaggagcgggaggccgtggccaccatcatgagcggcagcaaggccaaggtgaggaaggccctgcagctggaggtggaccggctggaggagctgaagatgcagaacatgaagaaggtgattgaggccatccgggtggagctggtgcagtactgggaccagtgcttctacagccaggagcagaggcaggcctttgcccccttctgtgccgaggactacacagagagcctgctgcagctgcatgatgctgagatcgtgcggctgaagaactactatgaggtgcacaaggagctgtttgagggcgtgcagaagtgggaggagacctggaggctcttcctggagtttgagaggaaggccagtgaccccaaccgcttcaccaacagaggaggcaacctgctgaaggaggagaagcagagggccaagctgcagaagatgctgcccaagctggaggaggagctgaaggcccgcatcgagctgtgggagcaggagcacagcaaggccttcatggtgaatggccagaagttcatggagtatgtggccgagcagtgggagatgcaccggctggagaaggagcgggccaagcaggagcggcagctgaagaacaagaagcagacagaaacagagatgctgtatggcagcgcccccaggacccccagcaagaggcggggcctggcccccaacacccctgggaaggccaggaagctgaacaccaccaccatgagcaatgccacagccaacagcagcatccggcccatctttggaggcaccgtgtaccacagccctgtgtcccggctgcccccatctggcagcaagcctgtggccgccagcacctgcagcggcaagaagacccccaggacaggccgccacggggccaacaaggagaacctggagctgaatggcagcatcctgagcggcggctacccaggcagcgcccccctgcagaggaacttcagcatcaacagcgtggccagcacctacagcgagtttgccaaggaccccagcctgagtgacagcagcacagtgggcctgcagcgggagctgagcaaggccagcaagagtgatgccaccagcggcatcctgaacagcaccaacatccagagctag

SEQ ID NO: 142559 - DNA, 1863 bp, Artificial Sequence
  derived and/or modified sequence
atgcggcggagcgaggtgctggccgaggagagcatcgtgtgcctgcaaaaggctctcaatcatcttagagaaatctgggagttgataggaattcccgaggatcagcggctgcaaagaacagaggttgtgaagaagcatattaaggagctgctggatatgatgatcgcagaggaagaatctcttaaggagcgtttgattaagtccatttccgtttgtcagaaagagctgaacaccttgtgctcagagctgcatgttgaaccttttcaggaggagggagagactaccatcctacagctggaaaaagacctgagaacacaggtcgagctcatgcgcaagcaaaagaaagagagaaaacaggagctaaaacttctccaggaacaggatcaggagctgtgcgagatcctgtgcatgccccactatgatattgattcggccagcgttcctagtctggaggagttaaaccagttccggcagcatgtgaccaccctgagagagacgaaggccagtcggcgcgaggaatttgtctcaattaaacgccagattatcctgtgcatggaagccctggaccacacaccagatacttctttcgagcgggatgtggtctgtgaagacgaggacgctttttgtcttagtttggaaaatatcgccaccctccagaagttgttgagacagcttgaaatgcaaaagtcccagaacgaggccgtgtgtgagggactccgaacccaaatcagagagttgtgggataggttgcagattcctgaggaagagcgggaagcagtggccactattatgtccggctccaaggccaaggtaagaaaagcgcttcaattggaggtagatcgacttgaggagttgaaaatgcagaatatgaaaaaagttattgaggcaattagggtcgaactagtacagtattgggaccaatgcttctatagccaggaacaaagacaggcattcgctcctttctgtgccgaagattatacggagtctctgttacagttacacgatgccgagattgtgcggttaaaaaactactatgaggttcataaagagctttttgagggagttcagaaatgggaggaaacatggcgattatttctggaattcgagcgaaaagcctccgaccctaaccgattcaccaaccgcggcggcaacttgctgaaagaagagaagcagcgcgccaagcttcaaaagatgctccctaaactcgaggaggaacttaaagcacgcattgagctgtgggagcaggagcactctaaggcatttatggtcaatgggcagaaattcatggagtatgtcgcagagcaatgggagatgcacagactggaaaaggaaagggccaaacaagagaggcagttaaagaacaagaagcaaactgagactgagatgctttatggaagcgcaccaaggacaccgtccaagaggaggggtcttgcccctaacacccccggaaaggccagaaagttgaacacaaccaccatgtctaacgctacagctaacagctcaatccggcccatctttggaggcactgtgtatcattcccccgtctctcggctccccccgagcggcagtaagcccgtcgccgcgagcacctgctccgggaagaagacacccaggactggacgacacggagccaacaaagagaatttggaactgaatggatccatcttgtccggagggtatccagggtcagccccgcttcagaggaattttagtataaacagcgtggcctccacttactccgaatttgccaaggaccctagcctgagtgactcttctaccgtgggtcttcagcgcgagttaagcaaggccagtaagagcgatgctacctctggaatcctgaatagcactaatattcaaagttag

SEQ ID NO: 142560 - DNA, 1863 bp, Artificial Sequence
  derived and/or modified sequence
atgaggcgctctgaggtactggcagaggagtcaatcgtgtgcctacagaaggctctgaaccacctgagggagatatgggaactaattggtattcctgaagatcagaggctgcagcgcactgaagtagtgaaaaagcacatcaaagagttgctggatatgatgattgccgaagaggagtccctgaaagaacggctgatcaaaagcatctccgtctgccagaaggagctaaacactctctgtagtgaattacatgttgagccttttcaggaagaaggagagactactatcctgcaacttgagaaggatctgagaactcaggtggagctgatgcgtaagcagaaaaaagaacggaaacaggagctcaaactgctgcaggaacaggatcaagagttgtgcgaaatcctgtgcatgcctcactacgatatcgactccgcgagcgtcccttccctggaagagctgaaccagttcaggcagcacgtgactaccctgcgggagacaaaagcaagcaggcgcgaggagtttgtctccatcaagcgccagataattctctgcatggaggccttagaccatacgcctgacaccagctttgagagagatgtcgtctgtgaggatgaagacgctttttgtctgagtttggagaatatcgccaccctacagaagcttctgaggcagctggagatgcagaaaagccaaaatgaggccgtctgcgaaggactaagaacccagatcagagaactttgggatcgcttgcaaattccggaggaagaacgggaggcagtagctacaattatgtctggctctaaagcaaaggtcaggaaggccttgcagttggaggtggacagactggaggagctgaagatgcagaatatgaaaaaggtgattgaggcaatacgtgtagagctggttcagtattgggatcagtgcttctattcccaggagcagagacaggccttcgcacccttttgtgccgaagattacaccgaaagcctgctacagctacacgatgctgagattgtgaggttaaaaaactattacgaggtgcataaagaactgtttgagggcgtgcagaagtgggaggaaacgtggcggttgttcctggaattcgaacggaaagcatccgaccccaatcgcttcacaaatagggggggtaatctgcttaaagaggaaaaacagagggctaaactgcaaaagatgctaccaaaattagaagaggagttaaaagcgaggattgagctgtgggagcaggaacattccaaagcctttatggtgaacggtcaaaagtttatggaatacgtggctgagcagtgggaaatgcaccggctggaaaaagaacgagctaagcaagaacgccaactcaagaacaaaaagcagaccgaaacagagatgctttacggctccgcaccccgaactccctctaagcggcgtggtcttgccccaaataccccgggaaaggccaggaaattgaataccacaactatgtccaacgccaccgccaactctagcatccgccctatcttcggcggaactgtctatcattctcccgtgtccaggttgccaccgtctggcagcaaacctgttgcagctagcacctgcagtggtaagaagactccccgaacaggtcggcacggtgcaaacaaagaaaacttagagcttaatgggtcgatcctgagcggcggataccctggctcggctcccctccaacggaacttctccataaattcggtcgcttctacttactctgagttcgccaaggatccatccctgagtgattcttccacagtcggcctgcaacgagagctatccaaggcctctaagtccgatgctacaagcggcatcctgaactccaccaacattcagagttag

SEQ ID NO: 142561 - DNA, 3032 bp, Artificial Sequence
  derived and/or modified sequence
gtttgcgggtggttgttgctctcggggccgtgtggagtaggtctggacctggactcacggctgcttggagcgtccgccatgaggagaagtgaggtgctggcggaggagtccatagtatgtctgcagaaagccctaaatcaccttcgggaaatatgggagctaattgggattccagaggaccagcggttacaaagaactgaggtggtaaagaagcatatcaaggaactcctggatatgatgattgctgaagaggaaagcctgaaggaaagactcatcaaaagcatatccgtctgtcagaaagagctgaacactctgtgcagcgagttacatgttgagccatttcaggaagaaggagagacgaccatcttgcaactagaaaaagatttgcgcacccaagtggaattgatgcgaaaacagaaaaaggagagaaaacaggaactgaagctacttcaagagcaagatcaagaactgtgcgaaattctttgtatgccccactatgatattgacagtgcctcagtgcccagcttagaagagctgaaccagttcaggcaacatgtgacaactttgagggaaacaaaggcttctaggcgtgaggagtttgtcagtataaagagacagatcatactgtgtatggaagcattagaccacaccccagacacaagctttgaaagagatgtggtgtgtgaagacgaagatgccttttgtttgtctttggagaatattgcaacactacaaaagttgctacggcagctggaaatgcagaaatcacaaaatgaagcagtgtgtgaggggctgcgtactcaaatccgagagctctgggacaggttgcaaatacctgaagaagaaagagaagctgtggccaccattatgtctgggtcaaaggccaaggtccggaaagcgctgcaattagaagtggatcggttggaagaactgaaaatgcaaaacatgaagaaagtgattgaggcaattcgagtggagctggttcagtactgggaccagtgcttttatagccaggagcagagacaagcttttgcccctttctgtgctgaggactacacagaaagtctgctccagctccacgatgctgagattgtgcggttaaaaaactactatgaagttcacaaggaactctttgaaggtgtccagaagtgggaagaaacctggaggcttttcttagagtttgagagaaaagcttcagatccaaatcgatttacaaaccgaggaggaaatcttctaaaagaagaaaaacaacgagccaagctccagaaaatgctgcccaagctggaagaagagttgaaggcacgaattgaattgtgggaacaggaacattcaaaggcatttatggtgaatgggcagaaattcatggagtatgtggcagaacaatgggagatgcatcgattggagaaagagagagccaagcaggaaagacaactgaagaacaaaaaacagacagagacagagatgctgtatggcagcgctcctcgaacacctagcaagcggcgaggactggctcccaatacaccgggcaaagcacgtaagctgaacactaccaccatgtccaatgctacggccaatagtagcattcggcctatctttggagggacagtctaccactcccccgtgtctcgacttcctccttctggcagcaagccagtcgctgcttccacctgttcagggaagaaaacaccccgtactggcaggcatggagccaacaaggagaacctggagctcaacggcagcatcctgagtggtgggtaccctggctcggcccccctccagcgcaacttcagcattaattctgttgccagcacctattctgagtttgcgaaggatccgtccctctctgacagttccactgttgggcttcagcgagaactttcaaaggcttccaaatctgatgctacttctggaatcctcaattcaaccaacatccagtcctgagaagccctgatcagtcaaccagctgtggcttcctgtgcctagactggacctaattatatgggggtgactttagtttttcttcagcttaggcgtgcttgaaaccttggccaggttccatgaccatgggcctaacttaaagatgtgaatgagtgttacagttgaaagcccatcataggtttagtggtcctaggagacttggttttgacttatatacatgaaaagtttatggcaagaagtgcaaattttagcatatggggcctgacttctctaccacataattctacttgctgaagcatgatcaaagcttgttttatttcaccactgtaggaaaatgattgactatgcccatccctgggggtaattttggcatgtatacctgtaactagtaattaacatcttttttgtttaggcatgttcaattaatgctgtagctatcatagctttgctcttacctgaagccttgtccccaccacacaggacagccttcctcctgaagagaatgtctttgtgtgtccgaagttgagatggcctgccctactgccaaagaggtgacaggaaggctgggagcagctttgttaaattgtgttcagttctgttacacagtgcattgccctttgttgggggtatgcatgtatgaacacacatgcttgtcggaacgctttctcggcgtttgtcccttggctctcatctcccccattcctgtgcctactttgcctgagttcttctacccccgcagttgccagccacattgggagtctgtttgttccaatgggttgagctgtctttgtcgtggagatctggaactttgcacatgtcactactggggaggtgttcctgctctagcttccacgatgaggcgccctctttacctatcctctcaatcactactcttcttgaagcactattatttattcttccgctgtctgcctgcagcagtactactgtcaacatagtgtaaatggttctcaaaagcttaccagtgtggacttggtgttagccacgctgtttactcatacagtacgtgtcctgtttttaaaatatacaattattcttaaaaataaattaaaatctgtatacttacatttcaaaaa

SEQ ID NO: 142562 - DNA, 1863 bp, Artificial Sequence
  derived and/or modified sequence
atgagaagaagcgaggtgctggccgaggagagcatcgtgtgcctgcagaaggccctgaaccacctgagagagatctgggagctgatcggcatccccgaggaccagagactgcagagaaccgaggtggtgaagaagcacatcaaggagctgctggacatgatgatcgccgaggaggagagcctgaaggagagactgatcaagagcatcagcgtgtgccagaaggagctgaacaccctgtgcagcgagctgcacgtggagcccttccaggaggagggcgagaccaccatcctgcagctggagaaggacctgagaacccaggtggagctgatgagaaagcagaagaaggagagaaagcaggagctgaagctgctgcaggagcaggaccaggagctgtgcgagatcctgtgcatgccccactacgacatcgacagcgccagcgtgcccagcctggaggagctgaaccagttcagacagcacgtgaccaccctgagagagaccaaggccagcagaagagaggagttcgtgagcatcaagagacagatcatcctgtgcatggaggccctggaccacacccccgacaccagcttcgagagagacgtggtgtgcgaggacgaggacgccttctgcctgagcctggagaacatcgccaccctgcagaagctgctgagacagctggagatgcagaagagccagaacgaggccgtgtgcgagggcctgagaacccagatcagagagctgtgggacagactgcagatccccgaggaggagagagaggccgtggccaccatcatgagcggcagcaaggccaaggtgagaaaggccctgcagctggaggtggacagactggaggagctgaagatgcagaacatgaagaaggtgatcgaggccatcagagtggagctggtgcagtactgggaccagtgcttctacagccaggagcagagacaggccttcgcccccttctgcgccgaggactacaccgagagcctgctgcagctgcacgacgccgagatcgtgagactgaagaactactacgaggtgcacaaggagctgttcgagggcgtgcagaagtgggaggagacctggagactgttcctggagttcgagagaaaggccagcgaccccaacagattcaccaacagaggcggcaacctgctgaaggaggagaagcagagagccaagctgcagaagatgctgcccaagctggaggaggagctgaaggccagaatcgagctgtgggagcaggagcacagcaaggccttcatggtgaacggccagaagttcatggagtacgtggccgagcagtgggagatgcacagactggagaaggagagagccaagcaggagagacagctgaagaacaagaagcagaccgagaccgagatgctgtacggcagcgcccccagaacccccagcaagagaagaggcctggcccccaacacccccggcaaggccagaaagctgaacaccaccaccatgagcaacgccaccgccaacagcagcatcagacccatcttcggcggcaccgtgtaccacagccccgtgagcagactgccccccagcggcagcaagcccgtggccgccagcacctgcagcggcaagaagacccccagaaccggcagacacggcgccaacaaggagaacctggagctgaacggcagcatcctgagcggcggctaccccggcagcgcccccctgcagagaaacttcagcatcaacagcgtggccagcacctacagcgagttcgccaaggaccccagcctgagcgacagcagcaccgtgggcctgcagagagagctgagcaaggccagcaagagcgacgccaccagcggcatcctgaacagcaccaacatccagagctag

SEQ ID NO: 142563 - protein, 515 aa, Artificial Sequence
  derived and/or modified sequence
MEAREPGRPTPTYHLVPNTSQSQVEEDVSSPPQRSSETMQLKKEISLLNGVSLVVGNMIGSGIFVSPKGVLVHTASYGMSLIVWAIGGLFSVVGALCYAELGTTITKSGASYAYILEAFGGFIAFIRLWVSLLVVEPTGQAIIAITFANYIIQPSFPSCDPPYLACRLLAAACICLLTFVNCAYVKWGTRVQDTFTYAKVVALIAIIVMGLVKLCQGHSEHFQDAFEGSSWDMGNLSLALYSALFSYSGWDTLNFVTEEIKNPERNLPLAIGISMPIVTLIYILTNVAYYTVLNISDVLSSDAVAVTFADQTFGMFSWTIPIAVALSCFGGLNASIFASSRLFFVGSREGHLPDLLSMIHIERFTPIPALLFNCTMALIYLIVEDVFQLINYFSFSYWFFVGLSVVGQLYLRWKEPKRPRPLKLSVFFPIVFCICSVFLVIVPLFTDTINSLIGIGIALSGVPFYFMGVYLPESRRPLFIRNVLAAITRGTQQLCFCVLTELDVAEEKKDERKTD

SEQ ID NO: 142564 - protein, 229 aa, Artificial Sequence
  derived and/or modified sequence
MEAREPGRPTPTYHLVPNTSQSQVEEDVSSPPQRSSETMQLKKEISLLNGVSLVVGNMIGSGIFVSPKGVLVHTASYGMSLIVWAIGGLFSVVGALCYAELGTTITKSGASYAYILEAFGGFIAFIRLWVSLLVVEPTGQAIIAITFANYIIQPSFPSCDPPYLACRLLAAACICLLTFVNCAYVKWGTRVQDTFTYAKVVALIAIIVMGLVKLCQEICPWPLGFLCQL

SEQ ID NO: 142565 - DNA, 1548 bp, Artificial Sequence
  derived and/or modified sequence
atggaggcacgggaacccggtaggccaacgcctacctaccacttagttcctaacacctcgcaatcgcaggtagaggaggatgtgtcatcccctccacagcggagcagcgaaaccatgcagcttaagaaggagataagccttctaaacggcgtttctcttgtggtggggaatatgattggcagcggtattttcgtctctcccaaaggagtcctggtgcatactgcgtcctacgggatgtcattaatagtctgggcgattggtggactatttagcgtagttggcgcactgtgctacgctgagcttggaactaccattaccaaaagcggtgccagctatgcttacatcctagaggcttttgggggttttatcgctttcattcgactctgggtctctctccttgtggttgagcccacgggtcaggcaatcatcgctattacctttgcaaattacataatccaaccctcctttccatcctgtgatcctccttacctggcatgccgcctgttggctgccgcttgtatctgtctgctgacatttgtgaattgcgcctatgtcaagtggggcaccagagtgcaggacactttcacgtatgccaaggttgtcgcccttattgccatcatagttatgggcctggtgaagctgtgccaggggcactcggagcacttccaagatgccttcgaagggtcctcttgggacatgggcaacttgtcccttgcactctattctgcgctcttcagctatagtggctgggatactctgaattttgtcacagaagagatcaagaatcccgaacgaaacctaccactggctataggaatctctatgccgatcgtgaccctgatttacatcctgaccaatgtcgcttattacacggtactgaatattagcgacgtacttagctctgacgctgtggccgtaacattcgcagaccaaacattcggtatgtttagttggaccattcccatagcagtcgccctgtcttgtttcggtggtctgaacgccagtattttcgcatccagcagactgttcttcgtcggcagccgtgaggggcacctgccagatctgctctctatgattcacatcgaaagattcactccaatccccgcacttctcttcaactgcactatggccctgatttatctcattgtcgaggacgtgtttcagcttattaactatttttcgttctcatactggttttttgttggactttctgtggttggacagctctatctcaggtggaaggaaccgaaacgacctcgacccctgaagttaagtgtgtttttcccgatcgtcttctgcatttgttccgtgttcctggtgatcgtgcccctttttactgatacaattaacagcctgatcgggataggcatcgccttgagtggagtacctttttactttatgggggtgtacctgcctgagtcccggaggcccttgttcatccgaaatgttctggccgcaataacccggggaacacaacagctttgcttttgtgtcctgacagagttagacgttgcggaggaaaagaaggatgagcgcaaaactgactag

SEQ ID NO: 142566 - DNA, 1548 bp, Artificial Sequence
  derived and/or modified sequence
atggaggccagagagcccggcagacccacccccacctaccacctggtgcccaacaccagccagagccaggtggaggaggacgtgagcagccccccccagagaagcagcgagaccatgcagctgaagaaggagatcagcctgctgaacggcgtgagcctggtggtgggcaacatgatcggcagcggcatcttcgtgagccccaagggcgtgctggtgcacaccgccagctacggcatgagcctgatcgtgtgggccatcggcggcctgttcagcgtggtgggcgccctgtgctacgccgagctgggcaccaccatcaccaagagcggcgccagctacgcctacatcctggaggccttcggcggcttcatcgccttcatcagactgtgggtgagcctgctggtggtggagcccaccggccaggccatcatcgccatcaccttcgccaactacatcatccagcccagcttccccagctgcgaccccccctacctggcctgcagactgctggccgccgcctgcatctgcctgctgaccttcgtgaactgcgcctacgtgaagtggggcaccagagtgcaggacaccttcacctacgccaaggtggtggccctgatcgccatcatcgtgatgggcctggtgaagctgtgccagggccacagcgagcacttccaggacgccttcgagggcagcagctgggacatgggcaacctgagcctggccctgtacagcgccctgttcagctacagcggctgggacaccctgaacttcgtgaccgaggagatcaagaaccccgagagaaacctgcccctggccatcggcatcagcatgcccatcgtgaccctgatctacatcctgaccaacgtggcctactacaccgtgctgaacatcagcgacgtgctgagcagcgacgccgtggccgtgaccttcgccgaccagaccttcggcatgttcagctggaccatccccatcgccgtggccctgagctgcttcggcggcctgaacgccagcatcttcgccagcagcagactgttcttcgtgggcagcagagagggccacctgcccgacctgctgagcatgatccacatcgagagattcacccccatccccgccctgctgttcaactgcaccatggccctgatctacctgatcgtggaggacgtgttccagctgatcaactacttcagcttcagctactggttcttcgtgggcctgagcgtggtgggccagctgtacctgagatggaaggagcccaagagacccagacccctgaagctgagcgtgttcttccccatcgtgttctgcatctgcagcgtgttcctggtgatcgtgcccctgttcaccgacaccatcaacagcctgatcggcatcggcatcgccctgagcggcgtgcccttctacttcatgggcgtgtacctgcccgagagcagaagacccctgttcatcagaaacgtgctggccgccatcaccagaggcacccagcagctgtgcttctgcgtgctgaccgagctggacgtggccgaggagaagaaggacgagagaaagaccgactag

SEQ ID NO: 142567 - DNA, 1548 bp, Artificial Sequence
  derived and/or modified sequence
atggaggcacgggaacccggacgaccaacaccgacctaccatctcgttcccaacacctcgcaatcacaggtggaagaggatgtgagcagccctccacaacgtagcagtgagacaatgcagttgaagaaggagataagcttgcttaacggtgttagcctggtcgttgggaacatgattggatccggaattttcgtttcacccaagggcgtccttgtgcacactgcctcttacgggatgagcttgatcgtctgggccatcgggggcctgttctcagtggtgggggccctttgttacgctgagctcggcacaaccatcactaaaagcggcgcctcctatgcatacatcttggaagcattcggaggtttcattgcatttatacgcctttgggtttcattgttggtagtagagcctaccggtcaggctatcatcgccatcacctttgccaactatatcatccagccgagtttcccctcatgcgacccgccatatctcgcgtgcagattgttggcagccgcctgcatttgcctcctgacattcgtgaattgcgcatacgtgaagtgggggactagagtgcaagacacttttacctacgctaaggtagttgcactgatagccatcattgtcatggggctggttaagttgtgccagggacacagcgagcatttccaggacgcctttgagggaagctcctgggacatgggcaatctctccctcgctctgtacagtgccctgtttagctattcgggatgggacaccctcaacttcgtaacagaggagattaagaatcctgaaagaaacttacccctggccattgggattagcatgcctattgtaacccttatctacatcctgacaaacgtggcatattacactgtacttaatatttctgatgtgctgtcaagcgacgccgtggccgtgaccttcgcagaccagactttcggaatgtttagctggacaattccaatagcagtggctctttcatgcttcggaggcctgaacgcatccatattcgcaagttcacgtctttttttcgtaggttctcgagagggacatctaccagatctgctgtccatgatccacatcgagcgcttcacccccatccctgctttattgtttaactgtactatggcactcatttatttaatcgtcgaagatgtgtttcagctaattaactatttttctttttcgtactggttcttcgtgggcctgagcgtggtgggtcagctctatctgcgttggaaggaaccaaagaggccgcggcctcttaaacttagtgttttcttccctattgtgttttgtatctgctctgtttttctagttatcgtgcctctattcacagacactatcaattccctcataggcattggcattgctttatcaggcgtgcccttctatttcatgggcgtgtacctccccgaatctcgaaggcctcttttcattcgtaacgtgctggctgctatcacaagggggacccagcaattgtgcttttgtgtgctcacagaattggatgtagctgaagaaaaaaaggatgagagaaagaccgattag

SEQ ID NO: 142568 - DNA, 1548 bp, Artificial Sequence
  derived and/or modified sequence
atggaggcccgggagcccggccggcccacccccacctaccacctggtgcccaacaccagccagagccaggtggaggaggatgtgagcagccccccccagaggagcagcgagaccatgcagctgaagaaggagatcagcctgctgaatggagtgtccctggtggtgggcaacatgattggcagcggcatctttgtgagccccaagggcgtgctggtgcacacagccagctatggcatgagcctcatcgtgtgggccatcggcggcctcttctctgtggtgggcgccctgtgctacgccgagctgggcaccaccatcaccaagagcggggccagctatgcctacatcctggaggcctttggaggcttcatcgccttcatccggctgtgggtgtccctgctggtggtggagcccaccggccaggccatcatcgccatcacctttgccaactacatcatccagcccagcttccccagctgtgaccccccctacctggcctgccgcctgctggccgccgcctgcatctgcctgctgacctttgtgaactgtgcctacgtgaagtggggcaccagggtgcaggacaccttcacctacgccaaggtggtggccctgattgccatcatcgtgatgggcctggtgaagctgtgccagggccacagcgagcacttccaggatgcctttgagggcagctcctgggacatgggcaacctgagcctggccctgtacagcgccctcttctcctacagcggctgggacaccctgaactttgtgacagaggagatcaagaaccctgagaggaacctgcccctggccatcggcatctccatgcccatcgtgaccctcatctacatcctgaccaacgtggcctactacacagtgctgaacatcagtgatgtgctgagcagtgatgctgtggccgtgacctttgctgaccagaccttcggcatgttctcctggaccatccccatcgctgtggccctgagctgctttggaggcctgaatgccagcatctttgccagcagccgcctcttctttgtgggcagccgggagggccacctgcctgacctgctgtccatgatccacatcgagcgcttcacccccatcccagccctgctcttcaactgcaccatggccctgatctacctgattgtggaggatgtgttccagctgatcaactacttctccttctcctactggttctttgtgggcctgtctgtggtgggccagctgtacctgcgctggaaggagcccaagaggccccggcccctgaagctgtctgtgttcttccccatcgtgttctgcatctgcagcgtcttcctggtgattgtgcccctcttcacagacaccatcaacagcctgattggaattggaattgccctgagcggcgtgcccttctacttcatgggcgtgtacctgcctgagagcagaagacccctcttcatcagaaatgtgctggccgccatcacccggggcacccagcagctgtgcttctgtgtgctgacagagctggatgtggccgaggagaagaaggatgagaggaagacagactag

SEQ ID NO: 142569 - DNA, 1548 bp, Artificial Sequence
  derived and/or modified sequence
atggaggcccgggagcccggccggcccacccccacctaccacctggttcccaacaccagccagagccaagtggaagaggacgtgagctccccaccccagcggtcttctgaaaccatgcagctcaaaaaggagattagcctgttaaatggcgtgtctctggtcgtaggaaacatgataggttctggaattttcgtctcccccaaaggcgttctggtacataccgcctcatatggtatgtcattgatcgtttgggccatcgggggtctttttagtgtcgttggagccctgtgctatgctgagctgggtaccacaattaccaagtccggcgccagctacgcatacatcctggaggcatttggggggtttatagcctttatccgcctctgggtgagtctgctcgtggttgaacccaccggccaggccattatcgctattacttttgcaaactacatcattcagcctagttttccttcatgtgaccccccgtatctcgcgtgccgcctcctggcagccgcctgcatctgcctgctgacatttgtgaactgcgcctatgtaaaatggggcaccagagtgcaggatactttcacctacgctaaagtggttgcactgatcgcaatcattgtgatggggttagtcaaactgtgccaggggcactccgagcattttcaggatgcttttgaaggatcatcatgggatatggggaatttgtccctggcactgtactcggccctgttcagttattccggctgggatactctgaatttcgtgacagaggaaattaaaaatcctgagcgcaatctgcccttggccatcgggattagcatgccaatcgtcaccctgatatacatcctgacgaatgtcgcatattatacagtgttgaatataagcgatgttctcagctctgacgcagtggctgtgacctttgccgaccagacgtttggaatgttcagttggactatccccatagcagtggcactcagttgttttggtggactgaatgcctcaatctttgcaagttcccggttattcttcgtcgggtcccgagagggccatctgccagacctactgagcatgatacacattgagcgttttacacccattccggccctgctattcaattgtactatggcattaatctatctcatcgtggaagatgttttccagttgatcaattatttttctttcagctactggttcttcgtgggtttgtccgtggtgggacaactatacctacgctggaaggaaccaaaacgcccgcgcccactcaagctgagtgtgttcttcccgatcgtgttctgcatctgctccgtcttcctggtcattgtgccattgttcactgacaccattaattccctcatcggaatcggcattgccctgtctggcgttccgttttattttatgggggtttatctacctgaatcccgacgacccctgttcataaggaacgttttggcagctatcacccggggaacccagcagttatgtttctgtgtgctcaccgaacttgacgttgccgaagagaagaaggacgagagaaaaacggactag

SEQ ID NO: 142570 - DNA, 690 bp, Artificial Sequence
  derived and/or modified sequence
atggaggccagagagcccggcagacccacccccacctaccacctggtgcccaacaccagccagagccaggtggaggaggacgtgagcagccccccccagagaagcagcgagaccatgcagctgaagaaggagatcagcctgctgaacggcgtgagcctggtggtgggcaacatgatcggcagcggcatcttcgtgagccccaagggcgtgctggtgcacaccgccagctacggcatgagcctgatcgtgtgggccatcggcggcctgttcagcgtggtgggcgccctgtgctacgccgagctgggcaccaccatcaccaagagcggcgccagctacgcctacatcctggaggccttcggcggcttcatcgccttcatcagactgtgggtgagcctgctggtggtggagcccaccggccaggccatcatcgccatcaccttcgccaactacatcatccagcccagcttccccagctgcgaccccccctacctggcctgcagactgctggccgccgcctgcatctgcctgctgaccttcgtgaactgcgcctacgtgaagtggggcaccagagtgcaggacaccttcacctacgccaaggtggtggccctgatcgccatcatcgtgatgggcctggtgaagctgtgccaggagatctgcccctggcccctgggcttcctgtgccagctgtag

SEQ ID NO: 142571 - DNA, 1548 bp, Artificial Sequence
  derived and/or modified sequence
atggaggccagggagcctggacggcctacccctacctaccacctggtccccaacacaagccagtcgcaggtggaagaggacgtgagctcacccccacagagatcgagtgagacaatgcagctgaaaaaagagatttccctgctgaatggggtgtctctggtcgtaggaaacatgatcgggtccgggattttcgtgtcgcctaagggcgtcctggttcacaccgcctcctacggaatgtctttgatcgtttgggcaatcggcggactgttctcagtggtcggtgctctttgctacgccgaacttggtaccaccatcactaagtcaggggcatcatacgcatatatactggaggcttttgggggctttattgctttcattaggctgtgggtttcactgctcgtagtcgaacccaccggacaggctataattgcaatcacctttgcaaattacattatccaacctagcttcccctcctgcgacccaccgtatctggcctgcagactacttgctgccgcctgcatttgtcttctcacctttgtgaattgtgcgtacgtgaaatggggcacccgggtccaagatacattcacgtacgccaaggtggtggctttaatcgccattatcgttatgggtctcgtgaagctgtgccaaggacatagtgagcacttccaggatgcgttcgaaggctcttcctgggacatgggcaacctcagcctggctctgtactccgcactgttcagttattcaggatgggacacactgaactttgtgaccgaggaaatcaaaaatcccgagaggaacttacccctggcaattggtataagcatgccaatcgtcactctgatttacattctaacaaatgttgcctactacactgtgctgaatattagtgacgtattaagttcagatgctgtggccgtgacgtttgccgatcagactttcgggatgtttagttggaccatcccgatagcggtcgccctgtcttgcttcggcgggctcaacgccagcatattcgcctcctccagattgttcttcgtcggcagtcgagaaggccacctgcccgatctactcagcatgattcatattgaacgtttcactcccatccctgctcttctgtttaactgcacaatggcactcatttacctgatcgttgaggacgtgtttcagctaatcaattacttttccttctcttattggttctttgtgggtctgagcgtggttggccagttgtacctgcgctggaaagaacccaagcgtcctagacctctcaagctctctgtcttctttcccatcgttttctgcatttgctcggtgtttctggttattgtccccctttttacggataccattaactccctaatcgggattgggatcgcacttagtggcgtccctttttattttatgggggtatacctcccagaatcacggcgcccgcttttcattaggaatgttctggccgccattactaggggcacccagcaattatgcttctgcgtattaaccgaactcgatgtagcagaagaaaagaaggacgagaggaaaactgactag

SEQ ID NO: 142572 - DNA, 690 bp, Artificial Sequence
  derived and/or modified sequence
atggaagctagggagcctggccgccctactcctacctatcacttggttcctaatacatctcaatcacaggtcgaggaggacgtgagctcaccaccacagcgctcatcagaaaccatgcagttaaaaaaagagatcagccttcttaacggcgtgtctctggtcgtgggcaacatgatagggagcggcatattcgttagccccaaaggagtgctggtgcacacggcttcatatgggatgtccttaatagtctgggccattgggggcctgttttcagtggttggggccctttgctatgcagagttgggcactaccattacaaaaagtggggcttcatacgcatatattctggaagccttcgggggattcatcgctttcatcaggctgtgggtatccctgttagtcgtggagccaacaggacaggccataatcgccatcacattcgcaaactatataatccaaccctcgttcccatcttgtgatcccccatacctggcttgtcgccttctggctgctgcctgcatctgcttactgaccttcgtgaactgtgcttacgtgaagtggggaaccagggtgcaggatacgttcacctatgccaaggttgtcgccctgatcgccataatcgtgatggggctagtgaaactgtgccaggagatctgcccctggcctctcggatttctttgccagttatag

SEQ ID NO: 142573 - DNA, 690 bp, Artificial Sequence
  derived and/or modified sequence
atggaggcccgggagcccggccggcccacccccacctaccacctggtgcccaacaccagccagagccaggtggaggaggatgtgagcagccccccccagaggagcagcgagaccatgcagctgaagaaggagatcagcctgctgaatggagtgtccctggtggtgggcaacatgattggcagcggcatctttgtgagccccaagggcgtgctggtgcacacagccagctatggcatgagcctcatcgtgtgggccatcggcggcctcttctctgtggtgggcgccctgtgctacgccgagctgggcaccaccatcaccaagagcggggccagctatgcctacatcctggaggcctttggaggcttcatcgccttcatccggctgtgggtgtccctgctggtggtggagcccaccggccaggccatcatcgccatcacctttgccaactacatcatccagcccagcttccccagctgtgaccccccctacctggcctgccgcctgctggccgccgcctgcatctgcctgctgacctttgtgaactgtgcctacgtgaagtggggcaccagggtgcaggacaccttcacctacgccaaggtggtggccctgattgccatcatcgtgatgggcctggtgaagctgtgccaggagatctgcccctggcccctgggcttcctgtgccagctgtag

SEQ ID NO: 142574 - DNA, 1548 bp, Artificial Sequence
  derived and/or modified sequence
atggaggcccgggagcccggccggcccacccccacctaccacctggtacctaacacaagtcagtctcaggtggaggaagacgtgtcttctcccccccagcgcagcagcgaaacaatgcagctgaagaaggagatctctttgctcaatggagtaagcttggtggttggcaatatgattgggtcgggcatttttgtgtcacccaagggcgttttagtacataccgccagctatggcatgtccctgatagtgtgggccataggcggtctgttcagcgtagtgggggccctgtgctacgcagaacttggaactaccatcacgaagtcaggcgcaagctacgcatatattctggaggccttcggcggttttattgcttttattcgactttgggtgagcctactcgtggtcgagccaaccggccaggccataattgctattaccttcgccaactacatcatacagccctcatttccctcttgtgacccaccttacctagcatgtcgacttctggccgcggcttgcatctgcctcctcacctttgtgaattgcgcgtatgtgaaatggggcactcgggtgcaggacacttttacgtatgcaaaggtggttgcccttattgccatcattgtcatgggcctagtgaaactctgtcaaggacactctgagcacttccaagacgctttcgaaggcagtagttgggacatgggcaatcttagcctggcattgtattctgcactcttctcgtactctggctgggacaccctgaatttcgtcacggaagagatcaagaatcctgagaggaacttgccgctagctatcggaataagtatgcctatcgtgaccctgatttatatcttaaccaatgtcgcatactataccgtccttaacattagtgatgtgctttcttccgatgccgtagccgtcacatttgcagaccagactttcggcatgttctcctggaccattccgatcgcagtggcgctgtcttgtttcgggggacttaatgcttcgattttcgcgagctcccgactattcttcgtcggctcacgggaaggtcacctcccagacctgctttcaatgatccacattgagcgttttacaccaatccccgcactgctcttcaattgtaccatggccttaatttacttgattgttgaagacgtgtttcagctcatcaactacttctccttctcttactggttctttgtgggcctgtccgtcgtgggccaactgtacctgagatggaaagaaccgaagcgcccacgaccattgaagctttccgttttcttccccatcgtgttctgtatctgcagtgttttcctcgtaatcgttcctttgttcacagacacaatcaattcgctgatcggaattggaatcgccctgtcgggtgtgcccttctacttcatgggcgtgtacctccccgaatcccggagacctttattcattcgaaatgtgctggctgctatcaccaggggcacacagcagctttgtttttgtgttctcacagagctggacgtggctgaggaaaagaaggacgagcgaaagactgattag

SEQ ID NO: 142575 - DNA, 690 bp, Artificial Sequence
  derived and/or modified sequence
atggaggcccgggagcccggccggcccacccccacctaccacctggtgcctaacaccagtcagagccaggtcgaggaagatgtctctagtccgccccagcgcagctccgaaacaatgcaattaaagaaggagatttcactgctgaatggtgtgtccctagtcgtgggcaatatgataggcagtggcatctttgtgagcccaaaaggtgtgctggttcatacggcgagctacggtatgagcctcatcgtctgggccatagggggcttgttttccgtggtgggagccttgtgttacgcggagctgggcactactataactaagtcaggggcatcctacgcgtatatactagaagccttcgggggctttatagccttcatacgtctctgggtgagtctcctggtggtggaacctactgggcaggcgatcatcgctattacattcgccaactatatcattcaaccctcttttcctagctgtgacccaccctaccttgcatgtagactgctggccgccgcgtgtatttgtctgctaaccttcgtgaactgcgcgtacgtaaaatggggcacacgagtacaagatacctttacctatgcgaaagtcgtggctctgattgctataattgtgatgggactggttaaactttgccaagagatatgcccctggcccctcgggttcctgtgccaactgtag

SEQ ID NO: 142576 - DNA, 1548 bp, Artificial Sequence
  derived and/or modified sequence
atggaggctagggaacctgggagacctacacctacctaccacttagtgcctaatacatcccagtcccaggtggaggaggatgtgtcgagtcccccacagagatcatcggaaactatgcaacttaagaaggagattagcctgctcaatggggtgagtctcgtggtcggaaacatgattggtagcggaattttcgtgagtcctaaaggagtgttggttcacacagcgtcctacggcatgagtctgatagtctgggccataggtggattattttccgttgttggtgcactctgttatgcggagctggggacaactattacaaagagcggagcgagctatgcctatatcttagaagccttcggtgggtttatcgcgttcatccggttgtgggtcagtcttctggtggtagaaccgactggacaagccattatagccatcacctttgctaactatatcattcagccctccttcccaagctgcgacccaccgtacctggcctgtaggctgttggctgctgcctgtatatgcctgctaacattcgtcaactgcgcatacgtgaagtggggcacacgcgtacaagacacatttacctatgccaaggtcgtcgctctcatcgctatcatagttatgggcctggttaagctgtgccaaggacattccgagcactttcaggatgcatttgagggaagctcatgggacatgggtaacctatccctcgcactctacagcgccctgtttagctatagcgggtgggacacactaaactttgtgactgaagagatcaaaaatccggagcggaatttgcccctggcgattgggatctctatgcctatcgtgacacttatttatatattaacaaacgtggcctactacacagtcctaaacattagcgatgttctctcttctgatgctgtcgcagttacctttgcagaccagacattcggaatgtttagctggaccattcctattgccgtggctttaagctgttttggcggtctgaatgcaagcattttcgcgtcctcacgtctgttctttgtggggtccagggaggggcacctgcccgacttactgagtatgatacatatcgagaggtttacgcctatccctgcactcctgttcaactgtacaatggctctgatctatttgatcgtagaagacgtgttccagctcattaactacttctccttttcatattggtttttcgttggtctcagtgtggtggggcagctctatttgaggtggaaggagccaaaaagacccagaccgctcaaactgtcggttttttttccgatcgtcttctgcatttgcagcgtcttcctcgtcatagttcccctttttacagacaccattaattctctcatcggcattggtatcgcgctgagtggcgtccccttttacttcatgggtgtgtacttgccggagagtcggaggcccctgttcatcaggaacgttttggccgctattacacgcggaactcagcagctctgcttctgcgttcttaccgagctggacgtcgcagaggagaagaaggacgaacgcaagacagactag

SEQ ID NO: 142577 - DNA, 690 bp, Artificial Sequence
  derived and/or modified sequence
atggaagcccgagaacccggaaggcccacacccacataccacttggttcccaacacaagccagtcccaagtcgaggaagacgtgtcaagcccccctcaaaggagctccgaaaccatgcagctcaaaaaagagatatccctgctcaatggggtgtctctcgtggtgggtaacatgatcggttcaggaattttcgtgtccccaaagggcgtgcttgttcataccgccagttatgggatgagtctgatcgtgtgggctataggtggcctgttcagcgtggtcggtgcactgtgttacgccgagctaggcactaccattactaagagtggggctagttacgcctacatactcgaggccttcggaggtttcatcgcattcatccggctgtgggtgagcctgcttgtggttgaacccacaggccaagcaatcatagctataaccttcgcgaactatatcattcagccgtcatttccatcctgcgatccaccttacctggcctgtcgcctgctggcggctgcttgtatctgtctccttacattcgtcaactgtgcatacgtaaagtggggaacgagagtgcaggacacttttacctacgccaaggtggtggccctgattgccatcatcgtcatgggactcgtgaagttatgtcaagaaatttgcccgtggcctctgggtttcctgtgccagctctag

SEQ ID NO: 142578 - DNA, 6308 bp, Artificial Sequence
  derived and/or modified sequence
cgccgggccactgggagagtttatgtggccgaggcagacaagtggaattaggccttgctgcaggggacttcatttccttctcagtactggacccatttatgaggaggtggcttatgaaagtgtgatgttcgcgtatttcttgacaggcagtggcgtgatcttggctcactgcaacctccgactccctggttcaagcgattctcctgcctcagcctcctgagtggggattacaggccacagcaaacacaggtgtgcaggaaccgtttgtcatggaagccagggagcctgggaggcccacacccacctaccatcttgtccctaacaccagccagtcccaggtggaagaagatgtcagctcgccacctcaaaggtcctccgaaactatgcagctgaagaaggagatctccctgctgaatggggtcagcctggtggtgggcaacatgatcggctcagggatctttgtctcacccaagggtgtgctggtacacactgcctcctatgggatgtcactgattgtgtgggccattggtgggctcttctctgttgtgggtgccctttgttatgcagagctggggaccaccatcaccaagtcgggagccagctacgcttatattctagaggcctttgggggcttcattgccttcatccgcctgtgggtctcactgctagttgttgagcccaccggtcaggccatcatcgccatcacctttgccaactacatcatccagccgtccttccccagctgtgatcccccatacctggcctgccgtctcctggctgctgcttgcatatgtctgctgacatttgtgaactgtgcctatgtcaagtggggcacacgtgtgcaggacacgttcacttacgccaaggtcgtagcgctcattgccatcattgtcatgggccttgttaaactgtgccagggacactctgagcactttcaggacgcctttgagggttcctcctgggacatgggaaacctctctcttgccctctactctgccctcttctcttactcaggttgggacacccttaattttgtaacagaagaaatcaaaaacccagaaagaaatttgcccttggccattgggatttctatgccaattgtgacgctcatctacatcctgaccaatgtggcctattacacagtgctgaacatttcagatgtccttagcagtgatgctgtggctgtgacatttgctgaccagacgtttggcatgttcagctggaccatccccattgctgttgccctgtcctgctttgggggcctcaatgcatccatctttgcttcatcaaggttgttcttcgtgggctcccgggagggccacctaccggaccttctgtccatgatccacattgagcgttttacacctatccctgctttactgttcaattgcaccatggcactcatctacctcatcgtggaggatgttttccagcttatcaactacttcagcttcagctactggttcttcgtgggcctgtctgttgttggacagctctacctccgctggaaggagcccaagcggccccggcctctcaagctgagcgtgtttttccccatcgtgttctgcatatgctccgtgtttctggtgatagtgcccctcttcactgacaccattaattccctcattggcatcgggattgccctttctggagtccctttctacttcatgggtgtttacctgccagagtcccggaggccattgtttattcggaatgtcctggctgctatcaccagaggcacccagcagctttgcttttgtgtcctgactgagcttgatgtagccgaagaaaaaaaggatgagaggaaaactgactagaggtcagaggtggctttctgaggcctggaaggcaggccaaccagcaaaatcctgataacaagactctgtgggcccaactctcctgaattaaaggagccttttgacccaatcatatagtggggctcagggccagtgctcactcttattggtaagctataggagactcaggatctgggccaacctcaaggtgggggcttcagagggtggggggaagattggggaacggggggaatggtcatttagttttactcctgataggtagatgcagctcttacagatatttacttggtaaagtgcagtggggaagagggaatgctaggttgatagggctggtggcttctgaatttggtatttgaactaggagtccctatagaggggctgctttatgggaagtttttctctgaccaggtacaacacctgactttaaaggcctgaaatgctaccatttcttcctctggctcaaaattcttccctggggagagagttatattcccttatttattgatatttagtccagaacaccagttctaacgaagcatgcgtgtctcttcatctacaggatgcaataggctgattgtatttaaaaatcaaagtacccaaaactgagtccctttgggctcagaaatgtctgtggtattgggtcagactctgaccacaggttttatgctgtttagcacaatttctattgagtcttacctgcaacaatgaaccttaaagatttttttactcacgtacctgttacactttagcatacagatagatcatagatcacgttacaagcacttggctcaggtccagcaaggacagatgaacaaattcctgagtcagaagtctgttaatattgctgttttgaaggacaatcctttattttacttgagaccttacatctttgttctagctgacagtaaatctctgggtttctgttacgaactctaagagggctgaaacttctgatattcaggtggatcacctgaattctctcagctgtcaatggcttggagaacatctcatgggcccaagtcatcaaataacctgttcctctctgtaagggcagtgtgagggactgctgtgcagacccaagcaatcccaacctggtgctaggtcatttcacttttctgaaaacctcacatcaggctgcatcctcttctgtccctggcaccaggctttgtttacacttggagccaccttggtgtgggtcaccgggacagtgtactcctctcctgccagcctccccttccccgaggtgtggtggctgcagtctcaggaagagcttggtacttgtggggacttctgttttctccctgtggagatcagtgaagactgggaggaaagctgcttcaacctgagtccggctcttcagcaggctgcacaagtggaagcaactaattctggtgctcaggctgggctctccacccaagttaggcctgctctggcctaatggatcttactgtatgagcaggacggctgcattggattgtacaactgttttgtgatgcccccagacactgtcatcctgggccgagaagaacctgctagcttgacataccccatgggcttatccttaggttttggaattggtcaacagtgaggcagtctcccttcctgaccattcttctccacccagtcacagataagggaataaccttggccatatatttgctcaataaagattgaaggaagcatggtcatagttgccctgggttcagagcataatgcatatgtgaagcatggggtgacattcctactgtcatgggtttgggatttgtaacggcaaattcctgcccgacgacagggtgtcttatgcaaaggctgacttgcctgaacgctaagaacatgacttctgtctgagctaagctggcacccatcccagggctcctctggagctaatcctttaagcaaaatgtgcttgccttttaaagatccctgaccccagctttagctttctccaccagataaccagctaatcccaggaatttgctgccccccaccagtggcttctagggaaagcaaggacctcacatgccaggtgccctagtacttgcttagtgagccatgtcatcctcctttcatttttggatggtgacagcatttttcccctctgtgctggatacagacttctcccaggatcctctctttgggagcgaagccagaggatccctacagcactcaagcttcatggtggaattaatttctgccagctctttgttgtctgtctccttaaatccttttcctggtgtgcttattatcccttttgcagtgagtacagtttattaagttgtcagccctttaatattggggaaacttaatgagtataaatagcagggagcacattgtaacagcacagtgttttgtttttttcacccggttgctgtatgagaatggctttcaatcctttgtttctatgcctacagacagaaagcaagatgtctaatattagacatacaagttgctgcctgttataacggtgaattatacctttgtgcatgcctaggatgtttgttgttttaattagctgcaatatatacggcctgtgtacacagaatttaatcacttcggcaggttgaacaactccatgtagataagagcaagtgtaggcaaaggtttagaaaatggacataaagtcaaagaatgatggcaggtaggatgaaggagagatacttaggaaatcctaaaagaggcggcaagaaggtacctccctgtgtaactcaccttcccccatgacagtgagtaagagacactcacaggctatgagggtacacccctagctgaatgttctgtgttgtttccttagacctgtggtgtccgctgcaacagctactagccacgtgtagctaattacattaaaatgaaataaaattaaaagctcagtttctcagttgcgctaatcacatttcaagtgctcagcagccacccgtgtctactactacacagtgcagacacagaacatatcatcactgcagatagttctactggacaatgttacgctagaataaacaccaaggcagtcagttaaggcagctatggtttggaaaggcatacggacagagtctgcttagaagagatacaagttgttaataaaattgatcctgttgatagtagtttgtttttgtggtgggtgctgtgaagagtaaacattactcagtggaaagctaagttcagaaggtactttgtttttcctcccttgccttaagtccttggtatttataatcaatgctgaaccttctatttcactaccgctccctgttttagatattcagatttaaaaggttttcaaagaattactttcttccatgttcaaagctagattttactaaacacatgtatcacattcatatatattgtttcttggccccactgccaaaggaagtcagtcagtaatttcacaaccgttatcagagtttggaagcagaaatagctgttaactaaaatctcccactgctcagactactttctgccctaatggccattactatccagtctgtattgctacaagggacccactggtaccccttttagattctatcaaaaggaacagggttttcctagaggcaggcagcctggtggtatggcacagcagaagcttactgctaatgaaatgggaacctccccctcccttgtggtttcagcacagaacctgaatgccaggaaaaattcctgggccaagaagctaaagctaaagaaaccttccttttttcaacgtttttttttctttcaaactgtagggtcacttttgattgaggcaaaggggtcctactgtaagtggaaaagactcactcccctaacataagttttcactgtggtgggatggtgccgcccgatatgcttgatatgcttttccttccacatgttaagctaggaaacctaacaggatgtcagcagggcagttaactctggactcagagccctcaagggcatgtggcagaacctcatggacatcacaagaccatcagtctgaatccaggtcgtgggggctgtcatagccgaactccttctgcacatccagagggtacttgctccacatccgctgtctgctgctgcctctttcctcctcactcaggctgttgtagtcagcagagcctagaatgacatcccgggagtggattctaaatgtgattttcctaggctactgcaggagccccttctcttctcagaaaggtctgtttttgttcccgattgtaatgcaaaatccttgctcaataaataaaaaagaatatagaattcttttttttttaaagaaggaatcactttcctatcatctaaaccaagttccttcacactggagtattttgtcacttctcccctccgtggagtattttgtcacttctcccctccgtataggattttttgttgttgtaagagttgtagtcatattgtaaatatttttgtacctttctccttttaacgtgttattgacaaacctccccaaaagaatatgcaattgtttgattcatttctctgttatcagacaccaataaattctttttgttgggc

SEQ ID NO: 142579 - DNA, 6261 bp, Artificial Sequence
  derived and/or modified sequence
gctgccgcggcggcggcggcgcgaccgagcatcctggcggcgccgggccactgggagagtttatgtggccgaggcagacaagtggaattaggccttgctgcaggggacttcatttccttctcagtactggacccatttatgaggaggtggcttatgaaagtgtgatgttcgcgtatttcttgacaggccacagcaaacacaggtgtgcaggaaccgtttgtcatggaagccagggagcctgggaggcccacacccacctaccatcttgtccctaacaccagccagtcccaggtggaagaagatgtcagctcgccacctcaaaggtcctccgaaactatgcagctgaagaaggagatctccctgctgaatggggtcagcctggtggtgggcaacatgatcggctcagggatctttgtctcacccaagggtgtgctggtacacactgcctcctatgggatgtcactgattgtgtgggccattggtgggctcttctctgttgtgggtgccctttgttatgcagagctggggaccaccatcaccaagtcgggagccagctacgcttatattctagaggcctttgggggcttcattgccttcatccgcctgtgggtctcactgctagttgttgagcccaccggtcaggccatcatcgccatcacctttgccaactacatcatccagccgtccttccccagctgtgatcccccatacctggcctgccgtctcctggctgctgcttgcatatgtctgctgacatttgtgaactgtgcctatgtcaagtggggcacacgtgtgcaggacacgttcacttacgccaaggtcgtagcgctcattgccatcattgtcatgggccttgttaaactgtgccagggacactctgagcactttcaggacgcctttgagggttcctcctgggacatgggaaacctctctcttgccctctactctgccctcttctcttactcaggttgggacacccttaattttgtaacagaagaaatcaaaaacccagaaagaaatttgcccttggccattgggatttctatgccaattgtgacgctcatctacatcctgaccaatgtggcctattacacagtgctgaacatttcagatgtccttagcagtgatgctgtggctgtgacatttgctgaccagacgtttggcatgttcagctggaccatccccattgctgttgccctgtcctgctttgggggcctcaatgcatccatctttgcttcatcaaggttgttcttcgtgggctcccgggagggccacctaccggaccttctgtccatgatccacattgagcgttttacacctatccctgctttactgttcaattgcaccatggcactcatctacctcatcgtggaggatgttttccagcttatcaactacttcagcttcagctactggttcttcgtgggcctgtctgttgttggacagctctacctccgctggaaggagcccaagcggccccggcctctcaagctgagcgtgtttttccccatcgtgttctgcatatgctccgtgtttctggtgatagtgcccctcttcactgacaccattaattccctcattggcatcgggattgccctttctggagtccctttctacttcatgggtgtttacctgccagagtcccggaggccattgtttattcggaatgtcctggctgctatcaccagaggcacccagcagctttgcttttgtgtcctgactgagcttgatgtagccgaagaaaaaaaggatgagaggaaaactgactagaggtcagaggtggctttctgaggcctggaaggcaggccaaccagcaaaatcctgataacaagactctgtgggcccaactctcctgaattaaaggagccttttgacccaatcatatagtggggctcagggccagtgctcactcttattggtaagctataggagactcaggatctgggccaacctcaaggtgggggcttcagagggtggggggaagattggggaacggggggaatggtcatttagttttactcctgataggtagatgcagctcttacagatatttacttggtaaagtgcagtggggaagagggaatgctaggttgatagggctggtggcttctgaatttggtatttgaactaggagtccctatagaggggctgctttatgggaagtttttctctgaccaggtacaacacctgactttaaaggcctgaaatgctaccatttcttcctctggctcaaaattcttccctggggagagagttatattcccttatttattgatatttagtccagaacaccagttctaacgaagcatgcgtgtctcttcatctacaggatgcaataggctgattgtatttaaaaatcaaagtacccaaaactgagtccctttgggctcagaaatgtctgtggtattgggtcagactctgaccacaggttttatgctgtttagcacaatttctattgagtcttacctgcaacaatgaaccttaaagatttttttactcacgtacctgttacactttagcatacagatagatcatagatcacgttacaagcacttggctcaggtccagcaaggacagatgaacaaattcctgagtcagaagtctgttaatattgctgttttgaaggacaatcctttattttacttgagaccttacatctttgttctagctgacagtaaatctctgggtttctgttacgaactctaagagggctgaaacttctgatattcaggtggatcacctgaattctctcagctgtcaatggcttggagaacatctcatgggcccaagtcatcaaataacctgttcctctctgtaagggcagtgtgagggactgctgtgcagacccaagcaatcccaacctggtgctaggtcatttcacttttctgaaaacctcacatcaggctgcatcctcttctgtccctggcaccaggctttgtttacacttggagccaccttggtgtgggtcaccgggacagtgtactcctctcctgccagcctccccttccccgaggtgtggtggctgcagtctcaggaagagcttggtacttgtggggacttctgttttctccctgtggagatcagtgaagactgggaggaaagctgcttcaacctgagtccggctcttcagcaggctgcacaagtggaagcaactaattctggtgctcaggctgggctctccacccaagttaggcctgctctggcctaatggatcttactgtatgagcaggacggctgcattggattgtacaactgttttgtgatgcccccagacactgtcatcctgggccgagaagaacctgctagcttgacataccccatgggcttatccttaggttttggaattggtcaacagtgaggcagtctcccttcctgaccattcttctccacccagtcacagataagggaataaccttggccatatatttgctcaataaagattgaaggaagcatggtcatagttgccctgggttcagagcataatgcatatgtgaagcatggggtgacattcctactgtcatgggtttgggatttgtaacggcaaattcctgcccgacgacagggtgtcttatgcaaaggctgacttgcctgaacgctaagaacatgacttctgtctgagctaagctggcacccatcccagggctcctctggagctaatcctttaagcaaaatgtgcttgccttttaaagatccctgaccccagctttagctttctccaccagataaccagctaatcccaggaatttgctgccccccaccagtggcttctagggaaagcaaggacctcacatgccaggtgccctagtacttgcttagtgagccatgtcatcctcctttcatttttggatggtgacagcatttttcccctctgtgctggatacagacttctcccaggatcctctctttgggagcgaagccagaggatccctacagcactcaagcttcatggtggaattaatttctgccagctctttgttgtctgtctccttaaatccttttcctggtgtgcttattatcccttttgcagtgagtacagtttattaagttgtcagccctttaatattggggaaacttaatgagtataaatagcagggagcacattgtaacagcacagtgttttgtttttttcacccggttgctgtatgagaatggctttcaatcctttgtttctatgcctacagacagaaagcaagatgtctaatattagacatacaagttgctgcctgttataacggtgaattatacctttgtgcatgcctaggatgtttgttgttttaattagctgcaatatatacggcctgtgtacacagaatttaatcacttcggcaggttgaacaactccatgtagataagagcaagtgtaggcaaaggtttagaaaatggacataaagtcaaagaatgatggcaggtaggatgaaggagagatacttaggaaatcctaaaagaggcggcaagaaggtacctccctgtgtaactcaccttcccccatgacagtgagtaagagacactcacaggctatgagggtacacccctagctgaatgttctgtgttgtttccttagacctgtggtgtccgctgcaacagctactagccacgtgtagctaattacattaaaatgaaataaaattaaaagctcagtttctcagttgcgctaatcacatttcaagtgctcagcagccacccgtgtctactactacacagtgcagacacagaacatatcatcactgcagatagttctactggacaatgttacgctagaataaacaccaaggcagtcagttaaggcagctatggtttggaaaggcatacggacagagtctgcttagaagagatacaagttgttaataaaattgatcctgttgatagtagtttgtttttgtggtgggtgctgtgaagagtaaacattactcagtggaaagctaagttcagaaggtactttgtttttcctcccttgccttaagtccttggtatttataatcaatgctgaaccttctatttcactaccgctccctgttttagatattcagatttaaaaggttttcaaagaattactttcttccatgttcaaagctagattttactaaacacatgtatcacattcatatatattgtttcttggccccactgccaaaggaagtcagtcagtaatttcacaaccgttatcagagtttggaagcagaaatagctgttaactaaaatctcccactgctcagactactttctgccctaatggccattactatccagtctgtattgctacaagggacccactggtaccccttttagattctatcaaaaggaacagggttttcctagaggcaggcagcctggtggtatggcacagcagaagcttactgctaatgaaatgggaacctccccctcccttgtggtttcagcacagaacctgaatgccaggaaaaattcctgggccaagaagctaaagctaaagaaaccttccttttttcaacgtttttttttctttcaaactgtagggtcacttttgattgaggcaaaggggtcctactgtaagtggaaaagactcactcccctaacataagttttcactgtggtgggatggtgccgcccgatatgcttgatatgcttttccttccacatgttaagctaggaaacctaacaggatgtcagcagggcagttaactctggactcagagccctcaagggcatgtggcagaacctcatggacatcacaagaccatcagtctgaatccaggtcgtgggggctgtcatagccgaactccttctgcacatccagagggtacttgctccacatccgctgtctgctgctgcctctttcctcctcactcaggctgttgtagtcagcagagcctagaatgacatcccgggagtggattctaaatgtgattttcctaggctactgcaggagccccttctcttctcagaaaggtctgtttttgttcccgattgtaatgcaaaatccttgctcaataaataaaaaagaatatagaattcttttttttttaaagaaggaatcactttcctatcatctaaaccaagttccttcacactggagtattttgtcacttctcccctccgtggagtattttgtcacttctcccctccgtataggattttttgttgttgtaagagttgtagtcatattgtaaatatttttgtacctttctccttttaacgtgttattgacaaacctccccaaaagaatatgcaattgtttgattcatttctctgttatcagacaccaataaattctttttgttgggc

SEQ ID NO: 142580 - protein, 592 aa, Artificial Sequence
  derived and/or modified sequence
MATCWQALWAYRSYLIVFFVPILLLPLPILVPSKEAYCAYAIILMALFWCTEALPLAVTALFPLILFPMMGIVDASEVAVEYLKDSNLLFFGGLLVAIAVEHWNLHKRIALRVLLIVGVRPAPLILGFMLVTAFLSMWISNTATSAMMVPIAHAVLDQLHSSQASSNVEEGSNNPTFELQEPSPQKEVTKLDNGQALPVTSASSEGRAHLSQKHLHLTQCMSLCVCYSASIGGIATLTGTAPNLVLQGQINSLFPQNGNVVNFASWFSFAFPTMVILLLLAWLWLQILFLGFNFRKNFGIGEKMQEQQQAAYCVIQTEHRLLGPMTFAEKAISILFVILVLLWFTREPGFFLGWGNLAFPNAKGESMVSDGTVAIFIGIIMFIIPSKFPGLTQDPENPGKLKAPLGLLDWKTVNQKMPWNIVLLLGGGYALAKGSERSGLSEWLGNKLTPLQSVPAPAIAIILSLLVATFTECTSNVATTTIFLPILASMAQAICLHPLYVMLPCTLATSLAFMLPVATPPNAIVFSFGDLKVLDMARAGFLLNIIGVLIIALAINSWGIPLFSLHSFPSWAQSNTTAQCLPSLANTTTPSP

SEQ ID NO: 142581 - protein, 521 aa, Artificial Sequence
  derived and/or modified sequence
MPVCGNVAVEYLKDSNLLFFGGLLVAIAVEHWNLHKRIALRVLLIVGVRPAPLILGFMLVTAFLSMWISNTATSAMMVPIAHAVLDQLHSSQASSNVEEGSNNPTFELQEPSPQKEVTKLDNGQALPVTSASSEGRAHLSQKHLHLTQCMSLCVCYSASIGGIATLTGTAPNLVLQGQINSLFPQNGNVVNFASWFSFAFPTMVILLLLAWLWLQILFLGFNFRKNFGIGEKMQEQQQAAYCVIQTEHRLLGPMTFAEKAISILFVILVLLWFTREPGFFLGWGNLAFPNAKGESMVSDGTVAIFIGIIMFIIPSKFPGLTQDPENPGKLKAPLGLLDWKTVNQKMPWNIVLLLGGGYALAKGSERSGLSEWLGNKLTPLQSVPAPAIAIILSLLVATFTECTSNVATTTIFLPILASMAQAICLHPLYVMLPCTLATSLAFMLPVATPPNAIVFSFGDLKVLDMARAGFLLNIIGVLIIALAINSWGIPLFSLHSFPSWAQSNTTAQCLPSLANTTTPSP

SEQ ID NO: 142582 - protein, 549 aa, Artificial Sequence
  derived and/or modified sequence
MATCWQALWAYRSYLIVFFVPILLLPLPILVPSKVAVEYLKDSNLLFFGGLLVAIAVEHWNLHKRIALRVLLIVGVRPAPLILGFMLVTAFLSMWISNTATSAMMVPIAHAVLDQLHSSQASSNVEEGSNNPTFELQEPSPQKEVTKLDNGQALPVTSASSEGRAHLSQKHLHLTQCMSLCVCYSASIGGIATLTGTAPNLVLQGQINSLFPQNGNVVNFASWFSFAFPTMVILLLLAWLWLQILFLGFNFRKNFGIGEKMQEQQQAAYCVIQTEHRLLGPMTFAEKAISILFVILVLLWFTREPGFFLGWGNLAFPNAKGESMVSDGTVAIFIGIIMFIIPSKFPGLTQDPENPGKLKAPLGLLDWKTVNQKMPWNIVLLLGGGYALAKGSERSGLSEWLGNKLTPLQSVPAPAIAIILSLLVATFTECTSNVATTTIFLPILASMAQAICLHPLYVMLPCTLATSLAFMLPVATPPNAIVFSFGDLKVLDMARAGFLLNIIGVLIIALAINSWGIPLFSLHSFPSWAQSNTTAQCLPSLANTTTPSP

SEQ ID NO: 142583 - DNA, 1779 bp, Artificial Sequence
  derived and/or modified sequence
atggctacttgttggcaggccctatgggcataccgatcctacctgatcgtgtttttcgtgccaatcttgctgctgcccctccccatcttagtacccagtaaggaggcgtattgcgcttatgctattattctcatggcactcttctggtgtaccgaagctctgcccctggccgtgacggctttgtttccactgattctatttcccatgatgggtatcgtggatgcaagtgaagttgccgtggagtacctcaaggactccaatctgctgttcttcgggggtctgctggtggcaatagctgttgagcactggaacttacacaagagaattgccctgcgggttcttctcatcgtgggagtgagaccagcccctttgatcctgggattcatgttggtcacggcgtttctctctatgtggatctccaacactgcaacttccgccatgatggtgcccattgcccacgccgttttagaccaactgcacagctcacaggctagtagcaacgtagaagaaggttccaataaccccacttttgagctccaggagccaagtccacaaaaggaagtgacgaaattggataacggacaggcactgcccgtgaccagcgcgtcctctgagggcagagcccacctcagccagaaacacctccacttgacgcaatgcatgagcttatgcgtctgttactctgcatctattggaggtatagcaacccttacgggaaccgcccctaacttggtgctgcagggacaaattaactctctgttcccgcagaacggaaacgtggtgaatttcgcttcatggttttcattcgctttccctaccatggtcatcctgttgctcctcgcttggttgtggctccaaatcctattcctggggttcaatttccgaaagaacttcggaatcggtgagaagatgcaggagcaacagcaggccgcctactgcgtgattcaaacagagcacaggctgttagggccaatgacatttgccgagaaggccatctccatcctcttcgttatccttgtgctcctatggttcaccagggaacctggcttcttcctcggctggggtaacctggcatttcccaatgccaagggcgaatcaatggtgtccgacggtaccgtggcaatctttatcggcatcatcatgttcatcattccctccaagtttccaggtctgacccaagaccccgagaacccaggcaaactgaaggcccccctcggtctgcttgactggaagaccgtcaaccaaaaaatgccttggaacatcgtgctgctgctgggtggtggttacgcattggccaaaggttccgagagatccggcttatccgagtggctgggaaacaagttaactcctctccagagtgtccctgcccctgcgattgccatcatcctgtcgctgctagtggctacgtttactgaatgcacctcaaatgtagcaacaaccaccatcttcctgcctatactggcctcgatggcccaggccatctgcttgcaccctctgtacgtgatgttgccctgtaccctagcgacgtcattggccttcatgttgccagtagctactccgccgaatgctatcgtcttttcattcggcgatctgaaagttctggacatggcaagggccggctttctgcttaacataattggtgttttgatcatcgccctagccattaattcttgggggattcccctcttttctctccattcgttcccctcttgggcccagagcaacactactgcccaatgtttgccatccctcgctaatacaaccacgccctctccctag

SEQ ID NO: 142584 - DNA, 1566 bp, Artificial Sequence
  derived and/or modified sequence
atgccagtttgtggcaatgtcgcagtggaatacttgaaagactcaaacctgctctttttcggggggcttctagtggccattgctgtggagcattggaaccttcacaagcgaatagctctgcgtgtgcttttaatagtgggcgtgcgcccagctcccctgattctggggttcatgttggtcacagcattcctaagtatgtggatctccaatacagccaccagcgcaatgatggtgcccattgcccacgctgtgcttgaccagcttcacagttcacaggcatcatctaacgtggaagagggttccaacaaccccaccttcgaactgcaggaaccctcaccacagaaagaagttaccaagcttgataacggccaggctctgccggttaccagcgcttcgtctgagggacgggcccacttatcccagaagcatcttcacctcactcaatgcatgtctctctgtgtgtgctactcagcaagtataggaggcattgctaccttgacggggacggcacctaatctggtcttacaaggacagattaactccttatttccccagaatggaaacgttgtaaatttcgcttcctggttcagcttcgccttccctaccatggtgatcctgctcttattggcctggctgtggctgcaaattctttttcttggattcaacttccgtaagaattttggcattggcgaaaagatgcaagaacagcaacaggccgcctattgcgtgatccagacggagcatcgtctgctggggccaatgaccttcgcggaaaaggcaatctcaatcctctttgtgattttggtcctgctctggtttacgagagaacccggcttctttcttgggtgggggaacctggcatttcccaatgctaaaggagaatctatggtctccgacggaacggtggccatctttattgggataatcatgttcattatcccatccaaatttcccggcctgactcaagatcctgagaatcctggaaagctcaaggcccctctgggcttactggattggaaaactgttaaccagaagatgccgtggaatatcgtgctcctccttgggggcgggtacgccctcgccaaaggttccgagagaagtggattgtccgaatggttaggcaacaaactgacccccctgcagtctgtgccggctcccgctattgccatcattttgagtttgctagtggccacctttactgagtgtacgtccaatgtggccactactaccatctttctgcctatcttggcctctatggcgcaagcaatatgcttgcatccactttacgtgatgctgccgtgcactctggccacatcattggctttcatgttgcctgtggcaacccctccgaatgccatagtgttttcgttcggggatctcaaagtgttggacatggccagagcagggttccttctgaatatcatcggggtgctgattatagctctggctataaacagctggggaatccctctgttctctctccactcattcccttcatgggcccagtccaataccactgcccagtgcctaccgtctctcgcaaacaccaccactcccagcccttag

SEQ ID NO: 142585 - DNA, 1650 bp, Artificial Sequence
  derived and/or modified sequence
atggcaacatgttggcaagctctttgggcttaccggtcttaccttatcgtgtttttcgtgccaattttactcctgccactgcctatcctcgtgccgtcgaaggtggccgttgaatacctgaaggattcaaacttgctgtttttcggaggactgctggttgccattgccgtcgagcattggaacttgcacaaacgcatcgccctgagagttcttctaatagtgggtgtaagacccgcccctctgattcttggtttcatgctggtcacagctttcctatccatgtggatatctaatacggcgacctctgccatgatggtgcccatcgcccatgccgtgctggaccaacttcacagctcccaggcgtcgagcaatgtcgaagaagggagcaacaaccctacctttgagctccaggagcccagccctcagaaagaggttacaaagctggacaatggacaggcactcccagtgacgtctgcctcatctgaagggagagcgcaccttagtcagaagcacctgcacctcacccaatgtatgagcttgtgcgtctgttattctgcttcaatcgggggtattgccaccctcacaggtaccgcacctaatctggtgttgcaagggcagatcaatagtctgtttccacagaacggcaacgtggtgaacttcgcaagctggttcagctttgcgttccccaccatggtgatcttgttgctgctggcctggttgtggctgcaaatattattcctgggcttcaacttcagaaagaacttcggaattggggaaaagatgcaggaacagcagcaagccgcatattgcgtgatccagacagagcaccgactcttaggacctatgacctttgctgaaaaggcaatctctatattgtttgtgatactcgtccttctctggtttaccagggagcccggctttttcctcgggtggggaaaccttgccttccctaatgcaaaaggagaatctatggtgagcgatgggacagtggccatttttatcggtattattatgttcattatccccagtaaattcccaggcctgactcaggatcccgagaaccctggtaagcttaaagctccactgggcctactggattggaaaaccgtcaaccagaaaatgccctggaatatagtgcttctactggggggcgggtatgctttggcgaagggcagtgaaagatctggcctgtcagaatggcttggaaataagcttacaccactgcaatcagtgcctgctcctgccattgcaatcattctaagcctcttggttgctacatttaccgagtgtacgtccaacgtcgctaccactaccatttttctgcctattctcgcatctatggcacaggccatttgccttcaccccttatatgtgatgcttccgtgcacattggccacttcactggctttcatgcttccagtcgctaccccaccaaatgctatcgtgttttcatttggcgatctgaaggttctcgatatggcacgggcaggcttcctcttgaatatcattggcgtgttgattattgcattggctattaattcctgggggattcctctattcagcctgcattcattcccttcctgggctcagtccaatacaactgcacaatgcctgccctcactcgcaaatacaacgacccctagcccatag

SEQ ID NO: 142586 - DNA, 1779 bp, Artificial Sequence
  derived and/or modified sequence
atggccacctgctggcaggccctgtgggcctaccgcagctacctgattgtgttctttgtgcccatcctgctgctgcccctgcccatcctggtgcccagcaaggaggcctactgtgcctatgccatcatcctgatggccctcttctggtgcacagaggccctgcccctggccgtgacagccctcttccccctcatcctcttccccatgatgggcatcgtggatgccagcgaggtggccgtggagtacctgaaggacagcaacctgctcttctttggaggcctgctggtggccatcgctgtggagcactggaacctgcacaagagaattgccctgcgggtgctgctgattgtgggcgtgcggcctgcccccctcatcctgggcttcatgctggtgacagccttcctgtccatgtggatcagcaacacagccaccagcgccatgatggtgcccatcgcccatgctgtgctggaccagctgcacagcagccaggccagcagcaatgtggaggagggcagcaacaaccccacctttgagctgcaggagcccagcccccagaaggaggtgaccaagctggacaatggccaggccctgcctgtgaccagcgccagcagcgagggccgggcccacctgagccagaagcacctgcacctgacccagtgcatgagcctgtgtgtgtgctacagcgccagcattggaggcatcgccaccctgaccggcacagcccccaacctggtgctgcagggccagatcaacagcctcttcccccagaatggaaatgtggtgaactttgcctcctggttctcctttgccttccccaccatggtgatcctgctgctgctggcctggctgtggctgcagatcctcttcctgggcttcaacttcaggaagaactttggcatcggggagaagatgcaggagcagcagcaggccgcctactgtgtgatccagacagagcaccggctgctgggccccatgacctttgctgagaaggccatcagcatcctcttcgtcatcctggtgctgctgtggttcacccgggagcccggcttcttcctgggctggggcaacctggccttccccaatgccaagggggagagcatggtgtctgatggcaccgtggccatcttcatcggcatcatcatgttcatcatccccagcaagtttcctggcctgacccaggaccctgagaaccctgggaagctgaaggcccccctgggcctgctggactggaagacagtgaaccagaagatgccctggaacatcgtgctgctgctgggcggcggctacgccctggccaagggcagcgagaggagcggcctgtctgagtggctgggcaacaagctgacccccctgcagagcgtgcctgccccagccatcgccatcatcctgagcctgctggtggccaccttcacagagtgcaccagcaatgtggccaccaccaccatcttcctgcccatcctggcctccatggcccaggccatctgcctgcaccccctgtatgtgatgctgccctgcaccctggccaccagcctggccttcatgctgcctgtggccaccccaccaaatgccatcgtgttctcctttggagacctgaaggtgctggacatggcccgggccggcttcctgctgaacatcatcggcgtgctgatcatcgccctggccatcaacagctggggcatccccctcttcagcctgcacagcttccccagctgggcccagagcaacaccacagcccagtgcctgcccagcctggccaacaccaccacccccagcccctag

SEQ ID NO: 142587 - DNA, 1566 bp, Artificial Sequence
  derived and/or modified sequence
atgcctgtgtgtggaaatgtggccgtggagtacctgaaggacagcaacctgctcttcttcggcggcctgctggtggccatcgctgtggagcactggaacctgcacaagagaattgccctgcgggtgctgctgattgtgggcgtgcggcctgcccccctcatcctgggcttcatgctggtgacagccttcctgtccatgtggatcagcaacacagccaccagcgccatgatggtgcccatcgcccatgctgtgctggaccagctgcacagcagccaggccagcagcaatgtggaggagggcagcaacaaccccacctttgagctgcaggagcccagcccccagaaggaggtgaccaagctggacaatggccaggccctgcctgtgaccagcgccagcagcgagggccgggcccacctgagccagaagcacctgcacctgacccagtgcatgagcctgtgtgtgtgctacagcgccagcatcggcggcatcgccaccctgactggaacagcccccaacctggtgctgcagggccagatcaacagcctcttcccccagaatggaaatgtggtgaactttgcctcctggttctcctttgccttccccaccatggtgatcctgctgctgctggcctggctgtggctgcagatcctcttcctgggcttcaacttcaggaagaactttggaattggagagaagatgcaggagcagcagcaggccgcctactgcgtcatccagacagagcaccggctgctgggccccatgacctttgctgagaaggccatcagcatcctgtttgtgatcctggtgctgctgtggttcacccgggagcccggcttcttcctgggctggggcaacctggccttccccaatgccaagggggagagcatggtgtctgatggcaccgtggccatcttcatcggcatcatcatgttcatcatccccagcaagtttcctggcctgacccaggaccctgaaaatcctgggaagctgaaggcccccctgggcctgctggactggaagacagtgaaccagaagatgccctggaacatcgtgctgctgctgggcggcggctacgccctggccaagggcagcgagaggagcggcctgtctgagtggctgggcaacaagctgacccccctgcagagcgtgcctgccccagccatcgccatcatcctgagcctgctggtggccaccttcacagaatgtaccagcaatgtggccaccaccaccatcttcctgcccatcctggcctccatggcccaggccatctgcctgcaccccctgtatgtgatgctgccctgcaccctggccaccagcctggccttcatgctgcctgtggccaccccaccaaatgccatcgtgttctcctttggagacctgaaggtgctggacatggcccgggccggcttcctgctgaacatcattggagtgctgatcatcgccctggccatcaacagctggggcatccccctcttcagcctgcacagcttccccagctgggcccagagcaacaccacagcccagtgcctgcccagcctggccaacaccaccacccccagcccctag

SEQ ID NO: 142588 - DNA, 1650 bp, Artificial Sequence
  derived and/or modified sequence
atggccacctgctggcaggccctgtgggcctaccgcagctacctgattgtgttctttgtgcccatcctgctgctgcccctgcccatcctggtgcccagcaaggtggccgtggagtacctgaaggacagcaacctgctcttcttcggcggcctgctggtggccatcgctgtggagcactggaacctgcacaagagaattgccctgcgggtgctgctgattgtgggcgtgcggcctgcccccctcatcctgggcttcatgctggtgacagccttcctgtccatgtggatcagcaacacagccaccagcgccatgatggtgcccatcgcccatgctgtgctggaccagctgcacagcagccaggccagcagcaatgtggaggagggcagcaacaaccccacctttgagctgcaggagcccagcccccagaaggaggtgaccaagctggacaatggccaggccctgcctgtgaccagcgccagcagcgagggccgggcccacctgagccagaagcacctgcacctgacccagtgcatgagcctgtgtgtgtgctacagcgccagcatcggcggcatcgccaccctgactggaacagcccccaacctggtgctgcagggccagatcaacagcctcttcccccagaatggaaatgtggtgaactttgcctcctggttctcctttgccttccccaccatggtgatcctgctgctgctggcctggctgtggctgcagatcctcttcctgggcttcaacttcaggaagaactttggaattggagagaagatgcaggagcagcagcaggccgcctactgcgtcatccagacagagcaccggctgctgggccccatgacctttgctgagaaggccatcagcatcctgtttgtgatcctggtgctgctgtggttcacccgggagcccggcttcttcctgggctggggcaacctggccttccccaatgccaagggggagagcatggtgtctgatggcaccgtggccatcttcatcggcatcatcatgttcatcatccccagcaagtttcctggcctgacccaggaccctgaaaatcctgggaagctgaaggcccccctgggcctgctggactggaagacagtgaaccagaagatgccctggaacatcgtgctgctgctgggcggcggctacgccctggccaagggcagcgagaggagcggcctgtctgagtggctgggcaacaagctgacccccctgcagagcgtgcctgccccagccatcgccatcatcctgagcctgctggtggccaccttcacagaatgtaccagcaatgtggccaccaccaccatcttcctgcccatcctggcctccatggcccaggccatctgcctgcaccccctgtatgtgatgctgccctgcaccctggccaccagcctggccttcatgctgcctgtggccaccccaccaaatgccatcgtgttctcctttggagacctgaaggtgctggacatggcccgggccggcttcctgctgaacatcattggagtgctgatcatcgccctggccatcaacagctggggcatccccctcttcagcctgcacagcttccccagctgggcccagagcaacaccacagcccagtgcctgcccagcctggccaacaccaccacccccagcccctag

SEQ ID NO: 142589 - DNA, 1779 bp, Artificial Sequence
  derived and/or modified sequence
atggccacctgctggcaggccctgtgggcctaccggagctacctgatcgttttcttcgtacccatcctactattgcctctgccaatactagtccccagtaaggaagcttactgcgcatacgccattattctgatggcactgttctggtgcacagaggccctgccactggcagtaacagccctgttcccactgatcctgttcccaatgatgggcatagtagatgcctccgaagtggcagtggagtacctgaaagattccaaccttctgtttttcggcggattattggtggccatcgcggtggagcactggaacctgcacaaacggatcgcattacgagtgctgttgatcgttggcgtacggcccgcccctctgatcctaggatttatgttggtcacggcatttctgagtatgtggataagtaatacagccacatccgccatgatggtgcctatcgcccacgctgtgctcgatcagttacactcatcacaggcctcctccaacgtggaggaggggtcaaataatccaacctttgaacttcaagaaccttccccacaaaaggaagtcactaaactagataacggtcaagcacttccggttacctctgcatcaagcgaaggtagagctcacctgagccagaaacatctgcaccttacacagtgtatgagtctgtgtgtttgctacagtgcttccatcggcggcattgccacactcacgggaacagcgccaaacctcgttctgcagggtcaaattaacagcttatttccccagaatggcaacgttgttaactttgccagctggtttagcttcgcttttcccacgatggtgattcttttgctcttagcctggctgtggctgcagatcttattcctgggttttaacttccgaaaaaactttgggattggcgagaagatgcaggaacagcagcaggcagcatactgcgtgatccaaacagaacataggctcctgggacccatgacattcgccgagaaggcgattagtatcctgttcgtgatcctggtactgctgtggtttacacgggagccggggttcttcctgggatggggcaacttggcattccctaacgcgaagggtgagtcgatggtcagcgatgggaccgtggcaatctttatcggaatcattatgtttatcattccaagcaaatttccgggactgacgcaggatcctgaaaaccctggcaagctgaaggcgcccctgggcctgctggattggaagactgtaaaccagaaaatgccttggaacattgtcctgcttctgggcgggggttatgctctggccaaagggtctgagcgtagtggactgagtgagtggcttggtaataaattgacgccactacagagcgtcccagcgccagccattgctattattctgagtttgctcgtcgccactttcaccgagtgcacctcaaacgtggccactaccacaattttcctgccaatcctggctagtatggcacaggccatatgccttcatccactctatgtaatgcttccctgtaccctggctacatctctggccttcatgttgcccgtggccactcctccaaacgccatcgttttttcgtttggagatttgaaggtcctcgatatggcccgagccgggtttctgcttaatatcatcggggtgctgatcatcgccctggcaataaattcatggggaatacctttattcagcctccattctttcccatcctgggcccagagtaatactaccgcccagtgtcttccttcacttgctaacacaacaacgccctccccatag

SEQ ID NO: 142590 - DNA, 1566 bp, Artificial Sequence
  derived and/or modified sequence
atgcccgtgtgcggcaacgtggccgtggagtacctgaaggacagcaacctgcttttttttggcgggctgctggtggcaatcgctgtcgaacactggaatctgcacaagcgcatcgcactccgggtactgctaatcgtcggcgtgcgccctgctccgctgattctgggattcatgctggttactgcatttctatcgatgtggatctctaataccgccacgtctgctatgatggtgccaatcgcccacgccgtcctggaccagttgcactcctcacaagccagctccaacgtcgaggaaggatcgaataaccccacgtttgagctccaggagccaagtcctcagaaagaagtgactaagctggataacggacaggctctccccgttacgagcgccagcagtgaggggcgcgcacatcttagtcagaagcaccttcatctgacacagtgcatgtccctgtgtgtttgttacagcgcgtccatcggtggaatagctactctcactgggacggctccgaatcttgtcctccagggccagataaacagccttttccctcagaacgggaacgtggtcaatttcgcctcctggttttccttcgcatttccgactatggtcatcctgttgctcttagcttggctctggctccagatcctgtttctggggtttaacttcaggaaaaatttcggtattggcgagaagatgcaggagcagcagcaggcagcctactgtgtgatccagaccgagcatcgtctgctcggcccaatgacattcgccgagaaagcaattagcattctgttcgtcatcctggtcctgctgtggtttacgagggagcccggcttttttcttggctggggaaacctcgcatttcctaatgcaaagggtgagtcaatggtgtcagatgggacagttgctattttcatcgggatcattatgttcattatccccagcaagtttcccggattgacccaggatcccgaaaaccccggaaagctcaaggcccccctggggctgctggattggaagacggttaaccaaaagatgccctggaatattgttctgctgctaggcggggggtatgcactcgcgaaggggtcagaacgatccgggttgtcggagtggctgggtaataagcttacacccctgcagtctgtcccagcccccgctatagcaatcatcttatctctcttagtcgctacgttcaccgagtgcacttccaatgtggccaccacaacaatctttctccccatacttgcatcaatggctcaggccatctgcttacaccctctgtacgtgatgctgccttgcaccctagctacttctctggcgtttatgctcccagtcgccactcccccaaacgccatcgtattttccttcggggacctaaaggtcctagacatggcccgtgccggattcctgttgaatataatcggcgtgctgatcattgctttggcaattaactcttggggcattcctttattctccctgcacagcttcccctcatgggcacagtccaataccactgcccagtgtcttccatctctggcgaacacgaccaccccctcaccctag

SEQ ID NO: 142591 - DNA, 1650 bp, Artificial Sequence
  derived and/or modified sequence
atggccacctgctggcaggccctgtgggcctaccggagctacctgatagtgtttttcgtgcccatcttgctgctgcccttgcctatcttggtaccgagcaaggtcgccgtagaatatctcaaggattcgaatttactgtttttcggggggctcttggtggcaatcgccgttgaacactggaatcttcataagcggatcgccttgcgtgtgctgttgatcgtcggagtgcggccagctcccttgattctggggttcatgctggtcacggcatttctgtccatgtggatctccaacaccgccacatccgccatgatggtgcccattgcccacgccgtgctggatcagctccactcgtctcaggcctcatccaatgtcgaggaagggagcaacaacccaacttttgaactgcaagaaccctccccacagaaggaagtgaccaagctcgataatgggcaagccctgccagttacatcggcctcatcggaaggcagggcccatctgtctcaaaagcacctgcatctgactcagtgcatgagcttatgcgtgtgttattcagcaagcatcggtggcatcgctactctgactggaaccgcaccaaatttagttctacaaggccagatcaattctctgttcccccaaaatggcaacgttgtcaactttgcttcttggttttcctttgccttcccgacaatggtgatactcctcctgttggcatggctgtggctgcaaattcttttcctgggctttaatttccggaaaaactttggcatcggcgagaaaatgcaggagcaacagcaggcagcctactgcgtgatccagaccgaacacagacttctgggacctatgactttcgcggaaaaagctatatctattctatttgtcattctggtgcttctctggttcacaagagagccaggattcttcctcggttggggcaacttggccttccccaatgctaaaggggaaagcatggttagtgacggcacagtcgctatcttcatcggaatcataatgttcattattccgtcaaagttcccgggtctgacacaggacccagagaaccccggtaagctaaaggcccctctgggtctcctggactggaagactgtgaaccagaaaatgccttggaacatcgttctcttactgggcggagggtatgcactcgccaaaggttcggagagaagcggtctcagtgaatggttaggcaacaagctgactcctttgcaatcagttcccgctcccgccatcgccatcatcctgagtctccttgtcgccacatttactgaatgcaccagcaatgttgccactacaactatttttctcccaattttagccagcatggcacaagccatctgcctgcatcccctttacgttatgctgccttgcaccttggctacctctctagcttttatgctccctgtggctacccctcctaatgccatagtgtttagtttcggcgaccttaaggtactggacatggcaagagcgggctttttactgaacatcataggcgtactgatcatcgctttggccataaacagctggggtatccccctgtttagtctgcactccttccccagctgggcccagagcaatactaccgcccagtgtctcccaagcttggccaacactacaactccctcgccatag

SEQ ID NO: 142592 - DNA, 1779 bp, Artificial Sequence
  derived and/or modified sequence
atggccacatgctggcaggccttgtgggcgtacaggtcttacttaattgtgttcttcgtgcccatcttgttactgcccttgcctattctcgtgccctccaaagaggcctattgcgcctatgcgattatactgatggccctcttttggtgtaccgaagcactgcctctcgctgtgactgccttgttccctctgatcttatttcccatgatgggtatcgttgatgcctccgaagtggccgtggagtacctgaaggattcgaatctgctgtttttcggcggtcttctcgtcgctatcgccgtcgaacattggaatctgcacaaaagaatcgcccttcgcgtgctcttgatcgtcggcgttagacctgctcccttgatacttgggttcatgctggttaccgcctttctttccatgtggatttctaacaccgcaacgagcgctatgatggtccctattgcccatgccgtgttagatcaacttcacagcagccaagcatcttcgaacgtcgaagagggttcaaataaccccacattcgaactgcaggaaccttctccacagaaagaggtgacaaaactcgataacggccaagcattacctgtcacatccgcctcttctgagggccgtgcgcatttgagtcagaagcaccttcaccttacccagtgcatgtcattgtgtgtctgttactcggcatccatcggcggaatagccaccttgacaggcactgcacccaacctggtgttgcaggggcagattaactccctgtttcctcagaatggcaatgttgtgaatttcgcttcatggttttcctttgcattcccaaccatggtgatcttactgctgttagcctggctgtggctgcaaatcctctttctcggcttcaacttccgaaaaaactttgggattggggagaaaatgcaggaacagcagcaggccgcatattgcgttatccagacagagcatagactgctggggcctatgacctttgccgaaaaagctatctccatcctttttgtcatactggtcctattgtggttcactcgcgagccgggatttttcttgggctgggggaatctggcattccccaacgctaaaggcgagtccatggtatcggacgggacagtggccatcttcatcgggatcattatgttcattattcccagcaaattcccaggcctgacccaggatcccgagaatccaggaaagctcaaagcaccactaggacttctggactggaagacggtaaaccagaagatgccgtggaacattgtgctcctcctggggggagggtatgctctggcaaagggctcagagcgctctgggctatccgagtggttgggaaacaaactgacacctctccagagtgtgccggctccagctattgccatcattctcagcctcctcgtggccacttttaccgagtgcacaagcaacgttgcgaccaccacgattttccttccaattctggcaagcatggcccaagcaatatgtctgcacccactgtacgtgatgcttccatgtacattggctacttctctggccttcatgctgcccgtggcaacgccccctaatgctatcgtcttctcgttcggtgatctgaaagtgctagatatggctcgggctggatttctcctcaacatcataggtgtcctgataatcgcactcgcgatcaacagctggggtatccccctgttctctttacattccttcccatcatgggcccagtctaacacgactgcacagtgcctccccagtctggccaacaccactactccctctccttag

SEQ ID NO: 142593 - DNA, 1566 bp, Artificial Sequence
  derived and/or modified sequence
atgcccgtgtgtggcaacgttgcagttgagtacctgaaggacagcaacctgctctttttcggtggcttgctcgtggctatagccgtggaacactggaacctgcataaacgcatcgcactgcgggtattactgatcgttggcgttcgtcccgcacctctgattctcggtttcatgttagtgacagcattcttgtctatgtggattagcaataccgcaacctctgctatgatggtgcctatcgcccacgcagtgcttgaccaactccactcatcccaggcttcctccaatgtagaggagggctctaataaccccacttttgaactgcaggaacccagcccgcaaaaggaagtaacaaagctcgacaatggccaggccttgccggtcaccagcgcatcatctgaaggtagagcacatctgtctcaaaagcacctccatctcacgcagtgtatgagtctttgtgtttgctactcagcgtctattggaggtatcgcaacactgactggcacagctcctaacttggtactgcagggtcagattaactctttgttccctcagaacggaaacgtggttaattttgctagctggttttcattcgctttccctactatggttatactcctgttactagcttggctgtggctgcaaatcctcttcctggggtttaacttcaggaagaatttcggcataggagagaaaatgcaggaacaacagcaagccgcatactgcgtgatccagactgagcacagattgctgggtcctatgacattcgcagagaaagcaatttctatcctgtttgtgattctcgttctcctgtggttcactcgcgaaccgggtttcttcctcggctggggtaacttggcattccccaatgccaaaggagaatccatggtgtcagacggcacggtagccatcttcatcgggatcattatgtttatcatccccagcaagtttccaggtctgacacaagatccagagaaccccggaaagctgaaggccccactagggctcctcgattggaagaccgttaaccaaaagatgccttggaacatcgtgcttttactgggcggaggttatgctctcgcaaagggtagcgagcgatccggcctttctgaatggttgggaaacaagctgacaccactccagtccgtgcctgcacccgctatagcaatcatcctttcgctacttgtggcaaccttcactgaatgtacatccaacgttgcaactaccacaatattcctgcccatactcgcctctatggctcaggcaatttgcttgcacccgctgtatgtgatgctgccctgcacactggctaccagtctggcattcatgttgcctgtggccacacctccaaatgctattgtcttttcttttggggaccttaaagtgctcgatatggccagagccggttttctgctgaacatcatcggggtgctaatcatcgcgttggcaatcaactcatggggcattcctctcttttctttgcattcctttccttcctgggcacagtccaacacaacagcccagtgccttccctccttggccaacaccacaactcccagcccctag

SEQ ID NO: 142594 - DNA, 1650 bp, Artificial Sequence
  derived and/or modified sequence
atggcaacctgttggcaggccctgtgggcctatcgatcctacctgatcgtgttttttgtgcctatcctgttactcccactgcccattctcgtcccatccaaggtggcagtggaatatttgaaggattcaaacctgcttttctttgggggtctgctggttgcgatcgcggttgagcactggaatctacacaaaaggatagcacttcgcgtgctgctgattgtcggtgttaggcctgcaccactaattttaggtttcatgctggtgactgcattcctgtcaatgtggatatcaaatacggccacatcagctatgatggtcccaattgcgcatgccgtgctggatcaattgcacagcagccaggcgtcttctaacgtggaagagggcagtaacaatccgactttcgagctgcaggaacccagcccgcagaaagaagtgactaagctagataacggccaggctctccctgtgacttccgcgtcttccgagggaagggcccacctaagtcagaagcacctccacctgacccagtgtatgtccctgtgtgtgtgttactccgccagcattggcggaatcgcgacacttaccggaaccgcccctaacttagttctccaggggcagattaactctctgtttccccagaatggtaatgtggtgaattttgcctcctggttttcgtttgcctttcccacgatggtcattcttttactgttagcgtggctctggctccagatcctgtttctgggttttaatttcagaaaaaacttcgggatcggcgagaagatgcaggaacagcagcaggccgcttattgtgtgatccaaaccgaacaccggctgctcggccctatgacttttgccgagaaagcaatctccatactgtttgtgattttagtactcctatggttcacccgtgagcccggattcttcttgggctggggaaacctggctttccctaatgcaaaaggtgagtctatggtatctgacggcacagtggcaatttttatcgggataatcatgttcatcatccccagcaaattcccaggtctgacccaggaccctgagaatccgggtaagctaaaggctcccttaggactgcttgactggaaaaccgtgaaccaaaagatgccctggaacattgtgcttctgttaggcggaggctacgctctggccaagggttctgaacgctcaggcctatctgaatggttgggaaacaaactgaccccgctccagagcgtgcccgctcctgccatcgctatcatcctgagtttgctggtggctacttttaccgagtgcacctcaaacgttgccaccacaactatctttcttcctatactggcttccatggcccaggctatttgtctccatcctctgtatgtgatgctgccatgtaccctcgctacgagtctggcttttatgctccccgtggcgacacccccaaatgccatagtattctcttttggcgacctgaaggtactggacatggcaagagcaggattcctgttaaacatcatcggcgtgcttattatagccctggctatcaacagctggggcataccccttttcagtttgcattcatttcccagctgggcccaatccaatacaacagcccagtgcttgccctctctcgcaaacacaacaaccccaagcccctag

SEQ ID NO: 142595 - DNA, 2711 bp, Artificial Sequence
  derived and/or modified sequence
ggagaacagcagaaaggaaaggccgggccagcggaggtggcttgggggctgcctgtggagggtggctgggggactctccttccttctccagctcctccagcaccaccctcagcagcctccaagaacagaaggagttaacgctgggattaacttcttgaaggaacctgaagttttttaatccttgttctttcctccttccttctccctctcccttcctgatctttactccgcctgtgggtccctcctccttactctcacctccccaactccaaaaacactctgattgccagactgggtcaatggttaacactcaactggctttatataagcctgccacctgcctgcttggctgcatctttggtccttctgttacccagctcctggaggcagtggctgtagcagcccttgctgctccacaccatggccacctgctggcaggccctgtgggcctatcgctcctacctgatcgtgttcttcgtgcccattctcctgctgcctctgcccatcctcgtccccagtaaggaggcctactgcgcgtatgccatcatcctcatggcgctcttctggtgcactgaggccctgcccctggccgtcactgccctcttccccttaatcctgttccctatgatgggcatcgtggatgcctctgaggttgccgtcgagtatcttaaggactccaacctcctgttcttcggggggctgctggtggccatcgcggtggaacactggaacctgcataaacgcatcgccctccgtgtcctcctcatcgttggggtgcggcctgccccgctaatcctgggcttcatgctggtcacggccttcctgtccatgtggatcagcaacacggccacctcagccatgatggtgcccatcgcacatgccgtcctggaccagctgcacagctcgcaagccagcagcaacgtcgaggagggcagcaacaaccccaccttcgagctccaggaaccaagtccccagaaggaggtgaccaagcttgataatgggcaggccctccctgtcacgtctgcctcttcggaggggagggcacatctcagccagaagcatctccacctcacccagtgcatgagcctgtgcgtgtgctactccgccagcatcgggggcatcgccacgctgactggcaccgcacccaacctggtgctgcaaggccagatcaactcgctcttcccccaaaacggcaacgtggtgaacttcgcctcctggttcagcttcgccttccccaccatggtcatcttgctgctgctggcctggttgtggctgcagatcctcttcctgggcttcaacttccggaagaactttggcattggggaaaagatgcaggagcaacagcaggcagcctactgcgtcatccagaccgagcacaggctgctgggccccatgacctttgcagaaaaggccatcagcatcctattcgtcatcctggtgctgctctggttcacccgggagccgggcttttttcttggctggggcaatttggcttttcccaatgccaagggggagagcatggtgtccgatgggacagtggccatcttcatcggcataattatgttcatcataccctccaagttcccagggctgacccaggacccagaaaacccagggaagctgaaggcccctcttggcctcctcgactggaagacggtgaaccagaagatgccgtggaatatcgtgttattgctgggtggtggctatgccctggccaagggcagtgagcgatcgggcctgtcagagtggctgggaaacaagctgaccccactgcagagtgtgccagctccagccattgccatcatcctctccctcctggtggccaccttcaccgagtgcactagcaacgtggccaccactacgatcttcctgcccatcctagcctccatggcccaggccatctgcctccaccctctctacgtcatgctcccctgcactctggccacctccctggccttcatgttgcctgtggccaccccgcccaatgccatcgtcttctctttcggggacctcaaagtgttggatatggcccgggcaggattcctcctcaacatcattggagtcctgatcatcgcactggccatcaacagctggggcatccccctcttcagcctgcactctttcccctcctgggcacagtccaacaccacagcccagtgcctgccaagcctggccaacaccaccacaccaagcccctaggctggggcacagcctggccatgcccaggaagacccaccccattcccactcctctgagcccggaggggacaccccaagctccaagctccaagctccaggccaaaggctgaaaggcacgtgtgtacataatctcttgcgtgtctgtaaggaaggggtgtatgctcagtttcctatgtgctggaataaaaggtgtgtgcatgtgtgtgtgcgcatatgtgtgcgcctgcatggatgtgaggggtgtgtgacgtgaggctatctgaggggggctgtgtgcatgcacatgatcctaggtatgtatgttggacagtgcacacgtgtgtgttcacagacaatacaacatgccctctctggtgccccaggtcttggtatccccagcttagtgaccagacttacttgcactgtatttattgaaattcaggcttggagtggcctgggaggagggcctgccagcagctgccacgggaacagcctctgggctgttaaagtcacattaaagtctttttcagtaaa

SEQ ID NO: 142596 - DNA, 2466 bp, Artificial Sequence
  derived and/or modified sequence
gggcctatcgctcctacctgatcgtgttcttcgtgcccattctcctgctgcctctgcccatcctcgtccccagtaagctgtgaaatgtgaacaatagttattacctctgagagcaaataaatgcaacttgtaaaagcatttgaagcacatagaatatgacgcctggcacaaagtcatcctccaatacttatacagaaacttcttcctgaatcagcagagaggcctactgcgcgtatgccatcatcctcatggcgctcttctggtgcactgaggccctgcccctggccgtcactgccctcttccccttaatcctgttccctatgatgggcatcgtggatgcctctgagatcattcagagaccatttccatccagtttcgagagcccaggggaatgccagtctgtgggaatgttgccgtcgagtatcttaaggactccaacctcctgttcttcggggggctgctggtggccatcgcggtggaacactggaacctgcataaacgcatcgccctccgtgtcctcctcatcgttggggtgcggcctgccccgctaatcctgggcttcatgctggtcacggccttcctgtccatgtggatcagcaacacggccacctcagccatgatggtgcccatcgcacatgccgtcctggaccagctgcacagctcgcaagccagcagcaacgtcgaggagggcagcaacaaccccaccttcgagctccaggaaccaagtccccagaaggaggtgaccaagcttgataatgggcaggccctccctgtcacgtctgcctcttcggaggggagggcacatctcagccagaagcatctccacctcacccagtgcatgagcctgtgcgtgtgctactccgccagcatcgggggcatcgccacgctgactggcaccgcacccaacctggtgctgcaaggccagatcaactcgctcttcccccaaaacggcaacgtggtgaacttcgcctcctggttcagcttcgccttccccaccatggtcatcttgctgctgctggcctggttgtggctgcagatcctcttcctgggcttcaacttccggaagaactttggcattggggaaaagatgcaggagcaacagcaggcagcctactgcgtcatccagaccgagcacaggctgctgggccccatgacctttgcagaaaaggccatcagcatcctattcgtcatcctggtgctgctctggttcacccgggagccgggcttttttcttggctggggcaatttggcttttcccaatgccaagggggagagcatggtgtccgatgggacagtggccatcttcatcggcataattatgttcatcataccctccaagttcccagggctgacccaggacccagaaaacccagggaagctgaaggcccctcttggcctcctcgactggaagacggtgaaccagaagatgccgtggaatatcgtgttattgctgggtggtggctatgccctggccaagggcagtgagcgatcgggcctgtcagagtggctgggaaacaagctgaccccactgcagagtgtgccagctccagccattgccatcatcctctccctcctggtggccaccttcaccgagtgcactagcaacgtggccaccactacgatcttcctgcccatcctagcctccatggcccaggccatctgcctccaccctctctacgtcatgctcccctgcactctggccacctccctggccttcatgttgcctgtggccaccccgcccaatgccatcgtcttctctttcggggacctcaaagtgttggatatggcccgggcaggattcctcctcaacatcattggagtcctgatcatcgcactggccatcaacagctggggcatccccctcttcagcctgcactctttcccctcctgggcacagtccaacaccacagcccagtgcctgccaagcctggccaacaccaccacaccaagcccctaggctggggcacagcctggccatgcccaggaagacccaccccattcccactcctctgagcccggaggggacaccccaagctccaagctccaagctccaggccaaaggctgaaaggcacgtgtgtacataatctcttgcgtgtctgtaaggaaggggtgtatgctcagtttcctatgtgctggaataaaaggtgtgtgcatgtgtgtgtgcgcatatgtgtgcgcctgcatggatgtgaggggtgtgtgacgtgaggctatctgaggggggctgtgtgcatgcacatgatcctaggtatgtatgttggacagtgcacacgtgtgtgttcacagacaatacaacatgccctctctggtgccccaggtcttggtatccccagcttagtgaccagacttacttgcactgtatttattgaaattcaggcttggagtggcctgggaggagggcctgccagcagctgccacgggaacagcctctgggctgttaaagtcacattaaagtctttttcagt

SEQ ID NO: 142597 - DNA, 1276 bp, Artificial Sequence
  derived and/or modified sequence
atctttggtccttctgttacccagctcctggaggcagtggctgtagcagcccttgctgctccacaccatggccacctgctggcaggccctgtgggcctatcgctcctacctgatcgtgttcttcgtgcccattctcctgctgcctctgcccatcctcgtccccagtaaggaggcctactgcgcgtatgccatcatcctcatggcgctcttctggtgcactgaggccctgcccctggccgtcactgccctcttccccttaatcctgttccctatgatgggcatcgtggatgcctctgaggttgccgtcgagtatcttaaggactccaacctcctgttcttcggggggctgctggtggccatcgcggtggaacactggaacctgcataaacgcatcgccctccgtgtcctcctcatcgttggggtgcggcctgccccgctaatcctgggcttcatgctggtcacggccttcctgtccatgtggatcagcaacacggccacctcagccatgatggtgcccatcgcacatgccgtcctggaccagctgcacagctcgcaagccagcagcaacgtcgaggagggcagcaacaaccccaccttcgagctccaggaaccaagtccccagaaggaggtgaccaagcttgataatgggcaggccctccctgtcacgtctgcctcttcggaggggagggcacatctcagccagaagcatctccacctcacccagtgcatgagcctgtgcgtgtgctactccgccagcatcgggggcatcgccacgctgactggcaccgcacccaacctggtgctgcaaggccagatcaactcgctcttcccccaaaacggcaacgtggtgaacttcgcctcctggttcagcttcgccttccccaccatggtcatcttgctgctgctggcctggttgtggctgcagatcctcttcctgggcttcaacttccggaagaactttggcattggggaaaagatgcaggagcaacagcaggcagcctactgcgtcatccagaccgagcacaggctgctgggccccatgacctttgcagaaaaggccatcagcatcctattcgtcatcctggtgctgctctggttcacccgggagccgggctttttttggctggggcaatttggcttttcccaatgccaagggggagaggtgagagttgcaggggttgggaggaggacacatctggggctcacatgctcgggaaggagggaagggtatagggcccccattgcagaacaggaggtaacacttggtgggggatga

SEQ ID NO: 142598 - DNA, 2226 bp, Artificial Sequence
  derived and/or modified sequence
atctttggtccttctgttacccagctcctggaggcagtggctgtagcagcccttgctgctccacaccatggccacctgctggcaggccctgtgggcctatcgctcctacctgatcgtgttcttcgtgcccattctcctgctgcctctgcccatcctcgtccccagtaaggttgccgtcgagtatcttaaggactccaacctcctgttcttcggggggctgctggtggccatcgcggtggaacactggaacctgcataaacgcatcgccctccgtgtcctcctcatcgttggggtgcggcctgccccgctaatcctgggcttcatgctggtcacggccttcctgtccatgtggatcagcaacacggccacctcagccatgatggtgcccatcgcacatgccgtcctggaccagctgcacagctcgcaagccagcagcaacgtcgaggagggcagcaacaaccccaccttcgagctccaggaaccaagtccccagaaggaggtgaccaagcttgataatgggcaggccctccctgtcacgtctgcctcttcggaggggagggcacatctcagccagaagcatctccacctcacccagtgcatgagcctgtgcgtgtgctactccgccagcatcgggggcatcgccacgctgactggcaccgcacccaacctggtgctgcaaggccagatcaactcgctcttcccccaaaacggcaacgtggtgaacttcgcctcctggttcagcttcgccttccccaccatggtcatcttgctgctgctggcctggttgtggctgcagatcctcttcctgggcttcaacttccggaagaactttggcattggggaaaagatgcaggagcaacagcaggcagcctactgcgtcatccagaccgagcacaggctgctgggccccatgacctttgcagaaaaggccatcagcatcctattcgtcatcctggtgctgctctggttcacccgggagccgggcttttttcttggctggggcaatttggcttttcccaatgccaagggggagagcatggtgtccgatgggacagtggccatcttcatcggcataattatgttcatcataccctccaagttcccagggctgacccaggacccagaaaacccagggaagctgaaggcccctcttggcctcctcgactggaagacggtgaaccagaagatgccgtggaatatcgtgttattgctgggtggtggctatgccctggccaagggcagtgagcgatcgggcctgtcagagtggctgggaaacaagctgaccccactgcagagtgtgccagctccagccattgccatcatcctctccctcctggtggccaccttcaccgagtgcactagcaacgtggccaccactacgatcttcctgcccatcctagcctccatggcccaggccatctgcctccaccctctctacgtcatgctcccctgcactctggccacctccctggccttcatgttgcctgtggccaccccgcccaatgccatcgtcttctctttcggggacctcaaagtgttggatatggcccgggcaggattcctcctcaacatcattggagtcctgatcatcgcactggccatcaacagctggggcatccccctcttcagcctgcactctttcccctcctgggcacagtccaacaccacagcccagtgcctgccaagcctggccaacaccaccacaccaagcccctaggctggggcacagcctggccatgcccaggaagacccaccccattcccactcctctgagcccggaggggacaccccaagctccaagctccaagctccaggccaaaggctgaaaggcacgtgtgtacataatctcttgcgtgtctgtaaggaaggggtgtatgctcagtttcctatgtgctggaataaaaggtgtgtgcatgtgtgtgtgcgcatatgtgtgcgcctgcatggatgtgaggggtgtgtgacgtgaggctatctgaggggggctgtgtgcatgcacatgatcctaggtatgtatgttggacagtgcacacgtgtgtgttcacagacaatacaacatgccctctctggtgccccaggtcttggtatccccagcttagtgaccagacttacttgcactgtatttattgaaattcaggcttggagtggcctgggaggagggcctgccagcagctgccacgggaacagcctctgggctgttaaagtcacattaaagtctttttcagt

SEQ ID NO: 142599 - DNA, 1779 bp, Artificial Sequence
  derived and/or modified sequence
atggccacctgctggcaggccctgtgggcctacagaagctacctgatcgtgttcttcgtgcccatcctgctgctgcccctgcccatcctggtgcccagcaaggaggcctactgcgcctacgccatcatcctgatggccctgttctggtgcaccgaggccctgcccctggccgtgaccgccctgttccccctgatcctgttccccatgatgggcatcgtggacgccagcgaggtggccgtggagtacctgaaggacagcaacctgctgttcttcggcggcctgctggtggccatcgccgtggagcactggaacctgcacaagagaatcgccctgagagtgctgctgatcgtgggcgtgagacccgcccccctgatcctgggcttcatgctggtgaccgccttcctgagcatgtggatcagcaacaccgccaccagcgccatgatggtgcccatcgcccacgccgtgctggaccagctgcacagcagccaggccagcagcaacgtggaggagggcagcaacaaccccaccttcgagctgcaggagcccagcccccagaaggaggtgaccaagctggacaacggccaggccctgcccgtgaccagcgccagcagcgagggcagagcccacctgagccagaagcacctgcacctgacccagtgcatgagcctgtgcgtgtgctacagcgccagcatcggcggcatcgccaccctgaccggcaccgcccccaacctggtgctgcagggccagatcaacagcctgttcccccagaacggcaacgtggtgaacttcgccagctggttcagcttcgccttccccaccatggtgatcctgctgctgctggcctggctgtggctgcagatcctgttcctgggcttcaacttcagaaagaacttcggcatcggcgagaagatgcaggagcagcagcaggccgcctactgcgtgatccagaccgagcacagactgctgggccccatgaccttcgccgagaaggccatcagcatcctgttcgtgatcctggtgctgctgtggttcaccagagagcccggcttcttcctgggctggggcaacctggccttccccaacgccaagggcgagagcatggtgagcgacggcaccgtggccatcttcatcggcatcatcatgttcatcatccccagcaagttccccggcctgacccaggaccccgagaaccccggcaagctgaaggcccccctgggcctgctggactggaagaccgtgaaccagaagatgccctggaacatcgtgctgctgctgggcggcggctacgccctggccaagggcagcgagagaagcggcctgagcgagtggctgggcaacaagctgacccccctgcagagcgtgcccgcccccgccatcgccatcatcctgagcctgctggtggccaccttcaccgagtgcaccagcaacgtggccaccaccaccatcttcctgcccatcctggccagcatggcccaggccatctgcctgcaccccctgtacgtgatgctgccctgcaccctggccaccagcctggccttcatgctgcccgtggccaccccccccaacgccatcgtgttcagcttcggcgacctgaaggtgctggacatggccagagccggcttcctgctgaacatcatcggcgtgctgatcatcgccctggccatcaacagctggggcatccccctgttcagcctgcacagcttccccagctgggcccagagcaacaccaccgcccagtgcctgcccagcctggccaacaccaccacccccagcccctag

SEQ ID NO: 142600 - DNA, 1566 bp, Artificial Sequence
  derived and/or modified sequence
atgcccgtgtgcggcaacgtggccgtggagtacctgaaggacagcaacctgctgttcttcggcggcctgctggtggccatcgccgtggagcactggaacctgcacaagagaatcgccctgagagtgctgctgatcgtgggcgtgagacccgcccccctgatcctgggcttcatgctggtgaccgccttcctgagcatgtggatcagcaacaccgccaccagcgccatgatggtgcccatcgcccacgccgtgctggaccagctgcacagcagccaggccagcagcaacgtggaggagggcagcaacaaccccaccttcgagctgcaggagcccagcccccagaaggaggtgaccaagctggacaacggccaggccctgcccgtgaccagcgccagcagcgagggcagagcccacctgagccagaagcacctgcacctgacccagtgcatgagcctgtgcgtgtgctacagcgccagcatcggcggcatcgccaccctgaccggcaccgcccccaacctggtgctgcagggccagatcaacagcctgttcccccagaacggcaacgtggtgaacttcgccagctggttcagcttcgccttccccaccatggtgatcctgctgctgctggcctggctgtggctgcagatcctgttcctgggcttcaacttcagaaagaacttcggcatcggcgagaagatgcaggagcagcagcaggccgcctactgcgtgatccagaccgagcacagactgctgggccccatgaccttcgccgagaaggccatcagcatcctgttcgtgatcctggtgctgctgtggttcaccagagagcccggcttcttcctgggctggggcaacctggccttccccaacgccaagggcgagagcatggtgagcgacggcaccgtggccatcttcatcggcatcatcatgttcatcatccccagcaagttccccggcctgacccaggaccccgagaaccccggcaagctgaaggcccccctgggcctgctggactggaagaccgtgaaccagaagatgccctggaacatcgtgctgctgctgggcggcggctacgccctggccaagggcagcgagagaagcggcctgagcgagtggctgggcaacaagctgacccccctgcagagcgtgcccgcccccgccatcgccatcatcctgagcctgctggtggccaccttcaccgagtgcaccagcaacgtggccaccaccaccatcttcctgcccatcctggccagcatggcccaggccatctgcctgcaccccctgtacgtgatgctgccctgcaccctggccaccagcctggccttcatgctgcccgtggccaccccccccaacgccatcgtgttcagcttcggcgacctgaaggtgctggacatggccagagccggcttcctgctgaacatcatcggcgtgctgatcatcgccctggccatcaacagctggggcatccccctgttcagcctgcacagcttccccagctgggcccagagcaacaccaccgcccagtgcctgcccagcctggccaacaccaccacccccagcccctag

SEQ ID NO: 142601 - DNA, 1650 bp, Artificial Sequence
  derived and/or modified sequence
atggccacctgctggcaggccctgtgggcctacagaagctacctgatcgtgttcttcgtgcccatcctgctgctgcccctgcccatcctggtgcccagcaaggtggccgtggagtacctgaaggacagcaacctgctgttcttcggcggcctgctggtggccatcgccgtggagcactggaacctgcacaagagaatcgccctgagagtgctgctgatcgtgggcgtgagacccgcccccctgatcctgggcttcatgctggtgaccgccttcctgagcatgtggatcagcaacaccgccaccagcgccatgatggtgcccatcgcccacgccgtgctggaccagctgcacagcagccaggccagcagcaacgtggaggagggcagcaacaaccccaccttcgagctgcaggagcccagcccccagaaggaggtgaccaagctggacaacggccaggccctgcccgtgaccagcgccagcagcgagggcagagcccacctgagccagaagcacctgcacctgacccagtgcatgagcctgtgcgtgtgctacagcgccagcatcggcggcatcgccaccctgaccggcaccgcccccaacctggtgctgcagggccagatcaacagcctgttcccccagaacggcaacgtggtgaacttcgccagctggttcagcttcgccttccccaccatggtgatcctgctgctgctggcctggctgtggctgcagatcctgttcctgggcttcaacttcagaaagaacttcggcatcggcgagaagatgcaggagcagcagcaggccgcctactgcgtgatccagaccgagcacagactgctgggccccatgaccttcgccgagaaggccatcagcatcctgttcgtgatcctggtgctgctgtggttcaccagagagcccggcttcttcctgggctggggcaacctggccttccccaacgccaagggcgagagcatggtgagcgacggcaccgtggccatcttcatcggcatcatcatgttcatcatccccagcaagttccccggcctgacccaggaccccgagaaccccggcaagctgaaggcccccctgggcctgctggactggaagaccgtgaaccagaagatgccctggaacatcgtgctgctgctgggcggcggctacgccctggccaagggcagcgagagaagcggcctgagcgagtggctgggcaacaagctgacccccctgcagagcgtgcccgcccccgccatcgccatcatcctgagcctgctggtggccaccttcaccgagtgcaccagcaacgtggccaccaccaccatcttcctgcccatcctggccagcatggcccaggccatctgcctgcaccccctgtacgtgatgctgccctgcaccctggccaccagcctggccttcatgctgcccgtggccaccccccccaacgccatcgtgttcagcttcggcgacctgaaggtgctggacatggccagagccggcttcctgctgaacatcatcggcgtgctgatcatcgccctggccatcaacagctggggcatccccctgttcagcctgcacagcttccccagctgggcccagagcaacaccaccgcccagtgcctgcccagcctggccaacaccaccacccccagcccctag

SEQ ID NO: 142602 - protein, 214 aa, Artificial Sequence
  derived and/or modified sequence
MDMHCKADPFSAMHPGHGGVNQLGGVFVNGRPLPDVVRQRIVELAHQGVRPCDISRQLRVSHGCVSKILGRYYETGSIKPGVIGGSKPKVATPKVVDKIAEYKRQNPTMFAWEIRDRLLAEGICDNDTVPSVSSINRIIRTKVQQPFHPTPDGAGTGVTAPGHTIVPSTASPPVSSASNDPVGSYSINGILGIPRSNGEKRKRDEVEVYTDPAH

SEQ ID NO: 142603 - protein, 417 aa, Artificial Sequence
  derived and/or modified sequence
MDMHCKADPFSAMHPGHGGVNQLGGVFVNGRPLPDVVRQRIVELAHQGVRPCDISRQLRVSHGCVSKILGRYYETGSIKPGVIGGSKPKVATPKVVDKIAEYKRQNPTMFAWEIRDRLLAEGICDNDTVPSVSSINRIIRTKVQQPFHPTPDGAGTGVTAPGHTIVPSTASPPVSSASNDPVGSYSINGILGIPRSNGEKRKRDEVEVYTDPAHIRGGGGLHLVWTLRDVSEGSVPNGDSQSGVDSLRKHLRADTFTQQQLEALDRVFERPSYPDVFQASEHIKSEQGNEYSLPALTPGLDEVKSSLSASTNPELGSNVSGTQTYPVVTGRDMASTTLPGYPPHVPPTGQGSYPTSTLAGMVPGSEFSGNPYSHPQYTAYNEAWRFSNPALLSSPYYYSAAPRGSAPAAAAAAYDRH

SEQ ID NO: 142604 - DNA, 645 bp, Artificial Sequence
  derived and/or modified sequence
atggatatgcactgcaaggccgaccctttttccgccatgcaccctggccatggaggagtaaaccaacttggaggcgtatttgtcaacgggagacccttacctgatgtggtcaggcagcgcatcgttgagcttgcccatcagggcgtacggccctgtgacatctctaggcagctgagggtcagtcacgggtgcgtaagcaagatcctcggcaggtattacgaaaccggcagtattaagcctggagtgatcgggggaagtaaacccaaagtggctactccaaaggtggtcgacaagatcgcagagtacaaacgccagaatccgaccatgtttgcctgggagatcagagaccgccttctggctgagggcatctgtgacaatgataccgtaccttcggtgtctagcatcaatcggatcataaggaccaaggtgcaacaaccttttcatcccactcccgatggcgcaggcaccggagtcaccgcacctggtcataccattgtcccaagcacagcctcccctcccgtgagctccgctagcaacgacccggttggatcatattctatcaatggcatccttggaattcctaggtctaacggcgagaagcggaaacgagacgaggtagaagtttacaccgatcctgcgcattag

SEQ ID NO: 142605 - DNA, 1254 bp, Artificial Sequence
  derived and/or modified sequence
atggatatgcactgcaaggccgacccattctccgcaatgcaccccgggcatggcggagtgaatcagctcggaggggtgttcgtgaacgggaggcccctcccggacgtcgtccggcaacgaatcgtggagcttgcccaccagggcgtgcggccatgcgacattagtaggcagctgcgggtttcccacggatgtgtgagcaagatcctgggtcgctattatgagacaggcagtattaagccaggagttatcggaggaagtaagccaaaagttgccacccccaaggttgttgacaagatcgctgagtacaagcgacagaaccctactatgtttgcgtgggaaatccgggaccgcctgcttgcagaggggatctgcgataatgatactgttcctagcgtgagtagtatcaatagaattattagaacaaaggtgcagcagccctttcacccgacgccggacggggccggcacaggcgttacagccccgggacacacaatcgttcctagtacagcttcacctcctgtttcctccgctagcaacgacccagtcggttcgtactccattaatggcatccttggcattccaaggtctaatggcgagaagagaaaaagggacgaggtcgaagtctatactgatcccgctcacattcggggtggcgggggcttgcatctggtctggaccctcagagatgtgtccgagggcagcgtccctaacggtgattcacagtccggtgtcgacagcctccgcaagcacctgcgagctgatacgtttacgcagcaacagctggaggctttggacagagtgtttgagagaccctcttaccccgatgtcttccaggctagtgagcatatcaagtccgagcaaggcaacgagtacagcctacccgccctcaccccaggcttggatgaggtcaaaagctctctcagcgccagcactaatccggagctcggaagcaatgtatccggcactcagacatatccagtagtaaccggaagggacatggcttctacaactcttcctgggtaccctccccatgtacctcccacagggcaggggtcctatcccacgagtaccctggctggcatggttccaggtagcgagttctccggaaatccctattcgcatccccagtatacggcttataacgaagcttggaggttttcgaatcccgcgctgctaagctctccttattattactcagccgcaccccgcgggtccgcacctgccgcagcagctgccgcttacgatcgacactag

SEQ ID NO: 142606 - DNA, 645 bp, Artificial Sequence
  derived and/or modified sequence
atggacatgcactgcaaggctgaccccttcagcgccatgcaccctggccatggaggagtgaaccagctgggcggcgtgtttgtgaatggccggcccctgcctgatgtggtgcggcagagaattgtggagctggcccaccagggcgtgcggccctgtgacatcagccggcagctgcgggtgagccacggctgtgtgtccaagatcctgggccgctactatgaaacaggcagcatcaagccaggagtgattggaggcagcaagcccaaggtggccacccccaaggtggtggacaagattgctgagtacaagaggcagaaccccaccatgtttgcctgggagatccgggaccggctgctggccgagggcatctgtgacaatgacacagtgcccagcgtgagcagcatcaaccgcatcatccgcaccaaggtgcagcagcccttccaccccaccccagatggagctggcaccggggtgacagcccctggccacaccatcgtgcccagcacagccagcccccctgtgagcagcgccagcaatgaccctgtgggcagctacagcatcaatggcatcctgggcatccccaggagcaatggagagaagaggaagagagatgaggtggaggtgtacacagatcctgcccactag

SEQ ID NO: 142607 - DNA, 1254 bp, Artificial Sequence
  derived and/or modified sequence
atggacatgcactgcaaggctgaccccttcagcgccatgcaccctggccatggaggagtgaaccagctgggcggcgtgtttgtgaatggccggcccctgcctgatgtggtgcggcagagaattgtggagctggcccaccagggcgtgcggccctgtgacatcagccggcagctgcgggtgagccacggctgtgtgtccaagatcctgggccgctactatgaaacaggcagcatcaagccaggagtgattggaggcagcaagcccaaggtggccacccccaaggtggtggacaagattgctgagtacaagaggcagaaccccaccatgtttgcctgggagatccgggaccggctgctggccgagggcatctgtgacaatgacacagtgcccagcgtgagcagcatcaaccgcatcatccgcaccaaggtgcagcagcccttccaccccaccccagatggagctggcaccggggtgacagcccctggccacaccatcgtgcccagcacagccagcccccctgtgagcagcgccagcaatgaccctgtgggcagctacagcatcaatggcatcctgggcatccccaggagcaatggagagaagaggaagagagatgaggtggaggtgtacacagatcctgcccacatccggggcggcggcggcctgcacctggtgtggaccctgagagatgtgtctgagggctctgtgcccaatggagacagccagagcggcgtggacagcctgaggaagcacctgcgggctgacaccttcacccagcagcagctggaggccctggacagagtgtttgagcggcccagctacccagatgtgttccaggccagcgagcacatcaagtctgagcagggcaatgagtacagcctgcctgccctgaccccaggcctggatgaggtgaagagcagcctgagcgccagcaccaaccctgagctgggcagcaatgtgtctggcacccagacctaccctgtggtgacaggccgggacatggccagcaccaccctgcccggctacccaccccacgtgccccccaccggccagggcagctaccccaccagcaccctggccggcatggtgcccggcagcgagttcagcggcaacccctacagccacccccagtacacagcctacaatgaggcctggaggttcagcaacccagccctgctgagcagcccctactactacagcgctgccccccggggcagcgccccagctgctgctgctgctgcctatgacagacactag

SEQ ID NO: 142608 - DNA, 645 bp, Artificial Sequence
  derived and/or modified sequence
atggacatgcactgcaaggccgaccccttcagcgccatgcaccccggacatggcggcgtaaatcagctcggcggggttttcgtgaacggcaggcctctgccagatgttgtacggcagagaattgtagagcttgcccaccagggtgtcagaccctgcgatataagtcggcagctgcgagtgtcccatggctgtgtgtcaaagatacttgggcggtactacgagacgggttctatcaagcctggagtcattggcggcagtaagcccaaggtggcaactcctaaggtggtagacaagattgcagaatataaacgccaaaatcctactatgttcgcgtgggagatccgcgatagattgctcgccgagggtatctgcgataacgacaccgtgccatcagtctcttccataaatcggattatcaggaccaaagttcagcagccctttcacccaacgccggacggcgctggcacaggggtgacggcaccgggccacactattgtgccctcaacggcgtctcccccagtgtcttctgcaagcaatgatcccgtggggtcttacagtattaacggcattctgggcatcccccggtccaatggcgaaaaacggaagcgggatgaagtggaagtgtacacggatcccgctcactag

SEQ ID NO: 142609 - DNA, 1254 bp, Artificial Sequence
  derived and/or modified sequence
atggacatgcactgcaaggccgaccccttcagcgccatgcaccccgggcatggaggagtaaatcagttaggaggcgtgttcgtaaacggtcgccctctaccggatgttgtaagacagcgaatagtggagctggctcatcagggcgtgcggccctgcgacatctctaggcagctgcgcgtgagccacggctgtgtgagcaaaatcctgggccggtactatgagaccgggtctatcaagcctggagtcatcggtgggtccaagccgaaggtagccacaccaaaggtggtggacaaaatcgccgagtataagagacagaacccaacaatgttcgcttgggagattcgtgacagactgctggccgaaggaatttgcgacaatgatacagtgccgagtgtgtcttccattaatcgtatcattaggacaaaagtccagcagccttttcacccaactccagatggggctgggaccggcgtcacagcacctggccacaccatcgtcccttcaacggcgtcccctccagtgagttcggctagtaacgatcccgtcggctcttactctatcaacggaatcctcgggattccacggagtaatggcgagaaacgaaaaagagacgaggtggaggtttacacagatcctgcccacatccgcggagggggaggcctgcatctggtgtggaccttgagggatgtgtccgaaggcagtgtgccaaatggtgacagccagtctggagtagactccctgcggaagcacctgagggctgatacctttacgcagcaacaattagaggccttggatcgagtgtttgagcgcccgtcttacccggacgtgttccaggcctcagagcacataaaaagtgagcaagggaacgaatattcgctgcccgctcttaccccgggcctggatgaggtgaagagcagtctttcagcctccactaatcctgagttaggctcgaatgtgtccggcacccagacttaccccgttgtaacaggccgcgacatggcctctaccaccctgcccggctatcccccacacgtaccaccaaccgggcagggatcttacccgactagtactttagcggggatggtgccgggctctgagttctcaggaaacccttacagccatccacagtacaccgcttacaacgaagcgtggcgtttctccaaccctgcgctgctgtcatccccatattattacagcgctgcccccaggggatccgcaccagcagccgccgccgcagcttacgatagacactag

SEQ ID NO: 142610 - DNA, 677 bp, Artificial Sequence
  derived and/or modified sequence
gcggccgcgctgctcccgctcctctgcctccccatggatatgcactgcaaagcagaccccttctccgcgatgcacccagggcacgggggtgtgaaccagctcgggggggtgtttgtgaacggccggcccctacccgacgtggtgaggcagcgcatcgtggagctggcccaccagggtgtgcggccctgtgacatctcccggcagctgcgggtcagccacggctgtgtcagcaaaatcctgggcaggtactacgagaccggcagcatcaagccgggtgtgatcggtggctccaagcccaaagtggcgacgcccaaagtggtggacaagattgctgaatacaaacgacagaacccgactatgttcgcctgggagattcgagaccggctcctggccgagggcatctgtgacaatgacacagtgcccagcgtctcttccatcaacagaatcatccggaccaaagttcagcagcctttccacccaacgccggatggggctgggacaggagtgaccgcccctggccacaccattgttcccagcacggcctcccctcctgtttccagcgcctccaatgacccagtgggatcctactccatcaatgggatcctggggattcctcgctccaatggtgagaagaggaaacgtgatgaagttgaggtatacactgatcctgcccacat

SEQ ID NO: 142611 - DNA, 4126 bp, Artificial Sequence
  derived and/or modified sequence
cgggggcctggcccgcgcgctcccctcccgcaggcgccacctcggacatccccgggattgctacttctctgccaacttcgccaactcgccagcacttggagaggcccggctcccctcccggcgccctctgaccgcccccgccccgcgcgctctccgaccaccgcctctcggatgaccaggttccaggggagctgagcgagtcgcctcccccgcccagcttcagccctggctgcagctgcagcgcgagccatgcgcccccagtgcaccccggcccggcccaccgccccggggccattctgctgaccgcccagccccgagccccgacagtggcaagttgcggctactgcagttgcaagctccggccaacccggaggagccccagcggggagcgcagtgctgcgccccccgcccccgcgcgccccgcagcagccgggcgttcactcatcctccctcccccaccgtccctcccttttctcctcaagtcctgaagttgagtttgagaggcgacacggcggcggcggccgcgctgctcccgctcctctgcctccccatggatatgcactgcaaagcagaccccttctccgcgatgcacccagggcacgggggtgtgaaccagctcgggggggtgtttgtgaacggccggcccctacccgacgtggtgaggcagcgcatcgtggagctggcccaccagggtgtgcggccctgtgacatctcccggcagctgcgggtcagccacggctgtgtcagcaaaatcctgggcaggtactacgagaccggcagcatcaagccgggtgtgatcggtggctccaagcccaaagtggcgacgcccaaagtggtggacaagattgctgaatacaaacgacagaacccgactatgttcgcctgggagattcgagaccggctcctggccgagggcatctgtgacaatgacacagtgcccagcgtctcttccatcaacagaatcatccggaccaaagttcagcagcctttccacccaacgccggatggggctgggacaggagtgaccgcccctggccacaccattgttcccagcacggcctcccctcctgtttccagcgcctccaatgacccagtgggatcctactccatcaatgggatcctggggattcctcgctccaatggtgagaagaggaaacgtgatgaagttgaggtatacactgatcctgcccacattagaggaggtggaggtttgcatctggtctggactttaagagatgtgtctgagggctcagtccccaatggagattcccagagtggtgtggacagtttgcggaagcacttgcgagctgacaccttcacccagcagcagctggaagctttggatcgggtctttgagcgtccttcctaccctgacgtcttccaggcatcagagcacatcaaatcagaacaggggaacgagtactccctcccagccctgacccctgggcttgatgaagtcaagtcgagtctatctgcatccaccaaccctgagctgggcagcaacgtgtcaggcacacagacatacccagttgtgactggtcgtgacatggcgagcaccactctgcctggttacccccctcacgtgccccccactggccagggaagctaccccacctccaccctggcaggaatggtgcctgggagcgagttctccggcaacccgtacagccacccccagtacacggcctacaacgaggcttggagattcagcaaccccgccttactaagttccccttattattatagtgccgccccccggggctccgcccctgccgctgctgccgctgcctatgaccgccactagttaccgcggggaccacatcaagcttcaggccgacagcttcggcctccacatcgtccccgtctgaccccaccccggagggagggaggaccgacgcgacgcgatgcctcccggccaccgccccagcctcaccccatcccacgacccccgcaacccttcacatcacccccctcgaaggtcggacaggacgggtggagccgtgggcgggaccctcaggcccgggcccgccgcccccagccccgcctgccgcccctccccgcctgcctggactgcgcggcgccgtgagggggattcggcccagctcgtcccggcctccaccaagccagccccgaagcccgccagccaccctgccggactcgggcgcgacctgctggcgcgcgccggatgtttctgtgacacacaatcagcgcggaccgcagcgcggcccagccccgggcacccgcctcggacgctcgggcgccaggaggcttcgctggaggggctgggccaaggagattaagaagaaaacgactttctgcaggaggaagagcccgctgccgaatccctgggaaaaattcttttcccccagtgccagccggactgccctcgccttccgggtgtgccctgtcccagaagatggaatgggggtgtgggggtccggctctaggaacgggctttgggggcgtcaggtctttccaaggttgggacccaaggatcggggggcccagcagcccgcaccgatcgagccggactctcggctcttcactgctcctcctggcctgcctagttccccagggcccggcacctcctgctgcgagacccggctctcagccctgccttgcccctacctcagcgtctcttccacctgctggcctcccagtttcccctcctgccagtccttcgcctgtcccttgacgccctgcatcctcctccctgactcgcagccccatcggacgctctcccgggaccgccgcaggaccagtttccatagactgcggactggggtcttcctccagcagttacttgatgccccctcccccgacacagactctcaatctgccggtggtaagaaccggttctgagctggcgtctgagctgctgcggggtggaagtggggggctgcccactccactcctcccatcccctcccagcctcctcctccggcaggaactgaacagaaccacaaaaagtctacatttatttaatatgatggtctttgcaaaaaggaacaaaacaacacaaaagcccaccaggctgctgctttgtggaaagacggtgtgtgtcgtgtgaaggcgaaacccggtgtacataacccctccccctccgccccgccccgcccggccccgtagagtccctgtcgcccgccggccctgcctgtagatacgccccgctgtctgtgctgtgagagtcgccgctcgctgggggggaagggggggacacagctacacgcccattaaagcacagcacgtcctgggggaggggggcattttttatgttacaaaaaaaaattacgaaagaaaagaaatctctatgcaaaatgacgaacatggtcctgtggactcctctggcctgttttgttggctctttctctgtaattccgtgttttcgctttttcctccctgcccctctctccctctgcccctctctcctctccgcttctctccccctctgtctctgtctctctccgtctctgtcgctcttgtctgtctgtctctgctctttcctcggcctctctccccagacctggcccggccgccctgtctccgcaggctagatccgaggtggcagctccagcccccgggctcgccccctcgcgggcgtgccccgcgcgccccgggcggccgaaggccgggccgccccgtcccgccccgtagttgctctttcggtagtggcgatgcgccctgcatgtctcctcacccgtggatcgtgacgactcgaaataacagaaacaaagtcaataaagtgaaaataaataaaaatccttgaacaaatccgaaaaggcttggagtcctcgcccagatctctctcccctgcgagccctttttatttgagaaggaaaaagagaaaagagaatcgtttaagggaacccggcgcccagccaggctccagtggcccgaacggggcggcgagggcggcgagggcgccgaggtccggcccatcccagtcctgtggggctggccgggcagagaccccggacccaggcccaggcctaacctgctaaatgtccccggacggttctggtctcctcggccactttcagtgcgtcggttcgttttgattctttttcttttgtgcacataagaaataaataataataataaataaagaataaaattttgtatgtca

SEQ ID NO: 142612 - DNA, 645 bp, Artificial Sequence
  derived and/or modified sequence
atggatatgcattgcaaagctgatcctttctctgcaatgcacccaggtcatgggggtgtcaaccaactggggggagttttcgttaatggaagaccgctgcctgacgtggttcgacagcggatagtggaactcgcgcaccagggcgtacggccttgcgatatttccaggcagcttagagtgtcacatggctgcgtcagcaaaatcctgggaagatactacgagaccggcagtattaagccaggcgtaatcggaggctctaagccaaaagtcgcgacccctaaggtcgtcgacaagattgcggagtacaagaggcagaaccctaccatgttcgcatgggagatccgcgacaggctgctggcggaagggatttgcgataatgacaccgtcccgtctgtgagttctatcaataggatcatccgaactaaggtgcagcaacccttccaccctacaccggacggggctggcaccggggtgaccgcccctggtcataccatcgtgccttctaccgctagtccccctgtgtcaagtgcctctaacgacccagtggggtcttatagtattaacggcattctggggattccccgatcaaacggggaaaagagaaaacgtgacgaggtggaagtctataccgatccagcgcattag

SEQ ID NO: 142613 - DNA, 1254 bp, Artificial Sequence
  derived and/or modified sequence
atggatatgcattgtaaggcagatccgttctctgccatgcatccaggccacggcggagtgaatcagttgggcggagtctttgttaatggcaggcccctccccgatgtggttagacagcggatagtggagctcgctcatcaaggcgtcagaccttgtgatattagtagacaattaagggtctctcacggttgcgtgtcaaagatacttgggcgatactacgagactgggtccataaagcccggtgtcatcggcggatccaagccaaaggtggctacacccaaggtggtggataaaatcgccgaatataagaggcaaaatcctaccatgttcgcttgggagattagggatcgacttctggcggaaggaatttgcgacaatgacaccgtgccttcagtgagcagcattaatcgaataatccggacgaaggttcagcagcccttccatcctactcccgacggcgcagggaccggtgtgaccgctcccggtcacaccattgtgccctcaaccgccagccctcccgtatcttccgcttcaaacgatccagttggctcatatagtattaacggaattctcggtatcccacgtagcaacggggagaaaagaaagagagacgaggtggaggtctatacagatcccgctcacatcagggggggtggtggcctgcacctagtgtggacactgagggacgtgtctgagggaagcgtccccaatggcgacagccagtcaggtgtagatagccttcgtaaacacctgcgagccgacacgtttactcagcagcaattggaagccctagatcgcgtatttgaaagaccgtcttacccagatgtcttccaggcgtccgagcatatcaagagcgagcaagggaatgagtactcgctgcccgctctgactcccggactggatgaagtgaagtcgagcttatctgcctctactaaccctgaactgggttcaaatgtgagcggcacacagacttaccccgttgtgactggacgcgatatggcatctaccaccctgcccggttacccccctcatgtgcctcccacaggccagggttcataccccacctccacccttgctggaatggtgcccggatcagagttctccggaaatccctactcacatccccagtacactgcctataacgaggcctggagatttagcaacccagcattgctctcaagtccatactactactctgccgcacctagaggctctgcaccagccgcagcagctgcagcatacgacaggcactag

SEQ ID NO: 142614 - DNA, 645 bp, Artificial Sequence
  derived and/or modified sequence
atggacatgcactgcaaggccgaccccttcagcgccatgcaccccggccacggcggcgtgaaccagctgggcggcgtgttcgtgaacggcagacccctgcccgacgtggtgagacagagaatcgtggagctggcccaccagggcgtgagaccctgcgacatcagcagacagctgagagtgagccacggctgcgtgagcaagatcctgggcagatactacgagaccggcagcatcaagcccggcgtgatcggcggcagcaagcccaaggtggccacccccaaggtggtggacaagatcgccgagtacaagagacagaaccccaccatgttcgcctgggagatcagagacagactgctggccgagggcatctgcgacaacgacaccgtgcccagcgtgagcagcatcaacagaatcatcagaaccaaggtgcagcagcccttccaccccacccccgacggcgccggcaccggcgtgaccgcccccggccacaccatcgtgcccagcaccgccagcccccccgtgagcagcgccagcaacgaccccgtgggcagctacagcatcaacggcatcctgggcatccccagaagcaacggcgagaagagaaagagagacgaggtggaggtgtacaccgaccccgcccactag

SEQ ID NO: 142615 - DNA, 1254 bp, Artificial Sequence
  derived and/or modified sequence
atggacatgcactgcaaggccgaccccttcagcgccatgcaccccggccacggcggcgtgaaccagctgggcggcgtgttcgtgaacggcagacccctgcccgacgtggtgagacagagaatcgtggagctggcccaccagggcgtgagaccctgcgacatcagcagacagctgagagtgagccacggctgcgtgagcaagatcctgggcagatactacgagaccggcagcatcaagcccggcgtgatcggcggcagcaagcccaaggtggccacccccaaggtggtggacaagatcgccgagtacaagagacagaaccccaccatgttcgcctgggagatcagagacagactgctggccgagggcatctgcgacaacgacaccgtgcccagcgtgagcagcatcaacagaatcatcagaaccaaggtgcagcagcccttccaccccacccccgacggcgccggcaccggcgtgaccgcccccggccacaccatcgtgcccagcaccgccagcccccccgtgagcagcgccagcaacgaccccgtgggcagctacagcatcaacggcatcctgggcatccccagaagcaacggcgagaagagaaagagagacgaggtggaggtgtacaccgaccccgcccacatcagaggcggcggcggcctgcacctggtgtggaccctgagagacgtgagcgagggcagcgtgcccaacggcgacagccagagcggcgtggacagcctgagaaagcacctgagagccgacaccttcacccagcagcagctggaggccctggacagagtgttcgagagacccagctaccccgacgtgttccaggccagcgagcacatcaagagcgagcagggcaacgagtacagcctgcccgccctgacccccggcctggacgaggtgaagagcagcctgagcgccagcaccaaccccgagctgggcagcaacgtgagcggcacccagacctaccccgtggtgaccggcagagacatggccagcaccaccctgcccggctaccccccccacgtgccccccaccggccagggcagctaccccaccagcaccctggccggcatggtgcccggcagcgagttcagcggcaacccctacagccacccccagtacaccgcctacaacgaggcctggagattcagcaaccccgccctgctgagcagcccctactactacagcgccgcccccagaggcagcgcccccgccgccgccgccgccgcctacgacagacactag

SEQ ID NO: 142616 - protein, 396 aa, Artificial Sequence
  derived and/or modified sequence
MDMHCKADPFSAMHPGHGGVNQLGGVFVNGRPLPDVVRQRIVELAHQGVRPCDISRQLRVSHGCVSKILGRYYETGSIKPGVIGGSKPKVATPKVVDKIAEYKRQNPTMFAWEIRDRLLAEGICDNDTVPSVSSINRIIRTKVQQPFHPTPDGAGTGVTAPGHTIVPSTASPPVSSASNDPVGSYSINGILGIPRSNGEKRKRDEDVSEGSVPNGDSQSGVDSLRKHLRADTFTQQQLEALDRVFERPSYPDVFQASEHIKSEQGNEYSLPALTPGLDEVKSSLSASTNPELGSNVSGTQTYPVVTGRDMASTTLPGYPPHVPPTGQGSYPTSTLAGMVPEAAVGPSSSLMSKPGRKLAEVPPCVQPTGASSPATRTATPSTRPTTRLGDSATPPY

SEQ ID NO: 142617 - protein, 419 aa, Artificial Sequence
  derived and/or modified sequence
MDMHCKADPFSAMHPGHGGVNQLGGVFVNGRPLPDVVRQRIVELAHQGVRPCDISRQLRVSHGCVSKILGRYYETGSIKPGVIGGSKPKVATPKVVDKIAEYKRQNPTMFAWEIRDRLLAEGICDNDTVPSVSSINRIIRTKVQQPFHPTPDGAGTGVTAPGHTIVPSTASPPVSSASNDPVGSYSINGILGIPRSNGEKRKRDEVEVYTDPAHIRGGGGLHLVWTLRDVSEGSVPNGDSQSGVDSLRKHLRADTFTQQQLEALDRVFERPSYPDVFQASEHIKSEQGNEYSLPALTPGLDEVKSSLSASTNPELGSNVSGTQTYPVVTGRDMASTTLPGYPPHVPPTGQGSYPTSTLAGMVPEAAVGPSSSLMSKPGRKLAEVPPCVQPTGASSPATRTATPSTRPTTRLGDSATPPY

SEQ ID NO: 142618 - DNA, 1191 bp, Artificial Sequence
  derived and/or modified sequence
atggacatgcattgcaaggcagatcccttcagtgctatgcaccccgggcacgggggagtgaaccagctcggtggagtgttcgttaatggacgtccactccctgacgtcgtgagacaacgcatcgtggaattggcccaccagggcgtcagaccttgtgacatttcccgacagctacgagtgtcccacggctgcgtgtcaaagattcttgggaggtattacgagacggggtccataaaaccaggagtcatagggggttctaagcctaaagttgccaccccaaaagtggtcgataaaatcgctgagtacaaacgacagaaccctacaatgttcgcctgggaaatacgagataggttactggctgaaggcatatgcgacaacgataccgtgcccagcgtgagttctatcaaccggattattaggacgaaggtccagcagccatttcacccaaccccagatggggctggaaccggtgtcacagctcctggacacacaatcgtaccctctacagcatcacctccagtttcaagtgcatcaaatgatccggtgggcagttacagtatcaatggcatcctggggatcccaaggagcaatggcgaaaaaaggaagcgcgatgaggacgtgtccgaggggagtgtcccgaatggagactctcagtctggcgtggacagtctccggaagcaccttagagcagacaccttcacacagcagcagctggaggctcttgaccgcgtgttcgagaggccctcataccccgacgtgtttcaggcctcagagcacatcaagtctgaacaggggaacgaatactccctgccagccctgaccccaggactggatgaggtcaaaagttcactgagcgcctccaccaaccccgaactcggatccaatgtcagcgggactcagacttaccccgtggtgactggccgcgatatggcctcgactaccctgccggggtatccaccacatgtacccccaaccggccagggctcatatccgaccagtacactggcaggaatggtccccgaggccgcggttggcccatccagttctctgatgtctaagcccggacggaagctggctgaagttccaccttgcgttcagccaacaggtgccagctcaccagccacccgcactgccaccccatcgactagacccaccactcgcctgggagactctgctacccccccttactag

SEQ ID NO: 142619 - DNA, 1260 bp, Artificial Sequence
  derived and/or modified sequence
atggacatgcactgcaaggccgatcccttcagcgccatgcatccaggacacggcggcgtgaaccagctgggtggcgttttcgtcaacgggcggccactgccggacgtcgtacggcaacgtatcgttgaattggcacaccagggggtgcgcccttgcgacataagccggcagctgagggtaagccacggctgcgtctcaaagattctcggacgctactacgaaaccggatctatcaagcctggggtgataggagggagtaaacccaaagtggctactcccaaagtggtggataaaatcgctgaatacaagcgccaaaaccctacgatgttcgcatgggagatcagagaccgccttctcgccgaggggatctgtgacaacgatacagtgccatcggtctcgtctattaaccgcatcattaggaccaaagtgcagcagccatttcatcctactccggatggcgcgggaacaggagtcaccgctcccggccatacaattgtgccaagcactgcatctccccctgtgagctctgcgtcgaacgatccagtgggatcttactctatcaatgggattctgggaatccctcgctcaaatggggagaagcgcaagcgagacgaggtggaagtctacactgatccagcacacattcgaggcggcggcggcttacatcttgtgtggaccctgagagacgttagcgaggggagtgtgccaaatggggactctcagtcaggcgttgacagtctgagaaagcatctgagggcagacacctttacacaacagcagttagaagctctggatcgggtgttcgaaaggcccagttacccagatgttttccaagcgtctgaacacattaagtctgagcagggcaatgagtattccctaccggctctcacaccaggtttggacgaggttaaatcctcattatctgcctctaccaatcccgaactcggcagtaacgtctcagggactcagacttatcccgttgttacaggtcgggatatggcttccacaaccttgcccgggtatcctccgcacgtcccccccacgggtcaagggtcgtacccaacttctaccctggccggcatggttcccgaggccgccgtggggccgtcttcgagcctgatgtcaaaaccaggaagaaagctggccgaagttcccccatgcgtgcagccaaccggtgcgtccagtccagccacaagaactgccacgccttccactcggccaactacccggctgggcgactcggcgactccaccctactag

SEQ ID NO: 142620 - DNA, 1191 bp, Artificial Sequence
  derived and/or modified sequence
atggacatgcactgcaaggctgaccccttcagcgccatgcaccctggccatggaggagtgaaccagctgggcggcgtgtttgtgaatggccggcccctgcctgatgtggtgcggcagagaattgtggagctggcccaccagggcgtgcggccctgtgacatcagccggcagctgcgggtgagccacggctgtgtgtccaagatcctgggccgctactatgaaacaggcagcatcaagccaggagtgattggaggcagcaagcccaaggtggccacccccaaggtggtggacaagattgctgagtacaagaggcagaaccccaccatgtttgcctgggagatccgggaccggctgctggccgagggcatctgtgacaatgacacagtgcccagcgtgagcagcatcaaccgcatcatccgcaccaaggtgcagcagcccttccaccccaccccagatggagctggcaccggggtgacagcccctggccacaccatcgtgcccagcacagccagcccccctgtgagcagcgccagcaatgaccctgtgggcagctacagcatcaatggcatcctgggcatccccaggagcaatggagagaagaggaagagagatgaagatgtgtctgagggctctgtgcccaacggggacagccagagcggcgtggacagcctgaggaagcacctgcgggctgacaccttcacccagcagcagctggaggccctggacagagtgtttgagcggcccagctacccagatgtgttccaggccagcgagcacatcaagtctgagcagggcaatgagtacagcctgcctgccctgaccccaggcctggatgaggtgaagagcagcctgagcgccagcaccaaccctgagctgggcagcaatgtgtctggcacccagacctaccctgtggtgacaggccgggacatggccagcaccaccctgcccggctacccacctcatgtgcccccaacaggccagggcagctaccccaccagcaccctggccggcatggtgcctgaggccgctgtgggccccagcagcagcctgatgagcaagccaggcaggaagctggccgaggtgcccccctgtgtgcagcccaccggggccagcagccctgccaccaggacagccacccccagcacccggcccaccacccggctgggggacagcgccaccccaccctactag

SEQ ID NO: 142621 - DNA, 1260 bp, Artificial Sequence
  derived and/or modified sequence
atggacatgcactgcaaggctgaccccttcagcgccatgcaccctggccatggaggagtgaaccagctgggcggcgtgtttgtgaatggccggcccctgcctgatgtggtgcggcagagaattgtggagctggcccaccagggcgtgcggccctgtgacatcagccggcagctgcgggtgagccacggctgtgtgtccaagatcctgggccgctactatgaaacaggcagcatcaagccaggagtgattggaggcagcaagcccaaggtggccacccccaaggtggtggacaagattgctgagtacaagaggcagaaccccaccatgtttgcctgggagatccgggaccggctgctggccgagggcatctgtgacaatgacacagtgcccagcgtgagcagcatcaaccgcatcatccgcaccaaggtgcagcagcccttccaccccaccccagatggagctggcaccggggtgacagcccctggccacaccatcgtgcccagcacagccagcccccctgtgagcagcgccagcaatgaccctgtgggcagctacagcatcaatggcatcctgggcatccccaggagcaatggagagaagaggaagagagatgaggtggaggtgtacacagatcctgcccacatccggggcggcggcggcctgcacctggtgtggaccctgagagatgtgtctgagggctctgtgcccaatggagacagccagagcggcgtggacagcctgaggaagcacctgcgggctgacaccttcacccagcagcagctggaggccctggacagagtgtttgagcggcccagctacccagatgtgttccaggccagcgagcacatcaagtctgagcagggcaatgagtacagcctgcctgccctgaccccaggcctggatgaggtgaagagcagcctgagcgccagcaccaaccctgagctgggcagcaatgtgtctggcacccagacctaccctgtggtgacaggccgggacatggccagcaccaccctgcccggctacccaccccacgtgccccccaccggccagggcagctaccccaccagcaccctggccggcatggtgcctgaggccgctgtgggccccagcagcagcctgatgagcaagccaggcaggaagctggccgaggtgcccccctgtgtgcagcccactggagccagcagccctgccaccaggacagccacccccagcacccggcccaccacccggctgggggacagcgccaccccaccctactag

SEQ ID NO: 142622 - DNA, 1191 bp, Artificial Sequence
  derived and/or modified sequence
atggacatgcactgcaaggccgaccccttcagcgccatgcaccccggccacggaggcgtgaaccagctgggcggggtatttgtcaacgggcggccactccctgatgtggtccgacagcgtattgtggagcttgcccaccagggcgtaagaccatgcgacatatccaggcaacttcgtgtctcacacggctgcgtgagcaagatcctgggtagatactacgagactgggagcatcaagccgggagtaatcggcggatccaagcccaaggtcgctactcctaaagtggtcgacaagattgcagagtataagaggcaaaatcccactatgttcgcctgggaaatcagagatagactgcttgctgaaggcatctgcgacaatgataccgtgccctcggtaagcagcataaacaggattatacgaaccaaggttcagcagccatttcaccccacacctgacggggctgggacaggtgtaacagcgcctggacacaccattgtaccatcgaccgcctcaccacccgtctcatctgctagcaacgatcctgtgggcagttactctatcaacggcatactcggaatacccaggtcaaacggtgagaaaaggaaacgggatgaagacgtgtctgagggatccgtaccaaacggggactcccagtcaggtgtggacagtttgagaaagcatttgcgcgccgatacttttactcaacagcagctcgaggctctcgaccgagtgttcgaacgaccatcatatccggacgtgttccaggcctctgagcacataaaaagtgaacagggcaatgagtactcattacctgcccttactccgggcttggatgaagtgaaatcatctctgtcagcgtccacgaatccggagctcgggtctaatgtcagcggcacacagacatatcctgtggttacgggccgcgacatggcttccacaacattgcccggctatcccccacatgtgccacccacaggtcagggctcctaccctacttctaccctcgcaggtatggttccggaagccgccgtaggccccagtagcagtttgatgtccaaaccgggtagaaaactggctgaggtaccaccctgcgtccagcctaccggcgcttccagccctgccactcgcaccgctaccccctctacacgccccaccactcgtctcggagactccgcaacaccaccctattag

SEQ ID NO: 142623 - DNA, 1260 bp, Artificial Sequence
  derived and/or modified sequence
atggacatgcactgcaaggccgaccccttcagcgccatgcaccccggccacgggggggtgaaccagctgggtggtgtgttcgtgaacgggagaccactaccagatgttgttagacagaggatcgtagagttagctcatcaaggcgttcggccatgtgatattagccggcaactccgagtgtcgcacggatgcgtgtccaagattctgggcaggtactatgagactggatccattaagcctggtgtcattgggggtagcaaacccaaggttgcaaccccgaaggtggtggacaaaattgctgaatataaaaggcagaatcctacaatgttcgcttgggaaatccgggatcggctgttagcagagggcatctgcgacaacgacacggtgccttccgtgtcctccattaatcggatcatacgcacaaaggtgcagcaaccctttcatcctacaccagatggcgccggcactggagtgaccgcacccgggcacactatagtcccttccacagcttcaccccccgtcagttcagcttcaaatgatcctgttggatcatactcgatcaacggaattctgggcatccccaggtctaacggagagaagaggaagcgtgatgaagttgaagtgtacacagaccctgcccatatacgaggcggaggaggcttgcatctggtctggacactgcgtgacgtgagcgagggctccgtgcctaacggtgactcgcaatccggcgtggacagcttacgaaaacaccttagggccgatacattcacccagcaacagctggaggccctggaccgcgtcttcgaacggccttcgtatccagatgtcttccaggccagcgaacatatcaagagcgagcaaggcaacgagtattcgctgcctgccctgactcctggtttggatgaagtcaagtcctcacttagcgcttccacaaaccctgagctgggctccaatgtgtccggaacacagacgtatcccgtggttacaggaagggacatggcttctaccaccttgcccggttatccgccacatgttcccccgacgggtcaaggctcttatcccacaagcaccctagcaggtatggtgcctgaggctgccgtgggaccatcctcttcactgatgagcaaacctgggagaaagctggccgaggtgcctccttgcgtgcagcccaccggggccagctcacccgctacacggaccgcaaccccctcaaccagacccacaacaaggctcggagactctgctacccctccctactag

SEQ ID NO: 142624 - DNA, 3516 bp, Artificial Sequence
  derived and/or modified sequence
cgggggcctggcccgcgcgctcccctcccgcaggcgccacctcggacatccccgggattgctacttctctgccaacttcgccaactcgccagcacttggagaggcccggctcccctcccggcgccctctgaccgcccccgccccgcgcgctctccgaccaccgcctctcggatgaccaggttccaggggagctgagcgagtcgcctcccccgcccagcttcagccctggctgcagctgcagcgcgagccatgcgcccccagtgcaccccggcccggcccaccgccccggggccattctgctgaccgcccagccccgagccccgacagtggcaagttgcggctactgcagttgcaagctccggccaacccggaggagccccagcggggagcgcagtgctgcgccccccgcccccgcgcgccccgcagcagccgggcgttcactcatcctccctcccccaccgtccctcccttttctcctcaagtcctgaagttgagtttgagaggcgacacggcggcggcggccgcgctgctcccgctcctctgcctccccatggatatgcactgcaaagcagaccccttctccgcgatgcacccagggcacgggggtgtgaaccagctcgggggggtgtttgtgaacggccggcccctacccgacgtggtgaggcagcgcatcgtggagctggcccaccagggtgtgcggccctgtgacatctcccggcagctgcgggtcagccacggctgtgtcagcaaaatcctgggcaggtactacgagaccggcagcatcaagccgggtgtgatcggtggctccaagcccaaagtggcgacgcccaaagtggtggacaagattgctgaatacaaacgacagaacccgactatgttcgcctgggagattcgagaccggctcctggccgagggcatctgtgacaatgacacagtgcccagcgtctcttccatcaacagaatcatccggaccaaagttcagcagcctttccacccaacgccggatggggctgggacaggagtgaccgcccctggccacaccattgttcccagcacggcctcccctcctgtttccagcgcctccaatgacccagtgggatcctactccatcaatgggatcctggggattcctcgctccaatggtgagaagaggaaacgtgatgaagatgtgtctgagggctcagtccccaatggagattcccagagtggtgtggacagtttgcggaagcacttgcgagctgacaccttcacccagcagcagctggaagctttggatcgggtctttgagcgtccttcctaccctgacgtcttccaggcatcagagcacatcaaatcagaacaggggaacgagtactccctcccagccctgacccctgggcttgatgaagtcaagtcgagtctatctgcatccaccaaccctgagctgggcagcaacgtgtcaggcacacagacatacccagttgtgactggtcgtgacatggcgagcaccactctgcctggttacccccctcacgtgccccccactggccagggaagctaccccacctccaccctggcaggaatggtgcctgaggctgcagttggtccctcatcctccctcatgagcaagccggggaggaagcttgcagaagtgcccccttgtgtgcaacccactggagcgagttctccggcaacccgtacagccacccccagtacacggcctacaacgaggcttggagattcagcaaccccgccttactaagttccccttattattatagtgccgccccccggggctccgcccctgccgctgctgccgctgcctatgaccgccactagttaccgcggggaccacatcaagcttcaggccgacagcttcggcctccacatcgtccccgtctgaccccaccccggagggagggaggaccgacgcgacgcgatgcctcccggccaccgccccagcctcaccccatcccacgacccccgcaacccttcacatcacccccctcgaaggtcggacaggacgggtggagccgtgggcgggaccctcaggcccgggcccgccgcccccagccccgcctgccgcccctccccgcctgcctggactgcgcggcgccgtgagggggattcggcccagctcgtcccggcctccaccaagccagccccgaagcccgccagccaccctgccggactcgggcgcgacctgctggcgcgcgccggatgtttctgtgacacacaatcagcgcggaccgcagcgcggcccagccccgggcacccgcctcggacgctcgggcgccaggaggcttcgctggaggggctgggccaaggagattaagaagaaaacgactttctgcaggaggaagagcccgctgccgaatccctgggaaaaattcttttcccccagtgccagccggactgccctcgccttccgggtgtgccctgtcccagaagatggaatgggggtgtgggggtccggctctaggaacgggctttgggggcgtcaggtctttccaaggttgggacccaaggatcggggggcccagcagcccgcaccgatcgagccggactctcggctcttcactgctcctcctggcctgcctagttccccagggcccggcacctcctgctgcgagacccggctctcagccctgccttgcccctacctcagcgtctcttccacctgctggcctcccagtttcccctcctgccagtccttcgcctgtcccttgacgccctgcatcctcctccctgactcgcagccccatcggacgctctcccgggaccgccgcaggaccagtttccatagactgcggactggggtcttcctccagcagttacttgatgccccctcccccgacacagactctcaatctgccggtggtaagaaccggttctgagctggcgtctgagctgctgcggggtggaagtggggggctgcccactccactcctcccatcccctcccagcctcctcctccggcaggaactgaacagaaccacaaaaagtctacatttatttaatatgatggtctttgcaaaaaggaacaaaacaacacaaaagcccaccaggctgctgctttgtggaaagacggtgtgtgtcgtgtgaaggcgaaacccggtgtacataacccctccccctccgccccgccccgcccggccccgtagagtccctgtcgcccgccggccctgcctgtagatacgccccgctgtctgtgctgtgagagtcgccgctcgctgggggggaagggggggacacagctacacgcccattaaagcacagcacgtcctgggggaggggggcattttttatgttacaaaaaaaaattacgaaagaaaagaaatctctatgcaaaatgacgaacatggtcctgtggactcctctggcctgttttgttggctctttctctgtaattccgtgttttcgctttttcctccctgcccctctctccctctgcccctctctcctctccgcttctctccccctctgtctctgtctctctccgtctctgtcgctcttgtctgtctgtctctgctcttt

SEQ ID NO: 142625 - DNA, 4209 bp, Artificial Sequence
  derived and/or modified sequence
cgggggcctggcccgcgcgctcccctcccgcaggcgccacctcggacatccccgggattgctacttctctgccaacttcgccaactcgccagcacttggagaggcccggctcccctcccggcgccctctgaccgcccccgccccgcgcgctctccgaccaccgcctctcggatgaccaggttccaggggagctgagcgagtcgcctcccccgcccagcttcagccctggctgcagctgcagcgcgagccatgcgcccccagtgcaccccggcccggcccaccgccccggggccattctgctgaccgcccagccccgagccccgacagtggcaagttgcggctactgcagttgcaagctccggccaacccggaggagccccagcggggagcgcagtgctgcgccccccgcccccgcgcgccccgcagcagccgggcgttcactcatcctccctcccccaccgtccctcccttttctcctcaagtcctgaagttgagtttgagaggcgacacggcggcggcggccgcgctgctcccgctcctctgcctccccatggatatgcactgcaaagcagaccccttctccgcgatgcacccagggcacgggggtgtgaaccagctcgggggggtgtttgtgaacggccggcccctacccgacgtggtgaggcagcgcatcgtggagctggcccaccagggtgtgcggccctgtgacatctcccggcagctgcgggtcagccacggctgtgtcagcaaaatcctgggcaggtactacgagaccggcagcatcaagccgggtgtgatcggtggctccaagcccaaagtggcgacgcccaaagtggtggacaagattgctgaatacaaacgacagaacccgactatgttcgcctgggagattcgagaccggctcctggccgagggcatctgtgacaatgacacagtgcccagcgtctcttccatcaacagaatcatccggaccaaagttcagcagcctttccacccaacgccggatggggctgggacaggagtgaccgcccctggccacaccattgttcccagcacggcctcccctcctgtttccagcgcctccaatgacccagtgggatcctactccatcaatgggatcctggggattcctcgctccaatggtgagaagaggaaacgtgatgaagttgaggtatacactgatcctgcccacattagaggaggtggaggtttgcatctggtctggactttaagagatgtgtctgagggctcagtccccaatggagattcccagagtggtgtggacagtttgcggaagcacttgcgagctgacaccttcacccagcagcagctggaagctttggatcgggtctttgagcgtccttcctaccctgacgtcttccaggcatcagagcacatcaaatcagaacaggggaacgagtactccctcccagccctgacccctgggcttgatgaagtcaagtcgagtctatctgcatccaccaaccctgagctgggcagcaacgtgtcaggcacacagacatacccagttgtgactggtcgtgacatggcgagcaccactctgcctggttacccccctcacgtgccccccactggccagggaagctaccccacctccaccctggcaggaatggtgcctgaggctgcagttggtccctcatcctccctcatgagcaagccggggaggaagcttgcagaagtgcccccttgtgtgcaacccactggagcgagttctccggcaacccgtacagccacccccagtacacggcctacaacgaggcttggagattcagcaaccccgccttactaagttccccttattattatagtgccgccccccggggctccgcccctgccgctgctgccgctgcctatgaccgccactagttaccgcggggaccacatcaagcttcaggccgacagcttcggcctccacatcgtccccgtctgaccccaccccggagggagggaggaccgacgcgacgcgatgcctcccggccaccgccccagcctcaccccatcccacgacccccgcaacccttcacatcacccccctcgaaggtcggacaggacgggtggagccgtgggcgggaccctcaggcccgggcccgccgcccccagccccgcctgccgcccctccccgcctgcctggactgcgcggcgccgtgagggggattcggcccagctcgtcccggcctccaccaagccagccccgaagcccgccagccaccctgccggactcgggcgcgacctgctggcgcgcgccggatgtttctgtgacacacaatcagcgcggaccgcagcgcggcccagccccgggcacccgcctcggacgctcgggcgccaggaggcttcgctggaggggctgggccaaggagattaagaagaaaacgactttctgcaggaggaagagcccgctgccgaatccctgggaaaaattcttttcccccagtgccagccggactgccctcgccttccgggtgtgccctgtcccagaagatggaatgggggtgtgggggtccggctctaggaacgggctttgggggcgtcaggtctttccaaggttgggacccaaggatcggggggcccagcagcccgcaccgatcgagccggactctcggctcttcactgctcctcctggcctgcctagttccccagggcccggcacctcctgctgcgagacccggctctcagccctgccttgcccctacctcagcgtctcttccacctgctggcctcccagtttcccctcctgccagtccttcgcctgtcccttgacgccctgcatcctcctccctgactcgcagccccatcggacgctctcccgggaccgccgcaggaccagtttccatagactgcggactggggtcttcctccagcagttacttgatgccccctcccccgacacagactctcaatctgccggtggtaagaaccggttctgagctggcgtctgagctgctgcggggtggaagtggggggctgcccactccactcctcccatcccctcccagcctcctcctccggcaggaactgaacagaaccacaaaaagtctacatttatttaatatgatggtctttgcaaaaaggaacaaaacaacacaaaagcccaccaggctgctgctttgtggaaagacggtgtgtgtcgtgtgaaggcgaaacccggtgtacataacccctccccctccgccccgccccgcccggccccgtagagtccctgtcgcccgccggccctgcctgtagatacgccccgctgtctgtgctgtgagagtcgccgctcgctgggggggaagggggggacacagctacacgcccattaaagcacagcacgtcctgggggaggggggcattttttatgttacaaaaaaaaattacgaaagaaaagaaatctctatgcaaaatgacgaacatggtcctgtggactcctctggcctgttttgttggctctttctctgtaattccgtgttttcgctttttcctccctgcccctctctccctctgcccctctctcctctccgcttctctccccctctgtctctgtctctctccgtctctgtcgctcttgtctgtctgtctctgctctttcctcggcctctctccccagacctggcccggccgccctgtctccgcaggctagatccgaggtggcagctccagcccccgggctcgccccctcgcgggcgtgccccgcgcgccccgggcggccgaaggccgggccgccccgtcccgccccgtagttgctctttcggtagtggcgatgcgccctgcatgtctcctcacccgtggatcgtgacgactcgaaataacagaaacaaagtcaataaagtgaaaataaataaaaatccttgaacaaatccgaaaaggcttggagtcctcgcccagatctctctcccctgcgagccctttttatttgagaaggaaaaagagaaaagagaatcgtttaagggaacccggcgcccagccaggctccagtggcccgaacggggcggcgagggcggcgagggcgccgaggtccggcccatcccagtcctgtggggctggccgggcagagaccccggacccaggcccaggcctaacctgctaaatgtccccggacggttctggtctcctcggccactttcagtgcgtcggttcgttttgattctttttcttttgtgcacataagaaataaataataataataaataaagaataaaattttgtatgtca

SEQ ID NO: 142626 - DNA, 1191 bp, Artificial Sequence
  derived and/or modified sequence
atggacatgcactgtaaggctgacccttttagtgccatgcatcctggccacgggggagtcaatcagcttggcggtgtgttcgtgaatggtcgcccactcccagacgtagtacgacagcggatcgtggagctggcccatcagggtgtgcggccttgcgatattagcaggcagctcagagtcagtcacggctgcgtgagcaagattctgggcaggtactacgagacagggtctattaaaccaggtgtgattgggggtagcaagcccaaggtggcgacccctaaggtagtggacaaaatcgccgagtataaaagacaaaatccaaccatgttcgcctgggaaatccgagatcggttgttagccgagggcatttgcgacaacgacacagtgccttcggtctcatctatcaatcgcatcattcgcacaaaggtgcagcaaccctttcaccctacacctgatggtgccggaaccggcgtgacagcccctgggcataccattgtacccagcacggcctctcctcctgtctcttcggctagcaacgatccagtcgggtcctatagtatcaacgggattcttggaattcctcgtagcaatggagaaaagcgaaagagagacgaggacgtcagcgagggctccgttcctaatggcgattcacaaagtggagttgactcattgagaaagcatcttcgtgccgacacgttcacacagcaacagttggaagccctggacagagtgttcgagcgcccttcatatcccgatgtgtttcaagcctctgaacacataaaaagcgagcagggaaatgagtacagcctgccggcactcacacccggtttggatgaggtcaagagtagcctcagcgcgagtactaatcctgaacttggatcaaatgtgtcaggtacacagacttaccccgttgtaaccgggagagatatggcttctactaccctgcctggctatcctccccatgtgccgccaacaggacaaggcagttaccccacatccactctggcaggcatggtgcccgaggccgctgttgggccaagttcctccctcatgtcaaagcctggccgaaagcttgccgaggtcccaccatgcgtacaaccaactggagccagcagtccggctacccgcacagccacaccaagcaccagacctacaactaggctaggagattcggccactcccccttactag

SEQ ID NO: 142627 - DNA, 1260 bp, Artificial Sequence
  derived and/or modified sequence
atggatatgcactgcaaagccgatccattcagcgcaatgcatcccggtcacggaggcgtgaaccagctgggaggcgtgttcgttaatggaaggcccctccctgacgtagtgcggcagaggattgttgagttggcacaccagggtgtgcgaccctgcgacatcagtcggcagctgagagtaagccacggctgtgtctcgaaaatcttaggcagatattacgaaacgggaagtattaagcccggtgttatcggaggttccaaaccaaaagtggcaactcccaaggttgtcgacaagatagcagaatacaagcgacagaatccaactatgtttgcttgggaaattcgcgaccgcctactagccgagggaatctgtgataacgataccgtccctagtgtctcgtccattaacaggataatacggacgaaagttcaacaaccgttccatcccactcctgacggtgccggtacaggtgtgaccgcaccagggcataccattgttccaagcacagcctcgccaccggtatccagcgcgtctaacgatcccgtgggctcttacagcattaacggtattttaggtatcccaagatctaatggagagaagcggaagcgcgacgaggtggaggtgtacaccgatcctgcacatatcaggggcggaggtggactacatctggtgtggacactgcgagatgtgagtgagggcagcgtacctaacggcgattctcaatcaggcgtggactcattacgcaagcatctcagagccgacaccttcacacagcagcagctcgaagcgttggacagagtcttcgagcgtccctcgtatccggacgtttttcaggcaagcgagcatataaaaagcgagcaaggcaatgagtatagcctaccggctttaacaccgggtctcgatgaagttaagtctagtctgagtgcatccacaaatccagagctgggcagtaacgtgagcggtacccagacgtatcccgtagttactggaagagacatggcaagcacgaccctgccaggatatcctcctcatgttccccctaccggacaaggaagctatcctacttcgaccttggccggaatggtacccgaggcggctgttggccctagcagctccttgatgagcaaaccaggacgtaaactcgctgaggtgcctccttgcgtgcaacctaccggtgccagctcccctgcaacacggacagccaccccttccactcgtcccaccactagactgggtgattctgccacacccccatactag

SEQ ID NO: 142628 - DNA, 1191 bp, Artificial Sequence
  derived and/or modified sequence
atggacatgcactgcaaggccgaccccttcagcgccatgcaccccggccacggcggcgtgaaccagctgggcggcgtgttcgtgaacggcagacccctgcccgacgtggtgagacagagaatcgtggagctggcccaccagggcgtgagaccctgcgacatcagcagacagctgagagtgagccacggctgcgtgagcaagatcctgggcagatactacgagaccggcagcatcaagcccggcgtgatcggcggcagcaagcccaaggtggccacccccaaggtggtggacaagatcgccgagtacaagagacagaaccccaccatgttcgcctgggagatcagagacagactgctggccgagggcatctgcgacaacgacaccgtgcccagcgtgagcagcatcaacagaatcatcagaaccaaggtgcagcagcccttccaccccacccccgacggcgccggcaccggcgtgaccgcccccggccacaccatcgtgcccagcaccgccagcccccccgtgagcagcgccagcaacgaccccgtgggcagctacagcatcaacggcatcctgggcatccccagaagcaacggcgagaagagaaagagagacgaggacgtgagcgagggcagcgtgcccaacggcgacagccagagcggcgtggacagcctgagaaagcacctgagagccgacaccttcacccagcagcagctggaggccctggacagagtgttcgagagacccagctaccccgacgtgttccaggccagcgagcacatcaagagcgagcagggcaacgagtacagcctgcccgccctgacccccggcctggacgaggtgaagagcagcctgagcgccagcaccaaccccgagctgggcagcaacgtgagcggcacccagacctaccccgtggtgaccggcagagacatggccagcaccaccctgcccggctaccccccccacgtgccccccaccggccagggcagctaccccaccagcaccctggccggcatggtgcccgaggccgccgtgggccccagcagcagcctgatgagcaagcccggcagaaagctggccgaggtgcccccctgcgtgcagcccaccggcgccagcagccccgccaccagaaccgccacccccagcaccagacccaccaccagactgggcgacagcgccacccccccctactag

SEQ ID NO: 142629 - DNA, 1260 bp, Artificial Sequence
  derived and/or modified sequence
atggacatgcactgcaaggccgaccccttcagcgccatgcaccccggccacggcggcgtgaaccagctgggcggcgtgttcgtgaacggcagacccctgcccgacgtggtgagacagagaatcgtggagctggcccaccagggcgtgagaccctgcgacatcagcagacagctgagagtgagccacggctgcgtgagcaagatcctgggcagatactacgagaccggcagcatcaagcccggcgtgatcggcggcagcaagcccaaggtggccacccccaaggtggtggacaagatcgccgagtacaagagacagaaccccaccatgttcgcctgggagatcagagacagactgctggccgagggcatctgcgacaacgacaccgtgcccagcgtgagcagcatcaacagaatcatcagaaccaaggtgcagcagcccttccaccccacccccgacggcgccggcaccggcgtgaccgcccccggccacaccatcgtgcccagcaccgccagcccccccgtgagcagcgccagcaacgaccccgtgggcagctacagcatcaacggcatcctgggcatccccagaagcaacggcgagaagagaaagagagacgaggtggaggtgtacaccgaccccgcccacatcagaggcggcggcggcctgcacctggtgtggaccctgagagacgtgagcgagggcagcgtgcccaacggcgacagccagagcggcgtggacagcctgagaaagcacctgagagccgacaccttcacccagcagcagctggaggccctggacagagtgttcgagagacccagctaccccgacgtgttccaggccagcgagcacatcaagagcgagcagggcaacgagtacagcctgcccgccctgacccccggcctggacgaggtgaagagcagcctgagcgccagcaccaaccccgagctgggcagcaacgtgagcggcacccagacctaccccgtggtgaccggcagagacatggccagcaccaccctgcccggctaccccccccacgtgccccccaccggccagggcagctaccccaccagcaccctggccggcatggtgcccgaggccgccgtgggccccagcagcagcctgatgagcaagcccggcagaaagctggccgaggtgcccccctgcgtgcagcccaccggcgccagcagccccgccaccagaaccgccacccccagcaccagacccaccaccagactgggcgacagcgccacccccccctactag

SEQ ID NO: 142630 - protein, 329 aa, Artificial Sequence
  derived and/or modified sequence
MFAWEIRDRLLAEGICDNDTVPSVSSINRIIRTKVQQPFHPTPDGAGTGVTAPGHTIVPSTASPPVSSASNDPVGSYSINGILGIPRSNGEKRKRDEVEVYTDPAHIRGGGGLHLVWTLRDVSEGSVPNGDSQSGVDSLRKHLRADTFTQQQLEALDRVFERPSYPDVFQASEHIKSEQGNEYSLPALTPGLDEVKSSLSASTNPELGSNVSGTQTYPVVTGRDMASTTLPGYPPHVPPTGQGSYPTSTLAGMVPGSEFSGNPYSHPQYTAYNEAWRFSNPALLSSPYYYSAAPRGSLPLLPLPMTATSYRGDHIKLQADSFGLHIVPV

SEQ ID NO: 142631 - DNA, 990 bp, Artificial Sequence
  derived and/or modified sequence
atgttcgcctgggaaatcagggatcgtctcttagccgagggaatatgcgacaatgatacagtgccatcagtgtcttcaatcaatcggatcattcgcacaaaggtgcagcagccttttcacccgacccccgatggggcggggacgggcgtgaccgctcccggccacactattgtgccctccactgcatccccccccgtgagctccgcctcaaatgaccccgtcgggtcatacagcataaacggcattctgggcatcccaagaagcaacggtgaaaagagaaagagggacgaggtagaggtgtacactgaccctgcccatataaggggtggggggggactgcacctggtctggacccttagggacgtatctgaagggtccgtccccaacggcgattctcaaagcggggttgattccttgaggaagcacctgagggccgatacctttacgcagcagcaactggaagcccttgatcgggtcttcgaaaggccttcatacccggacgtgtttcaggcaagcgagcatatcaagtcagagcagggtaacgaatacagcctgcctgcacttacacccggcctggacgaggttaaaagcagcttaagcgcctctactaatcccgagttaggatccaatgtgagcggcacccagacctacccagtggtgaccggtagggacatggcctccacaactctgccaggctaccccccccacgtgcctccaaccgggcagggtagctaccctacctccactctggccggaatggtccccggctctgagttctctgggaatccttactcacacccccagtatactgcgtacaacgaggcgtggcggttctcgaatcctgctctgctgagtagtccctattattattccgctgccccgcgcggatcgctgccactcctccccttacccatgaccgccacttcatatagaggagaccacatcaaactgcaagctgacagtttcggcctgcacatagtgcccgtttag

SEQ ID NO: 142632 - DNA, 990 bp, Artificial Sequence
  derived and/or modified sequence
atgtttgcctgggagatccgggaccggctgctggccgagggcatctgtgacaatgacacagtgcccagcgtgagcagcatcaaccgcatcatccgcaccaaggtgcagcagcccttccaccccaccccagatggagctggcaccggggtgacagcccctggccacaccatcgtgcccagcacagccagcccccctgtgagcagcgccagcaatgaccctgtgggcagctacagcatcaatggcatcctgggcatccccaggagcaatggagagaagaggaagagagatgaggtggaggtgtacacagatcctgcccacatccggggcggcggcggcctgcacctggtgtggaccctgagagatgtgtctgagggctctgtgcccaatggagacagccagagcggcgtggacagcctgaggaagcacctgcgggctgacaccttcacccagcagcagctggaggccctggacagagtgtttgagcggcccagctacccagatgtgttccaggccagcgagcacatcaagtctgagcagggcaatgagtacagcctgcctgccctgaccccaggcctggatgaggtgaagagcagcctgagcgccagcaccaaccctgagctgggcagcaatgtgtctggcacccagacctaccctgtggtgacaggccgggacatggccagcaccaccctgcccggctacccaccccacgtgccccccaccggccagggcagctaccccaccagcaccctggccggcatggtgcccggcagcgagttcagcggcaacccctacagccacccccagtacacagcctacaatgaggcctggaggttcagcaacccagccctgctgagcagcccctactactacagcgctgccccccggggcagcctgcccctgctgcccctgcccatgacagccaccagctacagaggagaccacatcaagctgcaggccgacagctttggcctgcacatcgtgcctgtgtag

SEQ ID NO: 142633 - DNA, 990 bp, Artificial Sequence
  derived and/or modified sequence
atgttcgcctgggagatccgggaccggctgctggccgagggcatctgcgataatgacacagtcccctccgtctcctcaattaatcgcatcatcagaactaaagtgcaacagccatttcacccaacgcccgacggcgccgggactggcgtaaccgcccccggtcatactatcgtaccatcgacagccagccctcctgtgtcatcagcatccaatgaccccgtggggtcatatagcattaatgggatcctggggatccccaggtccaacggagaaaaacgtaagcgagatgaggtcgaagtttacacggaccccgcccacatcaggggcggcggcgggcttcacctggtgtggacccttcgggacgtgtctgagggctccgtaccaaacggtgattcgcagtcaggtgtcgactccctccgtaaacatctacgcgcagacacctttacacagcaacaactggaggccttggatagggtgttcgaaaggccctcctatccggatgtgtttcaggcgtctgagcacattaagagcgagcagggaaatgagtactccctgccagctttgacacccgggctcgacgaagtgaaatcatctctgtctgccagtactaatccagagctgggttccaacgtgtccggtacacagacctatcccgtggtaacagggcgggacatggcttcgaccactttgcccgggtatcctcctcatgtgcctcccaccggccaggggagttatcccacatctacacttgctggcatggttcccgggagtgaattcagcgggaacccttatagtcacccgcaatatactgcctataacgaagcatggcgtttttctaatccagcactgctgtcctctccttactattattcagcagcacctagaggatcacttcccctcctcccacttcctatgaccgcaaccagctaccgtggagaccatatcaaacttcaagccgactcatttgggctccatattgtgcccgtctag

SEQ ID NO: 142634 - DNA, 4122 bp, Artificial Sequence
  derived and/or modified sequence
cgggggcctggcccgcgcgctcccctcccgcaggcgccacctcggacatccccgggattgctacttctctgccaacttcgccaactcgccagcacttggagaggcccggctcccctcccggcgccctctgaccgcccccgccccgcgcgctctccgaccaccgcctctcggatgaccaggttccaggggagctgagcgagtcgcctcccccgcccagcttcagccctggctgcagctgcagcgcgagccatgcgcccccagtgcaccccggcccggcccaccgccccggggccattctgctgaccgcccagccccgagccccgacagtggcaagttgcggctactgcagttgcaagctccggccaacccggaggagccccagcggggagcgcagtgctgcgccccccgcccccgcgcgccccgcagcagccgggcgttcactcatcctccctcccccaccgtccctcccttttctcctcaagtcctgaagttgagtttgagaggcgacacggcggcggcggccgcgctgctcccgctcctctgcctccccatggatatgcactgcaaagcagaccccttctccgcgatgcacccagggcacgggggtgtgaaccagctcgggggggtgtttgtgaacggccggcccctacccgacgtggtgaggcagcgcatcgtggagctggcccaccagggtgtgcggccctgtgacatctcccggcagctgcgggtcagccacggctgtgtcagcaaaatcctgggcaggtactacgagaccggcagcatcaagccgggtgtgatcggtggctccaagcccaaagtggcgacgcccaaagtggtggacaagattgctgaatacaaacgacagaacccgactatgttcgcctgggagattcgagaccggctcctggccgagggcatctgtgacaatgacacagtgcccagcgtctcttccatcaacagaatcatccggaccaaagttcagcagcctttccacccaacgccggatggggctgggacaggagtgaccgcccctggccacaccattgttcccagcacggcctcccctcctgtttccagcgcctccaatgacccagtgggatcctactccatcaatgggatcctggggattcctcgctccaatggtgagaagaggaaacgtgatgaagttgaggtatacactgatcctgcccacattagaggaggtggaggtttgcatctggtctggactttaagagatgtgtctgagggctcagtccccaatggagattcccagagtggtgtggacagtttgcggaagcacttgcgagctgacaccttcacccagcagcagctggaagctttggatcgggtctttgagcgtccttcctaccctgacgtcttccaggcatcagagcacatcaaatcagaacaggggaacgagtactccctcccagccctgacccctgggcttgatgaagtcaagtcgagtctatctgcatccaccaaccctgagctgggcagcaacgtgtcaggcacacagacatacccagttgtgactggtcgtgacatggcgagcaccactctgcctggttacccccctcacgtgccccccactggccagggaagctaccccacctccaccctggcaggaatggtgcctggtagcgagttctccggcaacccgtacagccacccccagtacacggcctacaacgaggcttggagattcagcaaccccgccttactaagttccccttattattatagtgccgccccccggggctccctgccgctgctgccgctgcctatgaccgccactagttaccgcggggaccacatcaagcttcaggccgacagcttcggcctccacatcgtccccgtctgaccccaccccggagggagggaggaccgacgcgacgcgatgcctcccggccaccgccccagcctcaccccatcccacgacccccgcaacccttcacatcacccccctcgaaggtcggacaggacgggtggagccgtgggcgggaccctcaggcccgggcccgccgcccccagccccgcctgccgcccctccccgcctgcctggactgcgcggcgccgtgagggggattcggcccagctcgtcccggcctccaccaagccagccccgaagcccgccagccaccctgccggactcgggcgcgacctgctggcgcgcgccggatgtttctgtgacacacaatcagcgcggaccgcagcgcggcccagccccgggcacccgcctcggacgctcgggcgccaggaggcttcgctggaggggctgggccaaggagattaagaagaaaacgactttctgcaggaggaagagcccgctgccgaatccctgggaaaaattcttttcccccagtgccagccggactgccctcgccttccgggtgtgccctgtcccagaagatggaatgggggtgtgggggtccggctctaggaacgggctttgggggcgtcaggtctttccaaggttgggacccaaggatcggggggcccagcagcccgcaccgatcgagccggactctcggctcttcactgctcctcctggcctgcctagttccccagggcccggcacctcctgctgcgagacccggctctcagccctgccttgcccctacctcagcgtctcttccacctgctggcctcccagtttcccctcctgccagtccttcgcctgtcccttgacgccctgcatcctcctccctgactcgcagccccatcggacgctctcccgggaccgccgcaggaccagtttccatagactgcggactggggtcttcctccagcagttacttgatgccccctcccccgacacagactctcaatctgccggtggtaagaaccggttctgagctggcgtctgagctgctgcggggtggaagtggggggctgcccactccactcctcccatcccctcccagcctcctcctccggcaggaactgaacagaaccacaaaaagtctacatttatttaatatgatggtctttgcaaaaaggaacaaaacaacacaaaagcccaccaggctgctgctttgtggaaagacggtgtgtgtcgtgtgaaggcgaaacccggtgtacataacccctccccctccgccccgccccgcccggccccgtagagtccctgtcgcccgccggccctgcctgtagatacgccccgctgtctgtgctgtgagagtcgccgctcgctgggggggaagggggggacacagctacacgcccattaaagcacagcacgtcctgggggaggggggcattttttatgttacaaaaaaaaattacgaaagaaaagaaatctctatgcaaaatgacgaacatggtcctgtggactcctctggcctgttttgttggctctttctctgtaattccgtgttttcgctttttcctccctgcccctctctccctctgcccctctctcctctccgcttctctccccctctgtctctgtctctctccgtctctgtcgctcttgtctgtctgtctctgctctttcctcggcctctctccccagacctggcccggccgccctgtctccgcaggctagatccgaggtggcagctccagcccccgggctcgccccctcgcgggcgtgccccgcgcgccccgggcggccgaaggccgggccgccccgtcccgccccgtagttgctctttcggtagtggcgatgcgccctgcatgtctcctcacccgtggatcgtgacgactcgaaataacagaaacaaagtcaataaagtgaaaataaataaaaatccttgaacaaatccgaaaaggcttggagtcctcgcccagatctctctcccctgcgagccctttttatttgagaaggaaaaagagaaaagagaatcgtttaagggaacccggcgcccagccaggctccagtggcccgaacggggcggcgagggcggcgagggcgccgaggtccggcccatcccagtcctgtggggctggccgggcagagaccccggacccaggcccaggcctaacctgctaaatgtccccggacggttctggtctcctcggccactttcagtgcgtcggttcgttttgattctttttcttttgtgcacataagaaataaataataataataaataaagaataaaattttgtatgtca

SEQ ID NO: 142635 - DNA, 990 bp, Artificial Sequence
  derived and/or modified sequence
atgttcgcctgggagatcagggatcggctcctagccgagggaatttgcgacaacgatactgtgcccagtgtgagcagcattaataggatcatccggacaaaggttcagcagccgttccacccaacacctgacggcgctgggacaggcgtgaccgcacccggtcatactatcgtcccatcaaccgcctcaccacccgtgtcctcagccagtaacgatcccgtcggctcctattctatcaacggcattctgggaatcccaagaagcaatggagagaagagaaagcgcgatgaggtggaggtgtacactgatcccgctcacatccgtggaggaggcggattgcaccttgtctggactttgagagacgtgtccgaggggtcagtcccaaatggggacagccagtccggagtggacagccttcgtaaacatttgagagcagacacattcacacaacaacagctggaggctttggacagggtgtttgaacggccttcttacccagacgtgttccaggcctctgagcatataaagagcgagcaaggaaatgaatattccctgccagcccttacaccaggattagatgaagttaaatcaagtttgtcggcaagcacaaatccagaactgggcagtaacgtgagcggaactcagacataccctgtggttacgggcagggatatggccagcaccactctgcccggttacccaccccatgtgcctccgacgggccaaggatcctatccaacatccacattggcaggtatggtgccgggaagcgagttctccgggaacccctactctcatcctcagtatactgcatacaatgaagcatggaggttctccaatcccgctctgctctcgtctccttattattactctgcagctccgagagggtcacttccattgcttcccctgcctatgaccgcgaccagctataggggcgatcatatcaagttgcaagccgattcatttggcttacacatcgtgcccgtatag

SEQ ID NO: 142636 - DNA, 990 bp, Artificial Sequence
  derived and/or modified sequence
atgttcgcctgggagatcagagacagactgctggccgagggcatctgcgacaacgacaccgtgcccagcgtgagcagcatcaacagaatcatcagaaccaaggtgcagcagcccttccaccccacccccgacggcgccggcaccggcgtgaccgcccccggccacaccatcgtgcccagcaccgccagcccccccgtgagcagcgccagcaacgaccccgtgggcagctacagcatcaacggcatcctgggcatccccagaagcaacggcgagaagagaaagagagacgaggtggaggtgtacaccgaccccgcccacatcagaggcggcggcggcctgcacctggtgtggaccctgagagacgtgagcgagggcagcgtgcccaacggcgacagccagagcggcgtggacagcctgagaaagcacctgagagccgacaccttcacccagcagcagctggaggccctggacagagtgttcgagagacccagctaccccgacgtgttccaggccagcgagcacatcaagagcgagcagggcaacgagtacagcctgcccgccctgacccccggcctggacgaggtgaagagcagcctgagcgccagcaccaaccccgagctgggcagcaacgtgagcggcacccagacctaccccgtggtgaccggcagagacatggccagcaccaccctgcccggctaccccccccacgtgccccccaccggccagggcagctaccccaccagcaccctggccggcatggtgcccggcagcgagttcagcggcaacccctacagccacccccagtacaccgcctacaacgaggcctggagattcagcaaccccgccctgctgagcagcccctactactacagcgccgcccccagaggcagcctgcccctgctgcccctgcccatgaccgccaccagctacagaggcgaccacatcaagctgcaggccgacagcttcggcctgcacatcgtgcccgtgtag

SEQ ID NO: 142637 - protein, 436 aa, Artificial Sequence
  derived and/or modified sequence
MQPPPSLCGRALVALVLACGLSRIWGEERGFPPDRATPLLQTAEIMTPPTKTLWPKGSNASLARSLAPAEVPKGDRTAGSPPRTISPPPCQGPIEIKETFKYINTVVSCLVFVLGIIGNSTLLRIIYKNKCMRNGPNILIASLALGDLLHIVIDIPINVYKLLAEDWPFGAEMCKLVPFIQKASVGITVLSLCALSIDRYRAVASWSRIKGIGVPKWTAVEIVLIWVVSVVLAVPEAIGFDIITMDYKGSYLRICLLHPVQKTAFMQFYKTAKDWWLFSFYFCLPLAITAFFYTLMTCEMLRKKSGMQIALNDHLKQRREVAKTVFCLVLVFALCWLPLHLSRILKLTLYNQNDPNRCELLSFLLVLDYIGINMASLNSCINPIALYLVSKRFKNCFKAGPHVGNKLVMLFSVNIECDGTVNQNPTMWPERKSNNN

SEQ ID NO: 142638 - DNA, 1311 bp, Artificial Sequence
  derived and/or modified sequence
atgcagcccccccccagcctgtgcggcagagccctggtggccctggtgctggcctgcggcctgagcagaatctggggcgaggagagaggcttcccccccgacagagccacccccctgctgcagaccgccgagatcatgaccccccccaccaagaccctgtggcccaagggcagcaacgccagcctggccagaagcctggcccccgccgaggtgcccaagggcgacagaaccgccggcagcccccccagaaccatcagcccccccccctgccagggccccatcgagatcaaggagaccttcaagtacatcaacaccgtggtgagctgcctggtgttcgtgctgggcatcatcggcaacagcaccctgctgagaatcatctacaagaacaagtgcatgagaaacggccccaacatcctgatcgccagcctggccctgggcgacctgctgcacatcgtgatcgacatccccatcaacgtgtacaagctgctggccgaggactggcccttcggcgccgagatgtgcaagctggtgcccttcatccagaaggccagcgtgggcatcaccgtgctgagcctgtgcgccctgagcatcgacagatacagagccgtggccagctggagcagaatcaagggcatcggcgtgcccaagtggaccgccgtggagatcgtgctgatctgggtggtgagcgtggtgctggccgtgcccgaggccatcggcttcgacatcatcaccatggactacaagggcagctacctgagaatctgcctgctgcaccccgtgcagaagaccgccttcatgcagttctacaagaccgccaaggactggtggctgttcagcttctacttctgcctgcccctggccatcaccgccttcttctacaccctgatgacctgcgagatgctgagaaagaagagcggcatgcagatcgccctgaacgaccacctgaagcagagaagagaggtggccaagaccgtgttctgcctggtgctggtgttcgccctgtgctggctgcccctgcacctgagcagaatcctgaagctgaccctgtacaaccagaacgaccccaacagatgcgagctgctgagcttcctgctggtgctggactacatcggcatcaacatggccagcctgaacagctgcatcaaccccatcgccctgtacctggtgagcaagagattcaagaactgcttcaaggccggcccccacgtgggcaacaagctggtgatgctgttcagcgtgaacatcgagtgcgacggcaccgtgaaccagaaccccaccatgtggcccgagagaaagagcaacaacaactag

SEQ ID NO: 142639 - DNA, 2530 bp, Artificial Sequence
  derived and/or modified sequence
aagaaaaacagctgagagggcatcaggaaggagtttcgacccgcgctggcgagtcatgagcgccaagtttcccactggcgcgcaaacttgagttacttttgagcgtggatactggcgaagaggctgcgggcggtattagcgtttgcagcgacttggctcgggcagctgacccaagtgtcctgtcttccttcctctgcttgtctctaggctctgaaactgcggagcggccaccggacgccttctggagcaggtagcagcatgcagccgcctccaagtctgtgcggacgcgccctggttgcgctggttcttgcctgcggcctgtcgcggatctggggagaggagagaggcttcccgcctgacagggccactccgcttttgcaaaccgcagagataatgacgccacccactaagaccttatggcccaagggttccaacgccagtctggcgcggtcgttggcacctgcggaggtgcctaaaggagacaggacggcaggatctccgccacgcaccatctcccctcccccgtgccaaggacccatcgagatcaaggagactttcaaatacatcaacacggttgtgtcctgccttgtgttcgtgctggggatcatcgggaactccacacttctgagaattatctacaagaacaagtgcatgcgaaacggtcccaatatcttgatcgccagcttggctctgggagacctgctgcacatcgtcattgacatccctatcaatgtctacaagctgctggcagaggactggccatttggagctgagatgtgtaagctggtgcctttcatacagaaagcctctgtgggaatcactgtgctgagtctatgtgctctgagtattgacagatatcgagctgttgcttcttggagtagaattaaaggaattggggttccaaaatggacagcagtagaaattgttttgatttgggtggtctctgtggttctggctgtccctgaagccataggttttgatataattacgatggactacaaaggaagttatctgcgaatctgcttgcttcatcccgttcagaagacagctttcatgcagttttacaagacagcaaaagattggtggctattcagtttctatttctgcttgccattggccatcactgcatttttttatacactaatgacctgtgaaatgttgagaaagaaaagtggcatgcagattgctttaaatgatcacctaaagcagagacgggaagtggccaaaaccgtcttttgcctggtccttgtctttgccctctgctggcttccccttcacctcagcaggattctgaagctcactctttataatcagaatgatcccaatagatgtgaacttttgagctttctgttggtattggactatattggtatcaacatggcttcactgaattcctgcattaacccaattgctctgtatttggtgagcaaaagattcaaaaactgctttaaggctgggccacatgttggaaataagctagtaatgttgttttctgtcaatattgaatgtgatggtacagtaaaccaaaacccaacaatgtggccagaaagaaagagcaataataattaattcacacaccatatggattctatttataaatcacccacaaacttgttctttaatttcatcccaatcactttttcagaggcctgttatcatagaagtcattttagactctcaattttaaattaattttgaatcactaatattttcacagtttattaatatatttaatttctatttaaattttagattatttttattaccatgtactgaatttttacatcctgataccttttccttctccatgtcagtatcatgttctctaattatcttgccaaattttgaaactacacacaaaaagcatacttgcattatttataataaaattgcattcagtggctttttaaaaaaatgtttgattcaaaactttaacatactgataagtaagaaacaattataatttctttacatactcaaaaccaagatagaaaaaggtgctatcgttcaacttcaaaacatgtttcctagtattaaggactttaatatagcaacagacaaaattattgttaacatggatgttacagctcaaaagatttataaaagattttaacctattttctcccttattatccactgctaatgtggatgtatgttcaaacaccttttagtattgatagcttacatatggccaaaggaatacagtttatagcaaaacatgggtatgctgtagctaactttataaaagtgtaatataacaatgtaaaaaattatatatctgggaggattttttggttgcctaaagtggctatagttactgattttttattatgtaagcaaaaccaataaaaatttaagtttttttaacaactaccttatttttcactgtacagacactaattcattaaatactaattgattgtttaaaagaaatataaatgtgacaagtggacattatttatgttaaatatacaattatcaagcaagtatgaagttattcaattaaaatgccacatttctggtctctggg

SEQ ID NO: 142640 - DNA, 1311 bp, Artificial Sequence
  derived and/or modified sequence
atgcagccccctccatccctctgcggaagggccctggttgctctggttctggcatgtggccttagtcgcatctggggcgaagaaagggggttcccacccgaccgggccacgccgttacttcagactgctgagatcatgacccctccgaccaagactctatggccaaaaggctccaatgccagccttgctagatcccttgcccccgccgaggtgcctaaaggggaccggactgccggaagtccaccaagaactatctcaccaccgccctgccaaggacctatagagatcaaggaaaccttcaaatacatcaataccgtggtaagttgtttggtcttcgtcctcggaatcataggtaatagcactctgctgcggatcatctataagaacaaatgcatgaggaacggccccaatattctgattgcgtcacttgcactcggtgacctgcttcatatcgtgatcgatattcctatcaacgtttacaagctgctggccgaagactggccctttggagccgagatgtgcaagctcgttccattcattcaaaaagcatcagtcggtatcactgtgttgagcctgtgtgcactgtctattgataggtatagggctgtcgccagctggagtcggattaagggtataggggttcctaagtggactgctgtcgagattgtcctcatttgggtggtgagtgtggtgctcgctgtgccggaggcaataggctttgacattatcaccatggactataagggctcttatctgcggatttgccttcttcatcccgtgcaaaagactgcttttatgcagttttataaaacagctaaagactggtggttgttcagcttttatttttgcttacctctggcgattaccgctttcttttatacccttatgacctgtgaaatgctgcgtaagaaaagcggaatgcagatagcactgaatgatcacctaaaacagcgccgagaggtggccaaaacggtcttctgcttggtcttagtgttcgcgctgtgctggctaccattgcatctgagtagaattttgaagttaaccctctacaatcaaaatgaccccaatcgttgcgaattgcttagtttccttctggtgctggactatattggcattaatatggcaagtttaaactcttgtatcaatccaattgctctgtatctggtgtccaaacggtttaaaaattgtttcaaagccggaccacatgttggaaacaagctagttatgctcttcagtgtgaatatagagtgcgacgggaccgtgaatcaaaatccaacaatgtggccggagcggaaaagcaacaataattag

SEQ ID NO: 142641 - DNA, 1311 bp, Artificial Sequence
  derived and/or modified sequence
atgcagcccccacccagcctgtgtggccgggccctggtggccctggtgctggcctgtggcctgagccgcatctggggcgaggagcggggcttccccccagaccgggccacccccctgctgcagacagctgagatcatgaccccacccaccaagaccctgtggcccaagggcagcaatgccagcctggcccggagcctggccccagctgaggtgcccaagggggacagaacagctggcagcccccccaggaccatcagccccccaccctgccagggccccatcgagatcaaggagaccttcaagtacatcaacacagtggtgtcctgcctggtgtttgtgctgggcatcatcggcaacagcaccctgctgcgcatcatctacaagaacaagtgcatgagaaatggccccaacatcctgattgccagcctggccctgggggacctgctgcacatcgtgattgacatccccatcaacgtgtacaagctgctggccgaggactggccctttggagctgagatgtgcaagctggtgcccttcatccagaaggcctctgtgggcatcaccgtgctgagcctgtgtgccctgagcattgaccgctacagagctgtggcctcctggagccgcatcaagggcatcggcgtgcccaagtggacagctgtggagatcgtgctgatctgggtggtgtctgtggtgctggccgtgcctgaggccatcggctttgacatcatcaccatggactacaagggcagctacctgcgcatctgcctgctgcaccctgtgcagaagacagccttcatgcagttctacaagacagccaaggactggtggctgttctccttctacttctgcctgcccctggccatcacagccttcttctacaccctgatgacctgtgagatgctgaggaagaagagcggcatgcagatcgccctgaatgaccacctgaagcagaggcgggaggtggccaagacagtgttctgcctggtgctggtgtttgccctgtgctggctgcccctgcacctgagccgcatcctgaagctgaccctgtacaaccagaatgaccccaacagatgtgagctgctgtccttcctgctggtgctggactacatcggcatcaacatggccagcctgaacagctgcatcaaccccatcgccctgtacctggtgtccaagcgcttcaagaactgcttcaaggccggcccccacgtgggcaacaagctggtgatgctgttctctgtgaacattgaatgtgatggcaccgtgaaccagaaccccaccatgtggccagagaggaagagcaacaacaactag

SEQ ID NO: 142642 - DNA, 1311 bp, Artificial Sequence
  derived and/or modified sequence
atgcagcccccccccagcctgtgcggccgggccctggtggccctggtgctggcatgtgggctttcacgcatctggggagaggaacgtggattccccccggaccgtgccactcccttgttgcagacggccgaaatcatgacacctcctaccaagacgttatggcctaagggcagcaacgctagcctggcccgtagcttagcacccgctgaggttccaaagggcgaccgcacggccggcagcccccccaggaccatatctccccccccatgccagggtccaatcgagattaaagagaccttcaagtacattaacacggttgtcagctgtctggtgttcgtgcttgggataatcggaaacagtaccctccttcgcattatttacaagaataaatgcatgcggaacgggcccaatattctgattgcaagcctggctctaggcgatctgctacacattgtgatagacattcctatcaacgtgtataagttactcgcggaagactggccgtttggagcggagatgtgtaagctggtgcccttcattcagaaagccagtgtaggcatcaccgtactgtctttgtgtgccctttcaattgaccgttaccgagctgtagccagttggagccggatcaaggggattggcgtgcccaagtggaccgccgtagagattgttctaatttgggtggttagtgtggtcctggccgtgcccgaggctataggtttcgatatcattactatggactacaaggggtcttatctacggatttgtctgcttcacccggtgcagaaaacagcctttatgcaattttacaaaaccgccaaggattggtggttattctctttctacttttgtctgccccttgcaataaccgcttttttttacactctgatgacatgcgagatgctgagaaagaagtctgggatgcagatcgccctaaatgatcacctcaagcagcggcgggaggtggcaaagaccgtgttttgcctggttttagtcttcgcactgtgttggctccccttgcatttgagtagaatcctgaagctgactctgtataaccaaaatgaccccaatcggtgtgagctgctttcctttctactagttctggattacatcggcattaacatggcctccctaaatagttgtattaaccccatcgccctataccttgtcagcaagagatttaagaattgttttaaagccggcccgcacgtgggaaacaagctggttatgcttttttccgtcaacatcgagtgtgatggaactgttaatcaaaatccaaccatgtggcctgaacgcaaaagtaataacaactag

SEQ ID NO: 142643 - DNA, 1311 bp, Artificial Sequence
  derived and/or modified sequence
atgcagccaccccctagtttgtgcggcagagcccttgtcgccttagtgctcgcctgcggtctgtctcggatctggggagaagagaggggattccctccagatcgagccacccctcttctgcagaccgccgagattatgactcctccgacgaaaacactgtggcctaaaggctctaacgcctcactagccaggtccctggcccctgccgaagttccaaaaggggatcgaactgcagggtctcctcccaggacaattagcccacccccttgtcaggggcctatcgagatcaaagaaaccttcaagtacattaataccgtggtttcttgtctggtgtttgtgctcggcattatcgggaactccaccttactgcgaataatctataagaacaaatgcatgcgcaatggacctaacatcctgattgctagtctcgctctgggagacctccttcacatagttatcgatattccgattaacgtgtataagctgctcgctgaggattggccgtttggcgctgaaatgtgcaagctcgttcccttcatccagaaagcttccgttggaatcaccgttttgtcactgtgtgccctcagcatagaccgctatcgtgctgtggcctcttggtctaggattaaggggatcggagtgcccaagtggaccgccgtcgaaatagtgctgatctgggttgtgtctgttgtgctggccgtgccagaggcaattggatttgacattataacaatggactataaggggagttacttgcggatctgcctgttgcaccccgtgcagaaaaccgcctttatgcagttctacaaaaccgccaaggactggtggctcttcagcttttatttctgcctcccgctggccattaccgcttttttttatacactgatgacgtgcgagatgctacggaaaaagagtgggatgcagatcgccctgaacgatcacctgaaacagcgacgggaggtggctaagacagtattttgcctggtgctggtattcgctctgtgttggcttcctttgcatctttctagaatcctgaagctgaccttgtacaaccagaacgatccaaatagatgtgaactattaagcttcctgctggtcctggactacattgggatcaatatggcttcattgaacagttgtataaaccctattgctctgtacctggtgtccaagcggtttaagaattgtttcaaggcgggaccacacgttgggaataaacttgtaatgctattttccgttaacatagagtgtgacggaacagtgaatcaaaatccaaccatgtggccggagaggaaatccaataataattag

SEQ ID NO: 142644 - protein, 498 aa, Artificial Sequence
  derived and/or modified sequence
MPHPRRYHSSERGSRGSYREHYRSRKHKRRRSRSWSSSSDRTRRRRREDSYHVRSRSSYDDRSSDRRVYDRRYCGSYRRNDYSRDRGDAYYDTDYRHSYEYQRENSSYRSQRSSRRKHRRRRRRSRTFSRSSSHSSRRAKSVEDDAEGHLIYHVGDWLQERYEIVSTLGEGTFGRVVQCVDHRRGGARVALKIIKNVEKYKEAARLEINVLEKINEKDPDNKNLCVQMFDWFDYHGHMCISFELLGLSTFDFLKDNNYLPYPIHQVRHMAFQLCQAVKFLHDNKLTHTDLKPENILFVNSDYELTYNLEKKRDERSVKSTAVRVVDFGSATFDHEHHSTIVSTRHYRAPEVILELGWSQPCDVWSIGCIIFEYYVGFTLFQTHDNREHLAMMERILGPIPSRMIRKTRKQKYFYRGRLDWDENTSAGRYVRENCKPLRRYLTSEAEEHHQLFDLIESMLEYEPAKRLTLGEALQHPFFARLRAEPPNKLWDSSRDISR

SEQ ID NO: 142645 - protein, 245 aa, Artificial Sequence
  derived and/or modified sequence
MKKTQTWILTCIYLQLLLFNPLVKTEGICRNRVTNNVKDVTKLVANLPKDYMITLKYVPGMDVLPSHCWISEMVVQLSDSLTDLLDKFSNISEGLSNYSIIDKLVNIVDDLVECVKENSSKDLKKSFKSPEPRLFTPEEFFRIFNRSIDAFKDFVVASETSDCVVSSTLSPEKGKAKNPPGDSSLHWAAMALPALFSLIIGFAFGALYWKKRQPSLTRAVENIQINEEDNEISMLQEKEREFQEV

SEQ ID NO: 142646 - DNA, 738 bp, Artificial Sequence
  derived and/or modified sequence
atgaagaagacccagacctggatcctgacctgcatctacctgcagctgctgctgttcaaccccctggtgaagaccgagggcatctgcagaaacagagtgaccaacaacgtgaaggacgtgaccaagctggtggccaacctgcccaaggactacatgatcaccctgaagtacgtgcccggcatggacgtgctgcccagccactgctggatcagcgagatggtggtgcagctgagcgacagcctgaccgacctgctggacaagttcagcaacatcagcgagggcctgagcaactacagcatcatcgacaagctggtgaacatcgtggacgacctggtggagtgcgtgaaggagaacagcagcaaggacctgaagaagagcttcaagagccccgagcccagactgttcacccccgaggagttcttcagaatcttcaacagaagcatcgacgccttcaaggacttcgtggtggccagcgagaccagcgactgcgtggtgagcagcaccctgagccccgagaagggcaaggccaagaacccccccggcgacagcagcctgcactgggccgccatggccctgcccgccctgttcagcctgatcatcggcttcgccttcggcgccctgtactggaagaagagacagcccagcctgaccagagccgtggagaacatccagatcaacgaggaggacaacgagatcagcatgctgcaggagaaggagagagagttccaggaggtgtag

SEQ ID NO: 142647 - DNA, 738 bp, Artificial Sequence
  derived and/or modified sequence
atgaagaagacccagacttggattctaacgtgtatttacctgcagctcctcctcttcaaccccttggtgaagactgaggggatttgcaggaacagggtaacaaacaatgtaaaggacgttaccaagctggttgccaaccttcctaaggattatatgatcacacttaagtacgtccctggaatggacgttctgccaagtcattgttggatctcagaaatggtggttcagctttccgacagcctaaccgaccttctcgataaattttccaacatctcggaaggcctgtcgaattacagtattatagacaaactggtgaatattgtcgacgacctagtggagtgcgttaaagagaattccagcaaagacctgaaaaagagtttcaagtctccagaacctcgcctgttcacgccagaagagttttttcgtatcttcaatcggtccatagatgcattcaaggacttcgtggtcgcatcggagacatctgattgcgtggttagtagcaccctgtcccctgagaagggtaaagcgaaaaatcctccgggggacagcagcctgcactgggcagccatggctctccccgcactctttagtctgatcatagggttcgcttttggagcgctgtactggaaaaagcggcagccctctctcactagagctgtcgaaaatatccaaatcaatgaagaagacaacgaaataagcatgctgcaggagaaagaacgggagtttcaggaggtctag

SEQ ID NO: 142648 - DNA, 738 bp, Artificial Sequence
  derived and/or modified sequence
atgaagaagacccagacctggatcctgacctgcatctacctgcagctgctgctcttcaaccccctggtgaagacagagggcatctgcaggaacagagtgaccaacaacgtgaaggatgtgaccaagctggtggccaacctgcccaaggactacatgatcaccctgaagtatgtgcccggcatggatgtgctgcccagccactgctggatcagcgagatggtggtgcagctgagtgacagcctgacagacctgctggacaagttcagcaacatcagcgagggcctgagcaactacagcatcatcgacaagctggtgaacatcgtggatgacctggtggagtgtgtgaaggagaacagcagcaaggacctgaagaagagcttcaagagccctgagcccaggctcttcaccccagaggagttcttccgcatcttcaacagaagcattgatgccttcaaggactttgtggtggccagcgagaccagtgactgtgtggtgagcagcaccctgagccctgagaagggcaaggccaagaaccccccaggggacagcagcctgcactgggccgccatggccctgcctgccctcttcagcctcatcatcggctttgccttcggggccctgtactggaagaagaggcagcccagcctgaccagggctgtggagaacatccagatcaatgaggaggacaatgagatctccatgctgcaggagaaggagcgggagttccaggaggtgtag

SEQ ID NO: 142649 - DNA, 738 bp, Artificial Sequence
  derived and/or modified sequence
atgaagaagacccagacctggatcctgacctgcatctacctgcagctgctgctatttaatcctctcgttaagaccgaaggaatctgtcgcaaccgggttacaaacaatgtaaaagacgtcacaaaactagtggcaaatttgcctaaagattatatgatcacccttaagtacgtccctgggatggatgttctgccttctcactgttggatcagcgagatggtagttcagctcagcgacagtcttaccgatctgctggacaagttctctaatatctccgaaggattgtcaaactatagcatcatcgacaaactcgtaaacatagtcgacgaccttgtggagtgcgtgaaagagaattcctcaaaagacctgaagaaaagcttcaaatctccagagccaagactgtttacacccgaggagtttttcagaatctttaatcgctcgatcgatgcttttaaggattttgttgtggcaagcgagacaagcgattgtgtcgtgagttccacactcagccccgagaaggggaaagcaaaaaacccaccaggcgactcctccctgcattgggccgctatggctcttcccgcactgttctctctgatcattggcttcgccttcggcgccctatactggaagaaaagacaaccctctctgacacgagctgtagaaaatattcagatcaacgaggaggataacgagatctcaatgctccaggagaaggagcgggagtttcaggaggtctag

SEQ ID NO: 142650 - DNA, 93 bp, Artificial Sequence
  derived and/or modified sequence
ggcatggacgtgctgggccggcccaagatccccctggagacccccgcctacaccggccagccgtggcattgccaacattgctttctgctgtag

SEQ ID NO: 142651 - DNA, 738 bp, Artificial Sequence
  derived and/or modified sequence
atgaagaaaacacagacctggatactcacatgcatctatttgcagctgctcctgttcaaccctctagtaaaaactgagggaatttgccgaaatagggtgacaaataacgttaaggatgtaaccaaattggtcgccaatcttcccaaagactatatgataacactgaagtacgtgcctggaatggacgtgctgccttcacactgttggatcagcgaaatggtggtccagctttccgactctctgacagatctcctggataagttttctaatattagcgaggggctgagcaactatagcatcatcgacaagttggtcaacatcgtggatgatctggtcgagtgcgttaaggaaaatagcagtaaggacctcaaaaaaagtttcaagtccccggagcctcgcctgtttaccccagaagagtttttcagaatcttcaatcgttcaattgatgcatttaaagacttcgttgtggcttcagaaacaagcgactgtgtggtctcgagtaccctcagtcctgagaaaggtaaggccaagaatcctcctggggattcaagtctacactgggctgccatggcactgccagctctgttctctcttatcataggttttgcatttggcgctctgtactggaagaagcgccagccttcccttactcgggcagtagagaatatacaaattaacgaggaggacaacgagatctctatgttgcaggaaaaggagagagaattccaagaggtttag

SEQ ID NO: 142652 - DNA, 93 bp, Artificial Sequence
  derived and/or modified sequence
ggaatggatgtgctgggaaggccaaagatccccctggagacgcccgcatatactggacagccctggcattgtcagcattgcttcctcttgtag

SEQ ID NO: 142653 - DNA, 1948 bp, Artificial Sequence
  derived and/or modified sequence
aacagagggagctccgagccctctctggcgcgcgaggtatttcgtctgtccccgggggtgccaggtgagccccagcggatccgggagggtaagctgggactcctcgcgagcagtagctgcagggtaccaagcttcgccctctgcgtccccgcgccttcgcggtctcccgccagtgcaggtccggggcccccaggcgagcggacaaggttggcctaatctgccaaacttctggggcatttaccgtgctctggccgccctcccgattcttccctccgcgcccttgcctgcttctcgcctaccccgggctccggaagggaaggaggcgtgtccggagcaggcgggcgggaactgtataaaagcgccggcggctcagcagccgggcttcgctcgccgcctcgcgccgagactagaagcgctgcgggaagcagggacagtggagagggcgctgcgctcgggctacccaatgcgtggactatctgccgccgctgttcgtgcaatatgctggagctccagaacagctaaacggagtcgccacaccactgtttgtgctggatcgcagcgctgcctttccttatgaagaagacacaaacttggattctcacttgcatttatcttcagctgctcctatttaatcctctcgtcaaaactgaagggatctgcaggaatcgtgtgactaataatgtaaaagacgtcactaaattggtggcaaatcttccaaaagactacatgataaccctcaaatatgtccccgggatggatgttttgccaagtcattgttggataagcgagatggtagtacaattgtcagacagcttgactgatcttctggacaagttttcaaatatttctgaaggcttgagtaattattccatcatagacaaacttgtgaatatagtggatgaccttgtggagtgcgtgaaagaaaactcatctaaggatctaaaaaaatcattcaagagcccagaacccaggctctttactcctgaagaattctttagaatttttaatagatccattgatgccttcaaggactttgtagtggcatctgaaactagtgattgtgtggtttcttcaacattaagtcctgagaaagggaaggccaaaaatccccctggagactccagcctacactgggcagccatggcattgccagcattgttttctcttataattggctttgcttttggagccttatactggaagaagagacagccaagtcttacaagggcagttgaaaatatacaaattaatgaagaggataatgagataagtatgttgcaagagaaagagagagagtttcaagaagtgtaattgtggcttgtatcaacactgttactttcgtacattggctggtaacagttcatgtttgcttcataaatgaagcagctttaaacaaattcatattctgtctggagtgacagaccacatctttatctgttcttgctacccatgactttatatggatgattcagaaattggaacagaatgttttactgtgaaactggcactgaattaatcatctataaagaagaacttgcatggagcaggactctattttaaggactgcgggacttgggtctcatttagaacttgcagctgatgttggaagagaaagcacgtgtctcagactgcatgtaccatttgcatggctccagaaatgtctaaatgctgaaaaaacacctagctttattcttcagatacaaactgcagcctgtagttatcctggtctctgcaagtagatttcagcttggatagtgagggtaacaatttttctcaaagggatctggaaaaaatgtttaaaactcagtagtgtcagccactgtacagtgtagaaagcagtgggaactgtgattggatttggcaacatgtcagctttatagttgccgattagtgatatgggtctgatttcgatctcttcctgatgtaaaccatgctcacccatatccca

SEQ ID NO: 142654 - DNA, 93 bp, Artificial Sequence
  derived and/or modified sequence
gggatggatgttttgggaaggccaaaaatccccctggagactccagcctacactgggcagccatggcattgccagcattgttttctcttataa

SEQ ID NO: 142655 - protein, 1047 aa, Artificial Sequence
  derived and/or modified sequence
MALPSLLLLVAALAGGVRPPGARNLTLAVVLPEHNLSYAWAWPRVGPAVALAVEALGRALPVDLRFVSSELEGACSEYLAPLSAVDLKLYHDPDLLLGPGCVYPAASVARFASHWRLPLLTAGAVASGFSAKNDHYRTLVRTGPSAPKLGEFVVTLHGHFNWTARAALLYLDARTDDRPHYFTIEGVFEALQGSNLSVQHQVYAREPGGPEQATHFIRANGRIVYICGPLEMLHEILLQAQRENLTNGDYVFFYLDVFGESLRAGPTRATGRPWQDNRTREQAQALREAFQTVLVITYREPPNPEYQEFQNRLLIRAREDFGVELGPSLMNLIAGCFYDGILLYAEVLNETIQEGGTREDGLRIVEKMQGRRYHGVTGLVVMDKNNDRETDFVLWAMGDLDSGDFQPAAHYSGAEKQIWWTGRPIPWVKGAPPSDNPPCAFDLDDPSCDKTPLSTLAIVALGTGITFIMFGVSSFLIFRKLMLEKELASMLWRIRWEELQFGNSERYHKGAGSRLTLSLRGSSYGSLMTAHGKYQIFANTGHFKGNVVAIKHVNKKRIELTRQVLFELKHMRDVQFNHLTRFIGACIDPPNICIVTEYCPRGSLQDILENDSINLDWMFRYSLINDLVKGMAFLHNSIISSHGSLKSSNCVVDSRFVLKITDYGLASFRSTAEPDDSHALYAKKLWTAPELLSGNPLPTTGMQKADVYSFGIILQEIALRSGPFYLEGLDLSPKEIVQKVRNGQRPYFRPSIDRTQLNEELVLLMERCWAQDPAERPDFGQIKGFIRRFNKEGGTSILDNLLLRMEQYANNLEKLVEERTQAYLEEKRKAEALLYQILPHSVAEQLKRGETVQAEAFDSVTIYFSDIVGFTALSAESTPMQVVTLLNDLYTCFDAIIDNFDVYKVETIGDAYMVVSGLPGRNGQRHAPEIARMALALLDAVSSFRIRHRPHDQLRLRIGVHTGPVCAGVVGLKMPRYCLFGDTVNTASRMESNGQALKIHVSSTTKDALDELGCFQLELRGDVEMKGKGKMRTYWLLGERKGPPGLL

SEQ ID NO: 142656 - DNA, 3144 bp, Artificial Sequence
  derived and/or modified sequence
atggccctcccaagtttattgctgctagtcgcggctttagctggcggagttaggccccctggggcacgaaacctgacactcgcagtggtactgccagaacacaacctttcctatgcctgggcctggcctagggttgggccggcagtagctttggctgtcgaagccctaggtagggccctgcccgtggatctccgctttgtcagttcagagctggaaggagcctgctccgagtatctggcgcccctatcagccgtcgacctcaagctttatcatgatcctgacttgctgttggggcctggatgcgtataccccgctgccagcgtggcccggtttgcatctcactggcggcttcccctgctgactgctggcgccgtggcatccgggttcagcgctaagaatgatcattaccggacattggtgcgtacaggcccttccgctccaaagctgggcgagtttgtagttactcttcacgggcattttaattggaccgccagggctgccctgctgtacctggatgctcggactgatgaccggccccattatttcacaatcgaaggcgtgtttgaagcactacaggggagcaacctttccgtgcagcaccaggtgtatgcaagagaaccaggtgggcctgaacaggctacacacttcatcagggccaatggccgcatcgtatatatctgtggaccgctcgagatgctgcatgaaatactgctgcaggctcagcgagaaaatctcaccaacggggactacgtgtttttttacttggatgtgttcggggagagcctgcgcgccgggcctaccagagctacaggacggccctggcaggataaccgcacacgcgaacaagctcaggcgctgagggaagcctttcaaactgtgctcgttattacctaccgggaacccccaaatccagaatatcaggagttccagaatagacttctgatacgtgcccgggaggatttcggggtagaacttggtccatccctgatgaaccttatagctggatgtttttatgacggcattctgttatatgccgaagtccttaacgaaactatccaggagggaggtacccgcgaagacgggctgaggattgtggagaagatgcagggtaggagatatcacggagttacaggcctggttgttatggataaaaataacgatcgcgagacagacttcgtgttgtgggctatgggcgatctcgatagcggagatttccagcccgcagcgcactacagcggagcggaaaaacagatatggtggaccggacggccaatcccttgggtcaaaggggcaccccctagcgataaccctccctgtgcattcgacctggacgatcccagctgcgacaagacacctctgagcaccttggctattgttgccttgggtacgggcattacgttcattatgtttggggtctcttccttcttgatcttccgcaaactcatgctcgaaaaggagctggcttcaatgttatggcgaataagatgggaagagctccaatttggaaactcagagagatatcataagggggctgggtcccggcttacactcagtctaagagggagctcctacgggtccctgatgacagcgcatggaaaataccagatctttgcaaacactggacactttaaagggaacgttgttgcaatcaagcatgtaaataagaagaggatcgaactgactcggcaagtcttgttcgagctgaaacatatgcgtgacgtccaatttaaccacctgacaaggtttatcggcgcgtgtatcgaccctccgaacatctgcattgtcactgagtactgccctagagggagtctccaagacattctggaaaacgattctattaatctcgactggatgttccgctatagccttatcaacgacttagtaaaaggcatggcttttctgcataactcaattattagcagccacgggtctttaaaaagctccaactgcgttgtggatagtcgtttcgtgctcaaaatcacggattatgggttggcctcatttcggagcaccgcggagccagatgatagtcatgccctctatgccaaaaagctgtggaccgcaccagagctgctgtcaggcaatcccctcccgacaacaggcatgcagaaagccgatgtctattcctttgggattatactacaagagatagcacttagatctgggccgttctacctcgaaggattggacttgtctcctaaagaaatcgtccaaaaggtgagaaatgggcaacggccatacttccgtccctctatcgacagaactcagctgaatgaagagctcgttctgctcatggagagatgctgggcgcaggacccagcagaacggcccgactttggccagatcaagggattcattaggcgcttcaataaagagggggggacgagtatcctggacaacctgctactgagaatggaacagtacgctaataacctcgagaaactggtcgaggagagaacacaggcctatctggaggagaaaagaaaagccgaggcactactgtatcagattctcccccatagcgttgctgagcagctcaaacggggggaaaccgtacaagcggaggccttcgactctgtgaccatctacttctccgacattgtcgggtttactgcattgtccgctgagtcgacaccaatgcaagtagtgacccttcttaatgatctttacacatgctttgatgccatcattgataattttgatgtatacaaggtggagacaattggtgatgcctatatggttgtgtctggactgccaggtagaaacgggcagcgccacgctcctgagatagctaggatggctctggccctcctcgacgctgtcagcagttttcgaattagacaccgacctcacgaccagctccgcctccgtataggagtccacacagggcccgtgtgcgcaggagttgtcggacttaagatgccgagatattgtctgttcggcgataccgtcaacacagctagccggatggaatctaatggccaggctttgaagattcacgtctcctctactactaaggatgcactcgatgagctgggctgcttccagctagaactccgaggagacgtggagatgaaagggaaaggcaagatgaggacctattggttgttgggcgaacggaaaggacccccaggtttgctatag

SEQ ID NO: 142657 - DNA, 3144 bp, Artificial Sequence
  derived and/or modified sequence
atggccctgcccagcctgctgctgctggtggccgccctggccggcggcgtgcggcccccaggggccaggaacctgaccctggccgtggtgctgcctgagcacaacctgtcctatgcctgggcctggccccgggtgggccctgctgtggccctggccgtggaggccctgggccgggccctgcctgtggacctgcgctttgtgtcctctgagctggagggcgcctgcagcgagtacctggcccccctgtctgctgtggacctgaagctgtaccatgaccctgacctgctgctgggccctggctgtgtgtacccagctgcctctgtggccaggtttgccagccactggaggctgcccctgctgacagctggagctgtggccagcggcttcagcgccaagaatgaccactaccgcaccctggtgaggacaggccccagcgcccccaagctgggggagtttgtggtgaccctgcacggccacttcaactggacagcccgggccgccctgctgtacctggatgccaggacagatgaccggccccactacttcaccatcgagggcgtgtttgaggccctgcagggcagcaacctgtctgtgcagcaccaggtgtatgcccgggagcccggcggccctgagcaggccacccacttcatccgggccaacggcagaattgtgtacatctgtggccccctggagatgctgcacgagatcctgctgcaggcccagcgggagaacctgaccaatggagactatgtgttcttctacctggatgtgtttggagagagcctgcgggccggccccacccgggccaccggccggccctggcaggacaacagaacccgggagcaggcccaggccctgcgggaggccttccagacagtgctggtgatcacctaccgggagccccccaaccctgagtaccaggagttccagaaccggctgctgatccgggccagagaagattttggagtggagctgggccccagcctgatgaacctgattgctggctgcttctatgatggcatcctgctgtatgcagaggtgctgaatgagaccatccaggagggcggcaccagagaagatggcctgcgcatcgtggagaagatgcagggccgccgctaccacggcgtgacaggcctggtggtgatggacaagaacaatgaccgggagacagactttgtgctgtgggccatgggagacctggacagcggggacttccagcctgctgcccactacagcggggctgagaagcagatctggtggacaggccggcccatcccctgggtgaagggggccccacccagcgacaaccccccctgtgcctttgacctggatgaccccagctgtgacaagacccccctgagcaccctggccatcgtggccctgggcaccggcatcaccttcatcatgtttggagtgagcagcttcctgatcttcaggaagctgatgctggagaaggagctggcctccatgctgtggaggatccgctgggaggagctgcagtttggaaacagcgagcgctaccacaagggagctggcagccggctgaccctgagcctgcggggcagcagctatggcagcctgatgacagcccacggcaagtaccagatctttgccaacacaggccacttcaagggaaatgtggtggccatcaagcacgtgaacaagaagagaattgagctgacccggcaggtgctgtttgagctgaagcacatgagagatgtgcagttcaaccacctgacccgcttcatcggggcctgcattgatcctcccaacatctgcatcgtgacagagtactgcccccggggcagcctgcaggacatcctggagaatgacagcatcaacctggactggatgttccgctacagcctcatcaatgacctggtgaagggcatggccttcctgcacaacagcatcatcagcagccacggcagcctgaagagcagcaactgtgtggtggacagcagatttgtgctgaagatcacagattatggcctggccagcttccgcagcacagctgagccagatgacagccacgccctgtatgccaagaagctgtggacagcccctgagctgctgagcggcaaccccctgcccaccaccggcatgcagaaggcagatgtgtacagctttggcatcatcctgcaggagatcgccctgcggagcggccccttctacctggagggcctggacctgagccccaaggagatcgtgcagaaggtgagaaatggccagaggccctacttccggcccagcattgacaggacccagctgaatgaggagctggtgctgctgatggagcgctgctgggcccaggaccctgctgagaggccagactttggccagatcaagggcttcatccgccgcttcaacaaggagggcggcaccagcatcctggacaacctgctgctgaggatggagcagtatgccaacaacctggagaagctggtggaggagaggacccaggcctacctggaggagaagaggaaggccgaggccctgctgtaccagatcctgccccacagcgtggccgagcagctgaagagaggagaaacagtgcaggccgaggcctttgattctgtgaccatctacttcagtgacatcgtgggcttcaccgccctgtctgctgagagcacccccatgcaggtggtgaccctgctgaatgacctgtacacctgctttgatgccatcatcgacaactttgatgtgtacaaggtggagaccatcggagatgcctacatggtggtgtctggcctgcctggaagaaatggccagagacatgcccctgagatcgccaggatggccctggccctgctggatgctgtgtcctccttccgcatccgccaccggccccatgaccagctgcggctgcgcatcggcgtgcacacaggccctgtgtgtgccggcgtggtgggcctgaagatgccccgctactgcctgtttggagacacagtgaacacagccagcaggatggagagcaatggccaggccctgaagatccacgtgagcagcaccaccaaggatgccctggatgagctgggctgcttccagctggagctgcggggagatgtggagatgaagggcaagggcaagatgaggacctactggctgctgggggagaggaaaggacctcctggcctgctgtag

SEQ ID NO: 142658 - DNA, 3686 bp, Artificial Sequence
  derived and/or modified sequence
tccccctgccaccccgttctcagtcctcagtccttgccctaggctggtagcccactccttgcccgccccccgccttcctcccatctccccctcctctccccggcccccagcaccttctgcatcccagcctacctagcctactcctcctcttcctggccctcttccccaggctccaggctggggggtgctcgcgtctcccctgtaggccagagcagccccaagttctgggggcggtggggctgctgctttatccccatggcgctgccatcacttctgctgttggtggcagccctggcaggtggggtgcgtcctcccggggcgcggaacctgacgctggcggtggtgctgccagaacacaacctgagctatgcctgggcctggccacgggtgggacccgctgtggcactagctgtggaggctctgggccgggcactgcccgtggacctgcggtttgtcagctccgaactggaaggcgcctgctctgagtacctggcaccgctgagcgctgtggacctcaagctgtaccatgaccccgacctgctgttaggtcccggttgcgtgtaccctgctgcctctgtggcccgctttgcctcccactggcgccttcccctgctgactgcgggtgctgtggcctctggtttttcggctaagaatgaccattatcgtaccctggttcgcactggcccctctgctcccaagctgggtgagtttgtggtgacactacacgggcacttcaattggactgcccgtgctgccttgctgtacctggatgctcgcacagatgaccggcctcactacttcaccatcgagggcgtctttgaggccctgcagggcagcaacctcagtgtgcagcaccaggtgtatgcccgagagccagggggccccgagcaggccacccacttcatccgggccaacgggcgcattgtgtatatctgcggccctctggagatgctgcatgagatcctgcttcaggcccagagggagaatctgaccaatggggattatgtcttcttttacctggatgtctttggggagagtctccgtgcaggccccacacgtgctacaggccggccctggcaggacaatcgcacccgggaacaggcccaggccctcagagaggcctttcagactgtattggtgatcacgtaccgagaacccccaaatcctgagtatcaggaattccagaatcgtctgctgataagagcccgggaagactttggtgtggagctgggcccttccctgatgaacctcatcgctggctgcttctatgatgggatcctgctatatgctgaagtcctgaatgagacaatacaggaaggaggcacccgggaggatggacttcgaattgtggaaaagatgcagggacgaagatatcacggtgtaactgggctggttgtcatggacaagaacaatgaccgagagactgactttgtcctctgggccatgggagacctggattctggggactttcagcctgcagcccactactcgggagctgagaagcagatttggtggacgggacggcctattccctgggtgaagggggctcctccctcggacaatcccccctgtgcctttgacttggacgacccatcctgtgataaaactccactttcaaccctggcaattgtggctctgggcacaggaatcaccttcatcatgtttggtgtttccagcttcctaattttccgaaagctgatgctggagaaggagctggctagcatgttgtggcgtattcgctgggaagaactgcagtttggcaactcagagcgttatcacaaaggtgcaggcagtcgcctcacactgtcgctgcggggatccagttacggctcgctcatgacagcccatgggaaataccagatctttgccaacaccggtcacttcaagggaaatgttgtcgccatcaaacatgtgaataagaagcgcattgagctgacccggcaggttctgtttgaactcaaacatatgagagatgttcagttcaaccatctcactcgcttcattggcgcctgcatagaccctcccaacatttgcattgtcactgaatactgtcctcgtgggagtttacaggatattctagaaaatgacagcatcaacttggactggatgtttcgttattcactcattaatgaccttgttaagggcatggcctttctccacaacagcattatttcatcgcatgggagtctcaagtcctccaactgtgtggtggatagtcgttttgtgctcaaaatcacagactatggcctggccagcttccgatcaactgctgaacctgatgacagccatgccctctatgccaagaagctgtggactgccccagaactgctcagtgggaaccccttgccaaccacaggcatgcagaaggctgacgtctatagctttgggatcatcctgcaggagatagcacttcgcagtggtcctttctacttggagggcctggacctcagccccaaagagattgtccagaaggtacgaaatggtcagcggccatatttccggccaagcattgaccggacccaactgaatgaagagctagttttgctgatggagcgatgttgggctcaggacccagctgagcggccagactttggacagattaagggcttcattcggcgctttaacaaggagggtggcaccagcatattggacaacctcctgctgcgcatggaacagtatgccaataacttggagaagctggtggaggaacgcacacaggcctatctggaggaaaaacgcaaggctgaagctctgctctaccaaatcctaccccattcagtggcagagcagttaaaacggggagagactgtacaggctgaggcctttgacagtgttaccatctacttcagtgacattgttggcttcacagcattgtcagcagagagcacccccatgcaggtagtgacacttcttaatgacctgtatacctgctttgatgccataattgacaactttgatgtctacaaggtggagacgattggggatgcttacatggtggtatctggcctcccaggccgaaatggtcaacgccatgcaccagaaattgctcgtatggccctagcattactagatgcagtttcttcctttcgcatccgccaccgaccccatgaccagctgaggctacgcataggggtccatactgggccagtctgtgctggggttgttggcctgaagatgccccgttattgtctttttggagacacagtgaacactgcttctcgaatggagtctaatggtcaagcgctgaagatccatgtctcctctaccaccaaggatgccctagatgagctaggatgcttccagctagagcttcggggggatgtggaaatgaagggaaaaggaaagatgcgaacatactggctcttaggagagcggaaaggacctcctggactcctgtaaacccccattctttccaagtcagatagtcttctgctgctggtacctgggtgggcaatggccaccatgtctgcacacaccagaaatggacattttcatatgcaatggaaaacagccacaaaaaaacctaccttatatggaagttgtagccctctgcagctcagccctgtacatatacctgtccctctctggcttggtccccttcctccctactttctgtaaatatctgtatctaaaccagaatattttggtcaaatataaaacaataataaaaaaagttctgatgtcat

SEQ ID NO: 142659 - DNA, 3144 bp, Artificial Sequence
  derived and/or modified sequence
atggccctgcccagcctgctgctgctggtggccgccctggccggcggagtgcgcccccccggcgctcgaaacctgacacttgccgtggtgctacctgaacataacctctcttatgcgtgggcctggcctcgcgtcggtccggccgtggctctggctgtcgaggctctggggagggcccttccagtggacctccggttcgtgtcatcagagctcgagggggcctgctctgagtacctagcccctctctcagccgtggaccttaaactgtaccacgaccctgacctactgctgggccctggctgtgtctatcccgccgcctctgtggctcgatttgcttcccactggaggctaccattgctcaccgcgggcgcggtggccagtggcttctctgctaaaaacgatcactatagaacattagtccggacaggtccgagcgccccaaagctcggcgagttcgtggtcacccttcacggccactttaactggactgcacgcgcggcactgctctacctggacgctcgaacggacgaccgcccccactattttacgatcgagggagtgttcgaggccttgcaggggtcgaatttgtccgtgcagcatcaggtctatgcccgcgagcccggtgggccagagcaagccacccacttcattagagcaaacggacgtatcgtctacatctgtgggcccctcgagatgttgcacgaaatcttgcttcaagctcagagagagaatctgaccaatggagactacgtttttttctacctagacgtgtttggggaatcattgagggcaggccctacacgggccacggggcggccttggcaagacaatcggacccgggaacaggctcaggctcttagagaggccttccaaactgtccttgtgattacctatagggaaccccccaaccccgaataccaggaatttcaaaaccgtttactcataagggctcgagaagattttggtgtggaactcgggccttctctcatgaacctgattgccggttgcttctatgacggcatccttctgtacgccgaagtgctgaacgaaaccattcaggaaggaggaacgagggaggacggcctgaggatagtcgagaaaatgcaggggagacgataccatggcgttacaggattggtggtaatggacaagaacaacgaccgtgagaccgatttcgtgctgtgggccatgggggatctggattctggggactttcagcctgcagctcactactctggagccgagaagcagatttggtggaccggtagaccaatcccatgggtgaaaggggcccctcccagcgataacccaccctgcgcatttgatctggacgatccatcctgcgacaaaacacccctcagtacactggctatagtcgccctggggaccggcatcactttcatcatgtttggggtgtccagcttcctgatcttcagaaaactgatgctcgagaaggagctcgcttccatgctttggcggattaggtgggaagagctgcagttcggaaatagcgaacgatatcacaagggcgcaggcagccggttgaccctgtctctgcggggctcgtcatatggaagcttgatgactgcccacgggaagtaccagatcttcgcgaatactggccattttaaaggaaatgtcgtagccataaagcatgttaacaagaagagaatagagctaacccggcaggtcctctttgaacttaagcatatgcgggacgtccagttcaatcacctgacgagattcattggcgcttgcatcgaccccccaaatatctgcatcgtcacggagtactgccctagggggtccctgcaggacattctggagaacgactcaatcaatctggattggatgttcagatactccttgatcaacgatctcgtcaaaggaatggccttccttcataattccatcatatccagccatgggtccctcaagtcctctaattgcgtggttgactctaggtttgtcctcaaaataaccgactatggtctggcaagtttccgctctacggctgaaccagatgacagtcacgctctctacgccaaaaaactctggacggccccagaactgcttagtggcaaccctctccctaccaccggtatgcagaaagcagacgtatactcattcggaattattctccaggagattgctctcagatcgggccccttttatctggaaggtctagatttgtcccctaaagaaatcgtgcagaaagtgcgcaacggacagagaccttacttccggccatccatcgatcggactcagctgaacgaggagcttgtcttgcttatggaacgttgttgggctcaagatccagctgaacgtcctgattttggccagatcaaggggtttattaggaggtttaataaggagggtgggacatccattctggacaatctgcttctgcgtatggaacagtatgccaataatctcgagaaacttgtcgaagagagaacccaggcatacctggaggaaaagcgtaaagccgaagcgctgctgtatcagattttgcctcactctgtcgcagagcaattgaagcgcggggaaaccgtgcaagcggaagcctttgactcagtgactatatacttctctgatatcgtaggctttacggccctcagcgctgagtcaacacctatgcaggtcgtaacactgctgaatgacctctatacctgcttcgacgcaattatcgataatttcgatgtatataaagtagagacgattggcgacgcctacatggtggtctccggactgccaggtagaaacggtcagcgccatgcacctgaaatcgccagaatggcactggctctgctcgacgccgtctcaagtttcagaataaggcatcggccccacgaccagttacgcttacgtattggagtgcacacgggccctgtttgcgccggcgtggtcggcctgaaaatgcctaggtactgtttgtttggggacaccgtgaacactgcttcccgcatggagtccaacgggcaggcacttaagatccacgttagttccacaacgaaggacgcactcgacgagcttggatgctttcagctggaactgaggggagacgttgagatgaaaggcaagggcaaaatgaggacttactggctacttggtgagcgcaagggcccacccggcctactctag

SEQ ID NO: 142660 - DNA, 3144 bp, Artificial Sequence
  derived and/or modified sequence
atggcactgccatcactcttgcttctggtggcagcccttgcgggaggggtcaggcctcccggtgcaaggaaccttactctggctgtggtgctaccagagcataatttatcatacgcatgggcttggcctcgggtgggaccagcagtggcattagctgtggaggccctggggcgtgctttaccggttgatctcagattcgtgtcgtccgagctcgagggagcctgcagcgagtatctggcacccctgtccgccgtggatctcaagttgtaccacgaccctgatcttctcctgggcccagggtgcgtgtatccagccgcatcagttgcccgatttgcatcgcattggcgcctgccactgctcaccgccggagctgtggccagcggtttctctgccaagaacgaccattaccgaactcttgtgaggactggcccaagcgcaccgaagttgggagaattcgtggttactttacatgggcatttcaactggacagcaagggctgcgctgttgtatctggacgcaagaactgacgacagaccgcactattttaccattgagggagtctttgaggctttgcaaggttccaatttaagtgtacaacatcaagtgtacgccagggagcctgggggaccagagcaggccacacacttcatccgcgctaatggaagaatcgtgtatatttgtggcccattagaaatgctgcatgaaatactgctgcaggcacagagagaaaacctgacaaacggagactatgtttttttctaccttgacgtgttcggtgaaagcctccgcgcaggccctactcgcgcaacaggaaggccatggcaggacaatagaaccagggaacaggcacaggcattgcgagaagcttttcagaccgtactggtgattacatatcgtgagcccccaaaccctgaatatcaagaatttcaaaacaggctcctcattagagctcgcgaggatttcggcgtggagttaggcccatctctgatgaatttaatagccggttgcttttacgatggcatcttgctctatgccgaggtcctgaatgaaactatacaggaaggtggtaccagggaagatggtcttagaatcgtcgaaaagatgcaaggcagacgctaccacggggtgactggtctcgtcgtgatggataagaacaatgaccgtgagaccgattttgtattgtgggcgatgggagacctcgatagtggagatttccaacctgccgctcattatagtggggctgagaaacaaatctggtggactgggagacccatcccctgggtcaaaggcgctccaccctcggataacccaccatgtgcatttgacctggatgatccatcttgcgataaaacccctctgagtaccctcgccattgttgctctcgggactggcattactttcattatgtttggggtcagttcttttctcatcttcagaaaactaatgctagagaaggaactggcctctatgttatggaggatacggtgggaggaactgcagttcggcaattcggagcggtaccacaaaggggcaggttccagactgaccctctcccttcgcggttcaagttacggtagtttaatgactgcgcatgggaaatatcagatttttgcgaacaccggccacttcaagggtaatgtggtcgctattaaacatgttaataagaaacgtatcgagcttacacgccaggttctgttcgaactcaagcatatgcgggacgtgcagtttaaccatctcactcgtttcataggagcttgtatcgatcctccaaatatctgcatcgtgacggagtactgcccgaggggctcccttcaagacattctggaaaacgactcaataaacctggattggatgttccgttactccctgattaatgatctggtgaaaggcatggcgtttctgcacaatagcatcatttcctctcatgggagcctgaaatcatctaactgtgtggtcgacagtaggtttgtccttaagattacggactatggactggccagctttcgaagcacagccgaacccgacgactctcacgctctgtacgccaagaagctatggaccgctcccgaactgctgagcgggaaccccctgccaaccacagggatgcagaaggctgatgtctacagtttcggaatcattctccaagagattgcgctgcggtccggccctttctaccttgaaggtctggacctgtcacccaaagagattgtgcaaaaagttaggaacggccagcgcccttacttcagacctagcatcgatcggacacagctaaacgaagagttggtgcttctgatggaacgctgctgggcccaggaccctgccgaacgacccgactttgggcagataaaagggttcattaggcgatttaacaaagaaggcggtacttcgattctcgacaatttactcctgaggatggagcagtacgccaacaatttggagaagcttgtggaagagcggacccaggcgtatctagaggagaagagaaaagcagaagctctgctgtaccagattctgcctcactcagtggccgagcagttgaagcggggtgagaccgtgcaggctgaagcgtttgattccgtaacgatctatttttcagatatcgttggctttaccgcactctccgcagaatctactcccatgcaggtggtcactttgttaaacgatctgtacacatgtttcgatgcaattattgacaatttcgatgtttataaagtcgagacaatcggcgatgcttatatggtagtaagcggactgcccggaagaaacgggcagaggcacgcccctgaaatcgccaggatggcattagcacttctcgacgccgtgtcatcctttcggatacgacataggcctcacgatcagcttcgccttagaatcggcgtgcataccgggcctgtgtgtgccggtgttgtcggactgaaaatgcctaggtattgcctctttggagatacagtcaacacagccagtcgaatggaatctaatggccaggctctgaagatccatgtgagctctacgactaaggacgcgttagatgaactgggatgcttccaactcgaactccgcggagatgtcgaaatgaaaggcaaggggaaaatgcggacctattggcttctaggggagcgtaagggccctcctggactgctctag

SEQ ID NO: 142661 - DNA, 3144 bp, Artificial Sequence
  derived and/or modified sequence
atggccctgcccagcctgctgctgctggtggccgccctggccggcggcgtgagaccccccggcgccagaaacctgaccctggccgtggtgctgcccgagcacaacctgagctacgcctgggcctggcccagagtgggccccgccgtggccctggccgtggaggccctgggcagagccctgcccgtggacctgagattcgtgagcagcgagctggagggcgcctgcagcgagtacctggcccccctgagcgccgtggacctgaagctgtaccacgaccccgacctgctgctgggccccggctgcgtgtaccccgccgccagcgtggccagattcgccagccactggagactgcccctgctgaccgccggcgccgtggccagcggcttcagcgccaagaacgaccactacagaaccctggtgagaaccggccccagcgcccccaagctgggcgagttcgtggtgaccctgcacggccacttcaactggaccgccagagccgccctgctgtacctggacgccagaaccgacgacagaccccactacttcaccatcgagggcgtgttcgaggccctgcagggcagcaacctgagcgtgcagcaccaggtgtacgccagagagcccggcggccccgagcaggccacccacttcatcagagccaacggcagaatcgtgtacatctgcggccccctggagatgctgcacgagatcctgctgcaggcccagagagagaacctgaccaacggcgactacgtgttcttctacctggacgtgttcggcgagagcctgagagccggccccaccagagccaccggcagaccctggcaggacaacagaaccagagagcaggcccaggccctgagagaggccttccagaccgtgctggtgatcacctacagagagccccccaaccccgagtaccaggagttccagaacagactgctgatcagagccagagaggacttcggcgtggagctgggccccagcctgatgaacctgatcgccggctgcttctacgacggcatcctgctgtacgccgaggtgctgaacgagaccatccaggagggcggcaccagagaggacggcctgagaatcgtggagaagatgcagggcagaagataccacggcgtgaccggcctggtggtgatggacaagaacaacgacagagagaccgacttcgtgctgtgggccatgggcgacctggacagcggcgacttccagcccgccgcccactacagcggcgccgagaagcagatctggtggaccggcagacccatcccctgggtgaagggcgccccccccagcgacaaccccccctgcgccttcgacctggacgaccccagctgcgacaagacccccctgagcaccctggccatcgtggccctgggcaccggcatcaccttcatcatgttcggcgtgagcagcttcctgatcttcagaaagctgatgctggagaaggagctggccagcatgctgtggagaatcagatgggaggagctgcagttcggcaacagcgagagataccacaagggcgccggcagcagactgaccctgagcctgagaggcagcagctacggcagcctgatgaccgcccacggcaagtaccagatcttcgccaacaccggccacttcaagggcaacgtggtggccatcaagcacgtgaacaagaagagaatcgagctgaccagacaggtgctgttcgagctgaagcacatgagagacgtgcagttcaaccacctgaccagattcatcggcgcctgcatcgacccccccaacatctgcatcgtgaccgagtactgccccagaggcagcctgcaggacatcctggagaacgacagcatcaacctggactggatgttcagatacagcctgatcaacgacctggtgaagggcatggccttcctgcacaacagcatcatcagcagccacggcagcctgaagagcagcaactgcgtggtggacagcagattcgtgctgaagatcaccgactacggcctggccagcttcagaagcaccgccgagcccgacgacagccacgccctgtacgccaagaagctgtggaccgcccccgagctgctgagcggcaaccccctgcccaccaccggcatgcagaaggccgacgtgtacagcttcggcatcatcctgcaggagatcgccctgagaagcggccccttctacctggagggcctggacctgagccccaaggagatcgtgcagaaggtgagaaacggccagagaccctacttcagacccagcatcgacagaacccagctgaacgaggagctggtgctgctgatggagagatgctgggcccaggaccccgccgagagacccgacttcggccagatcaagggcttcatcagaagattcaacaaggagggcggcaccagcatcctggacaacctgctgctgagaatggagcagtacgccaacaacctggagaagctggtggaggagagaacccaggcctacctggaggagaagagaaaggccgaggccctgctgtaccagatcctgccccacagcgtggccgagcagctgaagagaggcgagaccgtgcaggccgaggccttcgacagcgtgaccatctacttcagcgacatcgtgggcttcaccgccctgagcgccgagagcacccccatgcaggtggtgaccctgctgaacgacctgtacacctgcttcgacgccatcatcgacaacttcgacgtgtacaaggtggagaccatcggcgacgcctacatggtggtgagcggcctgcccggcagaaacggccagagacacgcccccgagatcgccagaatggccctggccctgctggacgccgtgagcagcttcagaatcagacacagaccccacgaccagctgagactgagaatcggcgtgcacaccggccccgtgtgcgccggcgtggtgggcctgaagatgcccagatactgcctgttcggcgacaccgtgaacaccgccagcagaatggagagcaacggccaggccctgaagatccacgtgagcagcaccaccaaggacgccctggacgagctgggctgcttccagctggagctgagaggcgacgtggagatgaagggcaagggcaagatgagaacctactggctgctgggcgagagaaagggcccccccggcctgctgtag

SEQ ID NO: 142662 - protein, 100 aa, Artificial Sequence
  derived and/or modified sequence
MTTQLRVVHLLPLLLACFVQTSPKQEKMKMDCHKDEKGTIYDYEAIALNKNEYVSFKQYVGKHILFVNVATYCGLTAQYPGMSVQGEDLYLVSSFLRKGM

SEQ ID NO: 142663 - DNA, 303 bp, Artificial Sequence
  derived and/or modified sequence
atgaccacccagctgcgggtggtgcacctgctgcccctgctgctggcgtgcttcgtgcagacctcacccaaacaggaaaagatgaaaatggattgccataaggatgaaaagggaacaatttatgattatgaggcaattgccctcaataaaaacgagtatgtgtccttcaaacagtatgtgggtaaacacatcctgtttgtgaacgtggctacttattgcggactgacagcacagtatcccggaatgagtgtgcagggggaggatctgtaccttgtaagttccttcttaagaaaaggaatgtag

SEQ ID NO: 142664 - DNA, 303 bp, Artificial Sequence
  derived and/or modified sequence
atgacaacacagcttagggtggtccacctattgccgctactgcttgcttgtttcgtccagacatccccgaaacaggaaaaaatgaaaatggattgccataaggacgagaaaggcaccatatatgactacgaggctattgctctcaacaaaaacgagtacgtcagcttcaagcagtatgtgggaaaacacatcctgtttgtgaatgtcgctacctattgcggcctgactgcgcagtacccaggtatgtcagtgcagggcgaggatctgtatctcgtgagctcatttctccggaagggcatgtag

SEQ ID NO: 142665 - DNA, 303 bp, Artificial Sequence
  derived and/or modified sequence
atgacaacccagctgcgcgtcgttcacctgctaccgctgctactggcatgttttgtacagacgtctcccaaacaggaaaagatgaagatggactgccacaaagatgagaaaggaacaatttatgattacgaggctatagcccttaacaaaaacgaatatgtgtcattcaaacagtatgtggggaagcacatcctatttgttaatgtcgctacatactgcggcctgacagcccagtatccaggcatgagcgtccagggggaagacctttatctcgtgtctagttttctgaggaaagggatgtag

SEQ ID NO: 142666 - DNA, 303 bp, Artificial Sequence
  derived and/or modified sequence
atgaccacccagctgagagtggtgcacctgctgcccctgctgctggcctgcttcgtgcagaccagccccaagcaggagaagatgaagatggactgccacaaggacgagaagggcaccatctacgactacgaggccatcgccctgaacaagaacgagtacgtgagcttcaagcagtacgtgggcaagcacatcctgttcgtgaacgtggccacctactgcggcctgaccgcccagtaccccggcatgagcgtgcagggcgaggacctgtacctggtgagcagcttcctgagaaagggcatgtag

SEQ ID NO: 142667 - DNA, 303 bp, Artificial Sequence
  derived and/or modified sequence
atgaccacccagttgcgagtggttcatctgctccctttgcttttggcctgttttgtgcagacgtccccaaagcaggagaagatgaaaatggactgccacaaggacgaaaaaggcaccatctacgactacgaagctatcgccctcaataaaaacgagtatgtcagcttcaagcagtatgtaggcaagcatatattattcgtcaatgtcgccacgtactgtggcctgacagcacagtatccaggcatgagtgtacagggagaagatttgtacttagtgtcgtcttttcttcggaaaggcatgtag

SEQ ID NO: 142668 - DNA, 303 bp, Artificial Sequence
  derived and/or modified sequence
atgaccacccagctgcgggtggtgcacctgctgcccctgctgctggcctgctttgtgcagaccagccccaagcaggagaagatgaagatggactgccacaaggatgagaagggcaccatctatgactatgaggccatcgccctgaacaagaatgaatatgtgtccttcaagcagtatgtgggcaagcacatcctgtttgtgaatgtggccacctactgcggcctgacagcccagtacccaggcatgtctgtgcagggagaagatctctacctggtgagcagcttcctgaggaagggcatgtag

SEQ ID NO: 142669 - DNA, 303 bp, Artificial Sequence
  derived and/or modified sequence
atgaccacgcagctgcgcgtggtgcacttgctgcctctcttactggcatgtttcgtccagacatcacctaaacaggagaagatgaaaatggattgccacaaggacgagaaaggaacaatttatgactacgaggctattgcgctgaacaaaaatgaatacgtttccttcaaacagtatgttgggaaacacatattattcgtgaatgtggccacttattgtggcctcactgcacagtaccccggaatgagcgttcagggcgaggatctgtacctagtgtcatcttttcttaggaaggggatgtag

SEQ ID NO: 142670 - DNA, 303 bp, Artificial Sequence
  derived and/or modified sequence
atgaccacccagctgcgggtggtgcacctgctgcccctgctgctggcatgttttgtgcagacctcacctaagcaagaaaagatgaagatggattgccacaaggacgagaaaggtactatttacgactatgaggctatcgccctgaacaagaatgagtacgtgtcctttaaacagtacgtgggtaaacacattctttttgtgaacgtggctacgtattgtggcctgaccgctcaataccctggcatgtccgtgcagggagaggacctgtacctcgtgtcatcctttcttcgcaaaggcatgtag

SEQ ID NO: 142671 - DNA, 303 bp, Artificial Sequence
  derived and/or modified sequence
atgacgactcagttaagagtcgtccacctgctacccctgctccttgcgtgtttcgttcagacgagccccaagcaggagaagatgaagatggactgccataaagatgaaaaggggaccatatatgattatgaggcgatcgctctcaataaaaacgaatatgtgtccttcaagcaatacgttgggaaacatatcctttttgtaaacgttgcgacatattgcggcctaactgcgcagtatcctggtatgagcgtgcagggggaagatctgtacttggtgagttcctttctgcggaaggggatgtag

SEQ ID NO: 142672 - RNA, 303 nt, Artificial Sequence
  derived and/or modified sequence
augacaacccagcugcgcgucguucaccugcuaccgcugcuacuggcauguuuuguacagacgucucccaaacaggaaaagaugaagauggacugccacaaagaugagaaaggaacaauuuaugauuacgaggcuauagcccuuaacaaaaacgaauaugugucauucaaacaguauguggggaagcacauccuauuuguuaaugucgcuacauacugcggccugacagcccaguauccaggcaugagcguccagggggaagaccuuuaucucgugucuaguuuucugaggaaagggauguag

SEQ ID NO: 142673 - protein, 969 aa, Artificial Sequence
  derived and/or modified sequence
MAEDDPYLGRPEQMFHLDPSLTHTIFNPEVFQPQMALPTADGPYLQILEQPKQRGFRFRYVCEGPSHGGLPGASSEKNKKSYPQVKICNYVGPAKVIVQLVTNGKNIHLHAHSLVGKHCEDGICTVTAGPKDMVVGFANLGILHVTKKKVFETLEARMTEACIRGYNPGLLVHPDLAYLQAEGGGDRQLGDREKELIRQAALQQTKEMDLSVVRLMFTAFLPDSTGSFTRRLEPVVSDAIYDSKAPNASNLKIVRMDRTAGCVTGGEEIYLLCDKVQKDDIQIRFYEEEENGGVWEGFGDFSPTDVHRQFAIVFKTPKYKDINITKPASVFVQLRRKSDLETSEPKPFLYYPEIKDKEEVQRKRQKLMPNFSDSFGGGSGAGAGGGGMFGSGGGGGGTGSTGPGYSFPHYGFPTYGGITFHPGTTKSNAGMKHGTMDTESKKDPEGCDKSDDKNTVNLFGKVIETTEQDQEPSEATVGNGEVTLTYATGTKEESAGVQDNLFLEKAMQLAKRHANALFDYAVTGDVKMLLAVQRHLTAVQDENGDSVLHLAIIHLHSQLVRDLLEVTSGLISDDIINMRNDLYQTPLHLAVITKQEDVVEDLLRAGADLSLLDRLGNSVLHLAAKEGHDKVLSILLKHKKAALLLDHPNGDGLNAIHLAMMSNSLPCLLLLVAAGADVNAQEQKSGRTALHLAVEHDNISLAGCLLLEGDAHVDSTTYDGTTPLHIAAGRGSTRLAALLKAAGADPLVENFEPLYDLDDSWENAGEDEGVVPGTTPLDMATSWQVFDILNGKPYEPEFTSDDLLAQGDMKQLAEDVKLQLYKLLEIPDPDKNWATLAQKLGLGILNNAFRLSPAPSKTLMDNYEVSGGTVRELVEALRQMGYTEAIEVIQAASSPVKTTSQAHSLPLSPASTRQQIDELRDSDSVCDSGVETSFRKLSFTESLTSGASLLTLNKMPHDYGQEGPLEGKI

SEQ ID NO: 142674 - protein, 145 aa, Artificial Sequence
  derived and/or modified sequence
MAEDDPYLGRPEQMFHLDPSLTHTIFNPEVFQPQMALPTADGPYLQILEQPKQRGFRFRYVCEGPSHGGLPGASSEKNKKSYPQVKICNYVGPAKVIVQLVTNGKNIHLHAHSLVGKHCEDGICTVTAGPKDMVVGFANLGILHV

SEQ ID NO: 142675 - DNA, 4085 bp, Artificial Sequence
  derived and/or modified sequence
gtgagagagtgagcgagacagaaagagagagaagtgcaccagcgagccggggcaggaagaggaggtttcgccaccggagcggcccggcgacgcgctgacagcttcccctgcccttcccgtcggtcgggccgccagccgccgcagccctcggcctgcacgcagccaccggccccgctcccggagcccagcgccgccgaggccgcagccgcccggccagtaaggcggcgccgccgcccggccaccgcgcgccctgcgcttccctccgcccgcgctgcggccatggcgcggcgctgactggcctggcccggccccgccgcgctcccgctcgccccgacccgcactcgggcccgcccgggctccggcctgccgccgcctcttccttctccagccggcaggcccgcgccgcttaggagggagagcccacccgcgccaggaggccgaacgcggactcgccacccggcttcagaatggcagaagatgatccatatttgggaaggcctgaacaaatgtttcatttggatccttctttgactcatacaatatttaatccagaagtatttcaaccacagatggcactgccaacagcagatggcccataccttcaaatattagagcaacctaaacagagaggatttcgtttccgttatgtatgtgaaggcccatcccatggtggactacctggtgcctctagtgaaaagaacaagaagtcttaccctcaggtcaaaatctgcaactatgtgggaccagcaaaggttattgttcagttggtcacaaatggaaaaaatatccacctgcatgcccacagcctggtgggaaaacactgtgaggatgggatctgcactgtaactgctggacccaaggacatggtggtcggcttcgcaaacctgggtatacttcatgtgacaaagaaaaaagtatttgaaacactggaagcacgaatgacagaggcgtgtataaggggctataatcctggactcttggtgcaccctgaccttgcctatttgcaagcagaaggtggaggggaccggcagctgggagatcgggaaaaagagctaatccgccaagcagctctgcagcagaccaaggagatggacctcagcgtggtgcggctcatgtttacagcttttcttccggatagcactggcagcttcacaaggcgcctggaacccgtggtatcagacgccatctatgacagtaaagcccccaatgcatccaacttgaaaattgtaagaatggacaggacagctggatgtgtgactggaggggaggaaatttatcttctttgtgacaaagttcagaaagatgacatccagattcgattttatgaagaggaagaaaatggtggagtctgggaaggatttggagatttttcccccacagatgttcatagacaatttgccattgtcttcaaaactccaaagtataaagatattaatattacaaaaccagcctctgtgtttgtccagcttcggaggaaatctgacttggaaactagtgaaccaaaacctttcctctactatcctgaaatcaaagataaagaagaagtgcagaggaaacgtcagaagctcatgcccaatttttcggatagtttcggcggtggtagtggtgctggagctggaggcggaggcatgtttggtagtggcggtggaggagggggcactggaagtacaggtccagggtatagcttcccacactatggatttcctacttatggtgggattactttccatcctggaactactaaatctaatgctgggatgaagcatggaaccatggacactgaatctaaaaaggaccctgaaggttgtgacaaaagtgatgacaaaaacactgtaaacctctttgggaaagttattgaaaccacagagcaagatcaggagcccagcgaggccaccgttgggaatggtgaggtcactctaacgtatgcaacaggaacaaaagaagagagtgctggagttcaggataacctctttctagagaaggctatgcagcttgcaaagaggcatgccaatgcccttttcgactacgcggtgacaggagacgtgaagatgctgctggccgtccagcgccatctcactgctgtgcaggatgagaatggggacagtgtcttacacttagcaatcatccaccttcattctcaacttgtgagggatctactagaagtcacatctggtttgatttctgatgacattatcaacatgagaaatgatctgtaccagacgcccttgcacttggcagtgatcactaagcaggaagatgtggtggaggatttgctgagggctggggccgacctgagccttctggaccgcttgggtaactctgttttgcacctagctgccaaagaaggacatgataaagttctcagtatcttactcaagcacaaaaaggcagcactacttcttgaccaccccaacggggacggtctgaatgccattcatctagccatgatgagcaatagcctgccatgtttgctgctgctggtggccgctggggctgacgtcaatgctcaggagcagaagtccgggcgcacagcactgcacctggctgtggagcacgacaacatctcattggcaggctgcctgctcctggagggtgatgcccatgtggacagtactacctacgatggaaccacacccctgcatatagcagctgggagagggtccaccaggctggcagctcttctcaaagcagcaggagcagatcccctggtggagaactttgagcctctctatgacctggatgactcttgggaaaatgcaggagaggatgaaggagttgtgcctggaaccacgcctctagatatggccaccagctggcaggtatttgacatattaaatgggaaaccatatgagccagagtttacatctgatgatttactagcacaaggagacatgaaacagctggctgaagatgtgaagctgcagctgtataagttactagaaattcctgatccagacaaaaactgggctactctggcgcagaaattaggtctggggatacttaataatgccttccggctgagtcctgctccttccaaaacacttatggacaactatgaggtctctgggggtacagtcagagagctggtggaggccctgagacaaatgggctacaccgaagcaattgaagtgatccaggcagcctccagcccagtgaagaccacctctcaggcccactcgctgcctctctcgcctgcctccacaaggcagcaaatagacgagctccgagacagtgacagtgtctgcgacagcggcgtggagacatccttccgcaaactcagctttaccgagtctctgaccagtggtgcctcactgctaactctcaacaaaatgccccatgattatgggcaggaaggacctctagaaggcaaaatttagcctgctgacaatttcccacaccgtgtaaaccaaagccctaaaattccactgcgttgtccacaagacagaagctgaagtgcatccaaaggtgctcagagagccggcccgcctgaatcattctcgatttaactcgagaccttttcaacttggcttcctttcttggttcataaatgaattttagtttggttcacttacagatagtatctagcaatcacaacactggctgagcggatgcatctggggatgaggttgcttactaagctttgccagctgctgctggatcacagctgctttctgttgtcattgctgttgtccctctgctacgttcctattgtcattaaaggtatcacggtcgccacctggcattccttctgaccacagcatcattttgcattcaaattaagggttaagaaaagagatattttaaaatgagagtcacttgatgtgccattttaaaaaaaaaggcatattgctttttctaatgtggttatttctctgatttgcaaaaaaaaaaaaaaaaaaaatacttgtcaatatttaaacatggttacaatcattgctgaaaatggtattttcccccttttctgcattttgctattgtaaatatgttttttagatcaaatactttaaaggaaaaaatgttggatttataaatgctattttttattttacttttataataaaaggaaaagcaaattgatgacctca

SEQ ID NO: 142676 - DNA, 2910 bp, Artificial Sequence
  derived and/or modified sequence
atggccgaggacgacccctaccttggtcgtcccgagcagatgttccatctggacccttcacttacacacactatcttcaacccagaggtcttccagcctcagatggcactccccacagccgatggaccttatctgcagattttggaacagccaaagcagagaggctttcgctttagatatgtctgtgagggacctagtcatggtgggttacccggcgcttcaagcgaaaagaacaagaagagttatccccaggttaaaatctgcaattacgttggccccgccaaagtcattgtacagctggtcacaaatggcaagaacatccatctccacgcccattccctggtgggaaagcattgcgaggacgggatctgcactgtgactgccggaccaaaagatatggtggtgggcttcgccaatttgggcatcctgcacgtcacgaagaaaaaggtcttcgagacattagaagcaagaatgactgaggcatgtatcaggggctacaaccctggccttctggtgcatccagacctcgcttacctgcaggcagaaggagggggagatcgccagctcggcgaccgcgaaaaagagctcatcaggcaggcggccctccagcagaccaaggagatggacctgagcgtcgtccgactgatgtttaccgcgttcttgcctgacagtacggggtcttttacccgtcgcctggagcctgtcgtatccgatgcaatttacgattccaaagcacccaacgcttccaatcttaaaatcgtgcgcatggataggacagctgggtgtgtaacaggcggcgaagagatctaccttctttgtgataaagtgcagaaggacgacattcagattagattttacgaggaggaagagaacggcggcgtatgggaagggttcggggacttttccccaaccgacgtgcaccgccagtttgctattgtcttcaagactcctaagtacaaggacatcaatatcacgaaaccagcgtctgtttttgttcagctccgccgaaaatccgacctcgaaaccagtgagcccaagcctttcttgtattacccagaaatcaaagacaaggaggaggtgcagcggaagcgacagaaactcatgcctaacttctcagattctttcggagggggatccggcgcgggggccggggggggggggatgttcggaagtggagggggtggcggggggactggttcaaccgggccaggttattcctttcctcactatggctttcccacctacggagggattacctttcatcccggcacaacaaagtcgaacgccggcatgaagcatggaacgatggatacggagagcaagaaggatcccgaaggatgtgacaagtcagatgataagaacacagttaacctgttcggaaaggtgatagaaacgacggaacaggaccaagagccaagtgaggcaactgtggggaatggcgaggtgactttgacatatgccaccggaactaaggaggaatctgccggggtgcaagataacctgttcttggaaaaagctatgcagctggccaagcgccacgccaatgctctgttcgactatgcagtgactggggatgtaaagatgttgctggcagtgcaacggcatctaacagcagtccaggacgaaaacggggatagcgtcctacacctggcaatcatccacctccatagccagctcgtgagggacttactggaggttaccagcggactcatctccgacgacataatcaatatgcggaatgacttgtatcagaccccgctgcacctggcggtgataactaaacaggaagatgtcgtggaagacctgctgagggccggcgccgacctaagcttgctggatcgcctgggaaattccgtgctgcatctggcagctaaggagggacatgacaaggtgctgagtatcctcctcaagcataaaaaggccgcattactgcttgatcacccaaacggggatggcttgaacgctatccacttggcaatgatgagtaacagtttgccctgtcttcttcttctggttgcagcaggggccgacgtcaacgcacaggagcaaaaatcggggcgcactgcgttgcatctggcggtggaacatgacaacatatcactggctggctgccttctcctcgagggggatgcccatgttgactctaccacttatgacgggactacccccctacacatcgccgctggccggggatccacgcgattggctgccctcctcaaggcggccggcgcggatccccttgtcgagaattttgagcctctttacgacctggatgattcttgggagaacgcgggagaggatgaaggtgtagtgcccgggacaacgcccctagacatggcaacatcctggcaagtgtttgacattctcaacggcaagccatacgagcccgaatttacatccgacgacctgttggctcagggcgacatgaagcaactcgccgaagacgtaaagctgcaattgtacaagctgctcgagatccctgacccagacaaaaattgggccaccctggcccagaaactcgggttaggtatccttaacaatgcctttaggctttctcctgccccatccaagaccttgatggataattatgaggtgtccggcggaactgtccgagaacttgtagaggccctacgccagatgggttatactgaagcaatcgaggtgattcaggccgccagcagcccggttaagacaaccagtcaggcgcattcattgccactgtctccggcctcaactcggcagcagatcgatgaactgagagactcggactccgtttgcgacagtggtgtcgagacaagcttcagaaagctgagcttcaccgagtcactcacatcaggggcatccctgctaacccttaacaagatgccccatgattacgggcaagagggccccttagagggcaaaatctag

SEQ ID NO: 142677 - DNA, 2910 bp, Artificial Sequence
  derived and/or modified sequence
atggctgaagatgacccctacctgggccggcctgagcagatgttccacctggaccccagcctgacccacaccatcttcaaccctgaggtgttccagccccagatggccctgcccacagcagatggcccctacctgcagatcctggagcagcccaagcagaggggcttccgcttccgctacgtgtgtgagggccccagccatggaggcctgcccggggccagcagcgagaagaacaagaagagctacccccaggtgaagatctgcaactacgtgggccctgccaaggtgattgtgcagctggtgaccaacgggaagaacatccacctgcacgcccacagcctggtgggcaagcactgtgaagatggcatctgcaccgtgacagctggccccaaggacatggtggtgggctttgccaacctgggcatcctgcacgtgaccaagaagaaggtgtttgagaccctggaggccaggatgacagaggcctgcatccggggctacaaccctggcctgctggtgcacccagacctggcctacctgcaggccgagggcggcggggaccggcagctgggggaccgggagaaggagctgatccggcaggccgccctgcagcagaccaaggagatggacctgtctgtggtgcggctgatgttcaccgccttcctgcctgacagcacaggcagcttcacccggcggctggagcctgtggtgtctgatgccatctatgacagcaaggccccaaatgccagcaacctgaagatcgtgaggatggacagaacagctggctgtgtgactggaggagaggagatctacctgctgtgtgacaaggtgcagaaggatgacatccagatccgcttctatgaggaggaggagaatggaggagtgtgggagggctttggagacttcagccccacagatgtgcaccggcagtttgccatcgtgttcaagacccccaagtacaaggacatcaacatcaccaagccagcctctgtgtttgtgcagctgcggaggaagagtgacctggagaccagcgagcccaagcccttcctgtactacccagagatcaaggacaaggaggaggtgcagaggaagaggcagaagctgatgcccaacttcagtgacagctttggaggcggcagcggggccggggccggcggcggcggcatgtttggaagtggcggcggcggcggcggcaccggcagcactggacctggctacagcttcccccactacggcttccccacctatggaggcatcaccttccaccctggcaccaccaagagcaatgccggcatgaagcacggcaccatggacacagagagcaagaaggaccctgagggctgtgacaagagtgatgacaagaacacagtgaacctgtttgggaaggtgattgagaccacagagcaggaccaggagcccagcgaggccaccgtgggcaatggagaggtgaccctgacctacgccaccggcaccaaggaggagagcgctggggtgcaggacaacctcttcctggagaaggccatgcagctggccaagagacatgccaatgccctgtttgattatgctgtgactggagatgtgaagatgctgctggccgtgcagaggcacctgacagctgtgcaggatgaaaatggagacagcgtgctgcacctggccatcatccacctgcacagccagctggtgcgggacctgctggaggtgaccagcggcctcatcagtgatgacatcatcaacatgagaaatgacctgtaccagacccccctgcacctggccgtcatcaccaagcaggaggatgtggtggaggacctgctgcgggccggggctgacctgagcctgctggaccggctgggcaacagcgtgctgcacctggccgccaaggagggccatgacaaggtgctgagcatcctgctgaagcacaagaaggccgccctgctgctggaccaccccaatggagatggcctgaatgccatccacctggccatgatgagcaacagcctgccctgcctgctgctgctggtggccgccggggctgatgtgaatgcccaggagcagaagagcggccgcacagccctgcacctggccgtggagcatgacaacatcagcctggccggctgcctgctgctggagggagatgcccacgtggacagcaccacctatgatggcaccacccccctgcacatcgccgccggccggggcagcacccggctggccgccctgctgaaggccgccggggctgaccccctggtggagaactttgagcccctgtatgacctggatgacagctgggagaatgctggggaggatgaaggagtggtgcccggcaccacccccctggacatggccacctcctggcaggtgtttgacatcctgaatggcaagccctatgagcctgagttcaccagtgatgacctgctggcccagggcgacatgaagcagctggccgaggatgtgaagctgcagctgtacaagctgctggagatcccagaccctgacaagaactgggccaccctggcccagaagctgggcctgggcatcctgaacaatgccttccggctgagccctgcccccagcaagaccctgatggacaactatgaggtgtctgggggcaccgtgcgggagctggtggaggccctgcggcagatgggctacacagaggccatcgaggtgatccaggccgccagcagccctgtgaagaccaccagccaggcccacagcctgcccctgagccctgccagcacccggcagcagattgatgagctgcgggacagcgacagcgtgtgtgacagcggcgtggagaccagcttcaggaagctgtccttcacagagagcctgaccagcggggccagcctgctgaccctgaacaagatgcctcatgactatggccaggagggccccctggagggcaagatctag

SEQ ID NO: 142678 - DNA, 2910 bp, Artificial Sequence
  derived and/or modified sequence
atggccgaggacgacccctacctgggccggcccgagcagatgttccacttagaccccagcctgacccataccatatttaaccctgaggtgtttcaacctcagatggcactgcctacagcagatggaccttatttgcagattctggagcagccaaagcagaggggtttcaggttccgctacgtctgtgagggcccaagccacggagggttgccaggagcttccagcgagaagaacaagaaaagctacccacaggttaagatctgcaattacgtggggcccgcaaaggtgattgtgcagctggtgacaaacgggaagaatatccacttgcatgcccattctttagtgggaaagcattgcgaagatggaatttgcactgttacagcaggccccaaggacatggtcgtgggcttcgccaacctcggaattctgcacgtgactaagaaaaaggtttttgaaacactcgaagcacgcatgacggaggcatgcattcggggctataatcccggcctgcttgttcacccggatctggcctacctgcaagctgagggaggaggtgaccggcagctgggtgaccgcgaaaaagaattgattcgccaggccgcgcttcagcagaccaaagaaatggacctctccgtcgtgagactgatgttcaccgccttcttacccgacagcactggaagtttcactcgccgactggagcctgttgtatctgacgctatctacgatagtaaggccccgaacgcctccaatcttaaaatcgtcagaatggatcgcacggcagggtgcgtcactggaggcgaggagatatacctcttgtgtgacaaggttcagaaggacgatatccagatccgtttctacgaggaggaggagaacggtggcgtctgggagggattcggcgattttagtcctacggatgtgcaccggcagttcgcgatcgtgtttaaaacacccaagtacaaagatatcaatataactaaacccgcaagcgtgttcgtgcagctgaggagaaagagtgatctggaaacttccgagcccaagccatttctgtattaccccgaaatcaaggataaggaggaggtgcaaaggaagcgccaaaaactgatgccaaactttagcgactcctttgggggcggctctggcgccggagctggcgggggcggcatgtttggctcgggggggggcggcggcgggactggttccaccggccccggctacagcttcccccattatgggttcccaacttacggcggcattacatttcatccaggcactacgaaatccaatgccggaatgaagcatggaacaatggatacagagagcaaaaaggatcccgaaggatgcgataaaagcgatgataagaacacggttaaccttttcggcaaggtgatagagacaaccgagcaggaccaggagccatccgaagctacggtgggcaatggggaagtaaccctaacttatgctacggggactaaagaagagtcagccggcgtccaggataatctgttcctcgaaaaagctatgcagctggccaagcggcacgccaacgccctgttcgattacgctgtgaccggagacgtcaaaatgctcctggcggtgcagcgccatttgaccgcggtgcaagacgagaacggtgactccgtgttacatctcgccattattcacctgcactctcaactggttcgcgatctgctggaggtaactagcgggctgatttctgatgacatcattaatatgcgcaacgatctgtatcaaacacccctccacctggccgtgatcaccaagcaggaagatgtggttgaggacctgctgagggccggggcagatttaagcctacttgatcggttaggaaattctgttctgcatctagcagcaaaggaagggcacgacaaggtgctgtctatcttgcttaaacataagaaagcggccctgctcttagaccaccccaacggcgacggtctgaatgccatccacctggcgatgatgagcaattcccttccctgcctgcttcttctggttgctgcgggggcggatgttaatgcacaagagcagaaatccgggcgtaccgcactgcatctcgctgttgaacatgataatatttcactggcagggtgcctacttttagagggtgatgcacacgtcgactcgaccacatacgatggtacaactcccttgcatatcgcagccggcagggggtcaaccaggctggccgctttactcaaggcagcaggcgccgatcccctcgttgaaaacttcgagcccctctatgacctggacgatagttgggagaatgccggggaagacgagggagtggtccccggcactacccccttggatatggccacctcgtggcaagtttttgacattctgaatggaaagccgtacgagcccgaatttacaagtgacgacctcctggcacagggggatatgaagcagctagctgaagatgtgaaactacagctgtacaagctcctcgaaatccctgatcccgataagaattgggctaccctcgcccagaagctgggcctgggcattctcaataatgcatttagactaagtcctgcacctagtaagaccctgatggataactacgaggtgtccggcggcactgttcgcgagttagtagaagccctgaggcaaatgggttacactgaggccatcgaggtaattcaggcagcctctagccctgttaagaccacctcacaggcccattcgctgcccctgtcaccagcttcaacacggcagcagattgatgaattaagagactcagactccgtatgcgacagtggcgtcgaaacctcgtttcggaaactttccttcaccgagtcacttaccagtggggcctccttgctaacgctgaacaagatgccgcatgactacgggcaagagggcccgttggagggaaaaatttag

SEQ ID NO: 142679 - DNA, 2910 bp, Artificial Sequence
  derived and/or modified sequence
atggccgaggacgacccctatctcggccgaccggaacaaatgtttcacctcgacccatcactgacgcataccatctttaatcccgaagtgtttcagcctcagatggctttacccaccgcggacggaccgtatttacagatcttagaacaacccaaacagcgcggtttcagattcagatacgtgtgtgagggacccagtcatggcggtttgcccggtgcctcttcagaaaagaataagaagtcctatccacaagtgaagatttgcaactatgtgggcccagcaaaggttattgttcagctggtgactaacggcaagaatattcacctgcacgctcattcactggttggtaagcattgcgaggacggaatttgcactgtgaccgccggacctaaggatatggttgtgggcttcgcaaatctgggaatcttacacgttacaaaaaagaaggtcttcgagaccctggaggcaaggatgacggaggcttgtatcagaggttacaatcccggtctcctggtccatcctgacctagcctatcttcaggccgagggcggaggagatcgacagctaggggatcgcgagaaggagctcatccgccaggccgcactccagcaaaccaaggagatggacttgtctgtggtgcgcctaatgtttactgctttcctcccagattctactggatcttttactcgccgtctggaaccagtcgtgtctgacgccatctacgactcaaaagccccaaatgcatccaatctgaagattgtgaggatggatcgtactgctgggtgcgtcacagggggagaggaaatttatctcctctgcgacaaagtacagaaagacgatatccagatccgcttctacgaggaggaggagaacgggggagtttgggaagggttcggcgacttttcgccaaccgacgttcaccgccaatttgccatagtctttaaaacccccaaatataaggacattaacataacaaagcccgcatccgtcttcgtgcagctccgtcggaaaagtgatttagagacttcggaaccgaaaccctttctctattaccctgaaatcaaagataaagaagaggtccagcgaaagcgccaaaaattgatgcccaatttctctgattcattcgggggtggaagtggggctggtgccggaggaggcggaatgttcggtagcggtggaggcggagggggtactggaagtactggacccggatactcctttccccactatggctttcccacctacggaggtattactttccatcctggcactactaagtctaacgctggaatgaaacatgggacgatggacaccgagtctaagaaagaccctgaaggttgcgataaaagtgacgacaaaaataccgtcaatctcttcgggaaggtaatcgagacaactgagcaggatcaagaaccctccgaagctacagtgggcaacggcgaggtgacactcacatatgcaacagggactaaagaagagtcagccggtgtgcaggataacctttttttggaaaaggcgatgcaattggctaagcgccacgcaaatgcgttattcgattatgccgtgaccggcgatgtcaagatgcttctggctgtgcagcgtcatctgaccgctgtacaggacgagaacggtgactctgtgctgcatctggccattattcacctgcattcacagcttgtgcgtgatctgttagaggtcacttctggcctgatcagtgacgatattattaatatgagaaacgacttgtaccaaaccccacttcatctggccgtaataaccaagcaggaagatgttgtagaggacctgctccgggctggcgctgatttgtctcttttagatcgcctgggcaatagtgttctccatttagcagcaaaggaggggcatgacaaggtcttatcgattttgctgaagcacaagaaggctgccctgcttctggaccaccctaacggggatggtttaaatgcaatccacctggcaatgatgtccaacagtcttccatgccttctcttactagtagccgctggcgctgatgtgaacgcccaggaacagaagtctggccgaactgccttacacctggcagtagagcacgacaacatatcactagccggatgtctcttactggaaggagatgcacacgtcgattccaccacctatgacgggactacccccctacatattgccgctggccgtggaagcacaagactggcggctctgctgaaagcagctggcgcagatccactggtggaaaatttcgaacctttatacgatctggacgattcttgggagaacgccggagaagacgagggggtcgtgccgggaaccactcccctggatatggctactagctggcaggtatttgacatcttgaatggtaagccctacgagccagaattcacaagcgatgacctactggctcaaggcgacatgaaacagctagcggaagatgttaagctgcagctttacaagctgttggaaattcccgaccccgataaaaactgggccaccttagctcagaagctggggctggggatcctcaataatgcgttcaggttgtctccagccccaagcaagaccttgatggataactacgaagtaagtggcggaacagtccgcgaacttgtcgaggcactgcgccaaatggggtatacggaagccattgaagtaatccaggccgctagctcccccgttaagacgacttcccaggctcatagtttgcctctgagccctgcctcaacgcgtcagcagatagacgagttgagagattcagattctgtatgtgatagtggagttgaaacttcgttccgcaagctcagcttcacagagtcattgacatccggagcatctctgttgacgcttaacaagatgccccacgactacggccaggagggtccactggaaggcaagatatag

SEQ ID NO: 142680 - DNA, 2910 bp, Artificial Sequence
  derived and/or modified sequence
atggccgaggacgacccctacctgggcagacccgagcagatgttccacctggaccccagcctgacccacaccatcttcaaccccgaggtgttccagccccagatggccctgcccaccgccgacggcccctacctgcagatcctggagcagcccaagcagagaggcttcagattcagatacgtgtgcgagggccccagccacggcggcctgcccggcgccagcagcgagaagaacaagaagagctacccccaggtgaagatctgcaactacgtgggccccgccaaggtgatcgtgcagctggtgaccaacggcaagaacatccacctgcacgcccacagcctggtgggcaagcactgcgaggacggcatctgcaccgtgaccgccggccccaaggacatggtggtgggcttcgccaacctgggcatcctgcacgtgaccaagaagaaggtgttcgagaccctggaggccagaatgaccgaggcctgcatcagaggctacaaccccggcctgctggtgcaccccgacctggcctacctgcaggccgagggcggcggcgacagacagctgggcgacagagagaaggagctgatcagacaggccgccctgcagcagaccaaggagatggacctgagcgtggtgagactgatgttcaccgccttcctgcccgacagcaccggcagcttcaccagaagactggagcccgtggtgagcgacgccatctacgacagcaaggcccccaacgccagcaacctgaagatcgtgagaatggacagaaccgccggctgcgtgaccggcggcgaggagatctacctgctgtgcgacaaggtgcagaaggacgacatccagatcagattctacgaggaggaggagaacggcggcgtgtgggagggcttcggcgacttcagccccaccgacgtgcacagacagttcgccatcgtgttcaagacccccaagtacaaggacatcaacatcaccaagcccgccagcgtgttcgtgcagctgagaagaaagagcgacctggagaccagcgagcccaagcccttcctgtactaccccgagatcaaggacaaggaggaggtgcagagaaagagacagaagctgatgcccaacttcagcgacagcttcggcggcggcagcggcgccggcgccggcggcggcggcatgttcggcagcggcggcggcggcggcggcaccggcagcaccggccccggctacagcttcccccactacggcttccccacctacggcggcatcaccttccaccccggcaccaccaagagcaacgccggcatgaagcacggcaccatggacaccgagagcaagaaggaccccgagggctgcgacaagagcgacgacaagaacaccgtgaacctgttcggcaaggtgatcgagaccaccgagcaggaccaggagcccagcgaggccaccgtgggcaacggcgaggtgaccctgacctacgccaccggcaccaaggaggagagcgccggcgtgcaggacaacctgttcctggagaaggccatgcagctggccaagagacacgccaacgccctgttcgactacgccgtgaccggcgacgtgaagatgctgctggccgtgcagagacacctgaccgccgtgcaggacgagaacggcgacagcgtgctgcacctggccatcatccacctgcacagccagctggtgagagacctgctggaggtgaccagcggcctgatcagcgacgacatcatcaacatgagaaacgacctgtaccagacccccctgcacctggccgtgatcaccaagcaggaggacgtggtggaggacctgctgagagccggcgccgacctgagcctgctggacagactgggcaacagcgtgctgcacctggccgccaaggagggccacgacaaggtgctgagcatcctgctgaagcacaagaaggccgccctgctgctggaccaccccaacggcgacggcctgaacgccatccacctggccatgatgagcaacagcctgccctgcctgctgctgctggtggccgccggcgccgacgtgaacgcccaggagcagaagagcggcagaaccgccctgcacctggccgtggagcacgacaacatcagcctggccggctgcctgctgctggagggcgacgcccacgtggacagcaccacctacgacggcaccacccccctgcacatcgccgccggcagaggcagcaccagactggccgccctgctgaaggccgccggcgccgaccccctggtggagaacttcgagcccctgtacgacctggacgacagctgggagaacgccggcgaggacgagggcgtggtgcccggcaccacccccctggacatggccaccagctggcaggtgttcgacatcctgaacggcaagccctacgagcccgagttcaccagcgacgacctgctggcccagggcgacatgaagcagctggccgaggacgtgaagctgcagctgtacaagctgctggagatccccgaccccgacaagaactgggccaccctggcccagaagctgggcctgggcatcctgaacaacgccttcagactgagccccgcccccagcaagaccctgatggacaactacgaggtgagcggcggcaccgtgagagagctggtggaggccctgagacagatgggctacaccgaggccatcgaggtgatccaggccgccagcagccccgtgaagaccaccagccaggcccacagcctgcccctgagccccgccagcaccagacagcagatcgacgagctgagagacagcgacagcgtgtgcgacagcggcgtggagaccagcttcagaaagctgagcttcaccgagagcctgaccagcggcgccagcctgctgaccctgaacaagatgccccacgactacggccaggagggccccctggagggcaagatctag

SEQ ID NO: 142681 - protein, 979 aa, Artificial Sequence
  derived and/or modified sequence
MALFAVFQTTFFLTLLSLRTYQSEVLAERLPLTPVSLKVSTNSTRQSLHLQWTVHNLPYHQELKMVFQIQISRIETSNVIWVGNYSTTVKWNQVLHWSWESELPLECATHFVRIKSLVDDAKFPEPNFWSNWSSWEEVSVQDSTGQDILFVFPKDKLVEEGTNVTICYVSRNIQNNVSCYLEGKQIHGEQLDPHVTAFNLNSVPFIRNKGTNIYCEASQGNVSEGMKGIVLFVSKVLEEPKDFSCETEDFKTLHCTWDPGTDTALGWSKQPSQSYTLFESFSGEKKLCTHKNWCNWQITQDSQETYNFTLIAENYLRKRSVNILFNLTHRVYLMNPFSVNFENVNATNAIMTWKVHSIRNNFTYLCQIELHGEGKMMQYNVSIKVNGEYFLSELEPATEYMARVRCADASHFWKWSEWSGQNFTTLEAAPSEAPDVWRIVSLEPGNHTVTLFWKPLSKLHANGKILFYNVVVENLDKPSSSELHSIPAPANSTKLILDRCSYQICVIANNSVGASPASVIVISADPENKEVEEERIAGTEGGFSLSWKPQPGDVIGYVVDWCDHTQDVLGDFQWKNVGPNTTSTVISTDAFRPGVRYDFRIYGLSTKRIACLLEKKTGYSQELAPSDNPHVLVDTLTSHSFTLSWKDYSTESQPGFIQGYHVYLKSKARQCHPRFEKAVLSDGSECCKYKIDNPEEKALIVDNLKPESFYEFFITPFTSAGEGPSATFTKVTTPDEHSSMLIHILLPMVFCVLLIMVMCYLKSQWIKETCYPDIPDPYKSSILSLIKFKENPHLIIMNVSDCIPDAIEVVSKPEGTKIQFLGTRKSLTETELTKPNYLYLLPTEKNHSGPGPCICFENLTYNQAASDSGSCGHVPVSPKAPSMLGLMTSPENVLKALEKNYMNSLGEIPAGETSLNYVSQLASPMFGDKDSLPTNPVEAPHCSEYKMQMAVSLRLALPPPTENSSLSSITLLDPGEHYC

SEQ ID NO: 142682 - DNA, 2940 bp, Artificial Sequence
  derived and/or modified sequence
atggccctgttcgctgtgttccaaacgacatttttcctcaccctcctgtcgctgagaacttaccagtccgaggttctggctgagcgtctgcccctcactccggtgagccttaaggtgagcaccaacagcacgaggcagagcctccacctgcagtggactgtgcacaatctcccctaccatcaagaactgaagatggtcttccaaatacagatctccaggattgaaacttcaaacgtaatttgggttggtaactattctacaactgtgaaatggaaccaagtcctccattggtcatgggagtccgagctgcccctggaatgtgctactcatttcgtaagaatcaaatccctggtggatgatgctaagtttcctgaaccaaatttctggtcaaactggtctagttgggaggaagtctccgtgcaggacagcaccgggcaggacatactgtttgtttttccaaaggacaagctggtggaagagggcaccaatgtgactatctgctacgtgtcacgtaacatacaaaacaatgtttcttgttacctggaaggcaagcaaatccacggcgagcagctggacccacatgtcactgcctttaatcttaacagcgttccttttatacggaacaaaggcacgaatatttattgtgaagcctcacaaggtaatgtttcggaaggtatgaagggaatagtgctgtttgtgagtaaagttctggaggagccaaaggatttttcttgtgaaactgaagactttaagactctgcattgcacatgggatcctggcactgacactgcattgggttggtccaaacaaccctcccagtcttataccttgttcgagtcattctccggcgaaaaaaagctctgcacccacaagaattggtgtaattggcagataactcaggatagccaggagacctacaattttacgttgatcgccgagaattacctaagaaaaagatccgttaatatcttgttcaaccttactcaccgggtttatttgatgaacccctttagcgtcaatttcgagaacgtaaacgctacaaacgccatcatgacttggaaagtgcatagcatccggaataattttacatatctgtgccagatcgagctgcatggagaaggaaagatgatgcagtacaacgtctctattaaagtgaatggagagtatttcctgtccgaactggaacccgcgacagaatacatggctcgagtacgctgcgcagatgcttcacacttctggaaatggtcagagtggtccgggcagaatttcaccaccctcgaggcagcaccttctgaggctccggacgtgtggcgaatagtttctctggagcccgggaaccatacggtgaccctcttctggaagcccctcagcaaacttcacgcgaacggaaagatcctcttctacaacgtggtcgtggagaatctggataaaccaagttcctctgagctacattctatccctgcccctgcgaacagcacaaagctcattctggacagatgttcctaccagatctgcgtcatagcaaacaacagtgtcggcgcttctcctgccagtgtgattgtgatttcagccgatcctgaaaacaaggaggtagaagaagaaagaatcgccggaacagaagggggcttttcactgtcctggaagccccaacccggggatgttattgggtatgtagtggactggtgcgaccacacacaggatgtcctgggagactttcagtggaaaaatgtagggccaaacaccacttctacagtgatttcaacagacgccttccgacccggtgtgaggtacgactttaggatatacgggctgagcacgaagcgaatagcttgtctgctcgaaaaaaaaactgggtactcacaagaactagccccttccgacaatccccatgtgctggtcgacaccctcacatcacattcattcacactgtcttggaaggactactcaactgagtcacagcctggttttatccaaggctaccatgtttacctcaaatcaaaggcgcgacagtgtcacccccgttttgagaaggcagtgctgagcgacggttctgaatgctgcaagtacaaaatcgataaccccgaagagaaggccctcatcgtggacaacctcaagcccgagagtttttatgaattctttatcaccccatttacatctgccggagagggaccatccgcgacatttacgaaggtcaccacccctgacgagcatagcagcatgcttatccacatcctgctgcccatggtgttctgcgtcctgcttataatggttatgtgctacctaaaatcacagtggattaaggaaacgtgttatcccgacattcccgacccgtataagagtagcatcctgagcctgatcaagttcaaagagaacccccatctcattattatgaacgtctcagactgtatccccgatgcgattgaagtggtgagtaaacccgagggcaccaaaatacagttcttgggcacaaggaagtcccttactgaaacggagctgacgaaacccaattacttgtatcttctgccaaccgagaagaaccatagtggccctggaccttgcatttgctttgagaatctgacctacaaccaggctgcctctgattccgggagttgtgggcacgtccctgtgtcccccaaggccccgagcatgctgggactcatgacttctcccgagaacgtgttgaaggccttggagaagaattacatgaactcactgggggaaataccggccggcgaaacaagcttaaattacgtcagccagctggcgagtcctatgttcggcgacaaagactcattaccaacaaacccagtggaagcaccccactgctccgagtacaaaatgcagatggccgttagtctgcgactggccttgccccccccaacggaaaactctagcctcagctctattaccctgcttgacccaggagaacattactgttag

SEQ ID NO: 142683 - DNA, 2940 bp, Artificial Sequence
  derived and/or modified sequence
atggccctgtttgctgtgttccagaccaccttcttcctgaccctgctgagcctgcggacctaccagagcgaggtgctggccgagcggctgcccctgacccctgtgtccctgaaggtgtccaccaacagcacccggcagagcctgcacctgcagtggacagtgcacaacctgccctaccaccaggagctgaagatggtgttccagatccagatcagccgcatcgagaccagcaatgtcatctgggtgggcaactacagcaccaccgtgaagtggaaccaggtgctgcactggagctgggagagcgagctgcccctggagtgtgccacccactttgtgcgcatcaagagcctggtggatgatgccaagtttcctgagcccaacttctggagcaactggagctcctgggaggaggtgtctgtgcaggacagcacaggccaggacatcctgtttgtgttccccaaggacaagctggtggaggagggcaccaacgtgaccatctgctacgtgtccaggaacatccagaacaacgtgtcctgctacctggagggcaagcagatccatggagagcagctggacccccacgtgacagccttcaacctgaacagcgtgcccttcatcagaaataaaggcaccaacatctactgtgaggccagccagggcaatgtgtctgagggcatgaagggcatcgtgctgtttgtgtccaaggtgctggaggagcccaaggacttcagctgtgaaacagaggacttcaagaccctgcactgcacctgggaccctggaacagacacagccctgggctggagcaagcagcccagccagagctacaccctgtttgagagcttcagcggggagaagaagctgtgcacccacaagaactggtgcaactggcagatcacccaggacagccaggagacctacaacttcaccctgattgctgagaactacctgaggaagaggtctgtgaacatcctcttcaacctgacccaccgggtgtacctgatgaaccccttctctgtgaactttgaaaatgtgaatgccaccaatgccatcatgacctggaaggtgcacagcatccggaacaacttcacctacctgtgccagatcgagctgcatggagagggcaagatgatgcagtacaacgtgtccatcaaggtgaatggagagtacttcctgtctgagctggagcccgccacagagtacatggcccgggtgcgctgtgctgatgccagccacttctggaagtggagcgagtggagcggccagaacttcaccaccctggaggccgcccccagcgaggccccagatgtgtggagaattgtgtccctggagcccggcaaccacacagtgaccctcttctggaagcccctgagcaagctgcacgccaacgggaagatcctcttctacaacgtggtggtggagaacctggacaagcccagcagcagcgagctgcacagcatcccagccccagccaacagcaccaagctgatcctggaccgctgcagctaccagatctgtgtgattgccaacaacagcgtgggcgccagccctgccagcgtcatcgtcatctctgctgaccctgagaacaaggaggtggaggaggagagaattgctggaacagaaggaggcttcagcctgtcctggaagccccagcctggagatgtgattggctacgtggtggactggtgtgaccacacccaggatgtgctgggggacttccagtggaagaatgtgggccccaacaccaccagcaccgtcatcagcacagatgccttccggcctggggtgcgctatgacttccgcatctacggcctgagcaccaagagaattgcctgcctgctggagaagaagacaggctacagccaggagctggcccccagcgacaacccccacgtgctggtggacaccctgaccagccacagcttcaccctgtcctggaaggactacagcacagagagccagcccggcttcatccagggctaccacgtgtacctgaagagcaaggcccggcagtgccaccccaggtttgagaaggctgtgctgagtgatggcagcgagtgctgcaagtacaagattgacaaccctgaggagaaggccctgattgtggacaacctgaagccagagagcttctatgagttcttcatcacccccttcaccagcgctggggagggccccagcgccaccttcaccaaggtgaccaccccagatgagcacagctccatgctgatccacatcctgctgcccatggtgttctgtgtgctgctgatcatggtgatgtgctacctgaagagccagtggatcaaggagacctgctacccagacatcccagacccctacaagagcagcatcctgagcctcatcaagttcaaggagaacccccacctgatcatcatgaatgtgtctgactgcatcccagatgccatcgaggtggtgtccaagccagagggcaccaagatccagttcctgggcaccaggaagagcctgacagaaacagagctgaccaagcccaactacctgtacctgctgcccacagagaagaaccacagcggccctggcccctgcatctgctttgagaacctgacctacaaccaggccgccagtgacagcggcagctgtggccacgtgcctgtgagccccaaggcccccagcatgctgggcctgatgaccagcccagaaaatgtgctgaaggccctggagaagaactacatgaacagcctgggggagatcccagctggggagaccagcctgaactacgtgtcccagctggccagccccatgtttggagacaaggacagcctgcccaccaaccctgtggaggccccccactgcagcgagtacaagatgcagatggctgtgtccctgcggctggccctgcccccacccacagagaacagcagcctgagcagcatcaccctgctggaccccggggagcactactgctag

SEQ ID NO: 142684 - DNA, 2940 bp, Artificial Sequence
  derived and/or modified sequence
atggccctgttcgccgtgttccagaccaccttcttcctgaccctgctctctctcaggacttaccagagtgaggtgttggctgaacggttgcccctcaccccggtttctcttaaagtgtcaaccaattcaaccagacaaagtctccacctgcagtggaccgtgcacaacctgccatatcaccaggaactgaaaatggtttttcagatacaaatcagcaggatagagacctccaatgtgatctgggtcggcaattattctacaacagtgaagtggaatcaggttctacattggagctgggagagcgagctcccactggagtgtgcaacccacttcgtgaggattaagtccttggtcgacgacgccaagttcccagagcctaatttctggagcaattggtcctcttgggaggaggtgagcgtacaggactctactgggcaggatatccttttcgtcttcccgaaggataagctggtcgaggaaggcacaaatgtcactatatgttacgtttctcgtaacatccagaataacgtgtcctgctacctggaggggaagcaaatccacggcgaacaactggatcctcatgtgacagccttcaatctgaatagcgtcccctttattcgcaataaggggaccaatatttactgcgaggctagccaggggaatgtgtcggaagggatgaagggtattgtattattcgtgtcgaaagtactcgaggaacctaaagacttttcttgcgaaacagaagacttcaaaaccctgcactgcacctgggatcctggcacagacaccgcactcgggtggagtaaacaacctagtcagtcatacacactgtttgaaagcttctccggggaaaagaagctgtgtacccataaaaactggtgcaattggcagatcactcaagacagtcaggagacctacaactttaccctgatcgccgaaaactacctccgcaagcgctctgtgaacatcctgtttaatctgactcacagagtctacctgatgaatccattctccgttaacttcgaaaacgtgaatgccacaaatgccataatgacatggaaagtgcattcaatacgaaataatttcacctacctgtgccagatcgaattacatggagaaggaaaaatgatgcagtacaatgtgtcaattaaagtgaacggcgaatactttcttagcgagctggagcccgctacagaatacatggcccgggtacggtgcgctgacgcttcacacttttggaagtggtctgagtggtcaggacagaacttcaccacgttggaggccgctccttccgaggcacctgacgtatggcggatcgttagcctggagcctggaaatcacacagtcacacttttttggaagcctttgtccaagctccacgcgaatggaaaaattctattttacaatgtagttgtcgaaaatctggataagccttcttcatcggagcttcattctatcccagcacctgccaatagcacaaaactgatactggaccgatgttcatatcagatctgtgtgattgccaacaactcagttggcgcgtcccctgctagtgtgatagtgatcagtgcggaccccgaaaataaggaagtcgaggaggagcggatcgccggcacagagggagggttttctttaagctggaagcctcaacccggtgatgtcatcgggtacgtggtcgattggtgcgatcacacacaggatgtacttggggattttcagtggaagaatgtgggacccaataccactagcactgtgatttccactgatgctttccgacccggtgtccgttacgatttccgcatatacggacttagtacaaagcgcatcgcctgcctactcgaaaaaaagacgggatactcccaggagcttgcccccagcgacaacccccacgtccttgtcgacacactgactagccacagctttaccctcagctggaaggattatagcacagagtctcagcctggcttcatccagggctatcatgtgtatcttaagtccaaggcaagacaatgccatccgcgttttgagaaggctgtcctatctgatggatcagaatgttgcaagtacaaaatcgacaaccccgaggagaaagcccttatcgtggacaatctgaagcctgagtccttctatgagttctttatcactcccttcacttcagccggggaagggcctagcgcgactttcacaaaggtgactactcctgacgaacactcttctatgctgatccacattctgcttcctatggtgttttgtgtgcttttgatcatggtgatgtgttatctgaagtcccagtggattaaagagacttgctaccccgacattcctgacccatacaaatcctcaatccttagcctgataaagttcaaagaaaatcctcatctcattattatgaatgtttcagattgcattcctgatgctattgaagtggttagcaagccggaggggaccaagatccagttcttggggacccgcaagagtcttaccgaaactgagctgacaaaacctaactacttgtacctgctccctactgagaaaaaccactcagggcctggcccctgtatctgtttcgaaaacttgacttataatcaggccgcatccgacagcgggagttgcggacatgtccccgtatcccctaaagcgccgagcatgctcggactgatgaccagtccagagaacgtgctgaaagccttggagaaaaactatatgaactccttaggtgagatccccgccggtgagacatccctcaattatgtctctcaactagcatctcccatgttcggagacaaagattcactcccaacgaatccggttgaagcaccccattgctctgaatacaaaatgcagatggccgtctccctccgtttggcccttccccccccgaccgagaactcaagcctcagctccatcaccttgctcgatccaggggaacactattgctag

SEQ ID NO: 142685 - DNA, 5539 bp, Artificial Sequence
  derived and/or modified sequence
gcgcttgccccgcagctgattcatagccccggcccgggccgcctctgcacgtccgccccggagcccgcacccgcgccccacgcgccgccgaggactcggcccggctcgtggagcccttcgcccgcggcgtgagtacccccgacccgcccgtccccgctctgctcgcgccctgccgctgcgccgccctcggtggcttttccgacgggcgagccccgtgctgtgcgggaaagaatccgacaacttcgcagcccatcccggctggacgcgaccgggagtgcagcagcccgttcccctcctcggtgccgcctctgcccagcgtttgcttggctgggctaccacctgcgctcggacggcgctcggagggtcctcgcccccggcctgcctacctgaaaaccagaactgatggctctatttgcagtctttcagacaacattcttcttaacattgctgtccttgaggacttaccagagtgaagtcttggctgaacgtttaccattgactcctgtatcacttaaagtttccaccaattctacgcgtcagagtttgcacttacaatggactgtccacaaccttccttatcatcaggaattgaaaatggtatttcagatccagatcagtaggattgaaacatccaatgtcatctgggtggggaattacagcaccactgtgaagtggaaccaggttctgcattggagctgggaatctgagctccctttggaatgtgccacacactttgtaagaataaagagtttggtggacgatgccaagttccctgagccaaatttctggagcaactggagttcctgggaggaagtcagtgtacaagattctactggacaggatatattgttcgttttccctaaagataagctggtggaagaaggcaccaatgttaccatttgttacgtttctaggaacattcaaaataatgtatcctgttatttggaagggaaacagattcatggagaacaacttgatccacatgtaactgcattcaacttgaatagtgtgcctttcattaggaataaagggacaaatatctattgtgaggcaagtcaaggaaatgtcagtgaaggcatgaaaggcatcgttctttttgtctcaaaagtacttgaggagcccaaggacttttcttgtgaaaccgaggacttcaagactttgcactgtacttgggatcctgggacggacactgccttggggtggtctaaacaaccttcccaaagctacactttatttgaatcattttctggggaaaagaaactttgtacacacaaaaactggtgtaattggcaaataactcaagactcacaagaaacctataacttcacactcatagctgaaaattacttaaggaagagaagtgtcaatatcctttttaacctgactcatcgagtttatttaatgaatccttttagtgtcaactttgaaaatgtaaatgccacaaatgccatcatgacctggaaggtgcactccataaggaataatttcacatatttgtgtcagattgaactccatggtgaaggaaaaatgatgcaatacaatgtttccatcaaggtgaacggtgagtacttcttaagtgaactggaacctgccacagagtacatggcgcgagtacggtgtgctgatgccagccacttctggaaatggagtgaatggagtggtcagaacttcaccacacttgaagctgctccctcagaggcccctgatgtctggagaattgtgagcttggagccaggaaatcatactgtgaccttattctggaagccattatcaaaactgcatgccaatggaaagatcctgttctataatgtagttgtagaaaacctagacaaaccatccagttcagagctccattccattccagcaccagccaacagcacaaaactaatccttgacaggtgttcctaccaaatctgcgtcatagccaacaacagtgtgggtgcttctcctgcttctgtaatagtcatctctgcagaccccgaaaacaaagaggttgaggaagaaagaattgcaggcacagagggtggattctctctgtcttggaaaccccaacctggagatgttataggctatgttgtggactggtgtgaccatacccaggatgtgctcggtgatttccagtggaagaatgtaggtcccaataccacaagcacagtcattagcacagatgcttttaggccaggagttcgatatgacttcagaatttatgggttatctacaaaaaggattgcttgtttattagagaaaaaaacaggatactctcaggaacttgctccttcagacaaccctcacgtgctggtggatacattgacatcccactccttcactctgagttggaaagattactctactgaatctcaacctggttttatacaagggtaccatgtctatctgaaatccaaggcgaggcagtgccacccacgatttgaaaaggcagttctttcagatggttcagaatgttgcaaatacaaaattgacaacccggaagaaaaggcattgattgtggacaacctaaagccagaatccttctatgagtttttcatcactccattcactagtgctggtgaaggccccagtgctacgttcacgaaggtcacgactccggatgaacactcctcgatgctgattcatatcctactgcccatggttttctgcgtcttgctcatcatggtcatgtgctacttgaaaagtcagtggatcaaggagacctgttatcctgacatccctgacccttacaagagcagcatcctgtcattaataaaattcaaggagaaccctcacctaataataatgaatgtcagtgactgtatcccagatgctattgaagttgtaagcaagccagaagggacaaagatacagttcctaggcactaggaagtcactcacagaaaccgagttgactaagcctaactacctttatctccttccaacagaaaagaatcactctggccctggcccctgcatctgttttgagaacttgacctataaccaggcagcttctgactctggctcttgtggccatgttccagtatccccaaaagccccaagtatgctgggactaatgacctcacctgaaaatgtactaaaggcactagaaaaaaactacatgaactccctgggagaaatcccagctggagaaacaagtttgaattatgtgtcccagttggcttcacccatgtttggagacaaggacagtctcccaacaaacccagtagaggcaccacactgttcagagtataaaatgcaaatggcagtctccctgcgtcttgccttgcctcccccgaccgagaatagcagcctctcctcaattacccttttagatccaggtgaacactactgctaaccagcatgccgatttcataccttatgctacacagacattaagaagagcagagctggcaccctgtcatcaccagtggccttggtccttaatcccagtacgatttgcaggtctggtttatataagaccactacagtctggctaggttaaaggccagaggctatggaacttaacactccccattggagcaagcttgccctagagacggcaggatcatgggagcatgcttaccttctgctgtttgttccaggctcacctttagaacaggagacttgagcttgacctaaggatatgcattaaccactctacagactcccactcagtactgtacagggtggctgtggtcctagaagttcagtttttactgaggaaatatttccattaacagcaattattatattgaaggctttaataaaggccacaggagacattactatagcatagattgtcaaatgtaaatttactgagcgtgttttataaaaaactcacaggtgtttgaggccaaaacagattttagacttaccttgaacggataagaatctatagttcactgacacagtaaaattaactctgtgggtgggggcggggggcatagctctaatctaatatataaaatgtgtgatgaatcaacaagatttccacaattcttctgtcaagcttactacagtgaaagaatgggattggcaagtaacttctgacttactgtcagttgtacttctgctccatagacatcagtattctgccatcatttttgatgactacctcagaacataaaaaggaacgtatatcacataattccagtcacagtttttggttcctcttttctttcaagaactatatataaatgacctgttttcacttagcatcctttggactctgcagtaggttgtctgggtcaagataactctcagtcacatttatattcatattatgctaaaatagtaaaatgaaacctcattgttggacataatttagatataactaaaaagttctatgaagtgggaaattccgtgttggctctggagcagctttgtctcctctgaaccaatatatcccaaaccaatatatgcaaagcacctggtacacaactggtattttagtacatgttggttcttttggtgcaatctcagctcactgcagcttccgcctcctagattcaaacaaacagttctcctgccccagcctccagagcacctaggactccaggtgcatgctaccacacctgactagtttttatatttttagtagagattgggttttaccatattggccaggctggtctcaaactcctgaccgcaggtgatccacctgcctcagcttccccaagggctgggattacaggtgtgagccaccatgcccagcctatttgtcacattatttgtcacatttattttacttttatttattttttgagatgaaatttcgctcttgttgcccaggctggagtgcaatggtgcagccttggctcactgcaacctccgcctcccagggtcaagcaattctcctgcctcagcctcctgagtagctgggattacaggcatgcaccaccacacccaggtaattttgtatctttagtagagatggggtttcaccatgttggtcaggctgttctcgaactcctgacctcaggtgatctgcctgccttggcctcccaaagtgctgggattacaggcgtgagccactgcgcctagccgtcacatttctaaacaagcatgaaaggggttcatttttgtcttcttcttgcctgccgtcagcatggtggaaatggctctgcctatgctcatgcttctggtgcccaatgccttgcactgtgccattcaacactatgaagagaaacaagtagccacacctcaaaataatgtggctgtcaacaactggcctaaataaacctacacaaaccagtacttgccttttgctggaaacattgattatgtgctcctcacgtagtagaaagcggtatcctgattagtctaacagttgtgttagactttagggccagtattgtcagcatttatttatttatgtacctttgttatgatgggatatttttcatttgaaacttgttcataaaaatgtcaatgacattgatgactgatttgtacatatttttcatatagttttgtttaaaaaataattcacgcaaaatcttgaagtcatttttgctattgaaataaaccttaattaaaatatttcatcatca

SEQ ID NO: 142686 - DNA, 2940 bp, Artificial Sequence
  derived and/or modified sequence
atggctctgttcgctgtgttccagaccacttttttccttacactgttgtccctgcggacctatcagtccgaggttctcgccgagcgcttgcctctaacccctgtgtctctgaaggtaagcaccaactccacgcgccagtccctccacctgcaatggacggtccataatcttccgtaccaccaggagcttaagatggtgtttcagatccaaatctcccgcatagagactagcaacgtaatttgggtgggcaactatagtaccactgtaaagtggaaccaggttctccattggtcctgggaatccgagcttcccctcgagtgtgccacccatttcgtgaggattaagagtctggtggatgacgcgaagttccccgagcccaacttctggtcaaactggtcttcttgggaggaggtgtcagtgcaggactccaccgggcaggatatcctgttcgtattcccaaaggataagctggtcgaggaggggaccaatgtgaccatttgttacgtctcaaggaacatacagaataatgtgtcttgttacctggagggtaaacaaattcacggtgagcagctggacccccacgtgactgcatttaacttgaacagcgtcccatttattaggaataagggaaccaacatatattgcgaggctagccaggggaatgtttcggaaggcatgaagggcatcgtgcttttcgtttctaaagtcttggaagaacctaaggatttttcctgtgaaacggaggacttcaaaacgctgcattgtacatgggaccctggtaccgacactgcccttggctggagcaagcagccaagccagtcatatactttgttcgagtcttttagcggggagaaaaagctgtgtacacacaagaattggtgtaactggcaaataactcaggattctcaggaaacctacaatttcacactgattgctgagaattatttacggaagcgatctgtgaatattttattcaacctgacccaccgggtctatctgatgaatccattcagcgtgaacttcgagaacgtgaacgctactaatgccatcatgacatggaaagttcatagcatcagaaataattttacatatctgtgccagatagaactgcatggggaggggaaaatgatgcagtataacgtttccattaaagtgaatggcgagtacttcctgagtgagctggaacctgccacagaatacatggccagggtccgatgtgcggacgcctcccatttttggaaatggagtgagtggtccggccagaactttacaaccctcgaggcggcaccatccgaggcgccagatgtttggcgaatcgtgtctctcgagcccggaaaccacaccgtgacgttgttttggaagccgttgagcaagttacatgccaacggcaaaatcctgttttataacgtagtagtcgaaaaccttgacaagccctcgagcagtgagctgcactctattcctgccccagccaactcaaccaagttgatcctggatcgttgcagctatcagatctgcgtgatcgctaacaattctgtgggggctagcccagcttccgtaatcgtgatttctgcagatccagagaacaaagaagtggaggaggaacgcattgctgggactgaaggaggattctctttaagttggaaaccccagcctggcgacgtaattggatacgttgtggactggtgtgatcacacacaggatgtcttgggcgattttcagtggaagaatgtgggtcctaataccacctctactgtcatatcgaccgatgccttccgccctggtgtccgctacgattttaggatttacgggctgtccacaaagcggattgcttgtctcctcgagaaaaaaactgggtattcgcaggagctggctcccagtgacaacccccacgtgttggtcgatactttaacatctcactcattcacgctgagctggaaggactattccactgagagccaacctggtttcattcagggttatcacgtttacttaaagtcaaaagcaagacagtgtcacccccgtttcgaaaaggcggtcttaagtgacggaagcgaatgctgtaagtataaaattgacaacccggaagagaaggcgctaattgtggacaatttgaagcctgaatctttttatgagttctttattacgccattcacatcggcaggcgaagggccaagcgccacatttaccaaggtcactacacccgacgaacatagctccatgttgattcatatactgctgcccatggtgttctgtgtgctactgatcatggtgatgtgttatctcaagagccaatggatcaaagagacgtgttaccccgacattcccgatccttacaagtctagcattctctccctgataaagtttaaagaaaatcctcatcttataatcatgaacgtgtccgactgtataccagacgcgatcgaagtggtgtctaaacccgaagggacaaaaattcagttcctaggcacccggaagagtctcactgaaacagagctcactaaaccaaactatctctatctattacctaccgagaaaaaccacagcggtcctgggccttgtatctgcttcgagaacctcacctacaatcaagccgcttctgactccggcagttgcggacatgtccctgtgagccctaaagcaccaagtatgctgggattgatgaccagcccagagaacgtcctaaaggctcttgagaaaaactacatgaacagtctaggtgagatcccagccggagagacaagcttgaattacgtgagccagttagcaagccctatgttcggagacaaggattcgttgcccaccaatcccgttgaggctccccattgctccgagtataagatgcagatggctgtgtcattacgactggctctacctcctccgaccgagaatagtagccttagctctatcactttgctggatccgggtgagcattactgctag

SEQ ID NO: 142687 - DNA, 2940 bp, Artificial Sequence
  derived and/or modified sequence
atggccctgttcgccgtgttccagaccaccttcttcctgaccctgctgagcctgagaacctaccagagcgaggtgctggccgagagactgcccctgacccccgtgagcctgaaggtgagcaccaacagcaccagacagagcctgcacctgcagtggaccgtgcacaacctgccctaccaccaggagctgaagatggtgttccagatccagatcagcagaatcgagaccagcaacgtgatctgggtgggcaactacagcaccaccgtgaagtggaaccaggtgctgcactggagctgggagagcgagctgcccctggagtgcgccacccacttcgtgagaatcaagagcctggtggacgacgccaagttccccgagcccaacttctggagcaactggagcagctgggaggaggtgagcgtgcaggacagcaccggccaggacatcctgttcgtgttccccaaggacaagctggtggaggagggcaccaacgtgaccatctgctacgtgagcagaaacatccagaacaacgtgagctgctacctggagggcaagcagatccacggcgagcagctggacccccacgtgaccgccttcaacctgaacagcgtgcccttcatcagaaacaagggcaccaacatctactgcgaggccagccagggcaacgtgagcgagggcatgaagggcatcgtgctgttcgtgagcaaggtgctggaggagcccaaggacttcagctgcgagaccgaggacttcaagaccctgcactgcacctgggaccccggcaccgacaccgccctgggctggagcaagcagcccagccagagctacaccctgttcgagagcttcagcggcgagaagaagctgtgcacccacaagaactggtgcaactggcagatcacccaggacagccaggagacctacaacttcaccctgatcgccgagaactacctgagaaagagaagcgtgaacatcctgttcaacctgacccacagagtgtacctgatgaaccccttcagcgtgaacttcgagaacgtgaacgccaccaacgccatcatgacctggaaggtgcacagcatcagaaacaacttcacctacctgtgccagatcgagctgcacggcgagggcaagatgatgcagtacaacgtgagcatcaaggtgaacggcgagtacttcctgagcgagctggagcccgccaccgagtacatggccagagtgagatgcgccgacgccagccacttctggaagtggagcgagtggagcggccagaacttcaccaccctggaggccgcccccagcgaggcccccgacgtgtggagaatcgtgagcctggagcccggcaaccacaccgtgaccctgttctggaagcccctgagcaagctgcacgccaacggcaagatcctgttctacaacgtggtggtggagaacctggacaagcccagcagcagcgagctgcacagcatccccgcccccgccaacagcaccaagctgatcctggacagatgcagctaccagatctgcgtgatcgccaacaacagcgtgggcgccagccccgccagcgtgatcgtgatcagcgccgaccccgagaacaaggaggtggaggaggagagaatcgccggcaccgagggcggcttcagcctgagctggaagccccagcccggcgacgtgatcggctacgtggtggactggtgcgaccacacccaggacgtgctgggcgacttccagtggaagaacgtgggccccaacaccaccagcaccgtgatcagcaccgacgccttcagacccggcgtgagatacgacttcagaatctacggcctgagcaccaagagaatcgcctgcctgctggagaagaagaccggctacagccaggagctggcccccagcgacaacccccacgtgctggtggacaccctgaccagccacagcttcaccctgagctggaaggactacagcaccgagagccagcccggcttcatccagggctaccacgtgtacctgaagagcaaggccagacagtgccaccccagattcgagaaggccgtgctgagcgacggcagcgagtgctgcaagtacaagatcgacaaccccgaggagaaggccctgatcgtggacaacctgaagcccgagagcttctacgagttcttcatcacccccttcaccagcgccggcgagggccccagcgccaccttcaccaaggtgaccacccccgacgagcacagcagcatgctgatccacatcctgctgcccatggtgttctgcgtgctgctgatcatggtgatgtgctacctgaagagccagtggatcaaggagacctgctaccccgacatccccgacccctacaagagcagcatcctgagcctgatcaagttcaaggagaacccccacctgatcatcatgaacgtgagcgactgcatccccgacgccatcgaggtggtgagcaagcccgagggcaccaagatccagttcctgggcaccagaaagagcctgaccgagaccgagctgaccaagcccaactacctgtacctgctgcccaccgagaagaaccacagcggccccggcccctgcatctgcttcgagaacctgacctacaaccaggccgccagcgacagcggcagctgcggccacgtgcccgtgagccccaaggcccccagcatgctgggcctgatgaccagccccgagaacgtgctgaaggccctggagaagaactacatgaacagcctgggcgagatccccgccggcgagaccagcctgaactacgtgagccagctggccagccccatgttcggcgacaaggacagcctgcccaccaaccccgtggaggccccccactgcagcgagtacaagatgcagatggccgtgagcctgagactggccctgcccccccccaccgagaacagcagcctgagcagcatcaccctgctggaccccggcgagcactactgctag

SEQ ID NO: 142688 - protein, 310 aa, Artificial Sequence
  derived and/or modified sequence
MGILSFLPVLATESDWADCKSPQPWGHMLLWTAVLFLAPVAGTPAAPPKAVLKLEPQWINVLQEDSVTLTCRGTHSPESDSIQWFHNGNLIPTHTQPSYRFKANNNDSGEYTCQTGQTSLSDPVHLTVLSEWLVLQTPHLEFQEGETIVLRCHSWKDKPLVKVTFFQNGKSKKFSRSDPNFSIPQANHSHSGDYHCTGNIGYTLYSSKPVTITVQAPSSSPMGIIVAVVTGIAVAAIVAAVVALIYCRKKRISALPGYPECREMGETLPEKPANPTNPDEADKVGAENTITYSLLMHPDALEEPDDQNRI

SEQ ID NO: 142689 - DNA, 2115 bp, Artificial Sequence
  derived and/or modified sequence
gccctctagggtagaatccgccaagctttgagagaaggctgtgactgctgtgctctgggcgccagctcgctccagggagtgatgggaatcctgtcattcttacctgtccttgccactgagagtgactgggctgactgcaagtccccccagccttggggtcatatgcttctgtggacagctgtgctattcctggctcctgttgctgggacacctgcagctcccccaaaggctgtgctgaaactcgagccccagtggatcaacgtgctccaggaggactctgtgactctgacatgccgggggactcacagccctgagagcgactccattcagtggttccacaatgggaatctcattcccacccacacgcagcccagctacaggttcaaggccaacaacaatgacagcggggagtacacgtgccagactggccagaccagcctcagcgaccctgtgcatctgactgtgctttctgagtggctggtgctccagacccctcacctggagttccaggagggagaaaccatcgtgctgaggtgccacagctggaaggacaagcctctggtcaaggtcacattcttccagaatggaaaatccaagaaattttcccgttcggatcccaacttctccatcccacaagcaaaccacagtcacagtggtgattaccactgcacaggaaacataggctacacgctgtactcatccaagcctgtgaccatcactgtccaagctcccagctcttcaccgatggggatcattgtggctgtggtcactgggattgctgtagcggccattgttgctgctgtagtggccttgatctactgcaggaaaaagcggatttcagctctcccaggataccctgagtgcagggaaatgggagagaccctccctgagaaaccagccaatcccactaatcctgatgaggctgacaaagttggggctgagaacacaatcacctattcacttctcatgcacccggatgctctggaagagcctgatgaccagaaccgtatttagtctccattgtcttgcattgggatttgagaagaaaatcagagagggaagatctggtatttcctggcctaaattccccttggggaggacagggagatgctgcagttccaaaagagaaggtttcttccagagtcatctacctgagtcctgaagctccctgtcctgaaagccacagacaatatggtcccaaataaccgactgcaccttctgtgcttcagctcttcttgacatcaaggctcttccgttccacatccacacagccaatccaattaatcaaaccactgttattaacagataatagcaacttgggaaatgcttatgttacaggttacgtgagaacaatcatgtaaatctatatgatttcagaaatgttaaaatagactaacctctaccagcacattaaaagtgattgtttctgggtgataaaattattgatgatttttattttctttatttttctataaagatcatatattacttttataataaaacattataaaaacaacattctgtttaccttttcaaggctgtattggttggagtgtagactgaactgcctggggtctgtttctcttcagtgatgagactcttaggaaggcaggaatggataggatagggggaggagaggagagatggggatttagaatgtagagtgagtgccccttttcttaaaactgaatacagtcacgcaccacataatgatgtttagttcaacaacagactgcatatatgatggtgatcccataaaattataataccatatttctattgtaccttttctattcctatgtttagatatatgagtacttaccattgtgttacaattgcctaaagtattcagtacagtagcatgctgtacaggtttgtagcctaggggcaataggctatacgctacagcctaggtgtgtagtaggccacaccatttaggtttgtataagtacctgctatgatgttcacacaacaaaattgcctgcatttctcaaaatgtatccccatatttcaacaatgcatgactgtactcttctgccaatgaccttgtattcttgtttccatgtcttcttctctttcctcctatggcaaataaaacactgttttgcaacacaa

SEQ ID NO: 142690 - DNA, 2157 bp, Artificial Sequence
  derived and/or modified sequence
agaacatttctttttcacttcccctttcagactccagaatttgtttgccctctagggtagaatccgccaagctttgagagaaggctgtgactgctgtgctctgggcgccagctcgctccagggagtgatgggaatcctgtcattcttacctgtccttgccactgagagtgactgggctgactgcaagtccccccagccttggggtcatatgcttctgtggacagctgtgctattcctggctcctgttgctgggacacctgcagctcccccaaaggctgtgctgaaactcgagccccagtggatcaacgtgctccaggaggactctgtgactctgacatgccgggggactcacagccctgagagcgactccattcagtggttccacaatgggaatctcattcccacccacacgcagcccagctacaggttcaaggccaacaacaatgacagcggggagtacacgtgccagactggccagaccagcctcagcgaccctgtgcatctgactgtgctttctgagtggctggtgctccagacccctcacctggagttccaggagggagaaaccatcgtgctgaggtgccacagctggaaggacaagcctctggtcaaggtcacattcttccagaatggaaaatccaagaaattttcccgttcggatcccaacttctccatcccacaagcaaaccacagtcacagtggtgattaccactgcacaggaaacataggctacacgctgtactcatccaagcctgtgaccatcactgtccaagctcccagctcttcaccgatggggatcattgtggctgtggtcactgggattgctgtagcggccattgttgctgctgtagtggccttgatctactgcaggaaaaagcggatttcagctctcccaggataccctgagtgcagggaaatgggagagaccctccctgagaaaccagccaatcccactaatcctgatgaggctgacaaagttggggctgagaacacaatcacctattcacttctcatgcacccggatgctctggaagagcctgatgaccagaaccgtatttagtctccattgtcttgcattgggatttgagaagaaaatcagagagggaagatctggtatttcctggcctaaattccccttggggaggacagggagatgctgcagttccaaaagagaaggtttcttccagagtcatctacctgagtcctgaagctccctgtcctgaaagccacagacaatatggtcccaaataaccgactgcaccttctgtgcttcagctcttcttgacatcaaggctcttccgttccacatccacacagccaatccaattaatcaaaccactgttattaacagataatagcaacttgggaaatgcttatgttacaggttacgtgagaacaatcatgtaaatctatatgatttcagaaatgttaaaatagactaacctctaccagcacattaaaagtgattgtttctgggtgataaaattattgatgatttttattttctttatttttctataaagatcatatattacttttataataaaacattataaaaacaacattctgtttaccttttcaaggctgtattggttggagtgtagactgaactgcctggggtctgtttctcttcagtgatgagactcttaggaaggcaggaatggataggatagggggaggagaggagagatggggatttagaatgtagagtgagtgccccttttcttaaaactgaatacagtcacgcaccacataatgatgtttagttcaacaacagactgcatatatgatggtgatcccataaaattataataccatatttctattgtaccttttctattcctatgtttagatatatgagtacttaccattgtgttacaattgcctaaagtattcagtacagtagcatgctgtacaggtttgtagcctaggggcaataggctatacgctacagcctaggtgtgtagtaggccacaccatttaggtttgtataagtacctgctatgatgttcacacaacaaaattgcctgcatttctcaaaatgtatccccatatttcaacaatgcatgactgtactcttctgccaatgaccttgtattcttgtttccatgtcttcttctctttcctcctatggcaaataaaacactgttttgcaac

SEQ ID NO: 142691 - DNA, 933 bp, Artificial Sequence
  derived and/or modified sequence
atgggcattctatcttttcttcctgttctggctaccgaatctgattgggccgactgcaagtcaccgcagccctgggggcacatgctgctgtggaccgctgtcttatttctggctcccgtggccggtaccccggcggcgccaccaaaggcagtgctgaaattggaaccccaatggattaatgtgttgcaggaggattctgttactttaacttgccgcggcacacactctcctgaaagcgacagtatccagtggttccataatggcaacctgatcccgacccatacacagccgtcctaccggttcaaagccaacaataacgactctggcgagtatacctgccagacaggccaaactagtttatctgaccctgtccacctcactgtcctcagcgaatggttggtgcttcagacgccccatctggaattccaggaaggagaaaccatcgtcctgcgatgccactcttggaaggataaacccctggtgaaggtgaccttcttccaaaatggaaagtcaaagaaattctctcgcagtgatcccaattttagcatacctcaggcaaatcatagtcacagcggggattatcattgtacaggaaatattggttataccctgtattctagtaaaccagtcacaatcaccgtgcaagctccatcctcttccccgatggggattatcgtggccgtcgtgaccggcattgccgtcgcagctattgttgctgctgtggtggcgctgatatattgccggaagaaacgcatttcggcgctcccaggttacccggagtgtcgcgaaatgggcgagacccttcccgagaaacccgccaaccccacaaacccggatgaggctgataaggtcggggccgagaatacaatcacatatagcctgctgatgcatcctgatgcactggaagaacctgacgatcagaataggatctag

SEQ ID NO: 142692 - DNA, 933 bp, Artificial Sequence
  derived and/or modified sequence
atggggatccttagttttctccctgttctggcaaccgagtcagactgggctgactgcaagagcccacagccatggggccacatgctgctgtggaccgccgttctgttcctagcacccgttgcagggacacccgcggccccaccaaaagctgtgctgaaacttgaaccgcaatggatcaatgttctacaggaagactcagtgactctgacttgtagggggacacatagccctgagtcagactctattcaatggttccacaatgggaacttgattccaacccacacgcagcccagctataggtttaaggcaaataacaacgatagcggagagtatacctgccagacaggtcagacttccttgtccgatcccgtccatctgaccgtcctatcagagtggcttgtgctccagacaccgcacttggaatttcaggagggagagaccatcgtcctgcgatgccattcatggaaggacaagcccctggttaaagtgactttcttccagaacggcaagtcaaaaaagttcagccgatctgacccaaattttagtatcccgcaagctaatcactcccactcaggggactaccattgtacggggaatattgggtacactttgtattcgtccaaacccgtcactatcactgtacaagctccatcttctagcccaatgggcatcattgtggctgtcgtgaccgggattgcggtagccgccatagtggctgccgttgtcgcactgatctattgcaggaagaagcgcatcagcgcattacctggatatcccgaatgtcgggaaatgggcgagacgttgccagaaaagccagcaaaccccaccaaccccgatgaggcagataaggtcggggccgagaacactattacttactccctgctcatgcatccagacgcgctggaagagcctgacgaccagaaccggatctag

SEQ ID NO: 142693 - DNA, 933 bp, Artificial Sequence
  derived and/or modified sequence
atgggcatcctgtccttcctgcctgtgctggccacagaaagtgactgggccgactgcaagagcccccagccctggggccacatgctgctgtggacagctgtgctcttcctggcccctgtggccggcaccccagctgccccacccaaggctgtgctgaagctggagccccagtggatcaacgtgctgcaggaggacagcgtgaccctgacctgccggggcacccacagccctgagagtgacagcatccagtggttccacaatggaaacctgatccccacccacacccagcccagctaccgcttcaaggccaacaacaatgacagcggggagtacacctgccagacaggccagaccagcctgagtgaccctgtgcacctgactgtgctgtctgagtggctggtgctgcagaccccccacctggagttccaggagggggagaccatcgtgctgcgctgccacagctggaaggacaagcccctggtgaaggtgaccttcttccagaatggcaagagcaagaagttcagcagaagtgaccccaacttcagcatcccccaggccaaccacagccacagcggggactaccactgcaccggcaacatcggctacaccctgtacagcagcaagcctgtgaccatcaccgtgcaggcccccagcagcagccccatgggcatcatcgtggccgtggtgactggaattgctgtggccgccatcgtggccgctgtggtggccctgatctactgcaggaagaagaggatcagcgccctgcccggctacccagagtgccgggagatgggagagaccctgcctgagaagccagccaaccccaccaacccagatgaagctgacaaggtgggcgctgagaacaccatcacctacagcctgctgatgcacccagatgccctggaggagccagatgaccagaaccgcatctag

SEQ ID NO: 142694 - DNA, 933 bp, Artificial Sequence
  derived and/or modified sequence
atgggcatcctgagcttcctgcccgtgctggccaccgagagcgactgggctgattgtaaatcaccccagccctggggacacatgctcctatggactgcggtgctcttcctggccccagtggcaggtacccctgccgcgccaccaaaggccgtgcttaaactcgaaccgcagtggatcaacgtactccaggaagacagcgtcaccctgacatgcaggggcacccatagtccagaatccgactcaattcagtggttccacaatggaaatctcattcctacacatactcagccttcctacaggttcaaggctaataataatgattctggcgagtacacgtgccagaccgggcaaacctccctgtccgatcctgtacacctcaccgtgctgagcgagtggctagtcctgcagacacctcatttggaattccaagagggagagactattgtcctgaggtgtcattcgtggaaagacaaacccctggtgaaggtcactttctttcaaaacggcaagtcaaagaaattttctcggagcgatcccaacttttccattcctcaggctaatcattcgcattcaggtgactatcattgcacaggaaacattggatatacactgtattcctccaaaccggttaccatcactgtacaggcaccgagctcttctcctatgggaatcattgtggctgtcgtcaccggcattgcagtggctgccattgtggcggccgtggtcgcacttatctactgcagaaagaagagaatcagcgccctgcctggctaccctgagtgcagagagatgggggagaccctcccggagaagcccgccaatccaacaaatcccgatgaggccgataaagttggagcggagaacaccattacttattccctgctgatgcatccagatgccctcgaagagcctgacgaccagaaccgcatctag

SEQ ID NO: 142695 - DNA, 933 bp, Artificial Sequence
  derived and/or modified sequence
atgggcatcctgagcttcctgcccgtgctggccaccgagagcgactgggctgactgcaagtccccgcagccttggggccacatgctcctctggaccgcagtccttttcctggccccagtcgcagggaccccagcagcgcccccgaaagcagtacttaaattggagcctcagtggattaacgtgcttcaggaagacagcgtgaccctgacatgccgaggaacacatagtcctgagtccgactccattcaatggttccataacggaaatctaattcccactcacacccagccatcgtaccgatttaaggcgaataacaacgactctggtgaatacacttgccagaccggacagactagtctctccgacccagtgcacctgacagttctgagcgaatggcttgtgctccagacccctcacttagaattccaggagggcgaaaccatagtgctgcgctgccatagctggaaggataaacctttggttaaggtcacattcttccagaacggtaagagtaagaaattctcaaggtcagacccaaatttctcaatccctcaggctaatcactctcatagtggcgattaccactgtactggtaatataggatacacgctgtacagctccaagcctgtgaccatcacagtacaagcccccagtagttcgccaatgggaattatagtagctgtcgtgaccggcattgctgtggcagctatcgttgccgctgtggtagctctgatctattgcaggaaaaagagaatctccgcactgcccggataccctgaatgccgtgagatgggcgaaaccctgccagagaaaccagcaaatcccacaaacccagatgaggctgataaggtgggcgccgaaaatacaataacatactccctgttgatgcatcccgatgctcttgaagagccagacgatcagaacaggatctag

SEQ ID NO: 142696 - DNA, 933 bp, Artificial Sequence
  derived and/or modified sequence
atgggtatcttgtcgttcctgcccgttctggccacagaaagtgactgggccgattgtaagtcaccccaaccatggggccacatgcttttgtggaccgcggtcctgtttttagctccagtggcaggtacgccagccgcacctccaaaggccgttttgaaacttgagccacaatggatcaacgtgctccaggaggactctgtcacacttacttgcagagggacgcacagtcccgagagtgattcaatccaatggttccataatggtaacctcattccaacccatacccaaccatcttatcgctttaaagccaacaacaatgattccggggagtatacctgccagacaggacagacttcactcagcgatcctgtacacctgaccgttcttagtgaatggctggtgttgcaaactcctcatctggaatttcaggaaggggagacaatcgttttacggtgccactcttggaaagacaaacctctggtaaaagtgacattctttcagaatgggaaaagcaagaagttctctaggagcgatccgaacttctcaattcctcaggctaaccattcacacagcggagactaccattgcaccgggaatataggctataccctgtattcatccaagccggtgactattactgtccaggcccctagttctagtccaatgggtatcatagttgccgtcgtcactgggattgcagttgcagccatcgtagccgctgtggttgctcttatctattgcaggaaaaaacgtatcagtgcacttcctggttaccccgaatgtagagaaatgggggagactttgccagaaaagccagcaaatcccaccaaccctgatgaggccgacaaagtgggcgctgaaaacaccattacctactctctgctgatgcaccccgacgccctggaggaacctgacgaccagaaccgaatatag

SEQ ID NO: 142697 - DNA, 933 bp, Artificial Sequence
  derived and/or modified sequence
atggggatactgtccttcctcccggtcctggcaacagagtcggactgggctgactgtaaatctccacagccttgggggcacatgcttctctggactgcggtcctgtttttggcgccagtcgccggaacgccagctgctccacctaaagcagtgctcaagctcgaaccacaatggataaacgttcttcaagaagactcggttacactgacctgtcgaggcacgcacagccccgaaagtgattcgatacagtggttccacaacggcaacctgatcccgactcacacccagccgtcttatcgattcaaagctaacaataacgacagcggagagtatacatgccagaccggacagaccagcttgtcagaccctgtccacctgacagtgttgagtgagtggctggtgcttcagacaccccatctcgaatttcaagaaggagagactatcgttttaagatgtcattcctggaaggacaaacccttggtaaaagtgacattctttcaaaatggcaagtcaaagaaattttctagaagcgacccaaatttcagcatccctcaagccaaccatagccattctggcgactatcattgcacaggcaacatcggctacactctctacagctctaagccagtcaccatcaccgtgcaggcccctagcagctctcccatgggaatcattgttgcagtggtgacaggtatcgctgtggcagccatagtggctgctgtggtggccctgatctactgccgaaagaagcgtatcagtgccctgcctggttatcccgaatgcagagagatgggtgagaccctaccagaaaagcccgcaaaccctactaatcctgacgaggccgataaggttggtgccgagaacaccattacatatagtcttctgatgcaccctgatgccctagaagaaccagacgaccagaaccggatctag

SEQ ID NO: 142698 - DNA, 933 bp, Artificial Sequence
  derived and/or modified sequence
atgggcatcctgagcttcctgcccgtgctggccaccgagagcgactgggccgactgcaagagcccccagccctggggccacatgctgctgtggaccgccgtgctgttcctggcccccgtggccggcacccccgccgccccccccaaggccgtgctgaagctggagccccagtggatcaacgtgctgcaggaggacagcgtgaccctgacctgcagaggcacccacagccccgagagcgacagcatccagtggttccacaacggcaacctgatccccacccacacccagcccagctacagattcaaggccaacaacaacgacagcggcgagtacacctgccagaccggccagaccagcctgagcgaccccgtgcacctgaccgtgctgagcgagtggctggtgctgcagaccccccacctggagttccaggagggcgagaccatcgtgctgagatgccacagctggaaggacaagcccctggtgaaggtgaccttcttccagaacggcaagagcaagaagttcagcagaagcgaccccaacttcagcatcccccaggccaaccacagccacagcggcgactaccactgcaccggcaacatcggctacaccctgtacagcagcaagcccgtgaccatcaccgtgcaggcccccagcagcagccccatgggcatcatcgtggccgtggtgaccggcatcgccgtggccgccatcgtggccgccgtggtggccctgatctactgcagaaagaagagaatcagcgccctgcccggctaccccgagtgcagagagatgggcgagaccctgcccgagaagcccgccaaccccaccaaccccgacgaggccgacaaggtgggcgccgagaacaccatcacctacagcctgctgatgcaccccgacgccctggaggagcccgacgaccagaacagaatctag

SEQ ID NO: 142699 - protein, 226 aa, Artificial Sequence
  derived and/or modified sequence
MDWGTLQTILGGVNKHSTSIGKIWLTVLFIFRIMILVVAAKEVWGDEQADFVCNTLQPGCKNVCYDHYFPISHIRLWALQLIFVSTPALLVAMHVAYRRHEKKRKFIKGEIKSEFKDIEEIKTQKVRIEGSLWWTYTSSIFFRVIFEAAFMYVFYVMYDGFSMQRLVKCNAWPCPNTVDCFVSRPTEKTVFTVFMIAVSGICILLNVTELCYLLIRYCSGKSKKPV

SEQ ID NO: 142700 - DNA, 681 bp, Artificial Sequence
  derived and/or modified sequence
atggactggggcactctgcagactatcctgggaggggtcaacaaacacagcacctccattggaaagatctggttgacagtgctgttcatatttcggatcatgatcctggtcgtcgccgccaaggaggtctggggggacgaacaggccgacttcgtctgtaacaccctccagcccggctgcaagaacgtgtgctatgaccactacttccctattagccatatccgattgtgggctctgcagttgattttcgtttctacccccgctcttctggtggccatgcacgtcgcttacagaaggcacgaaaagaagaggaaattcattaaaggagagataaaatccgagttcaaggacatcgaggagatcaagacacaaaaggtcagaattgaaggctctctatggtggacctatacatcctccatcttttttagggtgattttcgaagccgctttcatgtatgtgttttacgtaatgtacgacggtttctcgatgcaacggctcgttaaatgtaatgcctggccatgtccaaatactgtggactgctttgtgtctaggcccactgagaagaccgtgtttacagtctttatgatagctgtgagcggaatttgtatacttctgaacgtgaccgaactatgttacttgttgatcagatactgctccggaaaaagtaagaagccagtgtag

SEQ ID NO: 142701 - DNA, 681 bp, Artificial Sequence
  derived and/or modified sequence
atggactgggggactttacaaacaatcctgggcggcgtgaacaaacattctacgagcattggaaagatttggctgacagtgctttttatctttagaatcatgatcttggtggtggcagctaaagaggtctggggcgacgaacaggctgactttgtgtgcaacacattacagcccggctgtaaaaacgtctgctatgaccactacttcccgatctctcatatcaggttatgggccctgcagttaatcttcgtgtcaaccccagccctgttagttgccatgcacgtggcctaccgcagacatgagaagaagcgcaaatttattaagggcgagatcaagtcagaattcaaggacatcgaagaaatcaagacccagaaggtgcgaattgaaggctcattgtggtggacttacacatcaagcattttttttagagtgatcttcgaggcagcttttatgtatgtcttttatgtgatgtacgatggcttttctatgcagcgcctggtaaagtgcaacgcatggccatgccccaataccgttgattgtttcgtgtccagacccaccgagaaaactgtgtttaccgtcttcatgatcgctgtctcagggatctgcatcttgctgaacgtcacagaattgtgttatctgttaattcgttattgtagtggcaaaagcaagaaaccagtttag

SEQ ID NO: 142702 - DNA, 2309 bp, Artificial Sequence
  derived and/or modified sequence
atttaatcctatgacaaactaagttggttctgtcttcacctgttttggtgaggttgtgtaagagttggtgtttgctcaggaagagatttaagcatgcttgcttacccagactcagagaagtctccctgttctgtcctagctagtgattcctgtgttgtgtgcattcgtcttttccagagcaaaccgcccagagtagaagatggattggggcacgctgcagacgatcctggggggtgtgaacaaacactccaccagcattggaaagatctggctcaccgtcctcttcatttttcgcattatgatcctcgttgtggctgcaaaggaggtgtggggagatgagcaggccgactttgtctgcaacaccctgcagccaggctgcaagaacgtgtgctacgatcactacttccccatctcccacatccggctatgggccctgcagctgatcttcgtgtccacgccagcgctcctagtggccatgcacgtggcctaccggagacatgagaagaagaggaagttcatcaagggggagataaagagtgaatttaaggacatcgaggagatcaaaacccagaaggtccgcatcgaaggctccctgtggtggacctacacaagcagcatcttcttccgggtcatcttcgaagccgccttcatgtacgtcttctatgtcatgtacgacggcttctccatgcagcggctggtgaagtgcaacgcctggccttgtcccaacactgtggactgctttgtgtcccggcccacggagaagactgtcttcacagtgttcatgattgcagtgtctggaatttgcatcctgctgaatgtcactgaattgtgttatttgctaattagatattgttctgggaagtcaaaaaagccagtttaacgcattgcccagttgttagattaagaaatagacagcatgagagggatgaggcaacccgtgctcagctgtcaaggctcagtcgctagcatttcccaacacaaagattctgaccttaaatgcaaccatttgaaacccctgtaggcctcaggtgaaactccagatgccacaatggagctctgctcccctaaagcctcaaaacaaaggcctaattctatgcctgtcttaattttctttcacttaagttagttccactgagaccccaggctgttaggggttattggtgtaaggtactttcatattttaaacagaggatatcggcatttgtttctttctctgaggacaagagaaaaaagccaggttccacagaggacacagagaaggtttgggtgtcctcctggggttctttttgccaactttccccacgttaaaggtgaacattggttctttcatttgctttggaagttttaatctctaacagtggacaaagttaccagtgccttaaactctgttacactttttggaagtgaaaactttgtagtatgataggttattttgatgtaaagatgttctggataccattatatgttccccctgtttcagaggctcagattgtaatatgtaaatggtatgtcattcgctactatgatttaatttgaaatatggtcttttggttatgaatactttgcagcacagctgagaggctgtctgttgtattcattgtggtcatagcacctaacaacattgtagcctcaatcgagtgagacagactagaagttcctagtgatggcttatgatagcaaatggcctcatgtcaaatatttagatgtaattttgtgtaagaaatacagactggatgtaccaccaactactacctgtaatgacaggcctgtccaacacatctcccttttccatgactgtggtagccagcatcggaaagaacgctgatttaaagaggtcgcttgggaattttattgacacagtaccatttaatggggaggacaaaatggggcaggggagggagaagtttctgtcgttaaaaacagatttggaaagactggactctaaagtctgttgattaaagatgagctttgtctacttcaaaagtttgtttgcttaccccttcagcctccaattttttaagtgaaaatatagctaataacatgtgaaaagaatagaagctaaggtttagataaatattgagcagatctataggaagattgaacctgaatattgccattatgcttgacatggtttccaaaaaatggtactccacatatttcagtgagggtaagtattttcctgttgtcaagaatagcattgtaaaagcattttgtaataataaagaatagctttaatgatatgcttgtaactaaaataattttgtaatgtatcaaatacatttaaaacattaaaatataatctctataat

SEQ ID NO: 142703 - DNA, 2250 bp, Artificial Sequence
  derived and/or modified sequence
cggagcccctcggcggcgcccggcccaggacccgcctaggagcgcaggagccccagcgcagagaccccaacgccgagacccccgccccggccccgccgcgcttcctcccgacgcagagcaaaccgcccagagtagaagatggattggggcacgctgcagacgatcctggggggtgtgaacaaacactccaccagcattggaaagatctggctcaccgtcctcttcatttttcgcattatgatcctcgttgtggctgcaaaggaggtgtggggagatgagcaggccgactttgtctgcaacaccctgcagccaggctgcaagaacgtgtgctacgatcactacttccccatctcccacatccggctatgggccctgcagctgatcttcgtgtccacgccagcgctcctagtggccatgcacgtggcctaccggagacatgagaagaagaggaagttcatcaagggggagataaagagtgaatttaaggacatcgaggagatcaaaacccagaaggtccgcatcgaaggctccctgtggtggacctacacaagcagcatcttcttccgggtcatcttcgaagccgccttcatgtacgtcttctatgtcatgtacgacggcttctccatgcagcggctggtgaagtgcaacgcctggccttgtcccaacactgtggactgctttgtgtcccggcccacggagaagactgtcttcacagtgttcatgattgcagtgtctggaatttgcatcctgctgaatgtcactgaattgtgttatttgctaattagatattgttctgggaagtcaaaaaagccagtttaacgcattgcccagttgttagattaagaaatagacagcatgagagggatgaggcaacccgtgctcagctgtcaaggctcagtcgctagcatttcccaacacaaagattctgaccttaaatgcaaccatttgaaacccctgtaggcctcaggtgaaactccagatgccacaatggagctctgctcccctaaagcctcaaaacaaaggcctaattctatgcctgtcttaattttctttcacttaagttagttccactgagaccccaggctgttaggggttattggtgtaaggtactttcatattttaaacagaggatatcggcatttgtttctttctctgaggacaagagaaaaaagccaggttccacagaggacacagagaaggtttgggtgtcctcctggggttctttttgccaactttccccacgttaaaggtgaacattggttctttcatttgctttggaagttttaatctctaacagtggacaaagttaccagtgccttaaactctgttacactttttggaagtgaaaactttgtagtatgataggttattttgatgtaaagatgttctggataccattatatgttccccctgtttcagaggctcagattgtaatatgtaaatggtatgtcattcgctactatgatttaatttgaaatatggtcttttggttatgaatactttgcagcacagctgagaggctgtctgttgtattcattgtggtcatagcacctaacaacattgtagcctcaatcgagtgagacagactagaagttcctagtgatggcttatgatagcaaatggcctcatgtcaaatatttagatgtaattttgtgtaagaaatacagactggatgtaccaccaactactacctgtaatgacaggcctgtccaacacatctcccttttccatgactgtggtagccagcatcggaaagaacgctgatttaaagaggtcgcttgggaattttattgacacagtaccatttaatggggaggacaaaatggggcaggggagggagaagtttctgtcgttaaaaacagatttggaaagactggactctaaagtctgttgattaaagatgagctttgtctacttcaaaagtttgtttgcttaccccttcagcctccaattttttaagtgaaaatatagctaataacatgtgaaaagaatagaagctaaggtttagataaatattgagcagatctataggaagattgaacctgaatattgccattatgcttgacatggtttccaaaaaatggtactccacatatttcagtgagggtaagtattttcctgttgtcaagaatagcattgtaaaagcattttgtaataataaagaatagctttaatgatatgcttgtaactaaaataattttgtaatgtatcaaatacatttaaaacattaaaatataatctctataataa

SEQ ID NO: 142704 - DNA, 681 bp, Artificial Sequence
  derived and/or modified sequence
atggactggggcaccctgcagaccatcctgggcggcgtgaacaagcacagcaccagcatcggcaagatctggctgactgtgctcttcatcttccgcatcatgatcctggtggtggccgccaaggaggtgtggggagatgagcaggccgactttgtgtgcaacaccctgcagcccggctgcaagaatgtgtgctatgaccactacttccccatcagccacatccggctgtgggccctgcagctgatctttgtgtccaccccagccctgctggtggccatgcacgtggcctacagaagacatgagaagaagaggaagttcatcaagggggagatcaagtctgagttcaaggacatcgaggagatcaagacccagaaggtgcgcatcgagggcagcctgtggtggacctacaccagcagcatcttcttccgggtcatctttgaggccgccttcatgtatgtgttctacgtgatgtatgatggcttctccatgcagaggctggtgaagtgcaatgcctggccctgccccaacacagtggactgctttgtgtcccggcccacagagaagacagtgttcaccgtcttcatgattgctgtgtctggcatctgcatcctgctgaatgtgacagagctgtgctacctgctgatccgctactgcagcggcaagagcaagaagcctgtgtag

SEQ ID NO: 142705 - DNA, 681 bp, Artificial Sequence
  derived and/or modified sequence
atggactggggcaccctgcagaccatcctgggcggcgtgaacaagcactctacctctattggtaagatatggctgacagtcctctttattttccgcatcatgattcttgtggtggctgctaaggaggtctggggagatgagcaggctgatttcgtttgcaatacgctgcagccgggatgtaagaacgtgtgttatgaccactactttcccatttcccacatccggttatgggcactgcagctgatctttgtaagcaccccagctttgcttgtagctatgcacgtggcatataggaggcacgaaaaaaagcgcaaattcatcaaaggcgagatcaagagcgagtttaaggacatagaggaaatcaagacgcagaaggtgagaattgaaggttccctgtggtggacttacacaagttctatttttttcagagttatattcgaggcggccttcatgtacgtcttctacgtcatgtatgacggtttcagcatgcagcgtctcgtcaaatgcaatgcctggccgtgtcccaatactgtggactgtttcgttagcagacccacggaaaaaactgtgttcactgtgtttatgatcgcggtgtcagggatctgtatactgctaaacgttacagagttatgctacctcctgatccgctattgcagcggtaagtctaagaagcccgtgtag

SEQ ID NO: 142706 - DNA, 681 bp, Artificial Sequence
  derived and/or modified sequence
atggactggggcaccctgcagaccatcctgggcggcgtgaacaagcattcaacaagcattggcaagatctggttaaccgttttatttatctttaggattatgattctggttgtggcagctaaggaagtgtggggggacgagcaagctgacttcgtctgtaataccttacagccggggtgtaaaaatgtgtgctatgatcactactttccgatcagccacattcggctttgggctttacagctcatattcgtgtcgactcctgcattactcgtggccatgcacgtagcgtacaggagacacgaaaaaaagaggaaatttatcaaaggcgaaattaaaagcgaatttaaggacatcgaggaaatcaagacgcagaaggtgcggattgaaggtagtctatggtggacatacacatcctcgattttcttccgcgttattttcgaggcagccttcatgtacgtcttttatgtgatgtatgatggattttctatgcagaggctcgtcaagtgtaacgcttggccctgccctaacaccgtagactgcttcgtgtcaagacctaccgagaaaacagttttcaccgtctttatgattgcagtctcaggcatttgcattttgctgaatgtcaccgagttgtgctatcttctgattcggtattgctctgggaagtccaaaaagcccgtgtag

SEQ ID NO: 142707 - DNA, 681 bp, Artificial Sequence
  derived and/or modified sequence
atggactgggggaccctgcagaccatcctcgggggagtcaacaaacactccactagcattgggaagatctggctgactgttctcttcatcttccggattatgatcctggtagtcgccgcaaaagaagtgtggggcgacgagcaggcagatttcgtgtgtaacacattgcaacccggttgcaaaaatgtgtgttacgatcactactttcccatatcccatatcaggctgtgggctctgcaactgattttcgtgagcacgccagccctgttggtggccatgcacgtggcctaccgaagacacgagaagaaaaggaaattcatcaagggagagattaagtcagagtttaaggatatcgaagaaatcaagacccagaaggttcgaattgaaggctccctgtggtggacctacacatcctcaatcttctttagagtcatcttcgaagctgcttttatgtacgtgttctatgttatgtacgacgggtttagtatgcagcggcttgtgaaatgcaacgcttggccctgtcccaacacagtggattgttttgttagccgccctacagagaagaccgtgttcactgtgtttatgatcgctgtctcggggatttgcattcttctgaatgtaaccgagctctgttacctccttattcgctactgctccggtaaatccaagaaaccagtctag

SEQ ID NO: 142708 - DNA, 681 bp, Artificial Sequence
  derived and/or modified sequence
atggactggggaaccctccagaccatccttggcggagttaacaagcactctacctctattgggaagatctggctgactgtgctcttcatcttcagaataatgatcctggtggtggcagccaaggaggtgtggggcgacgagcaggcagacttcgtttgtaacacattacagccaggatgcaaaaacgtgtgctacgaccattacttccccataagccatatccggctatgggctcttcaactgatattcgtaagcacccctgctcttctcgtggccatgcacgttgcttaccggcgacatgaaaaaaagagaaagtttataaaaggggagataaaatctgagttcaaggatattgaggagataaaaacgcaaaaagtgcggatcgagggaagtctgtggtggacatacacctcaagtattttcttcagggtgatttttgaggcggcttttatgtatgtgttctacgtaatgtatgacggattttcaatgcagcgacttgtgaaatgcaacgcctggccatgccctaacacggtggattgttttgtgagccgcccaacagaaaaaactgtgttcactgtgtttatgattgccgtgtctggcatctgtatactgctcaacgttactgaactctgttaccttcttataaggtactgttcaggcaagagcaaaaagcccgtgtag

SEQ ID NO: 142709 - DNA, 681 bp, Artificial Sequence
  derived and/or modified sequence
atggactggggcaccctgcagaccatcctgggcggcgtgaacaagcacagcaccagcatcggcaagatctggctgaccgtgctgttcatcttcagaatcatgatcctggtggtggccgccaaggaggtgtggggcgacgagcaggccgacttcgtgtgcaacaccctgcagcccggctgcaagaacgtgtgctacgaccactacttccccatcagccacatcagactgtgggccctgcagctgatcttcgtgagcacccccgccctgctggtggccatgcacgtggcctacagaagacacgagaagaagagaaagttcatcaagggcgagatcaagagcgagttcaaggacatcgaggagatcaagacccagaaggtgagaatcgagggcagcctgtggtggacctacaccagcagcatcttcttcagagtgatcttcgaggccgccttcatgtacgtgttctacgtgatgtacgacggcttcagcatgcagagactggtgaagtgcaacgcctggccctgccccaacaccgtggactgcttcgtgagcagacccaccgagaagaccgtgttcaccgtgttcatgatcgccgtgagcggcatctgcatcctgctgaacgtgaccgagctgtgctacctgctgatcagatactgcagcggcaagagcaagaagcccgtgtag

SEQ ID NO: 142710 - protein, 3685 aa, Artificial Sequence
  derived and/or modified sequence
MLWWEEVEDCYEREDVQKKTFTKWVNAQFSKFGKQHIENLFSDLQDGRRLLDLLEGLTGQKLPKEKGSTRVHALNNVNKALRVLQNNNVDLVNIGSTDIVDGNHKLTLGLIWNIILHWQVKNVMKNIMAGLQQTNSEKILLSWVRQSTRNYPQVNVINFTTSWSDGLALNALIHSHRPDLFDWNSVVCQQSATQRLEHAFNIARYQLGIEKLLDPEDVDTTYPDKKSILMYITSLFQVLPQQVSIEAIQEVEMLPRPPKVTKEEHFQLHHQMHYSQQITVSLAQGYERTSSPKPRFKSYAYTQAAYVTTSDPTRSPFPSQHLEAPEDKSFGSSLMESEVNLDRYQTALEEVLSWLLSAEDTLQAQGEISNDVEVVKDQFHTHEGYMMDLTAHQGRVGNILQLGSKLIGTGKLSEDEETEVQEQMNLLNSRWECLRVASMEKQSNLHRVLMDLQNQKLKELNDWLTKTEERTRKMEEEPLGPDLEDLKRQVQQHKVLQEDLEQEQVRVNSLTHMVVVVDESSGDHATAALEEQLKVLGDRWANICRWTEDRWVLLQDILLKWQRLTEEQCLFSAWLSEKEDAVNKIHTTGFKDQNEMLSSLQKLAVLKADLEKKKQSMGKLYSLKQDLLSTLKNKSVTQKTEAWLDNFARCWDNLVQKLEKSTAQISQAVTTTQPSLTQTTVMETVTTVTTREQILVKHAQEELPPPPPQKKRQITVDSEIRKRLDVDITELHSWITRSEAVLQSPEFAIFRKEGNFSDLKEKVNAIEREKAEKFRKLQDASRSAQALVEQMVNEGVNADSIKQASEQLNSRWIEFCQLLSERLNWLEYQNNIIAFYNQLQQLEQMTTTAENWLKIQPTTPSEPTAIKSQLKICKDEVNRLSDLQPQIERLKIQSIALKEKGQGPMFLDADFVAFTNHFKQVFSDVQAREKELQTIFDTLPPMRYQETMSAIRTWVQQSETKLSIPQLSVTDYEIMEQRLGELQALQSSLQEQQSGLYYLSTTVKEMSKKAPSEISRKYQSEFEEIEGRWKKLSSQLVEHCQKLEEQMNKLRKIQNHIQTLKKWMAEVDVFLKEEWPALGDSEILKKQLKQCRLLVSDIQTIQPSLNSVNEGGQKIKNEAEPEFASRLETELKELNTQWDHMCQQVYARKEALKGGLEKTVSLQKDLSEMHEWMTQAEEEYLERDFEYKTPDELQKAVEEMKRAKEEAQQKEAKVKLLTESVNSVIAQAPPVAQEALKKELETLTTNYQWLCTRLNGKCKTLEEVWACWHELLSYLEKANKWLNEVEFKLKTTENIPGGAEEISEVLDSLENLMRHSEDNPNQIRILAQTLTDGGVMDELINEELETFNSRWRELHEEAVRRQKLLEQSIQSAQETEKSLHLIQESLTFIDKQLAAYIADKVDAAQMPQEAQKIQSDLTSHEISLEEMKKHNQGKEAAQRVLSQIDVAQKKLQDVSMKFRLFQKPANFEQRLQESKMILDEVKMHLPALETKSVEQEVVQSQLNHCVNLYKSLSEVKSEVEMVIKTGRQIVQKKQTENPKELDERVTALKLHYNELGAKVTERKQQLEKCLKLSRKMRKEMNVLTEWLAATDMELTKRSAVEGMPSNLDSEVAWGKATQKEIEKQKVHLKSITEVGEALKTVLGKKETLVEDKLSLLNSNWIAVTSRAEEWLNLLLEYQKHMETFDQNVDHITKWIIQADTLLDESEKKKPQQKEDVLKRLKAELNDIRPKVDSTRDQAANLMANRGDHCRKLVEPQISELNHRFAAISHRIKTGKASIPLKELEQFNSDIQKLLEPLEAEIQQGVNLKEEDFNKDMNEDNEGTVKELLQRGDNLQQRITDERKREEIKIKQQLLQTKHNALKDLRSQRRKKALEISHQWYQYKRQADDLLKCLDDIEKKLASLPEPRDERKIKEIDRELQKKKEELNAVRRQAEGLSEDGAAMAVEPTQIQLSKRWREIESKFAQFRRLNFAQIHTVREETMMVMTEDMPLEISYVPSTYLTEITHVSQALLEVEQLLNAPDLCAKDFEDLFKQEESLKNIKDSLQQSSGRIDIIHSKKTAALQSATPVERVKLQEALSQLDFQWEKVNKMYKDRQGRFDRSVEKWRRFHYDIKIFNQWLTEAEQFLRKTQIPENWEHAKYKWYLKELQDGIGQRQTVVRTLNATGEEIIQQSSKTDASILQEKLGSLNLRWQEVCKQLSDRKKRLEEQKNILSEFQRDLNEFVLWLEEADNIASIPLEPGKEQQLKEKLEQVKLLVEELPLRQGILKQLNETGGPVLVSAPISPEEQDKLENKLKQTNLQWIKVSRALPEKQGEIEAQIKDLGQLEKKLEDLEEQLNHLLLWLSPIRNQLEIYNQPNQEGPFDVKETEIAVQAKQPDVEEILSKGQHLYKEKPATQPVKRKLEDLSSEWKAVNRLLQELRAKQPDLAPGLTTIGASPTQTVTLVTQPVVTKETAISKLEMPSSLMLEVPALADFNRAWTELTDWLSLLDQVIKSQRVMVGDLEDINEMIIKQKATMQDLEQRRPQLEELITAAQNLKNKTSNQEARTIITDRIERIQNQWDEVQEHLQNRRQQLNEMLKDSTQWLEAKEEAEQVLGQARAKLESWKEGPYTVDAIQKKITETKQLAKDLRQWQTNVDVANDLALKLLRDYSADDTRKVHMITENINASWRSIHKRVSEREAALEETHRLLQQFPLDLEKFLAWLTEAETTANVLQDATRKERLLEDSKGVKELMKQWQDLQGEIEAHTDVYHNLDENSQKILRSLEGSDDAVLLQRRLDNMNFKWSELRKKSLNIRSHLEASSDQWKRLHLSLQELLVWLQLKDDELSRQAPIGGDFPAVQKQNDVHRAFKRELKTKEPVIMSTLETVRIFLTEQPLEGLEKLYQEPRELPPEERAQNVTRLLRKQAEEVNTEWEKLNLHSADWQRKIDETLERLRELQEATDELDLKLRQAEVIKGSWQPVGDLLIDSLQDHLEKVKALRGEIAPLKENVSHVNDLARQLTTLGIQLSPYNLSTLEDLNTRWKLLQVAVEDRVRQLHEAHRDFGPASQHFLSTSVQGPWERAISPNKVPYYINHETQTTCWDHPKMTELYQSLADLNNVRFSAYRTAMKLRRLQKALCLDLLSLSAACDALDQHNLKQNDQPMDILQIINCLTTIYDRLEQEHNNLVNVPLCVDMCLNWLLNVYDTGRTGRIRVLSFKTGIISLCKAHLEDKYRYLFKQVASSTGFCDQRRLGLLLHDSIQIPRQLGEVASFGGSNIEPSVRSCFQFANNKPEIEAALFLDWMRLEPQSMVWLPVLHRVAAAETAKHQAKCNICKECPIIGFRYRSLKHFNYDICQSCFFSGRVAKGHKMHYPMVEYCTPTTSGEDVRDFAKVLKNKFRTKRYFAKHPRMGYLPVQTVLEGDNMETPVTLINFWPVDSAPASSPQLSHDDTHSRIEHYASRLAEMENSNGSYLNDSISPNESIDDEHLLIQHYCQSLNQDSPLSQPRSPAQILISLESEERGELERILADLEEENRNLQAEYDRLKQQHEHKGLSPLPSPPEMMPTSPQSPRDAELIAEAKLLRQHKGRLEARMQILEDHNKQLESQLHRLRQLLEQPQAEAKVNGTTVSSPSTSLQRSDSSQPMLLRVVGSQTSDSMGEEDLLSPPQDTSTGLEEVMEQLNNSFPSSRGRNTPGKPMREDTM

SEQ ID NO: 142711 - protein, 3685 aa, Artificial Sequence
  derived and/or modified sequence
MLWWEEVEDCYEREDVQKKTFTKWVNAQFSKFGKQHIENLFSDLQDGRRLLDLLEGLTGQKLPKEKGSTRVHALNNVNKALRVLQNNNVDLVNIGSTDIVDGNHKLTLGLIWNIILHWQVKNVMKNIMAGLQQTNSEKILLSWVRQSTRNYPQVNVINFTTSWSDGLALNALIHSHRPDLFDWNSVVCQQSATQRLEHAFNIARYQLGIEKLLDPEDVDTTYPDKKSILMYITSLFQVLPQQVSIEAIQEVEMLPRPPKVTKEEHFQLHHQMHYSQQITVSLAQGYERTSSPKPRFKSYAYTQAAYVTTSDPTRSPFPSQHLEAPEDKSFGSSLMESEVNLDRYQTALEEVLSWLLSAEDTLQAQGEISNDVEVVKDQFHTHEGYMMDLTAHQGRVGNILQLGSKLIGTGKLSEDEETEVQEQMNLLNSRWECLRVASMEKQSNLHRVLMDLQNQKLKELNDWLTKTEERTRKMEEEPLGPDLEDLKRQVQQHKVLQEDLEQEQVRVNSLTHMVVVVDESSGDHATAALEEQLKVLGDRWANICRWTEDRWVLLQDILLKWQRLTEEQCLFSAWLSEKEDAVNKIHTTGFKDQNEMLSSLQKLAVLKADLEKKKQSMGKLYSLKQDLLSTLKNKSVTQKTEAWLDNFARCWDNLVQKLEKSTAQISQAVTTTQPSLTQTTVMETVTTVTTREQILVKHAQEELPPPPPQKKRQITVDSEIRKRLDVDITELHSWITRSEAVLQSPEFAIFRKEGNFSDLKEKVNAIEREKAEKFRKLQDASRSAQALVEQMVNEGVNADSIKQASEQLNSRWIEFCQLLSERLNWLEYQNNIIAFYNQLQQLEQMTTTAENWLKIQPTTPSEPTAIKSQLKICKDEVNRLSDLQPQIERLKIQSIALKEKGQGPMFLDADFVAFTNHFKQVFSDVQAREKELQTIFDTLPPMRYQETMSAIRTWVQQSETKLSIPQLSVTDYEIMEQRLGELQALQSSLQEQQSGLYYLSTTVKEMSKKAPSEISRKYQSEFEEIEGRWKKLSSQLVEHCQKLEEQMNKLRKIQNHIQTLKKWMAEVDVFLKEEWPALGDSEILKKQLKQCRLLVSDIQTIQPSLNSVNEGGQKIKNEAEPEFASRLETELKELNTQWDHMCQQVYARKEALKGGLEKTVSLQKDLSEMHEWMTQAEEEYLERDFEYKTPDELQKAVEEMKRAKEEAQQKEAKVKLLTESVNSVIAQAPPVAQEALKKELETLTTNYQWLCTRLNGKCKTLEEVWACWHELLSYLEKANKWLNEVEFKLKTTENIPGGAEEISEVLDSLENLMRHSEDNPNQIRILAQTLTDGGVMDELINEELETFNSRWRELHEEAVRRQKLLEQSIQSAQETEKSLHLIQESLTFIDKQLAAYIADKVDAAQMPQEAQKIQSDLTSHEISLEEMKKHNQGKEAAQRVLSQIDVAQKKLQDVSMKFRLFQKPANFEQRLQESKMILDEVKMHLPALETKSVEQEVVQSQLNHCVNLYKSLSEVKSEVEMVIKTGRQIVQKKQTENPKELDERVTALKLHYNELGAKVTERKQQLEKCLKLSRKMRKEMNVLTEWLAATDMELTKRSAVEGMPSNLDSEVAWGKATQKEIEKQKVHLKSITEVGEALKTVLGKKETLVEDKLSLLNSNWIAVTSRAEEWLNLLLEYQKHMETFDQNVDHITKWIIQADTLLDESEKKKPQQKEDVLKRLKAELNDIRPKVDSTRDQAANLMANRGDHCRKLVEPQISELNHRFAAISHRIKTGKASIPLKELEQFNSDIQKLLEPLEAEIQQGVNLKEEDFNKDMNEDNEGTVKELLQRGDNLQQRITDERKREEIKIKQQLLQTKHNALKDLRSQRRKKALEISHQWYQYKRQADDLLKCLDDIEKKLASLPEPRDERKIKEIDRELQKKKEELNAVRRQAEGLSEDGAAMAVEPTQIQLSKRWREIESKFAQFRRLNFAQIHTVREETMMVMTEDMPLEISYVPSTYLTEITHVSQALLEVEQLLNAPDLCAKDFEDLFKQEESLKNIKDSLQQSSGRIDIIHSKKTAALQSATPVERVKLQEALSQLDFQWEKVNKMYKDRQGRFDRSVEKWRRFHYDIKIFNQWLTEAEQFLRKTQIPENWEHAKYKWYLIALKDGIGQRQTVVRTLNATGEEIIQQSSKTDASILQEKLGSLNLRWQEVCKQLSDRKKRLEEQKNILSEFQRDLNEFVLWLEEADNIASIPLEPGKEQQLKEKLEQVKLLVEELPLRQGILKQLNETGGPVLVSAPISPEEQDKLENKLKQTNLQWIKVSRALPEKQGEIEAQIKDLGQLEKKLEDLEEQLNHLLLWLSPIRNQLEIYNQPNQEGPFDVKETEIAVQAKQPDVEEILSKGQHLYKEKPATQPVKRKLEDLSSEWKAVNRLLQELRAKQPDLAPGLTTIGASPTQTVTLVTQPVVTKETAISKLEMPSSLMLEVPALADFNRAWTELTDWLSLLDQVIKSQRVMVGDLEDINEMIIKQKATMQDLEQRRPQLEELITAAQNLKNKTSNQEARTIITDRIERIQNQWDEVQEHLQNRRQQLNEMLKDSTQWLEAKEEAEQVLGQARAKLESWKEGPYTVDAIQKKITETKQLAKDLRQWQTNVDVANDLALKLLRDYSADDTRKVHMITENINASWRSIHKRVSEREAALEETHRLLQQFPLDLEKFLAWLTEAETTANVLQDATRKERLLEDSKGVKELMKQWQDLQGEIEAHTDVYHNLDENSQKILRSLEGSDDAVLLQRRLDNMNFKWSELRKKSLNIRSHLEASSDQWKRLHLSLQELLVWLQLKDDELSRQAPIGGDFPAVQKQNDVHRAFKRELKTKEPVIMSTLETVRIFLTEQPLEGLEKLYQEPRELPPEERAQNVTRLLRKQAEEVNTEWEKLNLHSADWQRKIDETLERLRELQEATDELDLKLRQAEVIKGSWQPVGDLLIDSLQDHLEKVKALRGEIAPLKENVSHVNDLARQLTTLGIQLSPYNLSTLEDLNTRWKLLQVAVEDRVRQLHEAHRDFGPASQHFLSTSVQGPWERAISPNKVPYYINHETQTTCWDHPKMTELYQSLADLNNVRFSAYRTAMKLRRLQKALCLDLLSLSAACDALDQHNLKQNDQPMDILQIINCLTTIYDRLEQEHNNLVNVPLCVDMCLNWLLNVYDTGRTGRIRVLSFKTGIISLCKAHLEDKYRYLFKQVASSTGFCDQRRLGLLLHDSIQIPRQLGEVASFGGSNIEPSVRSCFQFANNKPEIEAALFLDWMRLEPQSMVWLPVLHRVAAAETAKHQAKCNICKECPIIGFRYRSLKHFNYDICQSCFFSGRVAKGHKMHYPMVEYCTPTTSGEDVRDFAKVLKNKFRTKRYFAKHPRMGYLPVQTVLEGDNMETPVTLINFWPVDSAPASSPQLSHDDTHSRIEHYASRLAEMENSNGSYLNDSISPNESIDDEHLLIQHYCQSLNQDSPLSQPRSPAQILISLESEERGELERILADLEEENRNLQAEYDRLKQQHEHKGLSPLPSPPEMMPTSPQSPRDAELIAEAKLLRQHKGRLEARMQILEDHNKQLESQLHRLRQLLEQPQAEAKVNGTTVSSPSTSLQRSDSSQPMLLRVVGSQTSDSMGEEDLLSPPQDTSTGLEEVMEQLNNSFPSSRGRNTPGKPMREDTM

SEQ ID NO: 142712 - DNA, 13993 bp, Artificial Sequence
  derived and/or modified sequence
tcctggcatcagttactgtgttgactcactcagtgttgggatcactcactttccccctacaggactcagatctgggaggcaattaccttcggagaaaaacgaataggaaaaactgaagtgttactttttttaaagctgctgaagtttgttggtttctcattgtttttaagcctactggagcaataaagtttgaagaacttttaccaggttttttttatcgctgccttgatatacacttttcaaaatgctttggtgggaagaagtagaggactgttatgaaagagaagatgttcaaaagaaaacattcacaaaatgggtaaatgcacaattttctaagtttgggaagcagcatattgagaacctcttcagtgacctacaggatgggaggcgcctcctagacctcctcgaaggcctgacagggcaaaaactgccaaaagaaaaaggatccacaagagttcatgccctgaacaatgtcaacaaggcactgcgggttttgcagaacaataatgttgatttagtgaatattggaagtactgacatcgtagatggaaatcataaactgactcttggtttgatttggaatataatcctccactggcaggtcaaaaatgtaatgaaaaatatcatggctggattgcaacaaaccaacagtgaaaagattctcctgagctgggtccgacaatcaactcgtaattatccacaggttaatgtaatcaacttcaccaccagctggtctgatggcctggctttgaatgctctcatccatagtcataggccagacctatttgactggaatagtgtggtttgccagcagtcagccacacaacgactggaacatgcattcaacatcgccagatatcaattaggcatagagaaactactcgatcctgaagatgttgataccacctatccagataagaagtccatcttaatgtacatcacatcactcttccaagttttgcctcaacaagtgagcattgaagccatccaggaagtggaaatgttgccaaggccacctaaagtgactaaagaagaacattttcagttacatcatcaaatgcactattctcaacagatcacggtcagtctagcacagggatatgagagaacttcttcccctaagcctcgattcaagagctatgcctacacacaggctgcttatgtcaccacctctgaccctacacggagcccatttccttcacagcatttggaagctcctgaagacaagtcatttggcagttcattgatggagagtgaagtaaacctggaccgttatcaaacagctttagaagaagtattatcgtggcttctttctgctgaggacacattgcaagcacaaggagagatttctaatgatgtggaagtggtgaaagaccagtttcatactcatgaggggtacatgatggatttgacagcccatcagggccgggttggtaatattctacaattgggaagtaagctgattggaacaggaaaattatcagaagatgaagaaactgaagtacaagagcagatgaatctcctaaattcaagatgggaatgcctcagggtagctagcatggaaaaacaaagcaatttacatagagttttaatggatctccagaatcagaaactgaaagagttgaatgactggctaacaaaaacagaagaaagaacaaggaaaatggaggaagagcctcttggacctgatcttgaagacctaaaacgccaagtacaacaacataaggtgcttcaagaagatctagaacaagaacaagtcagggtcaattctctcactcacatggtggtggtagttgatgaatctagtggagatcacgcaactgctgctttggaagaacaacttaaggtattgggagatcgatgggcaaacatctgtagatggacagaagaccgctgggttcttttacaagacatccttctcaaatggcaacgtcttactgaagaacagtgcctttttagtgcatggctttcagaaaaagaagatgcagtgaacaagattcacacaactggctttaaagatcaaaatgaaatgttatcaagtcttcaaaaactggccgttttaaaagcggatctagaaaagaaaaagcaatccatgggcaaactgtattcactcaaacaagatcttctttcaacactgaagaataagtcagtgacccagaagacggaagcatggctggataactttgcccggtgttgggataatttagtccaaaaacttgaaaagagtacagcacagatttcacaggctgtcaccaccactcagccatcactaacacagacaactgtaatggaaacagtaactacggtgaccacaagggaacagatcctggtaaagcatgctcaagaggaacttccaccaccacctccccaaaagaagaggcagattactgtggattctgaaattaggaaaaggttggatgttgatataactgaacttcacagctggattactcgctcagaagctgtgttgcagagtcctgaatttgcaatctttcggaaggaaggcaacttctcagacttaaaagaaaaagtcaatgccatagagcgagaaaaagctgagaagttcagaaaactgcaagatgccagcagatcagctcaggccctggtggaacagatggtgaatgagggtgttaatgcagatagcatcaaacaagcctcagaacaactgaacagccggtggatcgaattctgccagttgctaagtgagagacttaactggctggagtatcagaacaacatcatcgctttctataatcagctacaacaattggagcagatgacaactactgctgaaaactggttgaaaatccaacccaccaccccatcagagccaacagcaattaaaagtcagttaaaaatttgtaaggatgaagtcaaccggctatcaggtcttcaacctcaaattgaacgattaaaaattcaaagcatagccctgaaagagaaaggacaaggacccatgttcctggatgcagactttgtggcctttacaaatcattttaagcaagtcttttctgatgtgcaggccagagagaaagagctacagacaatttttgacactttgccaccaatgcgctatcaggagaccatgagtgccatcaggacatgggtccagcagtcagaaaccaaactctccatacctcaacttagtgtcaccgactatgaaatcatggagcagagactcggggaattgcaggctttacaaagttctctgcaagagcaacaaagtggcctatactatctcagcaccactgtgaaagagatgtcgaagaaagcgccctctgaaattagccggaaatatcaatcagaatttgaagaaattgagggacgctggaagaagctctcctcccagctggttgagcattgtcaaaagctagaggagcaaatgaataaactccgaaaaattcagaatcacatacaaaccctgaagaaatggatggctgaagttgatgtttttctgaaggaggaatggcctgcccttggggattcagaaattctaaaaaagcagctgaaacagtgcagacttttagtcagtgatattcagacaattcagcccagtctaaacagtgtcaatgaaggtgggcagaagataaagaatgaagcagagccagagtttgcttcgagacttgagacagaactcaaagaacttaacactcagtgggatcacatgtgccaacaggtctatgccagaaaggaggccttgaagggaggtttggagaaaactgtaagcctccagaaagatctatcagagatgcacgaatggatgacacaagctgaagaagagtatcttgagagagattttgaatataaaactccagatgaattacagaaagcagttgaagagatgaagagagctaaagaagaggcccaacaaaaagaagcgaaagtgaaactccttactgagtctgtaaatagtgtcatagctcaagctccacctgtagcacaagaggccttaaaaaaggaacttgaaactctaaccaccaactaccagtggctctgcactaggctgaatgggaaatgcaagactttggaagaagtttgggcatgttggcatgagttattgtcatacttggagaaagcaaacaagtggctaaatgaagtagaatttaaacttaaaaccactgaaaacattcctggcggagctgaggaaatctctgaggtgctagattcacttgaaaatttgatgcgacattcagaggataacccaaatcagattcgcatattggcacagaccctaacagatggcggagtcatggatgagctaatcaatgaggaacttgagacatttaattctcgttggagggaactacatgaagaggctgtaaggaggcaaaagttgcttgaacagagcatccagtctgcccaggagactgaaaaatccttacacttaatccaggagtccctcacattcattgacaagcagttggcagcttatattgcagacaaggtggacgcagctcaaatgcctcaggaagcccagaaaatccaatctgatttgacaagtcatgagatcagtttagaagaaatgaagaaacataatcaggggaaggaggctgcccaaagagtcctgtctcagattgatgttgcacagaaaaaattacaagatgtctccatgaagtttcgattattccagaaaccagccaattttgagcagcgtctacaagaaagtaagatgattttagatgaagtgaagatgcacttgcctgcattggaaacaaagagtgtggaacaggaagtagtacagtcacagctaaatcattgtgtgaacttgtataaaagtctgagtgaagtgaagtctgaagtggaaatggtgataaagactggacgtcagattgtacagaaaaagcagacggaaaatcccaaagaacttgatgaaagagtaacagctttgaaattgcattataatgagctgggagcaaaggtaacagaaagaaagcaacagttggagaaatgcttgaaattgtcccgtaagatgcgaaaggaaatgaatgtcttgacagaatggctggcagctacagatatggaattgacaaagagatcagcagttgaaggaatgcctagtaatttggattctgaagttgcctggggaaaggctactcaaaaagagattgagaaacagaaggtgcacctgaagagtatcacagaggtaggagaggccttgaaaacagttttgggcaagaaggagacgttggtggaagataaactcagtcttctgaatagtaactggatagctgtcacctcccgagcagaagagtggttaaatcttttgttggaataccagaaacacatggaaacttttgaccagaatgtggaccacatcacaaagtggatcattcaggctgacacacttttggatgaatcagagaaaaagaaaccccagcaaaaagaagacgtgcttaagcgtttaaaggcagaactgaatgacatacgcccaaaggtggactctacacgtgaccaagcagcaaacttgatggcaaaccgcggtgaccactgcaggaaattagtagagccccaaatctcagagctcaaccatcgatttgcagccatttcacacagaattaagactggaaaggcctccattcctttgaaggaattggagcagtttaactcagatatacaaaaattgcttgaaccactggaggctgaaattcagcagggggtgaatctgaaagaggaagacttcaataaagatatgaatgaagacaatgagggtactgtaaaagaattgttgcaaagaggagacaacttacaacaaagaatcacagatgagagaaagcgagaggaaataaagataaaacagcagctgttacagacaaaacataatgctctcaaggatttgaggtctcaaagaagaaaaaaggctctagaaatttctcatcagtggtatcagtacaagaggcaggctgatgatctcctgaaatgcttggatgacattgaaaaaaaattagccagcctacctgagcccagagatgaaaggaaaataaaggaaattgatcgggaattgcagaagaagaaagaggagctgaatgcagtgcgtaggcaagctgagggcttgtctgaggatggggccgcaatggcagtggagccaactcagatccagctcagcaagcgctggcgggaaattgagagcaaatttgctcagtttcgaagactcaactttgcacaaattcacactgtccgtgaagaaacgatgatggtgatgactgaagacatgcctttggaaatttcttatgtgccttctacttatttgactgaaatcactcatgtctcacaagccctattagaagtggaacaacttctcaatgctcctgacctctgtgctaaggactttgaagatctctttaagcaagaggagtctctgaagaatataaaagatagtctacaacaaagctcaggtcggattgacattattcatagcaagaagacagcagcattgcaaagtgcaacgcctgtggaaagggtgaagctacaggaagctctctcccagcttgatttccaatgggaaaaagttaacaaaatgtacaaggaccgacaagggcgatttgacagatctgttgagaaatggcggcgttttcattatgatataaagatatttaatcagtggctaacagaagctgaacagtttctcagaaagacacaaattcctgagaattgggaacatgctaaatacaaatggtatcttaaggaactccaggatggcattgggcagcggcaaactgttgtcagaacattgaatgcaactggggaagaaataattcagcaatcctcaaaaacagatgccagtattctacaggaaaaattgggaagcctgaatctgcggtggcaggaggtctgcaaacagctgtcagacagaaaaaagaggctagaagaacaaaagaatatcttgtcagaatttcaaagagatttaaatgaatttgttttatggttggaggaagcagataacattgctagtatcccacttgaacctggaaaagagcagcaactaaaagaaaagcttgagcaagtcaagttactggtggaagagttgcccctgcgccagggaattctcaaacaattaaatgaaactggaggacccgtgcttgtaagtgctcccataagcccagaagagcaagataaacttgaaaataagctcaagcagacaaatctccagtggataaaggtttccagagctttacctgagaaacaaggagaaattgaagctcaaataaaagaccttgggcagcttgaaaaaaagcttgaagaccttgaagagcagttaaatcatctgctgctgtggttatctcctattaggaatcagttggaaatttataaccaaccaaaccaagaaggaccatttgacgttcaggaaactgaaatagcagttcaagctaaacaaccggatgtggaagagattttgtctaaagggcagcatttgtacaaggaaaaaccagccactcagccagtgaagaggaagttagaagatctgagctctgagtggaaggcggtaaaccgtttacttcaagagctgagggcaaagcagcctgacctagctcctggactgaccactattggagcctctcctactcagactgttactctggtgacacaacctgtggttactaaggaaactgccatctccaaactagaaatgccatcttccttgatgttggaggtacctgctctggcagatttcaaccgggcttggacagaacttaccgactggctttctctgcttgatcaagttataaaatcacagagggtgatggtgggtgaccttgaggatatcaacgagatgatcatcaagcagaaggcaacaatgcaggatttggaacagaggcgtccccagttggaagaactcattaccgctgcccaaaatttgaaaaacaagaccagcaatcaagaggctagaacaatcattacggatcgaattgaaagaattcagaatcagtgggatgaagtacaagaacaccttcagaaccggaggcaacagttgaatgaaatgttaaaggattcaacacaatggctggaagctaaggaagaagctgagcaggtcttaggacaggccagagccaagcttgagtcatggaaggagggtccctatacagtagatgcaatccaaaagaaaatcacagaaaccaagcagttggccaaagacctccgccagtggcagacaaatgtagatgtggcaaatgacttggccctgaaacttctccgggattattctgcagatgataccagaaaagtccacatgataacagagaatatcaatgcctcttggagaagcattcataaaagggtgagtgagcgagaggctgctttggaagaaactcatagattactgcaacagttccccctggacctggaaaagtttcttgcctggcttacagaagctgaaacaactgccaatgtcctacaggatgctacccgtaaggaaaggctcctagaagactccaagggagtaaaagagctgatgaaacaatggcaagacctccaaggtgaaattgaagctcacacagatgtttatcacaacctggatgaaaacagccaaaaaatcctgagatccctggaaggttccgatgatgcagtcctgttacaaagacgtttggataacatgaacttcaagtggagtgaacttcggaaaaagtctctcaacattaggtcccatttggaagccagttctgaccagtggaagcgtctgcacctttctctgcaggaacttctggtgtggctacagctgaaagatgatgaattaagccggcaggcacctattggaggcgactttccagcagttcagaagcagaacgatgtacatagggccttcaagagggaattgaaaactaaagaacctgtaatcatgagtactcttgagactgtacgaatatttctgacagagcagcctttggaaggactagagaaactctaccaggagcccagagagctgcctcctgaggagagagcccagaatgtcactcggcttctacgaaagcaggctgaggaggtcaatactgagtgggaaaaattgaacctgcactccgctgactggcagagaaaaatagatgagacccttgaaagactccaggaacttcaagaggccacggatgagctggacctcaagctgcgccaagctgaggtgatcaagggatcctggcagcccgtgggcgatctcctcattgactctctccaagatcacctcgagaaagtcaaggcacttcgaggagaaattgcgcctctgaaagagaacgtgagccacgtcaatgaccttgctcgccagcttaccactttgggcattcagctctcaccgtataacctcagcactctggaagacctgaacaccagatggaagcttctgcaggtggccgtcgaggaccgagtcaggcagctgcatgaagcccacagggactttggtccagcatctcagcactttctttccacgtctgtccagggtccctgggagagagccatctcgccaaacaaagtgccctactatatcaaccacgagactcaaacaacttgctgggaccatcccaaaatgacagagctctaccagtctttagctgacctgaataatgtcagattctcagcttataggactgccatgaaactccgaagactgcagaaggccctttgcttggatctcttgagcctgtcagctgcatgtgatgccttggaccagcacaacctcaagcaaaatgaccagcccatggatatcctgcagattattaattgtttgaccactatttatgaccgcctggagcaagagcacaacaatttggtcaacgtccctctctgcgtggatatgtgtctgaactggctgctgaatgtttatgatacgggacgaacagggaggatccgtgtcctgtcttttaaaactggcatcatttccctgtgtaaagcacatttggaagacaagtacagataccttttcaagcaagtggcaagttcaacaggattttgtgaccagcgcaggctgggcctccttctgcatgattctatccaaattccaagacagttgggtgaagttgcatcctttgggggcagtaacattgagccaagtgtccggagctgcttccaatttgctaataataagccagagatcgaagcggccctcttcctagactggatgagactggaaccccagtccatggtgtggctgcccgtcctgcacagagtggctgctgcagaaactgccaagcatcaggccaaatgtaacatctgcaaagagtgtccaatcattggattcaggtacaggagtctaaagcactttaattatgacatctgccaaagctgctttttttctggtcgagttgcaaaaggccataaaatgcactatcccatggtggaatattgcactccgactacatcaggagaagatgttcgagactttgccaaggtactaaaaaacaaatttcgaaccaaaaggtattttgcgaagcatccccgaatgggctacctgccagtgcagactgtcttagagggggacaacatggaaactcccgttactctgatcaacttctggccagtagattctgcgcctgcctcgtcccctcagctttcacacgatgatactcattcacgcattgaacattatgctagcaggctagcagaaatggaaaacagcaatggatcttatctaaatgatagcatctctcctaatgagagcatagatgatgaacatttgttaatccagcattactgccaaagtttgaaccaggactcccccctgagccagcctcgtagtcctgcccagatcttgatttccttagagagtgaggaaagaggggagctagagagaatcctagcagatcttgaggaagaaaacaggaatctgcaagcagaatatgaccgtctaaagcagcagcacgaacataaaggcctgtccccactgccgtcccctcctgaaatgatgcccacctctccccagagtccccgggatgctgagctcattgctgaggccaagctactgcgtcaacacaaaggccgcctggaagccaggatgcaaatcctggaagaccacaataaacagctggagtcacagttacacaggctaaggcagctgctggagcaaccccaggcagaggccaaagtgaatggcacaacggtgtcctctccttctacctctctacagaggtccgacagcagtcagcctatgctgctccgagtggttggcagtcaaacttcggactccatgggtgaggaagatcttctcagtcctccccaggacacaagcacagggttagaggaggtgatggagcaactcaacaactccttccctagttcaagaggaagaaatacccctggaaagccaatgagagaggacacaatgtaggaagtcttttccacatggcagatgatttgggcagagcgatggagtccttagtatcagtcatgacagatgaagaaggagcagaataaatgttttacaactcctgattcccgcatggtttttataatattcatacaacaaagaggattagacagtaagagtttacaagaaataaatctatatttttgtgaagggtagtggtattatactgtagatttcagtagtttctaagtctgttattgttttgttaacaatggcaggttttacacgtctatgcaattgtacaaaaaagttataagaaaactacatgtaaaatcttgatagctaaataacttgccatttctttatatggaacgcattttgggttgtttaaaaatttataacagttataaagaaagattgtaaactaaagtgtgctttataaaaaaaagttgtttataaaaacccctaaaaacaaaacaaacacacacacacacacatacacacacacacacaaaactttgaggcagcgcattgttttgcatccttttggcgtgatatccatatgaaattcatggctttttctttttttgcatattaaagataagacttcctctaccaccacaccaaatgactactacacactgctcatttgagaactgtcagctgagtggggcaggcttgagttttcatttcatatatctatatgtctataagtatataaatactatagttatatagataaagagatacgaatttctatagactgactttttccattttttaaatgttcatgtcacatcctaatagaaagaaattacttctagtcagtcatccaggcttacctgcttggtctagaatggatttttcccggagccggaagccaggaggaaactacaccacactaaaacattgtctacagctccagatgtttctcattttaaacaactttccactgacaacgaaagtaaagtaaagtattggatttttttaaagggaacatgtgaatgaatacacaggacttattatatcagagtgagtaatcggttggttggttgattgattgattgattgatacattcagcttcctgctgctagcaatgccacgatttagatttaatgatgcttcagtggaaatcaatcagaaggtattctgaccttgtgaacatcagaaggtattttttaactcccaagcagtagcaggacgatgatagggctggagggctatggattcccagcccatccctgtgaaggagtaggccactctttaagtgaaggattggatgattgttcataatacataaagttctctgtaattacaactaaattattatgccctcttctcacagtcaaaaggaactgggtggtttggtttttgttgcttttttagatttattgtcccatgtgggatgagtttttaaatgccacaagacataatttaaaataaataaactttgggaaaaggtgtaaaacagtagccccatcacatttgtgatactgacaggtatcaacccagaagcccatgaactgtgtttccatcctttgcatttctctgcgagtagttccacacaggtttgtaagtaagtaagaaagaaggcaaattgattcaaatgttacaaaaaaacccttcttggtggattagacaggttaaatatataaacaaacaaacaaaaattgctcaaaaaagaggagaaaagctcaagaggaaaagctaaggactggtaggaaaaagctttactctttcatgccattttatttctttttgatttttaaatcattcattcaatagataccaccgtgtgacctataattttgcaaatctgttacctctgacatcaagtgtaattagcttttggagagtgggctgacatcaagtgtaattagcttttggagagtgggttttgtccattattaataattaattaattaacatcaaacacggcttctcatgctatttctacctcactttggttttggggtgttcctgataattgtgcacacctgagttcacagcttcaccacttgtccattgcgttattttctttttcctttataattctttctttttccttcataattttcaaaagaaaacccaaagctctaaggtaacaaattaccaaattacatgaagatttggtttttgtcttgcatttttttcctttatgtgacgctggaccttttctttacccaaggatttttaaaactcagatttaaaacaaggggttactttacatcctactaagaagtttaagtaagtaagtttcattctaaaatcagaggtaaatagagtgcataaataattttgttttaatctttttgtttttcttttagacacattagctctggagtgagtctgtcataatatttgaacaaaaattgagagctttattgctgcattttaagcataattaatttggacattatttcgtgttgtgttctttataaccaccaagtattaaactgtaaatcataatgtaactgaagcataaacatcacatggcatgttttgtcattgttttcaggtactgagttcttacttgagtatcataatatattgtgttttaacaccaacactgtaacatttacgaattatttttttaaacttcagttttactgcattttcacaacatatcagacttcaccaaatatatgccttactattgtattatagtactgctttactgtgtatctcaataaagcacgcagttatgttac

SEQ ID NO: 142713 - DNA, 7410 bp, Artificial Sequence
  derived and/or modified sequence
acactagcaatggcaaagctttgtgcggaggcattgctggctgctctgaactaaaagcatccgtggggaccgaaagaggtttttgcacaccttattaaggaactccaggatggcattgggcagcggcaaactgttgtcagaacattgaatgcaactggggaagaaataattcagcaatcctcaaaaacagatgccagtattctacaggaaaaattgggaagcctgaatctgcggtggcaggaggtctgcaaacagctgtcagacagaaaaaagaggctagaagaacaaaagaatatcttgtcagaatttcaaagagatttaaatgaatttgttttatggttggaggaagcagataacattgctagtatcccacttgaacctggaaaagagcagcaactaaaagaaaagcttgagcaagtcaagttactggtggaagagttgcccctgcgccagggaattctcaaacaattaaatgaaactggaggacccgtgcttgtaagtgctcccataagcccagaagagcaagataaacttgaaaataagctcaagcagacaaatctccagtggataaaggtttccagagctttacctgagaaacaaggagaaattgaagctcaaataaaagaccttgggcagcttgaaaaaaagcttgaagaccttgaagagcagttaaatcatctgctgctgtggttatctcctattaggaatcagttggaaatttataaccaaccaaaccaagaaggaccatttgacgttcaggaaactgaaatagcagttcaagctaaacaaccggatgtggaagagattttgtctaaagggcagcatttgtacaaggaaaaaccagccactcagccagtgaagaggaagttagaagatctgagctctgagtggaaggcggtaaaccgtttacttcaagagctgagggcaaagcagcctgacctagctcctggactgaccactattggagcctctcctactcagactgttactctggtgacacaacctgtggttactaaggaaactgccatctccaaactagaaatgccatcttccttgatgttggaggtacctgctctggcagatttcaaccgggcttggacagaacttaccgactggctttctctgcttgatcaagttataaaatcacagagggtgatggtgggtgaccttgaggatatcaacgagatgatcatcaagcagaaggcaacaatgcaggatttggaacagaggcgtccccagttggaagaactcattaccgctgcccaaaatttgaaaaacaagaccagcaatcaagaggctagaacaatcattacggatcgaattgaaagaattcagaatcagtgggatgaagtacaagaacaccttcagaaccggaggcaacagttgaatgaaatgttaaaggattcaacacaatggctggaagctaaggaagaagctgagcaggtcttaggacaggccagagccaagcttgagtcatggaaggagggtccctatacagtagatgcaatccaaaagaaaatcacagaaaccaagcagttggccaaagacctccgccagtggcagacaaatgtagatgtggcaaatgacttggccctgaaacttctccgggattattctgcagatgataccagaaaagtccacatgataacagagaatatcaatgcctcttggagaagcattcataaaagggtgagtgagcgagaggctgctttggaagaaactcatagattactgcaacagttccccctggacctggaaaagtttcttgcctggcttacagaagctgaaacaactgccaatgtcctacaggatgctacccgtaaggaaaggctcctagaagactccaagggagtaaaagagctgatgaaacaatggcaagacctccaaggtgaaattgaagctcacacagatgtttatcacaacctggatgaaaacagccaaaaaatcctgagatccctggaaggttccgatgatgcagtcctgttacaaagacgtttggataacatgaacttcaagtggagtgaacttcggaaaaagtctctcaacattaggtcccatttggaagccagttctgaccagtggaagcgtctgcacctttctctgcaggaacttctggtgtggctacagctgaaagatgatgaattaagccggcaggcacctattggaggcgactttccagcagttcagaagcagaacgatgtacatagggccttcaagagggaattgaaaactaaagaacctgtaatcatgagtactcttgagactgtacgaatatttctgacagagcagcctttggaaggactagagaaactctaccaggagcccagagagctgcctcctgaggagagagcccagaatgtcactcggcttctacgaaagcaggctgaggaggtcaatactgagtgggaaaaattgaacctgcactccgctgactggcagagaaaaatagatgagacccttgaaagactccaggaacttcaagaggccacggatgagctggacctcaagctgcgccaagctgaggtgatcaagggatcctggcagcccgtgggcgatctcctcattgactctctccaagatcacctcgagaaagtcaaggcacttcgaggagaaattgcgcctctgaaagagaacgtgagccacgtcaatgaccttgctcgccagcttaccactttgggcattcagctctcaccgtataacctcagcactctggaagacctgaacaccagatggaagcttctgcaggtggccgtcgaggaccgagtcaggcagctgcatgaagcccacagggactttggtccagcatctcagcactttctttccacgtctgtccagggtccctgggagagagccatctcgccaaacaaagtgccctactatatcaaccacgagactcaaacaacttgctgggaccatcccaaaatgacagagctctaccagtctttagctgacctgaataatgtcagattctcagcttataggactgccatgaaactccgaagactgcagaaggccctttgcttggatctcttgagcctgtcagctgcatgtgatgccttggaccagcacaacctcaagcaaaatgaccagcccatggatatcctgcagattattaattgtttgaccactatttatgaccgcctggagcaagagcacaacaatttggtcaacgtccctctctgcgtggatatgtgtctgaactggctgctgaatgtttatgatacgggacgaacagggaggatccgtgtcctgtcttttaaaactggcatcatttccctgtgtaaagcacatttggaagacaagtacagataccttttcaagcaagtggcaagttcaacaggattttgtgaccagcgcaggctgggcctccttctgcatgattctatccaaattccaagacagttgggtgaagttgcatcctttgggggcagtaacattgagccaagtgtccggagctgcttccaatttgctaataataagccagagatcgaagcggccctcttcctagactggatgagactggaaccccagtccatggtgtggctgcccgtcctgcacagagtggctgctgcagaaactgccaagcatcaggccaaatgtaacatctgcaaagagtgtccaatcattggattcaggtacaggagtctaaagcactttaattatgacatctgccaaagctgctttttttctggtcgagttgcaaaaggccataaaatgcactatcccatggtggaatattgcactccgactacatcaggagaagatgttcgagactttgccaaggtactaaaaaacaaatttcgaaccaaaaggtattttgcgaagcatccccgaatgggctacctgccagtgcagactgtcttagagggggacaacatggaaactcccgttactctgatcaacttctggccagtagattctgcgcctgcctcgtcccctcagctttcacacgatgatactcattcacgcattgaacattatgctagcaggctagcagaaatggaaaacagcaatggatcttatctaaatgatagcatctctcctaatgagagcatagatgatgaacatttgttaatccagcattactgccaaagtttgaaccaggactcccccctgagccagcctcgtagtcctgcccagatcttgatttccttagagagtgaggaaagaggggagctagagagaatcctagcagatcttgaggaagaaaacaggaatctgcaagcagaatatgaccgtctaaagcagcagcacgaacataaaggcctgtccccactgccgtcccctcctgaaatgatgcccacctctccccagagtccccgggatgctgagctcattgctgaggccaagctactgcgtcaacacaaaggccgcctggaagccaggatgcaaatcctggaagaccacaataaacagctggagtcacagttacacaggctaaggcagctgctggagcaaccccaggcagaggccaaagtgaatggcacaacggtgtcctctccttctacctctctacagaggtccgacagcagtcagcctatgctgctccgagtggttggcagtcaaacttcggactccatgggtgaggaagatcttctcagtcctccccaggacacaagcacagggttagaggaggtgatggagcaactcaacaactccttccctagttcaagaggaagaaatacccctggaaagccaatgagagaggacacaatgtaggaagtcttttccacatggcagatgatttgggcagagcgatggagtccttagtatcagtcatgacagatgaagaaggagcagaataaatgttttacaactcctgattcccgcatggtttttataatattcatacaacaaagaggattagacagtaagagtttacaagaaataaatctatatttttgtgaagggtagtggtattatactgtagatttcagtagtttctaagtctgttattgttttgttaacaatggcaggttttacacgtctatgcaattgtacaaaaaagttataagaaaactacatgtaaaatcttgatagctaaataacttgccatttctttatatggaacgcattttgggttgtttaaaaatttataacagttataaagaaagattgtaaactaaagtgtgctttataaaaaaaagttgtttataaaaacccctaaaaacaaaacaaacacacacacacacacatacacacacacacacaaaactttgaggcagcgcattgttttgcatccttttggcgtgatatccatatgaaattcatggctttttctttttttgcatattaaagataagacttcctctaccaccacaccaaatgactactacacactgctcatttgagaactgtcagctgagtggggcaggcttgagttttcatttcatatatctatatgtctataagtatataaatactatagttatatagataaagagatacgaatttctatagactgactttttccattttttaaatgttcatgtcacatcctaatagaaagaaattacttctagtcagtcatccaggcttacctgcttggtctagaatggatttttcccggagccggaagccaggaggaaactacaccacactaaaacattgtctacagctccagatgtttctcattttaaacaactttccactgacaacgaaagtaaagtaaagtattggatttttttaaagggaacatgtgaatgaatacacaggacttattatatcagagtgagtaatcggttggttggttgattgattgattgattgatacattcagcttcctgctgctagcaatgccacgatttagatttaatgatgcttcagtggaaatcaatcagaaggtattctgaccttgtgaacatcagaaggtattttttaactcccaagcagtagcaggacgatgatagggctggagggctatggattcccagcccatccctgtgaaggagtaggccactctttaagtgaaggattggatgattgttcataatacataaagttctctgtaattacaactaaattattatgccctcttctcacagtcaaaaggaactgggtggtttggtttttgttgcttttttagatttattgtcccatgtgggatgagtttttaaatgccacaagacataatttaaaataaataaactttgggaaaaggtgtaaaacagtagccccatcacatttgtgatactgacaggtatcaacccagaagcccatgaactgtgtttccatcctttgcatttctctgcgagtagttccacacaggtttgtaagtaagtaagaaagaaggcaaattgattcaaatgttacaaaaaaacccttcttggtggattagacaggttaaatatataaacaaacaaacaaaaattgctcaaaaaagaggagaaaagctcaagaggaaaagctaaggactggtaggaaaaagctttactctttcatgccattttatttctttttgatttttaaatcattcattcaatagataccaccgtgtgacctataattttgcaaatctgttacctctgacatcaagtgtaattagcttttggagagtgggctgacatcaagtgtaattagcttttggagagtgggttttgtccattattaataattaattaattaacatcaaacacggcttctcatgctatttctacctcactttggttttggggtgttcctgataattgtgcacacctgagttcacagcttcaccacttgtccattgcgttattttctttttcctttataattctttctttttccttcataattttcaaaagaaaacccaaagctctaaggtaacaaattaccaaattacatgaagatttggtttttgtcttgcatttttttcctttatgtgacgctggaccttttctttacccaaggatttttaaaactcagatttaaaacaaggggttactttacatcctactaagaagtttaagtaagtaagtttcattctaaaatcagaggtaaatagagtgcataaataattttgttttaatctttttgtttttcttttagacacattagctctggagtgagtctgtcataatatttgaacaaaaattgagagctttattgctgcattttaagcataattaatttggacattatttcgtgttgtgttctttataaccaccaagtattaaactgtaaatcataatgtaactgaagcataaacatcacatggcatgttttgtcattgttttcaggtactgagttcttacttgagtatcataatatattgtgttttaacaccaacactgtaacatttacgaattatttttttaaacttcagttttactgcattttcacaacatatcagacttcaccaaatatatgccttactattgtattatagtactgctttactgtgtatctcaataaagcacgcagttatgttac

SEQ ID NO: 142714 - DNA, 11058 bp, Artificial Sequence
  derived and/or modified sequence
atgctgtggtgggaggaggtggaggactgttatgaaagggaggatgtgcagaagaaaacatttaccaagtgggtcaacgcccagttttccaaatttggaaaacagcacatcgagaatctgttctctgatctgcaggacgggcgccgtctgctggatctcctggaggggctgaccggccagaaactgccgaaggagaaaggcagcacccgagttcacgcactaaataacgtgaataaagcactgcgggtgctgcagaataataatgtcgacctggtaaacattggatccacggatatcgttgacggtaaccacaagctcactcttgggctcatctggaatatcatcctacattggcaggttaagaacgtgatgaagaacatcatggccgggctccagcagaccaactctgagaagattctgctgagctgggtgcgccagtccactcgtaactacccccaagtaaatgtgattaacttcacaacctcctggtctgatggactggctctaaacgctctgattcattcccaccggccagatctgttcgactggaattcggtcgtgtgccagcagagtgctacccagagactcgaacacgctttcaacattgcccgttatcagttaggcattgagaagttgctcgatccagaggacgtagataccacctatcccgacaaaaagtcaattttaatgtacatcacctccttattccaagtactgccacaacaggtttccatcgaagccatccaggaggtggagatgctacctcgaccgccaaaggttaccaaagaagagcatttccagctccaccaccagatgcattactcccagcaaatcacggtctcattagcacaaggctatgaaaggacgagttccccaaagcctcgattcaaatcctacgcatacacacaagctgcatacgttaccaccagtgatcctacaaggtccccattcccctcgcaacatcttgaggcgcctgaagacaaatcttttggctcttcacttatggagagcgaggtgaacttggatagatatcagaccgccctggaggaggtcctttcgtggctgctgagcgccgaagacacgctccaggcacagggcgagatcagcaacgatgtggaagttgtgaaagaccaattccacacacacgaagggtacatgatggatctcacggcccaccagggtcgtgtggggaacatcctccagctcggatctaagttaattggaacagggaagttgtcagaggatgaggagacggaagtgcaagaacagatgaatctcctcaacagccgctgggaatgcctcagagtggcctcaatggagaaacagagcaatctgcatagggtgctgatggacctgcagaaccaaaagcttaaagagttgaatgactggcttaccaaaacagaggagagaacaagaaagatggaggaggagccgctggggcctgacctggaagatcttaagagacaggtgcagcagcacaaggtgctgcaggaggatctggaacaggagcaggtgcgagtaaattccctgacccatatggtggttgtcgtcgacgagtcgagcggagaccacgcaacagcggctctggaagagcaactaaaggtgctgggagaccgctgggccaatatttgccggtggaccgaggatcgatgggtcctactgcaggacatcctccttaagtggcagaggctgacagaggagcagtgcctgtttagcgcctggctgtcagagaaagaggatgccgtaaacaagatccataccacgggatttaaggaccagaatgagatgctgagcagcttacagaaactggctgtgcttaaggccgacctggagaaaaagaaacaaagtatgggaaagctgtatagcctgaaacaggatctcctgtcaacattaaagaataagagcgtcacacagaagaccgaggcctggctggacaattttgctaggtgctgggacaatctggtgcagaagcttgagaagtctacagcccagatttcccaagccgtgaccacaactcagccttcactcacgcaaaccacagttatggagaccgtcaccaccgtaactacccgcgagcaaatcctggtgaagcacgcacaggaggaacttccgcccccgccaccccaaaaaaagcgccagatcaccgtagattcggagatccgaaagcggcttgacgtcgatattactgagttgcactcttggatcactcgcagtgaagccgtactgcagtcaccggagtttgcaatcttcagaaaggagggtaatttctctgatcttaaggagaaggtgaatgcgatcgaacgcgagaaggcagagaaattccggaagctccaggatgctagccgcagtgcacaggcgctggtcgagcagatggtaaatgagggagtgaatgccgactccatcaagcaggccagcgaacaactcaattccagatggatagaattttgccaactgctaagtgaaaggcttaactggctggaataccagaacaacattatcgctttttacaatcaactccagcaactggaacaaatgacaaccacagcagagaattggctgaagatccagcccacgactccctcagaacccactgccatcaagtcccagctaaagatctgcaaagacgaggtcaatagactgagcgatcttcagccacagatcgaaaggctcaaaatccaaagcattgcactcaaggaaaaagggcagggacctatgtttctggacgccgacttcgtcgccttcaccaatcacttcaagcaggtcttttccgacgtgcaagccagggaaaaggagctgcagacaatcttcgatactctcccaccgatgcgttaccaggagactatgagtgctattcggacttgggtccaacagtccgagactaagctgtctatcccacaattgtccgttacagactacgaaatcatggaacagcgcctgggcgaactgcaagccctccagtcttctctacaagagcagcagtccgggctatactacctctcgacaacagtgaaggaaatgtcgaagaaagccccaagcgagattagcagaaaataccagagcgagtttgaggagatcgaaggaaggtggaaaaagttgtcatctcagctggttgagcactgtcaaaaattagaagaacagatgaacaagctgagaaaaattcaaaatcatattcagacgttaaagaaatggatggctgaagtcgacgtctttttgaaggaggagtggcctgccctcggcgactctgagatccttaagaaacaattgaagcagtgcagactgttggtgagtgacatccaaaccatacagccttcattaaactcagtgaacgagggcggtcagaagataaagaacgaagccgagcccgagttcgcctcacgactggaaacagagttgaaagagttaaatacccagtgggatcacatgtgccagcaagtctatgcacgcaaagaagccctgaaaggcggcctggagaagacggtgagcctgcagaaggacctgtctgagatgcatgaatggatgacacaggcggaggaggagtatctggagcgcgacttcgagtataagacgcccgacgagcttcagaaggcagtagaggagatgaaacgagctaaggaagaagcccaacagaaagaggccaaggtcaaacttttgactgaatcggtgaacagtgtgattgcacaggctccaccagtggcacaagaggcccttaagaaggagttagaaactctgacaacaaattatcagtggctttgcacaaggttgaacggcaaatgcaagactctggaggaagtgtgggcctgttggcatgagctgctctcttacctggaaaaagctaacaagtggcttaatgaggtagagtttaaactcaagactacagaaaatattcccgggggagctgaagaaatttccgaggtcctggatagcctggaaaatctaatgcgccatagcgaggacaatccaaaccagattcgcattctcgcccagactctgaccgacggaggggtgatggacgagttaattaacgaggagttggagacctttaattcaaggtggagggagctccatgaagaagccgttaggaggcagaaacttctggagcaaagcatccagtcagcccaggagactgaaaaatcattacatctcattcaggagtctctgaccttcatagataaacagctcgcagcttatatcgcagataaggtcgatgctgcacagatgccacaagaggctcagaagattcagtccgaccttacctctcacgaaattagtctcgaggaaatgaaaaaacacaatcagggtaaggaagcagctcagcgggtcctgagccaaatcgacgtggcgcagaaaaagttgcaggacgtgagcatgaagttccgtctgtttcagaagccggccaacttcgagcaaaggctccaagagagcaaaatgattctggatgaggtgaagatgcatctgcctgcgctggaaactaagtcggtggagcaggaggtggtccagagccagctcaaccactgtgttaatctttataaatcactttcagaggtcaaaagcgaagtggaaatggtgatcaagactggccggcagatcgttcagaagaaacaaacagagaatcctaaagaactggacgagcgggtgactgcgctgaaattacattataacgaactgggggctaaggtaaccgagagaaaacagcagctcgagaagtgccttaagctgtcacgtaagatgcggaaggagatgaatgtgctgacagagtggctggccgctactgacatggagctcaccaaacgatcagcggtagagggaatgccttctaacttagacagcgaagtggcatggggcaaagcgacccaaaaggagatcgaaaagcagaaggtacacctcaagagcataaccgaagtgggcgaagctttgaaaacagttctggggaaaaaggaaacactggtagaagataaactctctctcctgaactcaaactggatcgctgtgactagtcgcgccgaggagtggctgaatcttttactggaatatcagaagcatatggagaccttcgaccagaatgtggatcacataacgaagtggatcatacaggccgacacactgctggatgaatcagagaagaaaaaaccgcagcagaaggaagacgtgcttaagcggctgaaggccgagctgaatgatatcagaccaaaggtggacagtacccgcgaccaggctgcgaacctcatggccaataggggagatcactgccgtaagctggttgaaccccagatcagtgagttgaatcatcgctttgcagctatttctcaccggattaaaaccgggaaggcctctatccccctcaaagaactggaacagttcaattccgacatccagaagttgttggagcccttggaggccgaaattcagcagggagtaaacctcaaagaggaagactttaataaggatatgaacgaggacaatgagggcactgttaaggaattattgcagagaggagataatttgcaacagcgtattactgatgagcgaaaacgggaggaaatcaaaataaagcagcagttgctccagacgaagcacaacgccctgaaggatcttcggagtcaaaggaggaagaaagcccttgaaatttcccaccagtggtatcagtataagagacaagcagacgacctgctgaagtgcctggatgacattgagaaaaaactggccagtctgcccgaaccgcgggacgagcggaaaatcaaggaaatcgatagagaactgcaaaagaagaaagaagagctgaatgccgtacgccggcaagcagaagggctgagcgaagacggcgctgccatggcagtcgaaccaacgcagattcagctaagcaagaggtggcgcgaaattgagtccaaatttgcacagtttaggagacttaatttcgctcagatccacaccgtccgggaagaaactatgatggtgatgacagaagacatgccactcgagatatcatacgtcccgtccacttatctcacggagatcacccacgtctcgcaagcactgttggaagtcgagcaactgctcaatgcgccggacctctgtgccaaggactttgaggacctgttcaaacaggaggagtcactgaagaacataaaagactcactccaacagagctcaggtaggatagatatcatccacagtaagaaaaccgccgccctgcagtcagccacacctgtggaacgggtcaaactgcaagaggccctgagtcagcttgatttccagtgggagaaagtgaacaaaatgtacaaggacagacagggacgcttcgatagatctgtggaaaagtggaggcgattccactatgatatcaagatctttaaccagtggctcacagaggcggaacaattcttacgaaagacccagattccggagaattgggaacacgctaaatacaagtggtatctaaaagagctgcaggatggcatcggacagaggcaaaccgtcgtgcgcacattgaacgcaactggagaggaaattatccagcagtcatcaaagactgacgcaagtatactccaggagaagctcgggtccctgaacttgcgctggcaagaagtgtgtaagcagctgagtgaccggaaaaagcggctggaagaacagaagaatattttgtcggagttccaacgagacctgaacgaattcgttctgtggctggaggaagccgacaatatcgcctccatcccacttgagcccggcaaagaacagcagcttaaagaaaagctggagcaggtgaaactgttggtggaagagctaccactcagacaaggaatcctgaaacagctgaatgagaccggaggaccggtgctggtgtccgcacccatcagcccagaggagcaagacaagctggaaaacaagctgaaacagacgaacctgcaatggatcaaggtgagccgagcattgcctgagaagcagggcgaaattgaggcccagatcaaggacctgggtcaattggagaagaaactggaggacttggaagagcagctgaatcatctgctgttgtggctgtcccccatcaggaatcagctggagatctacaaccagcccaatcaagagggcccattcgacgtcaaagaaactgagattgctgtccaggccaagcaacccgatgttgaggagatcctttctaaaggacaacacctgtacaaggagaaaccggctacacaacctgtgaaacggaagctcgaagacttatcctcggaatggaaagcagtaaaccgactgttacaggaacttcgcgccaaacagcccgatctggcccccgggctcactacaattggggcatctcctacacagactgtgacactcgtcacccagccagtggtcacaaaagagacagccattagtaaactggagatgccctctagtttaatgctggaagtccccgcgctggcagacttcaatcgagcttggaccgaattgacagactggttaagcctgttagaccaggtgatcaagagccagcgcgttatggtcggggatctagaggacatcaatgagatgatcatcaaacaaaaggcaacaatgcaggacttagagcagcgtaggcctcagttggaggagctcatcacggccgcacagaatctgaagaacaagacctccaaccaggaagccaggaccatcatcacagataggatagagaggatacagaaccagtgggatgaagtgcaggagcacctgcagaatcggcgccaacagctgaacgaaatgctgaaagacagtacccaatggctcgaggccaaggaggaagccgagcaggtgctcggccaagccagggcaaagctggagtcatggaaagagggcccatacactgtcgacgccatacagaaaaagatcaccgaaaccaaacagctggccaaggacctccggcagtggcagactaacgtcgacgtggcaaacgatttagccctgaagctacttcgcgattactccgctgatgatacccgtaaagtgcatatgattacggagaacataaatgcatcctggcgcagcattcataagcgtgtgtctgagagggaggccgccctcgaagaaacacacaggctgcttcaacaattccccctcgatctcgagaagtttctcgcctggctgacggaggctgagactaccgctaacgttctgcaagacgcgacccggaaagagcgactgctggaagattctaaaggagtgaaggagctgatgaaacagtggcaggatctgcagggagagatcgaggcacacaccgatgtatatcataatcttgacgagaatagccaaaaaatcctgaggagcttggagggatccgatgatgccgtcctattgcagagaagactcgacaacatgaatttcaaatggagcgagctgcgaaaaaagagcctcaacattcgctctcacttggaggcatcttctgaccagtggaagcggttacacctgagcttgcaggaactcttagtctggctgcagcttaaagacgatgagctcagccgccaggctcccatcggaggcgatttccccgccgtgcagaagcaaaacgatgtgcacagagcattcaagcgggagctcaagaccaaggagcccgtgatcatgagtaccctggaaactgtgcgaatttttcttaccgaacagcctctcgaagggcttgaaaaactctaccaggagccccgtgagctgccccccgaggaaagggcccagaatgtgacaagactgctgcgaaaacaggcggaggaagtcaacactgaatgggaaaaattgaatcttcactcagctgactggcagagaaagattgacgagacgctggagcggctgcgggaattgcaagaggctaccgatgagctggacctcaaactgaggcaggcggaggttatcaagggttcgtggcagcctgtgggagatctcctgattgactccctccaagaccacctagaaaaggtgaaagccctgcgcggggagattgccccattaaaggaaaatgtgtctcatgtgaacgatctcgcccgacagttgaccactctgggcatccaactctctccatataacctaagcactcttgaagaccttaacactcgatggaagctcctgcaggtggccgtggaggatcgagtgagacaactgcacgaagcgcatagggacttcgggcccgcaagccagcactttctgagcacctctgttcagggcccctgggaacgcgccatcagtcctaataaggttccctattatattaaccatgagacccaaaccacatgctgggatcaccccaagatgacagagctctaccagtctctcgccgatctgaacaacgtgcgcttttccgcctaccggacagcgatgaagctgagaaggctccagaaggctctttgcttggatttgctaagtttgtctgcagcctgtgatgcgcttgaccagcacaatctgaagcagaatgaccaacccatggacattctgcagataataaattgtttgacgactatctatgaccggctagagcaggagcacaataatttggtgaatgtgcctctgtgcgtggatatgtgcttaaactggctgcttaacgtgtatgacaccggacggaccggacgcatccgcgtgctttcattcaagactggcatcattagtttgtgcaaagcccatctggaggacaagtatagatatctgttcaaacaggtggcatcttccactgggttttgtgatcagcggcgactcggtcttctcttacatgactcgatccaaatcccccgacagcttggcgaggtggcctcattcggcggcagtaacatcgaaccatcagtgcgatcctgttttcagtttgctaacaacaaaccagagatagaagctgccttgttccttgattggatgcgcttagagcctcagagcatggtttggctgcccgtcctgcatcgtgttgcggccgccgagaccgcaaagcatcaggccaagtgtaacatctgtaaggaatgccctataattgggttccgttaccggtcactcaagcacttcaattacgacatctgccagtcttgcttcttttctggacgcgtggccaaaggacacaaaatgcactaccccatggtagagtattgtacacccacaacaagcggggaagatgtccgggattttgctaaggtattgaagaataaattcaggactaaaaggtacttcgccaaacacccgcggatgggctatctaccggttcagacggttcttgaaggcgacaacatggagacgcccgtaacattaatcaatttctggccagtggactctgctcccgcgtcatcaccccagttgtctcacgacgatacacactcacggatcgagcactacgccagcagactcgcggagatggagaacagcaacgggtcgtatctcaatgatagcatatccccaaacgaatcaattgatgatgaacacttgctgattcagcattattgccagagcctcaatcaagattctcctctaagtcagccgaggagcccagcgcagatccttatttcgttggagtctgaggagcgtggagaactcgagcggatactggccgacctggaagaggagaacagaaacctgcaagcagagtacgaccgcttgaaacagcagcacgagcacaagggtttaagtcccctgcctagcccacccgagatgatgccgacaagcccccaaagcccccgagacgcggaacttattgcagaagccaagctccttcgacaacataaagggcggctggaggcgcggatgcagatcttagaagatcacaacaagcaactcgagagccagttacacagactgcggcagttattagagcagcctcaagctgaggctaaggttaacgggactacagttagtagcccatcaacttctctgcaaagatccgatagttctcaacccatgcttttgagagtggtgggctctcaaacatccgattctatgggggaggaagatctgttgagtccccctcaggacacatccacagggctggaagaggttatggaacagctcaataactccttccctagttcaaggggaaggaatacacctggaaagcctatgagggaggacactatgtag

SEQ ID NO: 142715 - DNA, 3678 bp, Artificial Sequence
  derived and/or modified sequence
atgccctcttccctaatgctggaggttcccgccctggccgacttcaaccgcgcctggactgaacttaccgattggttaagtctattggaccaagtcatcaagtctcagagagtgatggtgggagatctggaggatatcaacgagatgataattaagcagaaagcaacaatgcaggacttggaacaacgcagaccacaattggaggagttaatcaccgcagctcagaacctgaaaaataaaaccagcaatcaggaggcgcgcaccataattactgaccgtattgaacgcatacagaaccagtgggatgaggtgcaagaacacctccagaaccggaggcagcaattaaacgaaatgctgaaagattctacgcagtggctggaggcgaaagaagaagctgagcaggtgctgggtcaggcaagagcaaagttggagtcctggaaagaaggaccttatactgtagacgccatccagaagaaaattactgaaactaagcagctcgctaaggacttgaggcagtggcagactaatgtggatgtggcaaatgacctggctctcaagcttctcagggattattccgccgatgacacacggaaggttcacatgataaccgagaacatcaatgcgtcctggagatcgatccacaagagggtttccgaacgggaggctgcgctggaagaaacccatcgactcctgcaacagttcccacttgacctggagaaattcctcgcttggctgactgaggcagaaactactgcgaacgtcctccaggatgccactcggaaggagcggctcttggaagacagtaagggcgttaaagaactaatgaaacaatggcaagacctgcagggcgagatcgaggcccacacagacgtgtatcacaatcttgatgagaactcacagaagatccttcgttcactggagggcagcgacgatgccgtactgctccagaggcgcttagataacatgaacttcaagtggagcgaactgagaaagaagtcactcaatatccgcagccacctcgaagcatcctccgaccagtggaagagattgcacttatcactccaagaattgcttgtctggttacagcttaaggatgacgagttgagccggcaagcacctatcggaggcgattttcctgccgtacagaagcagaatgacgtccacagggcctttaagagagagctgaagaccaaagagccagtcattatgtcaacactagagacggtgcggatcttcctcactgaacaaccactggagggtctggagaagctgtaccaggagcctcgggagctccctccagaggagcgtgcccaaaacgtcactaggttactgaggaagcaggctgaggaggtgaacaccgaatgggaaaagttgaatctccactccgccgactggcagcgtaagatcgatgaaacgctcgaacgccttcgggagctgcaggaggccaccgatgagttagacttaaagctgcgtcaggctgaagtgataaaggggagctggcagcccgttggggacttattaattgatagcctgcaggaccatctggaaaaagtgaaagctctgaggggggaaatcgctcctctcaaggaaaacgtgagccacgtaaatgacttggcgaggcagctcacgaccctcgggatacagctgtccccttacaacctctcaactctggaagatcttaatacgcgctggaagctgctccaagttgcagtggaggaccgtgtgaggcagctccatgaggctcacagagatttcggccccgcttcacaacactttctgtccacctctgttcaggggccctgggaacgcgcaatcagccccaataaggtgccatattacattaatcacgaaactcagacaacctgttgggaccacccaaaaatgacagagctttatcagagcctggcggacctcaacaacgtgaggttcagcgcttacagaaccgccatgaaattaaggaggttacagaaagcactctgtctggatctcctgtcactaagtgccgcctgtgacgctcttgaccagcacaacctgaagcagaacgaccaacccatggatatcctccaaatcatcaattgcttaacgaccatatatgaccgcctggaacaggagcacaacaacctggtgaatgtccccctgtgcgtcgacatgtgcctcaactggctcctgaacgtttacgacaccggccgcacggggcgcatcagggtattgtctttcaagacgggaatcatctccctgtgcaaggcacatctggaggacaagtatcgttacctctttaagcaggtcgcctcctctaccggtttttgtgaccagcgccggctggggttgcttctgcacgatagcatccaaatcccccgccagctgggcgaagtggcgtcattcggtggcagcaacattgagccgtccgtgagatcctgctttcagttcgcaaataataagccagagattgaggccgctcttttcctcgactggatgcggctggagccccaaagcatggtgtggctgcccgttttgcaccgcgtggctgcggcagagacagctaaacaccaagcaaagtgtaatatctgcaaggaatgccctattattggatttcgctaccgatccctaaaacattttaattatgacatctgccagtcctgttttttcagcggaagagtggcaaagggccacaagatgcactatcctatggtggaatattgcaccccaacaaccagtggtgaggatgtacgggatttcgcgaaagtgctgaagaacaaattcagaacgaagcgctatttcgcaaaacatcccaggatgggttacctgcccgtacagactgtgctcgaaggagacaatatggagacacctgtgactctgatcaacttttggccggtggactcagcccccgcgtcatcaccacagcttagtcatgacgacacacacagccgcattgaacactatgctagccggctggcagaaatggagaactcaaacggctcttaccttaatgactccattagtcccaacgaatctatcgacgacgaacatctgctgatccagcactactgccagtcactcaaccaggattctccactgagccagccaagaagtccggctcagatcctgatctctttagaatcagaagagagaggtgagctcgagcgcatcctagccgacttagaagaggaaaacagaaacctgcaggctgaatacgaccgcctaaagcagcaacatgagcataaaggactgtcaccgttgccgtcacctccagagatgatgcctacttctcctcagtctccccgggacgccgagctcattgccgaagccaagctccttcgccaacataaaggacgcctggaagccagaatgcagatccttgaggatcataacaagcagcttgagtctcagctgcaccgacttagacagctgctagagcagcctcaagctgaggcgaaggtgaacggtacgacagttagttccccatccacctcactgcagcgctctgactcctcccagcctatgttgttgagagtcgtggggtcacagacttcggacagcatgggggaagaggacctgctctcacccccacaggacactagcacaggcctcgaagaggtcatggaacaacttaacaatagtttcccttcgtctaggggccgaaataccccgggaaagcctatgagggaagacactatgtag

SEQ ID NO: 142716 - DNA, 10689 bp, Artificial Sequence
  derived and/or modified sequence
atgaagaacattatggccggcctgcaacagacaaattctgagaaaattttgctgtcctgggtgcggcagtctaccagaaattatccccaagtaaacgtgatcaatttcaccaccagctggtcagacggcttggctctaaatgccctgattcattcacatcggccggatttgttcgactggaattcagtggtgtgccagcagtcagcaacccagagactcgagcacgctttcaatatcgctcgataccagctgggaatcgaaaaacttctggatccggaagatgtcgatactacatatcctgataagaagtccattcttatgtatatcacctccctgttccaagtgctgccccaacaggtgtctatagaggcaatccaggaggtcgaaatgcttcctcgaccaccaaaggtgacaaaggaagagcatttccaactgcatcaccagatgcactatagtcagcagataaccgtgagtctcgctcaaggatacgagaggacttcatccccaaagccccggttcaaaagctatgcttatacccaggccgcatatgtgactacaagtgaccccactcggtcgcctttccccagccagcatctagaggcccccgaagacaagagcttcggctcgagccttatggaaagtgaagtgaacctggaccggtatcagaccgcactggaggaggtgctgtcatggctgctgagcgccgaggataccctgcaggcccagggagaaatctctaacgatgtggaagttgtgaaggatcagtttcatacgcacgaaggttacatgatggatctgaccgcgcaccaaggacgcgttggtaatattctgcagcttgggtcaaagctcattggtacggggaaattgtcagaggatgaagaaacagaggtccaggagcagatgaatctgttgaactcgaggtgggagtgtttgagagttgcatccatggaaaaacaatctaacttacatcgggtgctgatggacttgcaaaaccagaaacttaaagaattgaatgactggctcaccaaaacagaagaaaggacacggaagatggaggaggagccattgggccctgatttagaagacctcaagaggcaagttcaacagcataaggtgctccaggaggacctggagcaggagcaggtgcgtgttaacagtctgacacatatggttgtagttgttgatgaaagcagcggggatcatgcgacagcagccctggaggaacaactgaaggttctcggcgatagatgggcgaatatttgtaggtggaccgaggatagatgggtcctgctgcaggatatcttgctaaaatggcagagattgaccgaagaacagtgccttttctcagcctggttgagcgaaaaagaagatgcggtgaacaagattcacaccacaggcttcaaagatcagaatgagatgctctccagcctgcagaagctggccgtgctgaaggccgaccttgaaaaaaaaaagcagagcatgggcaagctttactccctgaaacaagacttgctgagcaccctgaagaacaaatccgtcacacagaaaaccgaagcgtggctggataactttgctcgatgctgggataatttagtgcagaaactagagaagtcaactgcccagatatcacaggccgttacaacgacgcagccttctcttacgcaaactaccgttatggaaaccgtgaccaccgtcacaacacgggaacagatcctggtgaagcacgcgcaggaggaactcccaccgccaccgccacagaagaagaggcagatcaccgtagatagtgagatcaggaagcgcctggatgtggatataacagagcttcattcgtggattaccagatctgaggccgtgctgcagagcccggaattcgcgatcttccgcaaggaggggaacttctcggacctcaaggagaaagtcaatgcgatcgagcgcgaaaaagctgagaaatttcgtaagttgcaggacgcctctcggagtgcacaggcgttggttgagcaaatggtgaatgaaggcgtaaacgcagacagcatcaagcaggcatctgagcagctgaattctaggtggatcgagttctgtcagctgctgtcagagaggctgaattggttagagtaccagaacaatatcatcgccttctacaatcagcttcagcaattagaacagatgaccactacagccgagaactggttgaagattcagccgaccaccccgtcagagcctacggccatcaagagccagctgaagatctgcaaggatgaagttaacaggcttagtgatttacagccacagatcgaacgccttaaaattcagtcaattgctttaaaggagaaaggtcaaggcccaatgttcctcgacgcagatttcgtggcctttaccaatcacttcaaacaggtgtttagcgacgtgcaggcccgggaaaaagagttacagacgatttttgataccttgcctcctatgcggtatcaggagaccatgtccgcaattaggacctgggttcaacagtccgagactaagctcagtatcccacagctgagtgtcactgactatgaaattatggagcagcgactgggcgaattgcaggcattgcagtcgtccctgcaggagcagcagtctggtttgtattacctgagcacaactgtgaaggagatgtctaaaaaagcgccgtcagagattagtagaaagtaccagtctgaattcgaagaaatagagggcaggtggaagaaactgagctcacagctcgtggaacactgtcagaagcttgaagagcagatgaataagctcagaaaaatccagaatcatatacagaccctgaagaaatggatggccgaagtggacgtatttctgaaagaggagtggccagcactgggtgatagtgaaatcttgaagaaacagctgaaacaatgccggcttctggtgagcgacatccagaccattcagccttccctgaactccgtgaatgaaggaggccaaaaaattaagaacgaagctgagcctgagtttgcgagtcggttggagactgaactgaaggaactcaacacacaatgggatcatatgtgtcagcaggtgtacgcgcgcaaagaagcattgaaggggggactcgaaaaaacagtctcactacagaaagacttatcggagatgcatgaatggatgacgcaggctgaagaggagtacctcgagcgggacttcgagtataaaacacccgatgagttacagaaagctgtagaagagatgaaaagagcgaaggaagaggcacaacaaaaagaagctaaggttaagctcctgaccgagtccgtaaattccgtcattgcccaggccccaccagtggctcaggaagccctgaagaaggagctggaaaccctaacaacaaactaccagtggctgtgtacgcggctgaatggcaagtgtaagaccttggaagaagtgtgggcttgttggcacgaactgttatcttacctcgaaaaggccaataaatggcttaatgaagtggaattcaaactcaaaacaaccgagaatattccaggtggtgctgaagagatcagtgaggttctggattcgctggagaatctgatgagacatagcgaagacaatcccaatcagatacgtattctggcgcagacccttactgatgggggtgttatggatgaattgataaatgaagaattggaaactttcaacagtagatggcgggaactgcatgaggaggcggtccgccgccagaagttgctcgaacagtctattcagtcagcgcaggaaacggaaaaatctctgcacctgatccaggagtcgcttacctttatcgacaaacagctcgcagcctatattgctgacaaagtcgatgctgcccagatgcctcaggaagcgcagaagatccagagtgatctgacttcacacgagatctccctggaggaaatgaagaaacataatcagggaaaagaggctgcgcaaagggtgttatcccagattgatgttgcgcagaagaagttgcaagatgtatcaatgaagttcaggctgttccagaaacccgcaaactttgagcagcgcctccaggaaagcaaaatgatcctggatgaagttaagatgcacctgccagcactagagacgaaatccgttgagcaggaagttgttcaatctcagcttaaccattgtgtgaacctctacaaaagtttgagcgaggtcaaatccgaggtagaaatggtgatcaagaccggcagacaaatcgtacaaaaaaaacagaccgagaatcccaaggaacttgacgagcgagtcaccgcgctgaagcttcattacaacgaactgggcgcaaaggttaccgagagaaaacagcaactggagaaatgcttgaagctgtcacggaaaatgcgcaaagaaatgaatgtgttaaccgaatggctggccgctactgacatggaattaactaagagatccgccgtcgaagggatgccatccaacctggactcggaagtcgcatggggaaaagccacacaaaaggagatcgaaaagcagaaggtccacctgaagtccattacagaagtcggagaagcattgaagacggtgctgggtaagaaggagaccctcgtagaagacaagctgtccctactgaactccaactggatcgccgtgacatccagagcagaagagtggctgaatctactgctggagtaccaaaagcacatggagacatttgaccagaacgtggaccatattactaaatggatcatccaggcagatacactgctggatgagtctgaaaaaaagaaaccgcagcagaaagaagacgtgctgaagcggctgaaagcagaactgaacgatattcgtccgaaagtcgattcaacccgcgatcaagctgccaatctgatggcgaatcggggcgatcactgtcgcaagctcgtagaaccacagatctcagaactgaaccataggtttgcagccatctcccaccggattaagactggaaaggcttcaatccccctcaaggagctcgaacaattcaactccgacatacagaagcttctcgagccccttgaggcagagattcaacagggagtgaacctgaaggaagaagacttcaataaagatatgaatgaagataatgagggaaccgtgaaggagctgctacagcgtggcgacaacttgcagcagagaattacagatgagcgcaagagagaggaaattaagatcaagcaacagctgttacagacgaaacacaacgcactgaaagacctgcgtagtcagcgcaggaaaaaggcattagaaatctcccatcagtggtaccaatacaaacggcaggccgacgacctgctcaagtgcttggacgacattgagaagaagcttgcatcgctaccagagcccagagacgaacgcaaaataaaggaaatcgaccgcgaattgcaaaaaaaaaaagaagaactcaatgccgtgcgccgtcaagccgaagggctcagtgaagatggggcggccatggcagtcgagccgacccagatacaactctccaagcgatggcgggaaatagagtccaaatttgctcagtttaggcggctgaactttgcacaaatccatactgtgcgcgaagaaactatgatggtgatgactgaggacatgcccctggaaatttcatatgtaccttcaacctatctgacggagattacgcacgtgtctcaggcgctcctcgaggtcgaacagctgctgaatgcccctgacctgtgtgcaaaggactttgaggatctcttcaagcaagaagaaagtctgaagaatattaaggacagcctgcagcagagtagtgggaggatagatatcattcacagtaagaaaacagcagccctgcagtcagccacaccagtggagagggtaaagcttcaggaagccttatcgcaactggattttcagtgggagaaagttaacaaaatgtataaggataggcagggacgtttcgacagatcagtggagaaatggcggcggtttcactacgacattaaaatctttaaccagtggttgacagaggccgaacagttcctacgaaaaacccagattccagagaactgggagcatgccaaatacaagtggtatttgatcgctctgaaggatgggataggccagaggcagacagtcgtgagaaccctgaatgcaacgggggaagaaataatacagcagtcctcaaaaaccgacgcttcaattttacaagagaagctcggctctctcaacctgcggtggcaggaggtttgcaagcagctaagtgacaggaaaaagcggctggaagaacagaaaaatatattgtccgagttccaaagggaccttaatgagtttgtcctgtggctcgaggaggcggataacatcgcttcaatcccacttgagcctggcaaagagcagcagctgaaggagaaactggagcaggtgaaactcttggtggaggaactgcccctccggcagggcatactgaagcagctgaacgagaccgggggacccgttctggtgtcagctcccattagccccgaagagcaggataaactggagaataagctaaagcagactaacctacagtggatcaaggtgtcccgcgcattgcccgaaaaacaaggtgagattgaggcccagatcaaggacctgggacagctggaaaaaaagctagaggatctcgaagaacaattaaatcacctcctgttatggctgtcccctatccggaaccagttagagatctataaccaaccgaatcaggagggccctttcgatgtcaaagaaactgaaatcgccgtgcaggccaagcagccagacgtggaggaaatcctgtcaaaagggcaacatctgtacaaggagaaacccgcaacgcagccagttaagcgcaaattggaagacctcagttctgaatggaaggcagtgaacaggctccttcaagaactacgagcgaagcagccggacctggctcctggactaaccacaatcggagcctctcctacgcaaaccgtcactctggtaactcaaccagtggttacgaaagaaaccgccataagcaagttagagatgcctagcagcctcatgcttgaggtgcccgctctggctgacttcaaccgagcatggactgaacttacagactggctgtcactgctggaccaagtgattaagagccagagggtgatggtgggcgatcttgaggatatcaatgaaatgatcattaagcagaaagctaccatgcaagatttagagcagcgaaggccacaacttgaggagttaattaccgccgcccaaaacctgaagaataagacttctaatcaagaggcccgaacaatcattactgataggattgagcgcatccaaaatcagtgggatgaggtccaagaacaccttcaaaatcgtcgacaacagctgaatgaaatgcttaaagatagcacccagtggctcgaggccaaggaagaggccgaacaggtgctgggccaggcccgggcaaagttagaatcttggaaagaaggaccctatacagtggacgcaatccagaagaaaattaccgagacaaagcagcttgcaaaggatttacgccagtggcaaaccaatgtcgacgtcgcaaatgatctggccttaaagctcttgcgcgactacagcgccgatgacactagaaaagtgcacatgatcaccgaaaacattaatgccagctggaggtccatccacaaacgcgtttcagagcgcgaggctgccctggaagaaacccatcgtttactgcagcaattccccctggatctggaaaaattcctggcctggctgacagaagctgagacaacggccaacgtgcttcaggatgcgacaagaaaggagaggctcctggaggatagcaaaggtgtcaaagaactgatgaagcagtggcaggaccttcagggggaaatagaagcacacaccgacgtctaccacaatctggacgagaatagccagaagatcctgcgttcccttgaaggctcagacgatgccgtcttactccagcgccgccttgataacatgaacttcaagtggtcagaactgaggaagaagagcctcaacatccgctcgcatctggaggccagtagtgatcagtggaaacgattgcatctgagtctgcaagagctcctggtatggttacagctaaaggacgacgagctgagtcggcaggcaccgatcggcggggactttcctgctgtgcagaaacagaacgacgtccatagagccttcaagagggaactgaagacgaaggaaccagtcatcatgtccacactggaaacggtcaggatatttttaaccgaacagccactggagggcctcgagaaactataccaggaaccccgagagctcccacctgaagagcgtgcccagaacgtgacccggctcttgagaaaacaggcagaagaggtgaatacagagtgggagaaattgaacctacactccgcggactggcaacgcaagattgacgagacccttgagcgactcagagaacttcaggaggcgactgacgaactggacctcaaactgagacaagctgaggtgatcaagggtagctggcagcctgtgggcgatttgctgatagatagtctccaggaccacctagagaaggttaaggcgctaaggggggaaatcgcgcccctgaaagagaatgtaagccacgtgaacgacttagcccggcagctgaccacactcggcatacagctgtccccttacaatctgtcaactttggaggatctaaacacacggtggaaactcctccaagtggccgtggaggatagggttaggcagctgcacgaggcccacagggattttgggccggcgtctcagcacttcctctctacaagtgtccagggtccctgggagagggctatctcccctaataaggttccctactacattaatcacgaaactcagactacttgttgggaccaccctaagatgaccgagctgtaccaatcactagctgatttaaataatgtcagattctcggcctaccgcacagcgatgaaattgcgcaggctacagaaggctctgtgtctggacttactgagtctgagcgctgcctgtgacgctctcgaccagcacaatctgaagcagaacgaccagcccatggacatactgcaaatcataaattgtctgacaactatctatgaccgactcgagcaggagcacaacaacctggttaacgtgcccctgtgtgtggatatgtgtctgaattggctgttgaacgtgtatgacactggcaggaccgggcgaatcagagttttgtcgttcaagactgggattataagcctgtgtaaggcccacttggaggataagtatcgatacctttttaagcaggttgcatcatcaacaggcttctgtgaccaaaggagactggggttgctgttgcacgacagtatccagatcccacgacagttgggcgaagtggcttcttttggaggatctaatatcgagccctccgtgcggtcctgctttcaattcgccaacaataagcccgaaatcgaggccgccctgttcctcgactggatgcgactcgagccacagagcatggtctggctgccagtcttgcatagggtggctgccgctgaaaccgccaaacatcaggccaagtgcaacatttgtaaggagtgtccaattataggattccgctatcggtcattgaagcatttcaactacgatatttgccaatcatgttttttctccggccgggtggccaaaggccataagatgcactaccccatggtggagtattgcacgccaacgacctcaggcgaggacgtgcgggactttgcaaaggttctgaaaaataagtttcggacaaaacggtacttcgcgaaacacccacggatggggtatttacccgtgcagaccgtgttagagggagataacatggaaacccctgtgacacttataaacttctggcctgtagacagcgcccccgcaagcagccctcagctgtcacatgacgacacacactcccggattgagcactacgccagtaggttagccgagatggagaattcaaacggctcttacttgaatgacagtatttccccaaatgagtcaatcgacgatgaacacctgctaatacagcattactgccaaagcctgaatcaagactcacccttgagtcaacctcggtctccagcgcagatactcatttcccttgaaagtgaggaaagaggggagctggaaaggattctcgccgatcttgaggaagagaaccggaacctgcaagccgagtatgatcgtctgaaacagcaacacgaacacaaaggcctgtctccgctgccttcccctccagagatgatgccgactagcccccagagtcctcgcgatgcagagctcatagccgaagctaagcttctccgacaacacaaggggcggttagaggcccgaatgcaaatcttggaggatcacaacaaacaactggaatctcagctgcaccggctgcggcagctgctggagcaaccccaggctgaagccaaggtaaacggcaccactgtgtcctcacccagtacctccctgcagagatccgacagcagccaaccaatgttgttgagagtggtaggctctcagacgtcggatagtatgggagaggaagatcttctgtcccctcctcaggatacgtccaccggcctggaagaagtgatggaacaactcaataacagctttcctagttcccgcggaagaaacactcccggtaagcccatgcgcgaggacaccatgtag

SEQ ID NO: 142717 - DNA, 11058 bp, Artificial Sequence
  derived and/or modified sequence
atgctgtggtgggaggaagttgaggactgttacgagagagaagatgtacagaaaaagacgttcaccaagtgggtgaatgcccagttttctaaatttgggaaacagcatatagagaacctatttagcgacctacaggatggacggagactactggatcttcttgaaggtcttacaggtcaaaagctcccaaaagaaaagggcagcacccgggtgcatgctcttaacaatgtaaacaaggcactccgcgtgctccagaacaataacgtggacctggtcaatatcggatcaaccgacatcgtggatggaaaccataaactgaccctcggacttatttggaacattatcctgcattggcaggtaaagaatgtcatgaagaatatcatggccggcctgcagcaaacgaatagtgagaagatactgctgagctgggtgcgacagagcactcgaaactaccctcaggttaacgtcatcaactttacaacgtcctggagtgacggactcgctctgaatgcactcatccattctcaccgacccgacttattcgattggaactccgttgtgtgccagcagagtgctactcagaggctcgagcacgcgtttaacatcgcccgataccagttaggaattgaaaagctccttgacccagaagatgtcgacacaacatatccagataaaaaaagcattctgatgtacatcacaagcctgttccaggtgctcccacaacaggtgagtatagaagctatccaggaagttgagatgctgcccaggcccccaaaagtgaccaaggaggaacacttccaattgcaccatcagatgcactactctcagcaaatcactgtaagtcttgctcaggggtatgaaaggacatcctcacctaaaccacgattcaagagctacgcctatacgcaggcggcctatgtcactacaagtgatccaacccgcagtccgttcccttctcagcatttggaagcccccgaagacaagtccttcgggtcatctctgatggagagcgaggtgaacctcgatcgctaccagactgcactcgaggaggtgctcagctggctattatctgctgaagataccctacaggcccagggggaaatctctaacgatgtcgaagtcgttaaagaccagttccatacccacgaaggctacatgatggatttaacagctcatcagggacgcgttggaaacattctgcagctgggctcaaagctgatcggtacaggaaaattgagtgaggacgaagagaccgaagtgcaggagcagatgaacctgctcaactcacgttgggagtgtctgcgggtcgcctcaatggagaaacagtccaacctccaccgggtgctcatggatctgcagaatcagaagctcaaggaactaaacgattggctgaccaagaccgaggagaggaccaggaagatggaagaggagccccttggtccagatctggaggaccttaaaagacaggtgcagcagcataaagtcttgcaggaggaccttgaacaagaacaagtgcgggtgaactcgctgacccacatggtcgtggtggtggatgagagtagtggggatcacgccacagccgccttagaggagcaactcaaagttctgggcgaccgctgggccaatatttgccggtggaccgaggaccggtgggtgttgttgcaagatatcctgctgaaatggcagagactgactgaagaacagtgtctgttctcagcctggcttagtgaaaaagaggatgccgtgaataaaatccataccaccggcttcaaggaccagaacgagatgcttagctccctacaaaagcttgcggtgctgaaagccgacctggagaaaaaaaagcaatctatggggaaactctattccctgaagcaggacctccttagtactttaaagaataagtcggtcacacaaaagacggaggcctggcttgataattttgcccgatgctgggataacttggtgcaaaagctggagaagagcacagcacagatctctcaggcggtcaccaccacacaaccaagccttactcagaccactgtgatggagacagtaacaacggtgactacgcgagagcaaatattggtgaagcacgctcaggaggagcttcccccaccaccaccgcagaagaagagacagatcaccgtcgacagcgagatccggaagcggcttgatgttgacatcaccgaactgcattcttggattactcgatctgaggctgtactgcagagccctgagttcgccatattccgcaaagaaggtaacttctcggatttgaaagaaaaagtgaacgctattgagcgggaaaaagctgaaaagttcagaaagttgcaggatgccagccgctccgcgcaagccctggtggagcagatggtgaatgaaggagtgaatgccgattccatcaaacaagcctctgagcagctgaactccagatggattgagttctgccaactcttatctgaacggctaaattggctggaataccagaataacatcatcgctttctataaccagctacaacaactggaacagatgacaacaacagctgaaaattggctgaagattcaacctaccacacccagcgagccgacggctattaagtctcagctgaaaatatgcaaggacgaggtcaaccgcctttctgatttgcagccccagatcgagcggttaaagattcagagcatcgcccttaaggaaaaaggacagggtccaatgttcctggacgccgacttcgtggcatttacgaaccacttcaagcaggtcttttcagacgtccaggccagagaaaaggaactccagactatttttgacacactgcctccaatgcgataccaggagaccatgagcgctatcaggacatgggtacaacagagcgagaccaagctttccatccctcagctctccgtgactgactacgaaattatggagcagagactcggagaattgcaggcactgcaaagcagtctccaggaacagcagagcggactgtattacctgtcaaccacagtcaaagaaatgtctaagaaggctccttccgaaatcagtaggaagtaccaatctgagttcgaggagattgaggggcgttggaagaaactcagctcacaattggttgagcattgccagaagctggaagagcaaatgaacaaactgcgcaaaatccaaaaccacatccaaacgctgaaaaagtggatggccgaggtcgacgtatttttgaaggaggaatggccagctctgggggatagcgagattctgaagaaacagctgaagcaatgccgccttctagtgtcagacatccaaaccatccagccctctctcaactctgtgaacgaaggagggcagaagattaagaacgaagccgaacccgaattcgcctcaaggctggagacagagctcaaggaattaaatacacagtgggatcacatgtgtcagcaggtgtacgctagaaaagaggctctgaaagggggtcttgagaagacggtgtcccttcaaaaggatttgtcagaaatgcacgaatggatgacccaggccgaagaggaatacctggagcgggacttcgagtataagactccagatgagctacagaaagcagtagaggagatgaagcgggctaaagaggaagcgcagcagaaagaggcaaaggtcaaactgttgacagagagtgtaaatagtgtaatcgcccaggcaccacctgtggcgcaggaggccctaaagaaagagctggagacacttacaaccaactaccagtggctttgcaccagactgaatggcaaatgcaagaccctcgaggaggtctgggcctgttggcatgaattactttcatatctggaaaaagccaacaaatggctgaatgaggtagagtttaaactgaaaactacagagaacatacccgggggcgcagaagagattagcgaggtgctggacagcctcgagaacttaatgagacattccgaagacaatcccaatcagatccgaatcctggcccagaccttaacagacgggggcgtgatggacgagcttattaacgaggagctcgaaaccttcaatagcaggtggcgcgagctgcacgaggaagccgtccggaggcaaaaattactggaacagtccatccagtcagctcaagagaccgagaaaagcctgcatcttatacaggaaagcctcacatttattgacaagcagctggctgcttatatagctgataaggtggatgccgctcagatgccacaggaggcccaaaagattcagtccgacttgacgtctcatgagattagtctggaggagatgaaaaaacacaaccagggcaaggaggcagcccagagagtcttgagtcaaattgatgtcgcccagaagaagttgcaagacgttagtatgaagttcaggctgttccaaaaacctgccaacttcgaacagcggctgcaggagtctaagatgatcctcgacgaagtgaaaatgcacttgcccgcactggaaactaagtcagtggagcaggaagtggtccaaagccagctgaaccattgcgtgaatctgtacaagagtctgtccgaagttaagagtgaggtcgagatggtaataaagacggggcggcaaatagtgcagaaaaagcagacagaaaaccctaaagagctggatgaaagagtcaccgctctgaagctccactataatgaactgggtgccaaggtgaccgagaggaagcagcagctggagaagtgcttaaagttgagtcgaaaaatgcggaaggagatgaatgtgttgaccgaatggctggccgcaactgacatggaactgactaagagaagcgccgtggaaggcatgccttcaaacctcgactcagaagtagcctggggtaaggctacgcagaaagagattgagaaacagaaagtgcatctaaaatctattactgaagtgggggaagcattaaaaactgtgttgggaaagaaggaaacactcgtggaagacaagttgagccttctgaatagcaactggatcgctgtgacatcccgggcggaggagtggttgaatctcctgctcgagtatcagaagcatatggaaacatttgaccaaaacgtcgatcatatcaccaagtggatcattcaggcagacaccctattggacgagtctgaaaaaaagaaaccacagcaaaaggaagatgtgctgaaacgcctgaaggcagagctcaatgatatacggccgaaggtggacagcaccagggatcaggcggctaacctaatggccaacaggggagatcactgtcgcaaacttgtagaaccgcagatcagtgaactaaaccatcgattcgcagccatttctcaccgcattaagacaggcaaggcatcgatcccacttaaggagctcgaacagttcaactcagacatccagaagctgctggaaccccttgaggccgaaatccagcagggcgtgaatttgaaggaggaagatttcaataaagatatgaatgaggataacgaaggcacggtgaaggagctgcttcagcgcggggataaccttcagcagagaataactgatgaaaggaaacgggaagaaataaagatcaagcagcaactgctgcagactaagcataacgctctgaaggatctccgcagccagcgacggaagaaagccctggaaatctcacaccagtggtatcaatataagcggcaggccgacgatcttctgaaatgcctcgacgatatcgagaaaaagctggcctccttacctgagcccagggacgagaggaagattaaagagatagatcgcgagctacagaaaaagaaagaggagcttaacgcagtacggcgccaggctgaaggcctctctgaggacggcgccgctatggcggtggaacctacacagattcagctgagtaagcggtggcgggagattgaatcaaagtttgctcaattccgtcgactaaattttgcccaaatccacacggtgcgtgaggagacaatgatggtgatgaccgaggatatgcccttggagatctcttatgtgccctcaacatatttaacagaaatcacccatgtgagccaggccctgctggaggtggagcagctgctcaacgcacccgatctgtgcgctaaagatttcgaagatcttttcaaacaggaagagagcctgaaaaacattaaggacagtctgcagcagagttccgggcggatcgacataatccattccaagaagaccgcagccctgcagtctgcaactcctgtcgaaagagtcaagcttcaggaagccctgagccagctggactttcagtgggagaaggttaacaagatgtacaaagatcggcagggccggtttgaccgaagtgttgagaagtggagacggtttcattacgacatcaagatcttcaatcagtggcttactgaagcagaacagtttttaagaaagacgcaaattcccgagaattgggagcatgctaaatacaagtggtatcttattgcgctgaaggatggaatcggtcagaggcagaccgtggtccgcaccttaaatgcaaccggagaggagattatccagcagtccagtaaaacagacgcgtcaatcctgcaagaaaaactggggtctttaaaccttagatggcaggaagtttgtaagcaactcagcgatcggaagaaacggttagaggagcagaaaaacattctttccgagttccagcgcgatttaaatgagtttgtgctttggctagaagaagctgataatatagcctctataccgctcgaaccaggtaaggaacaacagttgaaggaaaagttagagcaggtgaagctgttagtggaggaacttcctctgcggcagggcatactcaaacagttaaatgaaactggagggcctgtgctagtgtctgcacctattagcccagaggagcaagataaactcgagaacaaacttaagcagacaaacctccagtggatcaaagtgtcaagagcgctccccgagaaacagggggaaatcgaagcccagataaaggatctaggtcagttagaaaaaaaactcgaggaccttgaagaacagctgaaccaccttctactgtggctgtctcccattagaaaccagctagaaatttataatcagccaaatcaggaggggccctttgacgtcaaggaaactgaaattgcggtccaggctaagcagcccgatgtggaggagattctgtcaaaagggcagcacctgtataaggagaagccagctacccaacccgtgaaacgtaagttagaagatctgagcagtgaatggaaggctgtgaaccgcttgctccaggaactgcgagccaagcagcccgatctcgcccccgggctcaccaccattggggcctccccaacacagactgtaaccctcgtaacccaaccagtggtaaccaaggaaactgctattagcaaattggagatgccttcaagtctcatgctggaagtgccagccctcgcagacttcaatcgggcctggacagagctaacggattggctgtcgctactggatcaggtaatcaaatcccagagagtcatggtgggggacctggaggatataaatgaaatgatcatcaaacaaaaggctactatgcaggatctggagcagaggaggcctcaactggaagagttaatcacagctgcccagaatcttaagaataaaaccagtaatcaggaagctcggacgatcattaccgaccggatagaacggatccaaaatcagtgggacgaggtgcaggagcatcttcaaaatcggcgccaacaactaaatgagatgctgaaagactccacacaatggctggaggcaaaggaggaagctgaacaagttttggggcaggctcgggccaagctggaatcatggaaagaaggaccttacacggtcgacgctatccaaaagaagattaccgagacgaagcagctggccaaggacttgcgccagtggcagacaaatgtcgacgtagccaacgacctggccctgaagttgctgcgggattacagcgctgatgatacacggaaggtgcatatgatcactgagaacataaacgccagttggagatcaatccacaaaagggtgtcagaacgggaggctgccctcgaggagacccacagactgctgcaacagttccccctagaccttgaaaaattcctagcctggctgacagaagccgaaacaacagcaaatgtgctgcaggatgcaaccaggaaggaacgactgttagaggactcaaaaggggtcaaagagctaatgaagcagtggcaggatctacagggagaaatagaagcacatacggatgtttaccataacctggacgagaactcccagaagatactgcgatcccttgagggcagcgacgacgcagtgctcctgcaaagaaggctggacaacatgaactttaagtggtccgagctgcgcaagaagtcgctgaacatccgatcacaccttgaggcctcttcagatcagtggaagaggcttcacctcagcctacaagaactactggtatggctgcagttaaaagacgatgagctgtctcgtcaggcgccaattggaggggattttccggcagtgcagaagcagaatgacgttcacagggcctttaagagagaactgaaaactaaagaacccgtcataatgtccacgttagagaccgtgcgcatatttctgactgagcaacccctggagggtctggagaagttatatcaagaaccccgcgagctgccacccgaagagagagcgcagaatgtcacccgcttgttgcgaaagcaagctgaggaggtgaataccgaatgggagaaacttaatctccacagcgcggattggcagcgaaaaatagacgagactctggaaagacttcgggaactacaagaggccaccgacgagctggatctgaaattgcggcaggctgaagtaattaagggctcttggcaaccggtgggtgacctcttgattgacagcctgcaggatcaccttgaaaaagtgaaggccctgcgcggagaaatagcaccactgaaggagaacgtttcacacgtcaacgacctggctcggcagctgacgacattgggcatacagctctcaccgtacaatctgagcactttagaagaccttaatactagatggaagttgttgcaagtggccgtggaggaccgcgtcaggcagctgcatgaggcacatagagatttcgggcccgccagccagcactttctgtcaaccagtgttcagggcccatgggagcgcgccatctcaccgaataaggtcccttattacatcaaccacgaaacacagaccacatgttgggaccaccctaagatgacagagctttaccagtctctggctgacctgaacaacgtccgttttagcgcttatcgaactgcaatgaagcttaggcgactgcagaaagctctgtgtctggatctgctatcactgtctgctgcctgtgacgcactggaccagcacaatctgaagcagaacgaccagccaatggatattctgcaaatcatcaattgcctgaccacaatctacgatcgcctggagcaagagcataacaacctcgtaaacgtgcccctctgcgttgatatgtgtctgaactggttgctaaatgtttatgacactgggcgcacagggcggatcagggtcctcagctttaaaaccggcattatctcgctgtgtaaggcccacttggaggacaagtaccgctacttgttcaaacaagtggcaagctcaacgggcttctgcgatcagaggagactgggactgctcttgcacgattccatacaaattcctaggcaactgggggaggtggcgagctttgggggctccaacattgaaccttccgtgaggtcatgttttcagtttgccaacaataagcctgagattgaggctgctttgtttctggactggatgaggctagaaccacagtccatggtgtggctgccagtcctgcaccgggttgctgcagctgagacggccaagcaccaagcgaaatgcaatatatgtaaagagtgcccgatcatcggatttagatacaggagcctgaagcattttaattacgatatctgccagagctgttttttcagtggcagggtggcgaagggacataaaatgcattatccaatggtggagtactgtacgccaaccacaagtggggaggacgtccgcgattttgctaaggtcctgaaaaacaaattcagaacaaagcggtacttcgctaagcaccccagaatgggctatctcccggttcagacagtgttggaaggtgacaatatggagactcctgttacacttattaatttttggcccgtcgactctgcacctgcctcttcccctcagcttagtcatgacgatacgcattctaggatcgaacactacgcttcccggctcgcagagatggaaaactcaaatgggtcctacctaaatgactctatcagtcctaacgaatcaatcgacgacgaacatttgctgatccagcactactgccagagtctcaatcaggactccccgctgagccagcccaggtctccagctcagattctgattagcttggaatccgaagaacgcggagaattagagcggattctagccgatctggaagaagaaaaccgaaacctgcaggccgagtatgacaggcttaaacagcaacatgaacacaagggactgtcccctctccccagccctcccgagatgatgccaacttcaccccaaagcccccgcgacgcagagcttatcgctgaggctaaactgctgcggcaacataaaggtcggctggaggcccggatgcaaattttggaggatcataataagcagttagaatctcagctccataggctacgtcagctgctggaacaaccccaggctgaagccaaagttaacggcacaactgtctcatcaccatctacttcactgcagaggtccgatagctctcagcctatgttgttaagagtggtcggcagccagacatctgattctatgggagaggaggatttactatccccaccacaggataccagtaccggtctggaggaggtaatggagcagctgaacaatagctttccgtcaagccggggcaggaatacgcccgggaaacctatgagggaggatactatgtag

SEQ ID NO: 142718 - DNA, 11058 bp, Artificial Sequence
  derived and/or modified sequence
atgctgtggtgggaggaggtggaggactgctatgagcgggaggatgtgcagaagaagaccttcaccaagtgggtgaatgcccagttcagcaagtttgggaagcagcacatcgagaacctcttcagtgacctgcaggacggccggcggctgctggacctgctggagggcctgaccggccagaagctgcccaaggagaagggcagcaccagggtgcacgccctgaacaacgtgaacaaggccctgcgggtgctgcagaacaacaacgtggacctggtgaacatcggcagcacagacatcgtggatggcaaccacaagctgaccctgggcctcatctggaacatcatcctgcactggcaggtgaagaatgtgatgaagaacatcatggccggcctgcagcagaccaacagcgagaagatcctgctgtcctgggtgcggcagagcaccaggaactacccccaggtgaatgtcatcaacttcaccacctcctggagcgatggcctggccctgaatgccctgatccacagccacaggccagacctgtttgactggaacagcgtggtgtgccagcagagcgccacccagaggctggagcacgccttcaacatcgcccgctaccagctgggcatcgagaagctgctggaccctgaagatgtggacaccacctacccagacaagaagagcatcctgatgtacatcaccagcctcttccaggtgctgccccagcaggtgtccattgaggccatccaggaggtggagatgctgcccaggcctcccaaggtgaccaaggaggagcacttccagctgcaccaccagatgcactacagccagcagatcaccgtgtccctggcccagggctatgaaagaaccagcagccccaagccccgcttcaagagctatgcctacacccaggccgcctacgtgaccaccagtgaccccaccaggagccccttccccagccagcacctggaggcccctgaggacaagagctttggcagcagcctgatggagagcgaggtgaacctggaccgctaccagacagccctggaggaggtgctgtcctggctgctgtctgctgaggacaccctgcaggcccagggcgagatcagcaatgatgtggaggtggtgaaggaccagttccacacccatgagggctacatgatggacctgacagcccaccagggccgggtgggcaacatcctgcagctgggcagcaagctgattggaacaggcaagctgtctgaagatgaggagacagaggtgcaggagcagatgaacctgctgaacagccgctgggagtgcctgcgggtggcctccatggagaagcagagcaacctgcaccgggtgctgatggacctgcagaaccagaagctgaaggagctgaatgactggctgaccaagacagaggagaggaccaggaagatggaggaggagcccctgggccctgacctggaggacctgaagaggcaggtgcagcagcacaaggtgctgcaggaggacctggagcaggagcaggtgcgggtgaacagcctgacccacatggtggtggtggtggatgagagcagcggggaccacgccacagctgccctggaggagcagctgaaggtgctgggggaccgctgggccaacatctgccgctggacagaggaccgctgggtgctgctgcaggacatcctgctgaagtggcagaggctgacagaggagcagtgcctcttcagcgcctggctgtctgagaaggaggatgctgtgaacaagatccacaccaccggcttcaaggaccagaatgagatgctgagcagcctgcagaagctggccgtgctgaaggctgacctggagaagaagaagcagagcatgggcaagctgtacagcctgaagcaggacctgctgagcaccctgaagaacaagtctgtgacccagaagacagaggcctggctggacaactttgcccgctgctgggacaacctggtgcagaagctggagaagagcacagcccagatcagccaggccgtgaccaccacccagcccagcctgacccagaccaccgtgatggagaccgtgaccaccgtgaccacccgggagcagatcctggtgaagcacgcccaggaggagctgcccccacctccaccccagaagaagaggcagatcaccgtggacagcgagatcaggaagaggctggatgtggacatcacagagctgcacagctggatcaccaggtctgaggccgtgctgcagagccctgagtttgccatcttcaggaaggagggcaacttcagtgacctgaaggagaaggtgaatgccatcgagcgggagaaggccgagaagttcaggaagctgcaggatgccagccgcagcgcccaggccctggtggagcagatggtgaatgaaggagtgaatgctgacagcatcaagcaggccagcgagcagctgaacagccgctggattgagttctgccagctgctgtctgagcggctgaactggctggagtaccagaacaacatcatcgccttctacaaccagctgcagcagctggagcagatgaccaccacagctgagaactggctgaagatccagcccaccaccccatctgagcccacagccatcaagagccagctgaagatctgcaaggatgaggtgaaccggctgagtgacctgcagccccagatcgagcggctgaagatccagagcatcgccctgaaggagaagggccagggccccatgttcctggatgctgactttgtggccttcaccaaccacttcaagcaggtgttcagtgatgtgcaggcccgggagaaggagctgcagaccatctttgacaccctgccccccatgagataccaggagaccatgtctgccatccgcacctgggtgcagcagagcgagaccaagctgagcatcccccagctgtctgtgacagattatgagatcatggagcagaggctgggggagctgcaggccctgcagagcagcctgcaggagcagcagagcggcctgtactacctgagcaccaccgtgaaggagatgagcaagaaggcccccagcgagatcagcaggaagtaccagagcgagtttgaggagattgagggccgctggaagaagctgagcagccagctggtggagcactgccagaagctggaggagcagatgaacaagctgaggaagatccagaaccacatccagaccctgaagaagtggatggccgaggtggatgtgttcctgaaggaggagtggccagccctgggggacagcgagatcctgaagaagcagctgaagcagtgccgcctgctggtgtctgacatccagaccatccagcccagcctgaacagcgtgaatgaaggaggccagaagatcaagaatgaagctgagcctgagtttgccagccggctggagacagagctgaaggagctgaacacccagtgggaccacatgtgccagcaggtgtatgccaggaaggaggccctgaagggcggcctggagaagacagtgtccctgcagaaggacctgtctgagatgcatgagtggatgacccaggccgaggaggagtacctggagcgggactttgagtacaagaccccagatgagctgcagaaggctgtggaggagatgaagagggccaaggaggaggcccagcagaaggaggccaaggtgaagctgctgacagagagcgtgaacagcgtgattgcccaggcccctcctgtggcccaggaggccctgaagaaggagctggagaccctgaccaccaactaccagtggctgtgcacccggctgaatggcaagtgcaagaccctggaggaggtgtgggcctgctggcatgagctgctgagctacctggagaaggccaacaagtggctgaatgaggtggagttcaagctgaagaccacagagaacatccctgggggcgctgaggagatcagcgaggtgctggacagcctggagaacctgatgaggcacagcgaggacaaccccaaccagatccgcatcctggcccagaccctgacagatggcggcgtgatggatgagctgatcaatgaggagctggagaccttcaacagccgctggagggagctgcacgaggaggccgtgcggcggcagaagctgctggagcagagcatccagagcgcccaggagacagagaagagcctgcacctgatccaggagagcctgaccttcatcgacaagcagctggccgcctacatcgctgacaaggtggatgctgcccagatgccccaggaggcccagaagatccagagcgacctgaccagccatgagatcagcctggaggagatgaagaagcacaaccagggcaaggaggccgcccagagggtgctgagccagattgatgtggcccagaagaagctgcaggatgtgtccatgaagttccgcctcttccagaagccagccaactttgagcagaggctgcaggagagcaagatgatcctggatgaggtgaagatgcacctgcctgccctggagaccaagtctgtggagcaggaggtggtgcagagccagctgaaccactgtgtgaacctgtacaagagcctgtctgaggtgaagtctgaggtggagatggtgatcaagacaggccggcagatcgtgcagaagaagcagacagagaaccccaaggagctggatgagcgggtgacagccctgaagctgcactacaatgagctgggcgccaaggtgacagagaggaagcagcagctggagaagtgcctgaagctgagcaggaagatgaggaaggagatgaatgtgctgacagagtggctggccgccacagacatggagctgaccaagaggtctgctgtggagggcatgcccagcaacctggacagcgaggtggcctggggcaaggccacccagaaggagattgagaagcagaaggtgcacctgaagagcatcacagaggtgggggaggccctgaagacagtgctgggcaagaaggagaccctggtggaggacaagctgagcctgctgaacagcaactggattgctgtgaccagcagagctgaggagtggctgaacctgctgctggagtaccagaagcacatggagacctttgaccagaatgtggaccacatcaccaagtggatcatccaggccgacaccctgctggatgaaagtgagaagaagaagccccagcagaaggaggatgtgctgaagaggctgaaggccgagctgaatgacatccggcccaaggtggacagcacccgggaccaggccgccaacctgatggccaacagaggagaccactgcaggaagctggtggagccccagatcagcgagctgaaccacagatttgctgccatcagccaccgcatcaagacaggcaaggccagcatccccctgaaggagctggagcagttcaacagcgacatccagaagctgctggagcccctggaggccgagatccagcagggcgtgaacctgaaggaggaggacttcaacaaggacatgaatgaagataatgaaggaacagtgaaggagctgctgcagagaggagacaacctgcagcagaggatcacagatgagaggaagcgggaggagatcaagatcaagcagcagctgctgcagaccaagcacaatgccctgaaggacctgcggagccagaggaggaagaaggccctggagatcagccaccagtggtaccagtacaagaggcaggctgatgacctgctgaagtgcctggatgacatcgagaagaagctggccagcctgcctgagcccagagatgagaggaagatcaaggagattgaccgggagctgcagaagaagaaggaggagctgaatgctgtgcggcggcaggccgagggcctgtctgaagatggagctgccatggctgtggagcccacccagatccagctgagcaagcgctggagagaaattgagagcaagtttgcccagttccggcggctgaactttgcccagatccacacagtgcgggaggagaccatgatggtgatgacagaggacatgcccctggagatctcctatgtgcccagcacctacctgacagagatcacccacgtgtcccaggccctgctggaggtggagcagctgctgaatgccccagacctgtgtgccaaggactttgaagatctcttcaagcaggaggagagcctgaagaacatcaaggacagcctgcagcagagcagcggcagaattgacatcatccacagcaagaagacagctgccctgcagagcgccacccctgtggagcgggtgaagctgcaggaggccctgagccagctggacttccagtgggagaaggtgaacaagatgtacaaggaccggcagggccgctttgacagatctgtggagaagtggaggcgcttccactatgacatcaagatcttcaaccagtggctgacagaagctgagcagttcctgaggaagacccagatccctgagaactgggagcacgccaagtacaagtggtacctgaaggagctgcaggacggcatcggccagaggcagacagtggtgaggaccctgaatgccactggagaggagatcatccagcagagcagcaagacagatgccagcatcctgcaggagaagctgggcagcctgaacctgcgctggcaggaggtgtgcaagcagctgagtgacaggaagaagaggctggaggagcagaagaacatcctgtctgagttccagagggacctgaatgaatttgtgctgtggctggaggaggccgacaacatcgccagcatccccctggagcccgggaaggagcagcagctgaaggagaagctggagcaggtgaagctgctggtggaggagctgcccctgcggcagggcatcctgaagcagctgaatgaaacaggaggccctgtgctggtgtctgcccccatcagccctgaggagcaggacaagctggagaacaagctgaagcagaccaacctgcagtggatcaaggtgtcccgggccctgcctgagaagcagggcgagattgaggcccagatcaaggacctgggccagctggagaagaagctggaggacctggaggagcagctgaaccacctgctgctgtggctgagccccatccggaaccagctggagatctacaaccagcccaaccaggagggcccctttgatgtgaaggagacagaaattgctgtgcaggccaagcagccagatgtggaggagatcctgagcaagggccagcacctgtacaaggagaagccagccacccagcctgtgaagaggaagctggaggacctgagcagcgagtggaaggctgtgaaccggctgctgcaggagctgcgggccaagcagcctgacctggcccctggcctgaccaccatcggggccagccccacccagacagtgaccctggtgacccagcctgtggtgaccaaggagacagccatcagcaagctggagatgcccagcagcctgatgctggaggtgcctgccctggccgacttcaacagagcctggacagagctgacagactggctgagcctgctggaccaggtgatcaagagccagagggtgatggtgggggacctggaggacatcaatgagatgatcatcaagcagaaggccaccatgcaggacctggagcagaggcggccccagctggaggagctgatcacagctgcccagaacctgaagaacaagaccagcaaccaggaggcccggaccatcatcacagaccgcatcgagcgcatccagaaccagtgggatgaggtgcaggagcacctgcagaacagacggcagcagctgaatgagatgctgaaggacagcacccagtggctggaggccaaggaggaggccgagcaggtgctgggccaggcccgggccaagctggagagctggaaggagggcccctacacagtggatgccatccagaagaagatcacagagaccaagcagctggccaaggacctgcggcagtggcagaccaacgtggatgtggccaatgacctggccctgaagctgctgcgggactacagcgcagatgacaccaggaaggtgcacatgatcacagagaacatcaatgcctcctggaggagcatccacaagagggtgtctgagcgggaggccgccctggaggagacccaccggctgctgcagcagttccccctggacctggagaagttcctggcctggctgacagaggccgagaccacagccaacgtgctgcaggatgccaccaggaaggagcggctgctggaggacagcaaaggagtgaaggagctgatgaagcagtggcaggacctgcagggcgagattgaggcccacacagatgtgtaccacaacctggatgagaacagccagaagatcctgcggagcctggagggcagtgatgatgctgtgctgctgcagaggcggctggacaacatgaacttcaagtggagcgagctgaggaagaagagcctgaacatccgcagccacctggaggccagcagtgaccagtggaagaggctgcacctgagcctgcaggagctgctggtgtggctgcagctgaaggatgatgagctgagccggcaggcccccatcggcggggacttccctgctgtgcagaagcagaatgatgtgcaccgggccttcaagcgggagctgaagaccaaggagcccgtcatcatgagcaccctggagaccgtgcgcatcttcctgacagagcagcccctggagggcctggagaagctgtaccaggagccccgggagctgcccccagaggagcgggcccagaatgtgacccggctgctgaggaagcaggccgaggaggtgaacacagagtgggagaagctgaacctgcacagcgctgactggcagaggaagattgatgagaccctggagcggctgcgggagctgcaggaggccacagatgagctggacctgaagctgcggcaggccgaggtgatcaagggctcctggcagcctgtgggggacctgctgattgacagcctgcaggaccacctggagaaggtgaaggccctgcggggggagatcgcccccctgaaggaaaatgtgagccacgtgaatgacctggcccggcagctgaccaccctgggcatccagctgagcccctacaacctgagcaccctggaggacctgaacacccgctggaagctgctgcaggtggccgtggaggacagagtgcggcagctgcacgaggcccaccgggactttggacctgccagccagcacttcctgagcacctctgtgcagggcccctgggagcgggccatcagccccaacaaggtgccctactacatcaaccacgagacccagaccacctgctgggaccaccccaagatgacagagctgtaccagagcctggccgacctgaacaacgtgcgcttcagcgcctacagaacagccatgaagctgcggcggctgcagaaggccctgtgcctggacctgctgagcctgtctgctgcctgtgatgccctggaccagcacaacctgaagcagaatgaccagcccatggacatcctgcagatcatcaactgcctgaccaccatctatgaccggctggagcaggagcacaacaacctggtgaatgtgcccctgtgtgtggacatgtgcctgaactggctgctgaatgtgtatgacaccggccgcacaggccgcatccgggtgctgtccttcaagacaggcatcatcagcctgtgcaaggcccacctggaggacaagtaccgctacctgttcaagcaggtggccagcagcacaggcttctgtgaccagaggcggctgggcctgctgctgcatgacagcatccagatcccccggcagctgggggaggtggccagctttggaggcagcaacatcgagcccagcgtgcgcagctgcttccagtttgccaacaacaagccagaaattgaggccgccctcttcctggactggatgaggctggagccccagagcatggtgtggctgcctgtgctgcaccgggtggccgctgctgagacagccaagcaccaggccaagtgcaacatctgcaaggagtgccccatcatcggcttccgctaccgcagcctgaagcacttcaactatgacatctgccagagctgcttcttcagcggccgggtggccaagggccacaagatgcactaccccatggtggagtactgcacccccaccaccagcggagaagatgtgcgggactttgccaaggtgctgaagaacaagttccgcaccaagcgctactttgccaagcaccccaggatgggctacctgcctgtgcagacagtgctggagggggacaacatggagacccctgtgaccctcatcaacttctggcctgtggacagcgccccagccagcagcccccagctgagccatgatgacacccacagcagaattgagcactacgccagccggctggccgagatggagaacagcaatggcagctacctgaatgacagcatcagccccaatgaaagcattgatgatgagcacctgctgatccagcactactgccagagcctgaaccaggacagccccctgagccagcccaggagccctgcccagatcctgatcagcctggagagcgaggagcggggggagctggagcgcatcctggccgacctggaggaggagaacagaaacctgcaggccgagtatgaccggctgaagcagcagcacgagcacaagggcctgagccccctgcccagccccccagagatgatgcccaccagcccccagagccccagagatgctgagctgattgctgaggccaagctgctgcggcagcacaagggccgcctggaggccaggatgcagatcctggaggaccacaacaagcagctggagagccagctgcaccggctgcggcagctgctggagcagccccaggccgaggccaaggtgaatggcaccaccgtgagcagccccagcaccagcctgcagaggagtgacagcagccagcccatgctgctgcgggtggtgggcagccagaccagtgacagcatgggagaggaggacctgctgagccccccccaggacaccagcacaggcctggaggaggtgatggagcagctgaacaacagcttccccagcagccggggcaggaacacccctgggaagcccatgagggaggacaccatgtag

SEQ ID NO: 142719 - DNA, 3678 bp, Artificial Sequence
  derived and/or modified sequence
atgcccagcagcctgatgctggaggtgcctgccctggccgacttcaacagagcctggacagagctgacagactggctgagcctgctggaccaggtgatcaagagccagagggtgatggtgggggacctggaggacatcaatgagatgatcatcaagcagaaggccaccatgcaggacctggagcagaggcggccccagctggaggagctgatcacagctgcccagaacctgaagaacaagaccagcaaccaggaggcccggaccatcatcacagaccgcatcgagcgcatccagaaccagtgggatgaggtgcaggagcacctgcagaacagacggcagcagctgaatgagatgctgaaggacagcacccagtggctggaggccaaggaggaggccgagcaggtgctgggccaggcccgggccaagctggagagctggaaggagggcccctacacagtggatgccatccagaagaagatcacagagaccaagcagctggccaaggacctgcggcagtggcagaccaacgtggatgtggccaatgacctggccctgaagctgctgcgggactacagcgcagatgacaccaggaaggtgcacatgatcacagagaacatcaatgcctcctggaggagcatccacaagagggtgtctgagcgggaggccgccctggaggagacccaccggctgctgcagcagttccccctggacctggagaagttcctggcctggctgacagaggccgagaccacagccaacgtgctgcaggatgccaccaggaaggagcggctgctggaggacagcaaaggagtgaaggagctgatgaagcagtggcaggacctgcagggcgagattgaggcccacacagatgtgtaccacaacctggatgagaacagccagaagatcctgcggagcctggagggcagtgatgatgctgtgctgctgcagaggcggctggacaacatgaacttcaagtggagcgagctgaggaagaagagcctgaacatccgcagccacctggaggccagcagtgaccagtggaagaggctgcacctgagcctgcaggagctgctggtgtggctgcagctgaaggatgatgagctgagccggcaggcccccatcggcggggacttccctgctgtgcagaagcagaatgatgtgcaccgggccttcaagcgggagctgaagaccaaggagcccgtcatcatgagcaccctggagaccgtgcgcatcttcctgacagagcagcccctggagggcctggagaagctgtaccaggagccccgggagctgcccccagaggagcgggcccagaatgtgacccggctgctgaggaagcaggccgaggaggtgaacacagagtgggagaagctgaacctgcacagcgctgactggcagaggaagattgatgagaccctggagcggctgcgggagctgcaggaggccacagatgagctggacctgaagctgcggcaggccgaggtgatcaagggctcctggcagcctgtgggggacctgctgattgacagcctgcaggaccacctggagaaggtgaaggccctgcggggggagatcgcccccctgaaggaaaatgtgagccacgtgaatgacctggcccggcagctgaccaccctgggcatccagctgagcccctacaacctgagcaccctggaggacctgaacacccgctggaagctgctgcaggtggccgtggaggacagagtgcggcagctgcacgaggcccaccgggactttggacctgccagccagcacttcctgagcacctctgtgcagggcccctgggagcgggccatcagccccaacaaggtgccctactacatcaaccacgagacccagaccacctgctgggaccaccccaagatgacagagctgtaccagagcctggccgacctgaacaacgtgcgcttcagcgcctacagaacagccatgaagctgcggcggctgcagaaggccctgtgcctggacctgctgagcctgtctgctgcctgtgatgccctggaccagcacaacctgaagcagaatgaccagcccatggacatcctgcagatcatcaactgcctgaccaccatctatgaccggctggagcaggagcacaacaacctggtgaatgtgcccctgtgtgtggacatgtgcctgaactggctgctgaatgtgtatgacaccggccgcacaggccgcatccgggtgctgtccttcaagacaggcatcatcagcctgtgcaaggcccacctggaggacaagtaccgctacctgttcaagcaggtggccagcagcacaggcttctgtgaccagaggcggctgggcctgctgctgcatgacagcatccagatcccccggcagctgggggaggtggccagctttggaggcagcaacatcgagcccagcgtgcgcagctgcttccagtttgccaacaacaagccagaaattgaggccgccctcttcctggactggatgaggctggagccccagagcatggtgtggctgcctgtgctgcaccgggtggccgctgctgagacagccaagcaccaggccaagtgcaacatctgcaaggagtgccccatcatcggcttccgctaccgcagcctgaagcacttcaactatgacatctgccagagctgcttcttcagcggccgggtggccaagggccacaagatgcactaccccatggtggagtactgcacccccaccaccagcggagaagatgtgcgggactttgccaaggtgctgaagaacaagttccgcaccaagcgctactttgccaagcaccccaggatgggctacctgcctgtgcagacagtgctggagggggacaacatggagacccctgtgaccctcatcaacttctggcctgtggacagcgccccagccagcagcccccagctgagccatgatgacacccacagcagaattgagcactacgccagccggctggccgagatggagaacagcaatggcagctacctgaatgacagcatcagccccaatgaaagcattgatgatgagcacctgctgatccagcactactgccagagcctgaaccaggacagccccctgagccagcccaggagccctgcccagatcctgatcagcctggagagcgaggagcggggggagctggagcgcatcctggccgacctggaggaggagaacagaaacctgcaggccgagtatgaccggctgaagcagcagcacgagcacaagggcctgagccccctgcccagccccccagagatgatgcccaccagcccccagagccccagagatgctgagctgattgctgaggccaagctgctgcggcagcacaagggccgcctggaggccaggatgcagatcctggaggaccacaacaagcagctggagagccagctgcaccggctgcggcagctgctggagcagccccaggccgaggccaaggtgaatggcaccaccgtgagcagccccagcaccagcctgcagaggagtgacagcagccagcccatgctgctgcgggtggtgggcagccagaccagtgacagcatgggagaggaggacctgctgagccccccccaggacaccagcacaggcctggaggaggtgatggagcagctgaacaacagcttccccagcagccggggcaggaacacccctgggaagcccatgagggaggacaccatgtag

SEQ ID NO: 142720 - DNA, 10689 bp, Artificial Sequence
  derived and/or modified sequence
atgaagaacatcatggccggcctgcagcagaccaacagcgagaagatcctgctgtcctgggtgcggcagagcaccaggaactacccccaggtgaatgtcatcaacttcaccacctcctggagcgatggcctggccctgaatgccctgatccacagccacaggccagacctgtttgactggaacagcgtggtgtgccagcagagcgccacccagaggctggagcacgccttcaacatcgcccgctaccagctgggcatcgagaagctgctggaccctgaagatgtggacaccacctacccagacaagaagagcatcctgatgtacatcaccagcctcttccaggtgctgccccagcaggtgtccattgaggccatccaggaggtggagatgctgccccggccccccaaggtgaccaaggaggagcacttccagctgcaccaccagatgcactacagccagcagatcaccgtgtccctggcccagggctatgaaagaaccagcagccccaagccccgcttcaagagctatgcctacacccaggccgcctacgtgaccaccagtgaccccaccaggagccccttccccagccagcacctggaggcccctgaggacaagagctttggcagcagcctgatggagagcgaggtgaacctggaccgctaccagacagccctggaggaggtgctgtcctggctgctgtctgctgaggacaccctgcaggcccagggcgagatcagcaatgatgtggaggtggtgaaggaccagttccacacccatgagggctacatgatggacctgacagcccaccagggccgggtgggcaacatcctgcagctgggcagcaagctgattggcaccgggaagctgtctgaagatgaggagacagaggtgcaggagcagatgaacctgctgaacagccgctgggagtgcctgcgggtggcctccatggagaagcagagcaacctgcaccgggtgctgatggacctgcagaaccagaagctgaaggagctgaatgactggctgaccaagacagaggagaggaccaggaagatggaggaggagcccctgggccctgacctggaggacctgaagaggcaggtgcagcagcacaaggtgctgcaggaggacctggagcaggagcaggtgcgggtgaacagcctgacccacatggtggtggtggtggatgagagcagcggggaccacgccacagctgccctggaggagcagctgaaggtgctgggggaccgctgggccaacatctgccgctggacagaagatcgctgggtgctgctgcaggacatcctgctgaagtggcagaggctgacagaggagcagtgcctcttcagcgcctggctgtctgagaaggaggatgctgtgaacaagatccacaccaccggcttcaaggaccagaatgagatgctgagcagcctgcagaagctggccgtgctgaaggctgacctggagaagaagaagcagagcatgggcaagctgtacagcctgaagcaggacctgctgagcaccctgaagaacaagtctgtgacccagaagacagaggcctggctggacaactttgcccgctgctgggacaacctggtgcagaagctggagaagagcacagcccagatcagccaggccgtgaccaccacccagcccagcctgacccagaccaccgtgatggagaccgtgaccaccgtgaccacccgggagcagatcctggtgaagcacgcccaggaggagctgcccccacctccaccccagaagaagaggcagatcaccgtggacagcgagatcaggaagaggctggatgtggacatcacagagctgcacagctggatcaccaggtctgaggccgtgctgcagagccctgagtttgccatcttcaggaaggagggcaacttcagtgacctgaaggagaaggtgaatgccatcgagcgggagaaggccgagaagttcaggaagctgcaggatgccagccgcagcgcccaggccctggtggagcagatggtgaatgaaggagtgaatgctgacagcatcaagcaggccagcgagcagctgaacagccgctggattgagttctgccagctgctgtctgagcggctgaactggctggagtaccagaacaacatcatcgccttctacaaccagctgcagcagctggagcagatgaccaccacagctgagaactggctgaagatccagcccaccacccccagcgagcccacagccatcaagagccagctgaagatctgcaaggatgaggtgaaccggctgagtgacctgcagccccagatcgagcggctgaagatccagagcatcgccctgaaggagaagggccagggccccatgttcctggatgctgactttgtggccttcaccaaccacttcaagcaggtgttcagtgatgtgcaggcccgggagaaggagctgcagaccatctttgacaccctgccccccatgagataccaggagaccatgtctgccatccgcacctgggtgcagcagagcgagaccaagctgagcatcccccagctgtctgtgacagattatgagatcatggagcagaggctgggggagctgcaggccctgcagagcagcctgcaggagcagcagagcggcctgtactacctgagcaccaccgtgaaggagatgagcaagaaggcccccagcgagatcagcaggaagtaccagagcgagtttgaggagattgagggccgctggaagaagctgagcagccagctggtggagcactgccagaagctggaggagcagatgaacaagctgaggaagatccagaaccacatccagaccctgaagaagtggatggccgaggtggatgtgttcctgaaggaggagtggccagccctgggggacagcgagatcctgaagaagcagctgaagcagtgccgcctgctggtgtctgacatccagaccatccagcccagcctgaacagcgtgaatgaaggaggccagaagatcaagaatgaggccgagcctgagtttgccagccggctggagacagagctgaaggagctgaacacccagtgggaccacatgtgccagcaggtgtatgccaggaaggaggccctgaagggcggcctggagaagacagtgtccctgcagaaggacctgtctgagatgcatgagtggatgacccaggccgaggaggagtacctggagcgggactttgagtacaagaccccagatgagctgcagaaggctgtggaggagatgaagagggccaaggaggaggcccagcagaaggaggccaaggtgaagctgctgacagaatctgtgaacagcgtcatcgcccaggcccctcctgtggcccaggaggccctgaagaaggagctggagaccctgaccaccaactaccagtggctgtgcacccggctgaatggcaagtgcaagaccctggaggaggtgtgggcctgctggcatgagctgctgagctacctggagaaggccaacaagtggctgaatgaggtggagttcaagctgaagaccacagagaacatccctggaggagctgaggagatcagcgaggtgctggacagcctggagaacctgatgaggcacagcgaggacaaccccaaccagatccgcatcctggcccagaccctgacagatggaggagtgatggatgagctgatcaatgaggagctggagaccttcaacagccgctggagggagctgcacgaggaggccgtgcggcggcagaagctgctggagcagagcatccagagcgcccaggagacagagaagagcctgcacctgatccaggagagcctgaccttcatcgacaagcagctggccgcctacatcgctgacaaggtggatgctgcccagatgccccaggaggcccagaagatccagagcgacctgaccagccatgagatcagcctggaggagatgaagaagcacaaccagggcaaggaggccgcccagagggtgctgagccagattgatgtggcccagaagaagctgcaggatgtgtccatgaagttccgcctcttccagaagccagccaactttgagcagaggctgcaggagagcaagatgatcctggatgaggtgaagatgcacctgcctgccctggagaccaagtctgtggagcaggaggtggtgcagagccagctgaaccactgtgtgaacctgtacaagagcctgtctgaggtgaagtctgaggtggagatggtgatcaagacaggccggcagatcgtgcagaagaagcagacagagaaccccaaggagctggatgagcgggtgacagccctgaagctgcactacaatgagctgggcgccaaggtgacagagaggaagcagcagctggagaagtgcctgaagctgagcaggaagatgaggaaggagatgaatgtgctgacagagtggctggccgccacagacatggagctgaccaagaggtctgctgtggagggcatgcccagcaacctggacagcgaggtggcctggggcaaggccacccagaaggagattgagaagcagaaggtgcacctgaagagcatcacagaggtgggggaggccctgaagacagtgctgggcaagaaggagaccctggtggaggacaagctgagcctgctgaacagcaactggattgctgtgaccagcagagctgaggagtggctgaacctgctgctggagtaccagaagcacatggagacctttgaccagaatgtggaccacatcaccaagtggatcatccaggccgacaccctgctggatgagagcgagaagaagaagccccagcagaaggaggatgtgctgaagaggctgaaggccgagctgaatgacatccggcccaaggtggacagcacccgggaccaggccgccaacctgatggccaacagaggagaccactgcaggaagctggtggagccccagatcagcgagctgaaccacagatttgctgccatcagccaccgcatcaagacaggcaaggccagcatccccctgaaggagctggagcagttcaacagcgacatccagaagctgctggagcccctggaggccgagatccagcagggcgtgaacctgaaggaggaggacttcaacaaggacatgaatgaagataatgaaggcaccgtgaaggagctgctgcagagaggagacaacctgcagcagaggatcacagatgagaggaagcgggaggagatcaagatcaagcagcagctgctgcagaccaagcacaatgccctgaaggacctgcggagccagaggaggaagaaggccctggagatcagccaccagtggtaccagtacaagaggcaggctgatgacctgctgaagtgcctggatgacatcgagaagaagctggccagcctgcctgagcccagagatgagaggaagatcaaggagattgaccgggagctgcagaagaagaaggaggagctgaatgctgtgcggcggcaggccgagggcctgtctgaagatggagctgccatggctgtggagcccacccagatccagctgagcaagcgctggagagaaattgagagcaagtttgcccagttccggcggctgaactttgcccagatccacacagtgcgggaggagaccatgatggtgatgacagaggacatgcccctggagatctcctatgtgcccagcacctacctgacagagatcacccacgtgtcccaggccctgctggaggtggagcagctgctgaatgccccagacctgtgtgccaaggactttgaggacctcttcaagcaggaggagagcctgaagaacatcaaggacagcctgcagcagagcagcggcagaattgacatcatccacagcaagaagacagctgccctgcagagcgccacccctgtggagcgggtgaagctgcaggaggccctgagccagctggacttccagtgggagaaggtgaacaagatgtacaaggaccggcagggccgctttgacagatctgtggagaagtggaggcgcttccactatgacatcaagatcttcaaccagtggctgacagaggccgagcagttcctgaggaagacccagatccctgagaactgggagcacgccaagtacaagtggtacctgattgccctgaaggatggcatcggccagaggcagacagtggtgaggaccctgaatgccaccggggaggagatcatccagcagagcagcaagacagatgccagcatcctgcaggagaagctgggcagcctgaacctgcgctggcaggaggtgtgcaagcagctgagtgacaggaagaagaggctggaggagcagaagaacatcctgtctgagttccagagggacctgaatgaatttgtgctgtggctggaggaggccgacaacatcgccagcatccccctggagcccgggaaggagcagcagctgaaggagaagctggagcaggtgaagctgctggtggaggagctgcccctgcggcagggcatcctgaagcagctgaatgagaccggcggccctgtgctggtgtctgcccccatcagccctgaggagcaggacaagctggagaacaagctgaagcagaccaacctgcagtggatcaaggtgtcccgggccctgcctgagaagcagggcgagattgaggcccagatcaaggacctgggccagctggagaagaagctggaggacctggaggagcagctgaaccacctgctgctgtggctgagccccatccggaaccagctggagatctacaaccagcccaaccaggagggcccctttgatgtgaaggagacagaaattgctgtgcaggccaagcagccagatgtggaggagatcctgagcaagggccagcacctgtacaaggagaagccagccacccagcctgtgaagaggaagctggaggacctgagcagcgagtggaaggctgtgaaccggctgctgcaggagctgcgggccaagcagcctgacctggcccctggcctgaccaccatcggggccagccccacccagacagtgaccctggtgacccagcctgtggtgaccaaggagacagccatcagcaagctggagatgcccagcagcctgatgctggaggtgcctgccctggccgacttcaacagagcctggacagagctgacagactggctgagcctgctggaccaggtgatcaagagccagagggtgatggtgggggacctggaggacatcaatgagatgatcatcaagcagaaggccaccatgcaggacctggagcagaggcggccccagctggaggagctgatcacagctgcccagaacctgaagaacaagaccagcaaccaggaggcccggaccatcatcacagacagaattgagcgcatccagaaccagtgggatgaggtgcaggagcacctgcagaacagacggcagcagctgaatgagatgctgaaggacagcacccagtggctggaggccaaggaggaggccgagcaggtgctgggccaggcccgggccaagctggagagctggaaggagggcccctacacagtggatgccatccagaagaagatcacagagaccaagcagctggccaaggacctgcggcagtggcagaccaacgtggatgtggccaatgacctggccctgaagctgctgcgggactacagcgcagatgacaccaggaaggtgcacatgatcacagagaacatcaatgcctcctggaggagcatccacaagagggtgtctgagcgggaggccgccctggaggagacccaccggctgctgcagcagttccccctggacctggagaagttcctggcctggctgacagaagctgagaccacagccaacgtgctgcaggatgccaccaggaaggagcggctgctggaggacagcaagggcgtgaaggagctgatgaagcagtggcaggacctgcagggcgagattgaggcccacacagatgtgtaccacaacctggatgagaacagccagaagatcctgcggagcctggagggcagtgatgatgctgtgctgctgcagaggcggctggacaacatgaacttcaagtggagcgagctgaggaagaagagcctgaacatccgcagccacctggaggccagcagtgaccagtggaagaggctgcacctgagcctgcaggagctgctggtgtggctgcagctgaaggatgatgagctgagccggcaggcccccatcggcggggacttccctgctgtgcagaagcagaatgatgtgcaccgggccttcaagcgggagctgaagaccaaggagcctgtgatcatgagcaccctggagaccgtgcgcatcttcctgacagagcagcccctggagggcctggagaagctgtaccaggagccccgggagctgcccccagaggagcgggcccagaatgtgacccggctgctgaggaagcaggccgaggaggtgaacacagagtgggagaagctgaacctgcacagcgctgactggcagaggaagattgatgagaccctggagcggctgcgggagctgcaggaggccacagatgagctggacctgaagctgcggcaggccgaggtgatcaagggctcctggcagcctgtgggggacctgctgattgacagcctgcaggaccacctggagaaggtgaaggccctgcggggggagatcgcccccctgaaggaaaatgtgagccacgtgaatgacctggcccggcagctgaccaccctgggcatccagctgagcccctacaacctgagcaccctggaggacctgaacacccgctggaagctgctgcaggtggccgtggaggacagagtgcggcagctgcacgaggcccaccgggactttggacctgccagccagcacttcctgagcacctctgtgcagggcccctgggagcgggccatcagccccaacaaggtgccctactacatcaaccacgagacccagaccacctgctgggaccaccccaagatgacagagctgtaccagagcctggccgacctgaacaacgtgcgcttcagcgcctacagaacagccatgaagctgcggcggctgcagaaggccctgtgcctggacctgctgagcctgtctgctgcctgtgatgccctggaccagcacaacctgaagcagaatgaccagcccatggacatcctgcagatcatcaactgcctgaccaccatctatgaccggctggagcaggagcacaacaacctggtgaatgtgcccctgtgtgtggacatgtgcctgaactggctgctgaatgtgtatgacaccggccgcacaggccgcatccgggtgctgtccttcaagacaggcatcatcagcctgtgcaaggcccacctggaggacaagtaccgctacctgttcaagcaggtggccagcagcacaggcttctgtgaccagaggcggctgggcctgctgctgcatgacagcatccagatcccccggcagctgggggaggtggccagctttggaggcagcaacatcgagcccagcgtgcgcagctgcttccagtttgccaacaacaagccagaaattgaagctgccctcttcctggactggatgaggctggagccccagagcatggtgtggctgcctgtgctgcaccgggtggccgctgctgagacagccaagcaccaggccaagtgcaacatctgcaaggaatgtcccatcatcggcttccgctaccgcagcctgaagcacttcaactatgacatctgccagagctgcttcttcagcggccgggtggccaagggccacaagatgcactaccccatggtggagtactgcacccccaccaccagcggggaggatgtgcgggactttgccaaggtgctgaagaacaagttccgcaccaagcgctactttgccaagcaccccaggatgggctacctgcctgtgcagacagtgctggagggggacaacatggagacccctgtgaccctcatcaacttctggcctgtggacagcgccccagccagcagcccccagctgagccatgatgacacccacagccgcatcgagcactacgccagccggctggccgagatggagaacagcaatggcagctacctgaatgacagcatcagccccaatgaaagcattgatgatgagcacctgctgatccagcactactgccagagcctgaaccaggacagccccctgagccagcccaggagccctgcccagatcctgatcagcctggagagcgaggagcggggggagctggagcgcatcctggccgacctggaggaggagaacagaaacctgcaggccgagtatgaccggctgaagcagcagcacgagcacaagggcctgagccccctgcccagccccccagagatgatgcccaccagcccccagagccccagagatgctgagctgattgctgaggccaagctgctgcggcagcacaagggccgcctggaggccaggatgcagatcctggaggaccacaacaagcagctggagagccagctgcaccggctgcggcagctgctggagcagccccaggccgaggccaaggtgaatggcaccaccgtgagcagccccagcaccagcctgcagaggagtgacagcagccagcccatgctgctgcgggtggtgggcagccagaccagtgacagcatgggagaggaggacctgctgagccccccccaggacaccagcacaggcctggaggaggtgatggagcagctgaacaacagcttccccagcagccggggcaggaacaccccaggcaagcccatgagggaggacaccatgtag

SEQ ID NO: 142721 - DNA, 11058 bp, Artificial Sequence
  derived and/or modified sequence
atgctgtggtgggaggaggtggaggactgctatgagcgggaggatgtgcagaagaagaccttcaccaagtgggtgaatgcccagttcagcaagtttgggaagcagcacatcgagaacctcttcagtgacctgcaggacggccggcggctgctggacctgctggagggcctgaccggccagaagctgcccaaggagaagggcagcaccagggtgcacgccctgaacaacgtgaacaaggccctgcgggtgctgcagaacaacaacgtggacctggtgaacatcggcagcacagacatcgtggatggcaaccacaagctgaccctgggcctcatctggaacatcatcctgcactggcaggtgaagaatgtgatgaagaacatcatggccggcctgcagcagaccaacagcgagaagatcctgctgtcctgggtgcggcagagcaccaggaactacccccaggtgaatgtcatcaacttcaccacctcctggagcgatggcctggccctgaatgccctgatccacagccacaggccagacctgtttgactggaacagcgtggtgtgccagcagagcgccacccagaggctggagcacgccttcaacatcgcccgctaccagctgggcatcgagaagctgctggaccctgaagatgtggacaccacctacccagacaagaagagcatcctgatgtacatcaccagcctcttccaggtgctgccccagcaggtgtccattgaggccatccaggaggtggagatgctgcccaggcctcccaaggtgaccaaggaggagcacttccagctgcaccaccagatgcactacagccagcagatcaccgtgtccctggcccagggctatgaaagaaccagcagccccaagccccgcttcaagagctatgcctacacccaggccgcctacgtgaccaccagtgaccccaccaggagccccttccccagccagcacctggaggcccctgaggacaagagctttggcagcagcctgatggagagcgaggtgaacctggaccgctaccagacagccctggaggaggtgctgtcctggctgctgtctgctgaggacaccctgcaggcccagggcgagatcagcaatgatgtggaggtggtgaaggaccagttccacacccatgagggctacatgatggacctgacagcccaccagggccgggtgggcaacatcctgcagctgggcagcaagctgattggaacaggcaagctgtctgaagatgaggagacagaggtgcaggagcagatgaacctgctgaacagccgctgggagtgcctgcgggtggcctccatggagaagcagagcaacctgcaccgggtgctgatggacctgcagaaccagaagctgaaggagctgaatgactggctgaccaagacagaggagaggaccaggaagatggaggaggagcccctgggccctgacctggaggacctgaagaggcaggtgcagcagcacaaggtgctgcaggaggacctggagcaggagcaggtgcgggtgaacagcctgacccacatggtggtggtggtggatgagagcagcggggaccacgccacagctgccctggaggagcagctgaaggtgctgggggaccgctgggccaacatctgccgctggacagaggaccgctgggtgctgctgcaggacatcctgctgaagtggcagaggctgacagaggagcagtgcctcttcagcgcctggctgtctgagaaggaggatgctgtgaacaagatccacaccaccggcttcaaggaccagaatgagatgctgagcagcctgcagaagctggccgtgctgaaggctgacctggagaagaagaagcagagcatgggcaagctgtacagcctgaagcaggacctgctgagcaccctgaagaacaagtctgtgacccagaagacagaggcctggctggacaactttgcccgctgctgggacaacctggtgcagaagctggagaagagcacagcccagatcagccaggccgtgaccaccacccagcccagcctgacccagaccaccgtgatggagaccgtgaccaccgtgaccacccgggagcagatcctggtgaagcacgcccaggaggagctgcccccacctccaccccagaagaagaggcagatcaccgtggacagcgagatcaggaagaggctggatgtggacatcacagagctgcacagctggatcaccaggtctgaggccgtgctgcagagccctgagtttgccatcttcaggaaggagggcaacttcagtgacctgaaggagaaggtgaatgccatcgagcgggagaaggccgagaagttcaggaagctgcaggatgccagccgcagcgcccaggccctggtggagcagatggtgaatgaaggagtgaatgctgacagcatcaagcaggccagcgagcagctgaacagccgctggattgagttctgccagctgctgtctgagcggctgaactggctggagtaccagaacaacatcatcgccttctacaaccagctgcagcagctggagcagatgaccaccacagctgagaactggctgaagatccagcccaccaccccatctgagcccacagccatcaagagccagctgaagatctgcaaggatgaggtgaaccggctgagtgacctgcagccccagatcgagcggctgaagatccagagcatcgccctgaaggagaagggccagggccccatgttcctggatgctgactttgtggccttcaccaaccacttcaagcaggtgttcagtgatgtgcaggcccgggagaaggagctgcagaccatctttgacaccctgccccccatgagataccaggagaccatgtctgccatccgcacctgggtgcagcagagcgagaccaagctgagcatcccccagctgtctgtgacagattatgagatcatggagcagaggctgggggagctgcaggccctgcagagcagcctgcaggagcagcagagcggcctgtactacctgagcaccaccgtgaaggagatgagcaagaaggcccccagcgagatcagcaggaagtaccagagcgagtttgaggagattgagggccgctggaagaagctgagcagccagctggtggagcactgccagaagctggaggagcagatgaacaagctgaggaagatccagaaccacatccagaccctgaagaagtggatggccgaggtggatgtgttcctgaaggaggagtggccagccctgggggacagcgagatcctgaagaagcagctgaagcagtgccgcctgctggtgtctgacatccagaccatccagcccagcctgaacagcgtgaatgaaggaggccagaagatcaagaatgaagctgagcctgagtttgccagccggctggagacagagctgaaggagctgaacacccagtgggaccacatgtgccagcaggtgtatgccaggaaggaggccctgaagggcggcctggagaagacagtgtccctgcagaaggacctgtctgagatgcatgagtggatgacccaggccgaggaggagtacctggagcgggactttgagtacaagaccccagatgagctgcagaaggctgtggaggagatgaagagggccaaggaggaggcccagcagaaggaggccaaggtgaagctgctgacagagagcgtgaacagcgtgattgcccaggcccctcctgtggcccaggaggccctgaagaaggagctggagaccctgaccaccaactaccagtggctgtgcacccggctgaatggcaagtgcaagaccctggaggaggtgtgggcctgctggcatgagctgctgagctacctggagaaggccaacaagtggctgaatgaggtggagttcaagctgaagaccacagagaacatccctgggggcgctgaggagatcagcgaggtgctggacagcctggagaacctgatgaggcacagcgaggacaaccccaaccagatccgcatcctggcccagaccctgacagatggcggcgtgatggatgagctgatcaatgaggagctggagaccttcaacagccgctggagggagctgcacgaggaggccgtgcggcggcagaagctgctggagcagagcatccagagcgcccaggagacagagaagagcctgcacctgatccaggagagcctgaccttcatcgacaagcagctggccgcctacatcgctgacaaggtggatgctgcccagatgccccaggaggcccagaagatccagagcgacctgaccagccatgagatcagcctggaggagatgaagaagcacaaccagggcaaggaggccgcccagagggtgctgagccagattgatgtggcccagaagaagctgcaggatgtgtccatgaagttccgcctcttccagaagccagccaactttgagcagaggctgcaggagagcaagatgatcctggatgaggtgaagatgcacctgcctgccctggagaccaagtctgtggagcaggaggtggtgcagagccagctgaaccactgtgtgaacctgtacaagagcctgtctgaggtgaagtctgaggtggagatggtgatcaagacaggccggcagatcgtgcagaagaagcagacagagaaccccaaggagctggatgagcgggtgacagccctgaagctgcactacaatgagctgggcgccaaggtgacagagaggaagcagcagctggagaagtgcctgaagctgagcaggaagatgaggaaggagatgaatgtgctgacagagtggctggccgccacagacatggagctgaccaagaggtctgctgtggagggcatgcccagcaacctggacagcgaggtggcctggggcaaggccacccagaaggagattgagaagcagaaggtgcacctgaagagcatcacagaggtgggggaggccctgaagacagtgctgggcaagaaggagaccctggtggaggacaagctgagcctgctgaacagcaactggattgctgtgaccagcagagctgaggagtggctgaacctgctgctggagtaccagaagcacatggagacctttgaccagaatgtggaccacatcaccaagtggatcatccaggccgacaccctgctggatgaaagtgagaagaagaagccccagcagaaggaggatgtgctgaagaggctgaaggccgagctgaatgacatccggcccaaggtggacagcacccgggaccaggccgccaacctgatggccaacagaggagaccactgcaggaagctggtggagccccagatcagcgagctgaaccacagatttgctgccatcagccaccgcatcaagacaggcaaggccagcatccccctgaaggagctggagcagttcaacagcgacatccagaagctgctggagcccctggaggccgagatccagcagggcgtgaacctgaaggaggaggacttcaacaaggacatgaatgaagataatgaaggaacagtgaaggagctgctgcagagaggagacaacctgcagcagaggatcacagatgagaggaagcgggaggagatcaagatcaagcagcagctgctgcagaccaagcacaatgccctgaaggacctgcggagccagaggaggaagaaggccctggagatcagccaccagtggtaccagtacaagaggcaggctgatgacctgctgaagtgcctggatgacatcgagaagaagctggccagcctgcctgagcccagagatgagaggaagatcaaggagattgaccgggagctgcagaagaagaaggaggagctgaatgctgtgcggcggcaggccgagggcctgtctgaagatggagctgccatggctgtggagcccacccagatccagctgagcaagcgctggagagaaattgagagcaagtttgcccagttccggcggctgaactttgcccagatccacacagtgcgggaggagaccatgatggtgatgacagaggacatgcccctggagatctcctatgtgcccagcacctacctgacagagatcacccacgtgtcccaggccctgctggaggtggagcagctgctgaatgccccagacctgtgtgccaaggactttgaagatctcttcaagcaggaggagagcctgaagaacatcaaggacagcctgcagcagagcagcggcagaattgacatcatccacagcaagaagacagctgccctgcagagcgccacccctgtggagcgggtgaagctgcaggaggccctgagccagctggacttccagtgggagaaggtgaacaagatgtacaaggaccggcagggccgctttgacagatctgtggagaagtggaggcgcttccactatgacatcaagatcttcaaccagtggctgacagaagctgagcagttcctgaggaagacccagatccctgagaactgggagcacgccaagtacaagtggtacctgattgccctgaaggatggcatcggccagaggcagacagtggtgaggaccctgaatgccactggagaggagatcatccagcagagcagcaagacagatgccagcatcctgcaggagaagctgggcagcctgaacctgcgctggcaggaggtgtgcaagcagctgagtgacaggaagaagaggctggaggagcagaagaacatcctgtctgagttccagagggacctgaatgaatttgtgctgtggctggaggaggccgacaacatcgccagcatccccctggagcccgggaaggagcagcagctgaaggagaagctggagcaggtgaagctgctggtggaggagctgcccctgcggcagggcatcctgaagcagctgaatgaaacaggaggccctgtgctggtgtctgcccccatcagccctgaggagcaggacaagctggagaacaagctgaagcagaccaacctgcagtggatcaaggtgtcccgggccctgcctgagaagcagggcgagattgaggcccagatcaaggacctgggccagctggagaagaagctggaggacctggaggagcagctgaaccacctgctgctgtggctgagccccatccggaaccagctggagatctacaaccagcccaaccaggagggcccctttgatgtgaaggagacagaaattgctgtgcaggccaagcagccagatgtggaggagatcctgagcaagggccagcacctgtacaaggagaagccagccacccagcctgtgaagaggaagctggaggacctgagcagcgagtggaaggctgtgaaccggctgctgcaggagctgcgggccaagcagcctgacctggcccctggcctgaccaccatcggggccagccccacccagacagtgaccctggtgacccagcctgtggtgaccaaggagacagccatcagcaagctggagatgcccagcagcctgatgctggaggtgcctgccctggccgacttcaacagagcctggacagagctgacagactggctgagcctgctggaccaggtgatcaagagccagagggtgatggtgggggacctggaggacatcaatgagatgatcatcaagcagaaggccaccatgcaggacctggagcagaggcggccccagctggaggagctgatcacagctgcccagaacctgaagaacaagaccagcaaccaggaggcccggaccatcatcacagaccgcatcgagcgcatccagaaccagtgggatgaggtgcaggagcacctgcagaacagacggcagcagctgaatgagatgctgaaggacagcacccagtggctggaggccaaggaggaggccgagcaggtgctgggccaggcccgggccaagctggagagctggaaggagggcccctacacagtggatgccatccagaagaagatcacagagaccaagcagctggccaaggacctgcggcagtggcagaccaacgtggatgtggccaatgacctggccctgaagctgctgcgggactacagcgcagatgacaccaggaaggtgcacatgatcacagagaacatcaatgcctcctggaggagcatccacaagagggtgtctgagcgggaggccgccctggaggagacccaccggctgctgcagcagttccccctggacctggagaagttcctggcctggctgacagaggccgagaccacagccaacgtgctgcaggatgccaccaggaaggagcggctgctggaggacagcaaaggagtgaaggagctgatgaagcagtggcaggacctgcagggcgagattgaggcccacacagatgtgtaccacaacctggatgagaacagccagaagatcctgcggagcctggagggcagtgatgatgctgtgctgctgcagaggcggctggacaacatgaacttcaagtggagcgagctgaggaagaagagcctgaacatccgcagccacctggaggccagcagtgaccagtggaagaggctgcacctgagcctgcaggagctgctggtgtggctgcagctgaaggatgatgagctgagccggcaggcccccatcggcggggacttccctgctgtgcagaagcagaatgatgtgcaccgggccttcaagcgggagctgaagaccaaggagcccgtcatcatgagcaccctggagaccgtgcgcatcttcctgacagagcagcccctggagggcctggagaagctgtaccaggagccccgggagctgcccccagaggagcgggcccagaatgtgacccggctgctgaggaagcaggccgaggaggtgaacacagagtgggagaagctgaacctgcacagcgctgactggcagaggaagattgatgagaccctggagcggctgcgggagctgcaggaggccacagatgagctggacctgaagctgcggcaggccgaggtgatcaagggctcctggcagcctgtgggggacctgctgattgacagcctgcaggaccacctggagaaggtgaaggccctgcggggggagatcgcccccctgaaggaaaatgtgagccacgtgaatgacctggcccggcagctgaccaccctgggcatccagctgagcccctacaacctgagcaccctggaggacctgaacacccgctggaagctgctgcaggtggccgtggaggacagagtgcggcagctgcacgaggcccaccgggactttggacctgccagccagcacttcctgagcacctctgtgcagggcccctgggagcgggccatcagccccaacaaggtgccctactacatcaaccacgagacccagaccacctgctgggaccaccccaagatgacagagctgtaccagagcctggccgacctgaacaacgtgcgcttcagcgcctacagaacagccatgaagctgcggcggctgcagaaggccctgtgcctggacctgctgagcctgtctgctgcctgtgatgccctggaccagcacaacctgaagcagaatgaccagcccatggacatcctgcagatcatcaactgcctgaccaccatctatgaccggctggagcaggagcacaacaacctggtgaatgtgcccctgtgtgtggacatgtgcctgaactggctgctgaatgtgtatgacaccggccgcacaggccgcatccgggtgctgtccttcaagacaggcatcatcagcctgtgcaaggcccacctggaggacaagtaccgctacctgttcaagcaggtggccagcagcacaggcttctgtgaccagaggcggctgggcctgctgctgcatgacagcatccagatcccccggcagctgggggaggtggccagctttggaggcagcaacatcgagcccagcgtgcgcagctgcttccagtttgccaacaacaagccagaaattgaggccgccctcttcctggactggatgaggctggagccccagagcatggtgtggctgcctgtgctgcaccgggtggccgctgctgagacagccaagcaccaggccaagtgcaacatctgcaaggagtgccccatcatcggcttccgctaccgcagcctgaagcacttcaactatgacatctgccagagctgcttcttcagcggccgggtggccaagggccacaagatgcactaccccatggtggagtactgcacccccaccaccagcggagaagatgtgcgggactttgccaaggtgctgaagaacaagttccgcaccaagcgctactttgccaagcaccccaggatgggctacctgcctgtgcagacagtgctggagggggacaacatggagacccctgtgaccctcatcaacttctggcctgtggacagcgccccagccagcagcccccagctgagccatgatgacacccacagcagaattgagcactacgccagccggctggccgagatggagaacagcaatggcagctacctgaatgacagcatcagccccaatgaaagcattgatgatgagcacctgctgatccagcactactgccagagcctgaaccaggacagccccctgagccagcccaggagccctgcccagatcctgatcagcctggagagcgaggagcggggggagctggagcgcatcctggccgacctggaggaggagaacagaaacctgcaggccgagtatgaccggctgaagcagcagcacgagcacaagggcctgagccccctgcccagccccccagagatgatgcccaccagcccccagagccccagagatgctgagctgattgctgaggccaagctgctgcggcagcacaagggccgcctggaggccaggatgcagatcctggaggaccacaacaagcagctggagagccagctgcaccggctgcggcagctgctggagcagccccaggccgaggccaaggtgaatggcaccaccgtgagcagccccagcaccagcctgcagaggagtgacagcagccagcccatgctgctgcgggtggtgggcagccagaccagtgacagcatgggagaggaggacctgctgagccccccccaggacaccagcacaggcctggaggaggtgatggagcagctgaacaacagcttccccagcagccggggcaggaacacccctgggaagcccatgagggaggacaccatgtag

SEQ ID NO: 142722 - DNA, 11058 bp, Artificial Sequence
  derived and/or modified sequence
atgctgtggtgggaggaggtggaggactgctacgagcgggaggacgtgcaaaaaaagacatttactaaatgggttaacgcacagttttctaagttcgggaagcagcatatagagaatctcttctcagatctacaagatggccgccggctgctagacttgctcgaggggttaaccggacagaagctcccgaaggagaaggggtcaacaagagtgcatgccctgaataacgtgaataaagccctcagggtcctccagaacaataacgtcgacctggttaacatcggttcaacggacattgtggacggtaatcacaagctgacactgggtcttatttggaatatcattctccactggcaggtcaagaatgtgatgaagaatatcatggcagggctgcagcagacgaatagcgagaaaattctgctgtcttgggtgaggcagtcgacaaggaactatccccaggttaacgtgatcaattttaccacaagctggtccgatggcctggccctcaacgctctgatccacagtcaccggcccgacctcttcgattggaactccgtggtgtgtcagcagagcgccactcaacgtctagaacacgctttcaacatcgccagatatcaattaggaattgaaaaactgctcgatcctgaagatgtggacaccacttatcctgataagaaatcaatcctgatgtatattacctccttattccaggttctgcctcaacaggtctctatagaagcaatccaagaggtggagatgctcccccgcccccccaaggtcacgaaagaagaacactttcaattgcatcatcagatgcattactctcaacagattacggtatcactcgcccaggggtacgagaggacctcaagtcccaagcctcggtttaagagctacgcctatacacaggctgcgtacgtcaccacctccgatccgacacgctcccccttcccatcgcaacacctggaggcacccgaggataaatcctttggcagctccctgatggagtccgaggtgaacctggaccggtaccagacagcactggaggaagtgttgagttggctgctgagtgccgaagatactctgcaggctcagggagagatctccaatgatgtggaagtcgtgaaggatcagtttcacactcacgaggggtacatgatggacctaacggcgcatcaagggcgagttgggaatattctccagctggggtctaagttgatcgggactgggaaattatccgaggacgaggagaccgaggtccaggaacagatgaacctgctaaactctcgctgggaatgcttaagggttgcatccatggagaagcagtctaatttgcatagggtactgatggatctgcaaaatcaaaagctgaaagaactgaacgactggctcaccaagaccgaagaaagaacaagaaaaatggaggaggagcctctgggtcctgatctggaagatctgaaaagacaggtacaacagcataaagttctccaggaggatctggaacaggaacaggtgagggtaaactctctgacacacatggtcgtggtggtggacgagtcgtccggcgaccacgcaactgctgccctggaggagcagttgaaggtgctgggagatagatgggctaatatatgccggtggaccgaggatagatgggtgctgcttcaggatatactgttaaaatggcagcgtctcacagaggagcagtgtctgttttctgcctggctctcagagaaagaggatgctgtaaataagattcacaccactggtttcaaagatcagaatgaaatgctgtcatcacttcagaagttggcagtgctgaaagccgaccttgagaagaaaaagcagagtatggggaagctttattccttgaagcaggacctgttaagcactctcaaaaataagtccgttacacagaagaccgaggcctggttggacaacttcgcacgctgctgggataacctggtgcaaaaactggagaaatctacagcacaaataagtcaggcggtcactaccactcagccgtcactcacccagactaccgtgatggagacagtgaccacagtgaccactagggaacaaatccttgtcaaacatgctcaggaggagctgcctccgcctcctccccagaaaaagcgccagatcacagtcgattccgagattcgcaaaaggcttgatgtggacatcacagaacttcacagttggataacccgctcagaagctgtcttgcagtcccctgaattcgccatcttcaggaaggagggcaattttagcgatctcaaggagaaggtgaacgctattgagagggaaaaggctgaaaagttcaggaaattgcaggacgcttcgagaagcgcccaggccctcgtcgaacagatggtcaacgagggagtgaacgccgattccatcaaacaggctagtgaacagctgaactcaaggtggatcgagttctgtcagcttctgtctgagagacttaactggctggagtaccagaacaacataatcgcattctacaaccagctccaacagctggagcagatgactactacggctgagaattggctcaagattcagcccacaacccccagcgagcccacagccattaagtcacaactcaaaatctgtaaggacgaggtcaatcggttgtcggatctccagcctcaaatagagagacttaaaattcagtccatcgcgttgaaagaaaagggacaaggtccaatgttcctggatgcagactttgtcgcattcaccaatcactttaaacaggtattcagcgacgtacaggcccgggagaaggaactgcagaccatattcgatactctgccacccatgaggtaccaggagacaatgtccgccatccgcacctgggtgcaacaatccgagacaaagctctccataccacagttgtctgttactgactacgagattatggaacaacgactcggagagctacaggccctgcagtcctccctgcaggagcagcagtcaggtctgtactacttgtcgacgacagtaaaagagatgagcaagaaagctcccagtgaaatttctcgtaaataccaaagtgagttcgaggagatcgaaggcagatggaaaaagctttcctctcagcttgtggaacattgtcaaaagctcgaggagcagatgaacaaacttaggaagatccagaaccacattcagacgcttaagaaatggatggctgaggtcgacgtgtttctcaaagaagagtggccagcgttaggggacagcgagatcctcaagaaacaattaaaacaatgcaggctgctggtgagtgatattcagacaatccaaccaagcctcaatagtgtaaacgagggggggcaaaaaattaaaaatgaagcagagcccgaattcgcctccaggcttgagactgagctcaaggagcttaacacacagtgggaccacatgtgtcaacaggtttatgctcggaaagaagctttgaaggggggcctggagaaaactgtgtcacttcagaaggatctgtcagaaatgcatgagtggatgacacaagcggaggaggagtacctcgagagagatttcgagtacaaaacccccgatgagttacagaaggccgttgaggagatgaaacgggccaaggaagaagctcagcagaaggaggctaaggtaaaactgctcacggagtccgtgaatagcgtgatcgcacaggcacctccagttgcgcaggaggccttaaagaaggaattggagactctcacgaccaactatcagtggctttgtacccgcctgaacgggaagtgtaagacgctcgaagaggtgtgggcctgctggcatgaactactcagctatctggagaaagcgaataaatggctcaacgaggtcgagttcaaactcaaaaccacggaaaacataccaggaggcgccgaggagatctccgaggtgttagacagcctggagaacctgatgcgacacagcgaagataaccccaaccagattaggatcctagcccagacgctgacagatggaggggtcatggacgagctgatcaacgaggagctggaaaccttcaatagcaggtggcgtgagctgcatgaagaggcagtgcgacgacagaagttgctcgaacagagcatccagagcgcccaggaaactgaaaaatctctgcatctgatccaagaaagcctgacattcattgataaacaacttgccgcctacatagccgacaaagtggacgccgcccaaatgccacaagaagcacaaaaaatccagtccgatcttacctctcacgaaatctccctggaggaaatgaaaaaacataatcaggggaaggaggctgcccagcgcgttctgagccaaatcgacgtcgctcagaagaaactgcaggacgtcagcatgaaattcaggctcttccagaagccagccaactttgaacagagattgcaggagtctaagatgatcctggacgaagtaaagatgcatctgcctgccctggagacaaaaagtgtagagcaggaggtcgtgcaatctcaactgaatcactgcgtcaatctctacaaatctttatccgaggttaagagcgaggttgagatggtcataaaaaccggacggcagatcgtgcagaagaagcaaactgagaacccgaaagaactcgacgaacgcgtcacggccctgaagctgcactacaatgaacttggcgctaaagtgactgaaaggaagcagcagttggagaaatgccttaagctttcacgtaaaatgagaaaggagatgaatgtgctgaccgaatggcttgcagcgaccgacatggagctgactaagcggagtgctgtcgaaggaatgccgagtaacctcgatagcgaagtggcttggggaaaagccacccagaaggagatcgagaagcagaaggtgcatctgaagtccatcactgaggtgggcgaggctttaaagactgtgctcggtaagaaggagaccctagtcgaagacaagctctccttgctgaactccaactggattgcagtgacttccagggctgaagaatggctgaatctactgctggagtaccagaagcatatggagactttcgatcagaacgtggatcacatcacaaaatggatcattcaggctgataccctgctggacgagtctgaaaaaaagaaaccccagcaaaaagaggacgtgcttaaacggctgaaggccgaacttaatgatattcgtcctaaggtggattctacacgcgaccaggcagcaaacctgatggccaataggggagaccactgtagaaaactggtggagccacagatttcagagctaaaccataggtttgcggcgatctcccatcggatcaaaacaggtaaagcctctattccactcaaagaacttgagcagtttaatagtgacatccagaagttacttgaaccactcgaggccgaaattcagcaaggcgtgaatctgaaagaggaggattttaacaaagatatgaacgaagacaatgagggaacagtcaaggagcttcttcaacgcggagataatctccagcagaggattacagatgaaagaaagagagaggagattaaaataaagcagcagcttctacagaccaagcacaatgccttaaaagacctccgaagccaacggcgaaaaaaagcactggagatctcgcaccagtggtatcagtataagcggcaggccgatgatctgctaaaatgcctcgacgacatagaaaagaaattggctagtctcccagagcctagggatgagcgcaagattaaagaaatagatcgtgaattgcagaaaaagaaagaggaactgaacgccgtgagacgccaagcggaaggcttgtctgaagatggagcagctatggcagtagaaccaactcagattcaactgagtaagagatggagagagatcgagagcaagtttgcacagttcaggaggcttaacttcgcacagatccataccgtgagggaggaaaccatgatggtcatgacagaagatatgcctctcgagatttcctatgtgccaagcacttacctcacggagattactcacgtgagtcaagccctgctcgaggtagagcaactgctaaacgccccagacttgtgcgccaaggactttgaagatctatttaaacaagaggaatcattgaagaacatcaaggattccttacaacagtctagtggtcgcattgacatcatccattcaaagaagacagctgctcttcaatcggccactccagtagaacgcgtgaaactgcaggaagctctttcccagcttgattttcagtgggaaaaggtgaataagatgtataaagacagacaaggcaggtttgaccggtctgtggagaagtggcggagattccattacgacataaagatatttaaccagtggttgacagaggcagagcagttcttgcgaaagacccaaataccagagaattgggagcatgctaaatacaagtggtacttgaaagagttacaagatggtatcgggcagcgacagactgtggtgagaacgctgaacgcgacaggggaggagattatccaacagtcaagtaaaactgatgcatcgatcctgcaggagaaactggggagcctcaatctgcgctggcaagaagtctgtaagcaacttagtgaccgcaagaagcgccttgaggagcagaaaaatattctgtctgaattccagcgagacctgaatgagtttgtgctgtggttggaggaggctgacaatatcgcctccattccattagagcccggcaaggagcagcaacttaaagagaagctggaacaagtgaagctgctggtagaagaacttcctcttcgccagggtatcctcaaacaactgaatgagactggcggcccggtgctggtttctgctcccatttcaccagaggaacaggataagctcgagaacaagctgaagcagacaaatctgcagtggattaaggtgagtcgagcgctccctgaaaagcagggagaaattgaagcacagatcaaggacctgggtcagctcgagaagaagttggaagatttggaagagcagcttaaccacttgcttctgtggttgtctcctattcggaaccagttggaaatttacaatcaacctaatcaggaaggacccttcgacgtgaaggaaacggaaatcgctgtccaggccaaacagccagatgtggaggagatacttagcaaggggcaacacctctataaggagaagcccgccacccaacctgtcaaacgcaagctcgaggacctctcatcggagtggaaggcagtgaacagactattgcaggagttacgcgctaagcaaccagacctcgccccagggctgaccacgatcggagcctcgcccacgcaaacggtcacactggtgactcagcctgtagtgacaaaagaaactgccattagtaagttagaaatgccaagttcccttatgctggaggtcccggcactggccgatttcaaccgggcctggacagagctcaccgactggctgtctctgcttgaccaggtaatcaaatcccagagggtgatggtcggtgaccttgaagacataaatgagatgatcattaaacaaaaggccactatgcaggaccttgaacagaggcggccacagctggaggaattgattacggccgcacagaatcttaagaacaaaacttccaatcaggaggctcgcactattataactgacagaatcgaacgtattcagaaccagtgggacgaggtgcaagaacacttacagaatcggcggcagcagctgaatgagatgcttaaggactccactcagtggttggaggcaaaagaagaggccgagcaggtgctcggccaagccagagctaaacttgagtcttggaaggagggaccatataccgtggatgctatacaaaaaaaaattacggaaactaagcagctggctaaggatctcagacagtggcagacaaatgtggacgtggccaatgacttggctctcaaattactccgtgattacagcgcagacgacacccgcaaagtgcacatgataacagagaatatcaatgcctcctggaggtcgatccataaaagagtgtccgagagggaggcagcactcgaagaaacacataggctgctccagcaattcccgttagacctggagaaattcctcgcctggctaactgaagccgagacaaccgcaaatgttctgcaggacgctacacggaaggagagactgctcgaagattcaaagggtgttaaagaactcatgaagcaatggcaggacctgcagggggaaattgaagctcacaccgacgtctaccacaacttagatgagaacagccagaagatcctgcggagtctcgaaggctccgatgatgccgtgctgctccagaggagactggataacatgaatttcaagtggagtgagctgaggaagaaatccttaaacatacggtctcacctggaagccagttcggatcagtggaagaggttacacctttccctccaggagctgctggtgtggctgcagttaaaagatgacgaactgtcacgccaggcgccaattgggggcgattttcctgcagtgcaaaagcagaacgatgtccacagggcctttaaaagagagctgaaaactaaagaacccgtaattatgagcaccctcgaaaccgtgcggatcttccttacagagcaaccattagaggggctcgaaaaattatatcaggagccgagggaactccctcctgaggaaagggctcaaaacgtcacccgcttgttacgcaaacaggcagaggaggtcaatacggagtgggaaaagttgaatctgcatagcgctgattggcagagaaagatagatgaaaccctggagcgcctgcgggaactacaggaggccaccgacgaacttgatctaaagctgaggcaagcagaagtgattaaaggcagttggcagcccgttggggaccttctgattgactctttgcaggatcacctggagaaagtgaaagctctccgcggtgaaattgctcctttaaaggaaaacgtttcccatgtcaatgacctggcgcgtcagttgactaccctgggcattcagctgtcaccctacaacttaagcaccctggaggatctgaataccagatggaagctgctccaggttgccgtagaggatagggtgaggcagctgcacgaagcacatcgcgactttgggcctgcatcacagcacttcctgagcacgtccgtccaagggccttgggaacgtgccatatctcccaacaaagtgccctactatattaaccacgagacacagaccacctgctgggaccacccgaaaatgacagaactttaccagagtttggccgatctcaacaacgtgcgcttctctgcctacagaaccgcgatgaagctcaggagactgcagaaagccttgtgcctggatctactcagcctttctgccgcgtgtgacgcgctggatcagcataatctgaaacagaacgatcagccgatggacatcttacagataattaactgcttgaccacaatttacgacaggctcgaacaggaacacaacaacctcgtgaatgtgccactctgcgtagatatgtgcctgaattggctcttgaacgtgtatgatacagggcgcaccggcaggattagagtgctgtcttttaaaaccggcatcatttccctatgcaaagcacacctggaagataagtataggtacttgtttaagcaggtggcttccagtaccgggttttgcgaccagagacgacttgggctgctcctacatgatagcatacagataccccggcaactcggggaagtcgcttcttttgggggctcgaacatagagccttccgttcgatcctgcttccagtttgcaaacaacaagccggaaattgaagccgcactgtttctcgattggatgcgccttgagccgcagtccatggtttggttgcccgtattgcatcgcgtggcggccgctgagacagctaaacaccaggctaagtgtaacatctgcaaggagtgcccaataataggcttcaggtatcggtctctgaagcactttaactacgacatctgtcaatcctgtttcttcagcggcagggttgccaagggccacaagatgcactatcccatggtggaatattgcacaccgactacaagcggagaggacgtacgggattttgctaaggtgctgaagaacaaatttagaacaaagagatactttgccaagcacccccggatgggctatctgcccgtacagacagttctcgagggagataacatggaaacacctgtgacactcataaacttttggcccgttgacagcgctccagcctctagcccccaactctctcacgacgatacacacagcagaattgagcattacgccagcaggctcgcagaaatggagaactcaaacggcagctacctaaatgactctatctcccccaacgagtcaattgatgacgaacatctcctaatccagcactactgtcaatctctaaaccaggatagtcctctttcacagcctcggtccccggctcagattcttatcagtctcgagtctgaagaaaggggagagctggagcggattctcgcagatttggaggaggagaaccgcaacttacaggctgaatatgaccggctcaagcagcagcatgaacacaaaggcctgtcacccctgccgagcccaccagagatgatgccaacttctccccagtcaccaagggatgccgaactgatcgcggaggccaagttattacgacaacacaaagggagacttgaagctagaatgcagatcctggaggatcacaacaaacaattagaatctcagttgcatcggttgaggcagctccttgagcagcctcaggcagaagctaaggtgaacgggacgacagtaagctccccatcgacttcactgcagcgcagtgactcatcgcagcctatgttactgcgagtggtgggatctcagacgtccgatagcatgggcgaggaagaccttttatcgcctccacaagacacctcaaccggcctggaggaggtaatggaacaactcaacaacagcttccccagttcaagaggaaggaacactcccgggaaacccatgagagaagatactatgtag

SEQ ID NO: 142723 - DNA, 3678 bp, Artificial Sequence
  derived and/or modified sequence
atgcccagcagcctgatgctggaggtgcccgccctggccgacttcaacagggcttggacagagttgacagattggctctccttgctcgatcaggtcatcaagtcgcagagagtgatggtgggcgacctggaggatattaatgaaatgatcattaaacaaaaggctaccatgcaggacctagagcaacgtagaccacagctggaggagcttatcacagccgcccagaatctgaagaataagacttccaatcaagaggcaagaactatcatcacagatcgaatagagagaatacagaatcaatgggatgaggttcaggagcacctacagaaccgacgccaacagctgaacgagatgctaaaagacagtacccagtggctggaagctaaggaggaggctgagcaagtgctagggcaggcccgagctaagctggaatcatggaaagagggaccatacaccgtcgacgccatccagaagaagatcaccgaaaccaagcagctggctaaggatctccgccagtggcagactaatgtcgacgtggcaaacgatctagcactgaagttactaagagattatagcgctgatgacacccggaaggtacacatgataaccgagaatataaatgcctcttggcgctccatccataagcgcgtttccgaaagagaggcagccctcgaggaaactcaccgactgctgcagcagtttcccttagacctggagaagtttctggcctggctgacagaagccgaaacaacagccaatgttctccaggacgctacccggaaggaacgtctgctggaggacagcaagggcgtgaaggagctgatgaagcagtggcaggaccttcagggcgagattgaggcccacacagatgtttatcacaacctggatgaaaatagccagaaaatcctgaggtctcttgaaggttccgacgatgcggtcctgctccagaggaggttggacaatatgaacttcaaatggtcagagctgaggaaaaaatccttaaacatcaggagtcatctggaggccagctcagatcagtggaaaaggcttcacctgagcttacaggagctgctggtatggctccagctgaaggacgacgagcttagtagacaggcccccatcggaggggatttcccagccgtgcagaagcagaacgacgtccaccgagcctttaagcgagagttgaaaacaaaagagccagtgataatgagtactctggagaccgtccggatcttcctgaccgaacaaccactggagggactggagaagctataccaagaacctagggagctgccacctgaggagcgcgcccaaaatgttaccagactcttacggaaacaagccgaggaggtgaataccgagtgggaaaagcttaatcttcattccgctgactggcagcgaaagattgatgaaacacttgagagactccgtgaacttcaagaggctaccgatgagttagatctgaagctacgacaggcagaagtcatcaagggcagttggcagcctgtgggggacctcctgatcgatagcctgcaggatcacctggagaaagtaaaggctctacgcggggagatagcccccttgaaagagaatgtgtcccacgtgaacgacctggctagacaacttactactctgggaattcaactgtccccttacaacctgagcaccctagaagatttgaatacccggtggaagttgctccaggtggctgtagaggaccgcgtgcgtcaactgcatgaagctcacagggattttgggcccgcttctcagcacttcctgagcacctctgttcaggggccttgggagagggccatatccccaaataaggtcccctattatattaatcacgagacacaaacaacctgctgggaccaccctaaaatgaccgaactgtaccaaagtctggccgacctcaacaacgtccgattctctgcttatcgcaccgcgatgaaattgcggaggctccagaaggccttgtgcctggacctgctgtctttgagtgccgcgtgcgacgcactcgatcagcataacctcaagcaaaatgaccagccgatggacatcctccaaatcataaactgtcttacaaccatatatgataggctggagcaagaacacaacaatttggtgaacgttccgctgtgcgttgatatgtgtttgaactggctgttaaatgtgtacgacactgggcgcaccggcagaatacgcgtcctgtcctttaagacagggatcatcagcctctgcaaggcgcatctcgaggacaagtatcggtacctgtttaagcaggtggcatcctccaccggtttctgtgaccagcggcggcttggactgctgcttcacgactcgatccagattcccaggcagttgggcgaagtcgcatccttcggtggctccaatatcgaaccaagcgtcagatcttgtttccagttcgccaataacaagccggaaatcgaggctgcgctgttcctggactggatgaggctcgaacctcaaagcatggtctggctgcccgtgctacatagagtcgcggccgccgaaactgccaagcaccaggccaaatgcaacatctgtaaggagtgtcccattatcggcttcaggtaccggagcctgaagcacttcaactacgatatttgccagagttgcttcttttcaggacgagtcgccaaaggccacaagatgcattacccaatggttgagtactgtacaccaaccacatctggggaagacgtgagggattttgccaaagtgctgaaaaacaagttcaggaccaaacggtatttcgccaagcatcctcggatgggctatctgccagtgcagactgtgttggagggtgataatatggagacacccgttacactcatcaatttttggccggtggactctgctcccgcatcatcaccccagctatctcacgatgatacgcacagtcgcatcgaacattatgctagcagactggccgaaatggagaactcaaatggctcatacttgaacgacagcatctctcctaacgagtctatcgatgatgagcacttgctcattcagcattattgtcaaagcttgaatcaggatagccctctcagccagcccaggagccccgctcagatcctgatcagtctggagagcgaggagaggggtgagctggaacggattcttgccgatctagaggaagagaatcgaaatcttcaggccgagtatgacagactgaagcagcagcacgagcataagggccttagtccattgccctcacctcccgaaatgatgccgacgtccccacaatccccaagggacgcagaattgatcgccgaggccaaattacttagacagcataagggcaggctggaggctaggatgcagattctggaggatcacaataagcaactcgaatcccagctacaccgcctgcgacagttgctggagcagcctcaggctgaggcgaaagtgaatggaactactgtgagctccccatctacttcactgcagagatccgattcaagccagcccatgcttctacgtgtggtgggcagccagacgagtgactccatgggagaggaagatttgctctcaccaccccaggatacatccacaggtctggaagaggtcatggaacagttgaacaacagctttccatcctcgcgggggagaaacacgccaggcaaaccaatgagagaggacacaatgtag

SEQ ID NO: 142724 - DNA, 10689 bp, Artificial Sequence
  derived and/or modified sequence
atgaagaacatcatggccggcctgcagcagaccaacagcgagaagattctcctgagctgggttagacaaagcactagaaactatcctcaggtcaacgtgattaacttcactacctcctggagcgatggccttgccttgaatgccttgatccattcacatagaccggatctcttcgattggaattcagtggtatgccagcaatcagcgacacagcgcctcgagcacgcattcaacatcgccaggtaccagctcggcatcgagaagctgctcgaccctgaggatgtggataccacttaccctgacaagaagagtatccttatgtacatcacgagtttgtttcaggtcctccctcagcaggtgtccattgaggccatccaggaagtagaaatgctgcccaggccacccaaggtcaccaaggaagagcactttcagctgcatcaccagatgcactacagccaacagatcaccgtgtcccttgcccagggttatgagcgtacatcgagccctaaacccaggtttaagagttatgcctatacccaggctgcttatgtgaccacgtcggacccaacccgatctccattcccctctcagcacctggaagcacccgaagacaagagtttcggaagttccttgatggaatccgaggttaacctcgaccgctaccagactgctctggaggaggtactgagctggctgttaagtgctgaagataccctacaggcccagggcgagatctcgaatgacgtcgaagttgttaaggatcaattccatacccacgagggatatatgatggatttgaccgcgcatcaggggagagtggggaatatcctgcagctcggatctaaattgattgggacaggcaagttgtcagaagatgaagagactgaggtgcaggagcagatgaatctcctgaatagtcgatgggagtgtctacgcgtggccagtatggagaaacagagtaatctgcacagggtgctgatggatctccaaaatcagaagctgaaggaattgaacgactggctaaccaagacagaggagaggacacgaaaaatggaggaggaaccccttgggccagacctggaggatcttaaacgacaagtgcagcagcacaaagtgctgcaagaagatcttgagcaggagcaagtcagagttaactcccttactcacatggtggttgtagtggatgagtcatctggtgatcacgctaccgcggccctggaggagcagcttaaagtacttggggaccgatgggctaacatatgcaggtggaccgaggatcgatgggtgttgctgcaagacatcttgcttaagtggcagcggcttacagaagaacagtgtctgttctcggcctggttatcagaaaaagaagatgctgttaataaaatacacaccacaggatttaaggaccaaaatgaaatgctgagttctctgcagaagcttgcggtgttgaaggcagatttagagaaaaagaaacagagcatggggaaactttatagcttgaaacaggacctactgagtaccctgaaaaataaaagcgtgacgcagaagacagaagcgtggctcgacaattttgcccggtgctgggacaacttagtgcagaagttggaaaagagtacagctcagattagccaggccgtgactacaacccaacctagcctcactcagacaacagtaatggaaaccgtgacgactgtgacaacaagggagcaaatcctggttaaacatgcgcaggaggagctgcctcctccgcctccccagaaaaagcgccagatcactgttgattctgaaattcgaaagcgtttagacgtcgacataaccgagctgcactcatggatcacgagaagcgaagctgtcctccagtcgccagagttcgctattttcagaaaagagggtaattttagtgacttaaaggaaaaagtcaacgcgatagagcgggagaaagcagaaaagtttagaaagctgcaggacgctagtcgctctgctcaggccctggtggaacagatggtgaacgagggtgtcaatgctgattcgatcaaacaggctagcgaacaacttaactccaggtggattgagttctgtcagctacttagcgagcgactgaattggttggagtaccagaataatatcatagctttttataatcaattacagcaactggagcagatgacaacaaccgcagaaaattggctgaagatccagcctacaactccctctgagccaacagcgatcaagtcccaactgaagatctgtaaggacgaggtgaaccgcctttccgatctacagcctcagattgagcggctgaagattcagtccatagctcttaaggaaaaggggcaaggccccatgttcctcgatgcagatttcgtcgcatttactaatcactttaagcaagtcttcagtgacgtccaggcacgtgagaaagagttgcaaaccattttcgacactttaccacccatgcggtatcaggaaactatgtccgctatcagaacctgggtgcagcagagcgagaccaagctgtcaattccgcagttaagcgtgacagactacgaaatcatggaacagcggctcggagaactccaggccctgcagtcctctctgcaggaacagcagtccggattatattatttatccacaacagtaaaggagatgagcaaaaaggctccctctgaaatatcacggaagtaccaatctgagttcgaggaaattgagggccggtggaagaaactgagttctcaactcgtcgaacattgccagaagcttgaggaacaaatgaataaactacgcaagatacagaaccacattcagaccctgaaaaaatggatggccgaggtggatgtgttcttgaaagaagagtggcctgcccttggggacagcgagattcttaaaaagcaactgaaacagtgtagattgttagtgagtgatatacagacaatccagccatctctgaattccgttaacgagggtggccagaagattaaaaacgaggcagagcctgaattcgcatctaggctagaaactgagctcaaagaactcaatacacagtgggatcatatgtgtcaacaggtttatgcccgcaaagaggctctcaaaggcggcctggagaaaactgtgtcgctccaaaaggacttatccgaaatgcacgagtggatgacacaggccgaggaggagtacctggaacgtgatttcgagtacaaaaccccggacgagctccagaaagccgtcgaggaaatgaagagagccaaggaggaagctcaacagaaagaagccaaggtgaaactgctgactgaaagcgtgaattcagtaatagcccaagcccctcccgtggctcaggaggctctcaaaaaggagctggaaaccctcacaaccaactatcaatggctctgtactcgtctgaatggaaagtgtaaaacccttgaggaggtatgggcttgttggcacgagctactgagctacttggagaaagcaaacaagtggctcaatgaggtggaattcaaactgaagaccacggagaacattcccggaggtgccgaggaaatttcagaggttcttgacagtctggaaaacttgatgaggcacagtgaggacaacccgaaccagattcggatcctggcacagaccctgacagacgggggagtgatggacgagctgatcaacgaggagctggaaacctttaattcaaggtggagagaactgcacgaggaagcagttaggcggcaaaagcttcttgagcaatccatccaatcagcccaggagacggaaaaatcactgcatttgatacaggagtccctgaccttcatcgataagcaattggccgcgtatatcgcggacaaagtggacgcagctcagatgccacaggaagcacagaaaatccagagcgacctcacgagccacgagatttctcttgaagagatgaaaaaacataaccagggtaaggaggctgcacaaagagtcttgtcacaaatagatgtcgcacaaaaaaaattacaagacgtaagtatgaaattcaggttgttccaaaagccagctaacttcgaacagaggttacaggagtccaaaatgatacttgacgaggtcaaaatgcatctgcccgctcttgaaacaaaatcagtggagcaggaggtcgttcagagtcagcttaaccattgcgtgaacctctataaaagcctctctgaggtgaagagcgaggtagagatggtcatcaagaccggacggcagatcgtccaaaaaaaacaaacagagaatcccaaagagctggacgagagggtgactgctctgaaactgcattacaatgaactgggagctaaagttactgaaaggaaacagcagttagaaaagtgcttgaagttgagtaggaagatgagaaaggagatgaacgtcctgacagagtggctggctgcaaccgacatggagctgacaaagagatccgcagttgagggcatgcccagtaatctggactctgaagtcgcctggggaaaggcaacacaaaaagaaatagagaaacagaaagtacatctgaagagtataactgaagtaggagaagcactgaagacagtactgggaaagaaggagactctcgttgaggacaaactgtctctgctcaatagcaactggattgctgtgacatccagggccgaggagtggttgaatctcctgctcgagtaccagaagcatatggaaacctttgaccagaatgttgaccatatcaccaagtggatcatccaagcagatacgctgctcgacgaaagcgagaaaaagaaaccccaacaaaaggaagatgttttaaaaagactaaaggcagaactgaatgatattcgcccaaaagttgatagcaccagagatcaggctgcaaacttgatggcaaatagaggcgaccactgtagaaagttagtagaaccacagataagcgagctgaaccaccgtttcgccgctattagccaccggatcaagaccggcaaggcctccattccactgaaagagttagagcagttcaattccgatatccagaagctgctggagcccctcgaagccgaaatacagcaaggagtaaacctgaaagaggaagactttaacaaagatatgaacgaagataatgaagggaccgtcaaggagttattgcagaggggcgacaaccttcagcagcggatcacagatgaaaggaagagagaagagatcaaaatcaaacaacagctccttcagaccaagcacaatgcgctcaaagaccttaggtcccagcggagaaaaaaggctctggagataagccaccaatggtaccagtacaagagacaggcagatgatcttctaaaatgtctcgatgacattgagaagaagctggcatctctgcctgaaccgcgagatgagcggaaaatcaaggaaatcgatagggaactgcagaaaaagaaggaagaactgaacgcggtccgccggcaggctgaagggctaagtgaagacggggcagccatggccgttgagccaacacaaattcaactgtcaaaacgatggcgagagatagaatctaaattcgctcagtttaggagacttaattttgcacaaattcacaccgttcgcgaggagactatgatggtgatgaccgaggacatgccgctggagatctcctacgtgcctagtacttatctgactgagatcactcacgtttctcaggcactgctggaagttgagcagctccttaacgcacccgatctgtgtgcgaaggattttgaagatctgtttaaacaggaagaatccctgaagaatataaaggattctctacagcaatcctccggtcgcatcgacatcatccactcaaagaagaccgccgccttgcagtccgctaccccggtggaacgcgtgaaactccaggaagctctatcacagttggacttccagtgggagaaggtgaacaagatgtataaggaccgtcagggacgctttgaccggtcagtggagaaatggcgcaggtttcactacgatattaagatattcaaccagtggcttacggaagctgaacagttcttgaggaaaactcagatacccgaaaactgggaacacgcaaaatacaagtggtacctaatagcactcaaagatggaatcggccaaagacaaactgtcgtgcgaacgttaaacgccaccggggaggagataatccagcagtcaagcaaaactgatgcctccatcctgcaagaaaaactgggtagtctgaatctccgctggcaggaagtgtgtaagcagctgtccgataggaagaagagactagaggagcagaagaatattctctcagaattccagcgcgatctgaacgaattcgttctgtggctggaggaggcagataatatcgcttccataccactggagcccggcaaggagcagcagctaaaggagaaactggagcaggtcaagctgttggtggaggaactccctctgcgacagggaattctgaagcaactcaacgaaacgggtggcccagtgctggtcagtgctcccatctcacccgaagagcaggacaagctggagaataaactcaagcagaccaacctgcagtggatcaaggtctcccgtgctctacccgaaaagcagggtgagatcgaggcccaaatcaaagatctgggacaattagaaaagaagcttgaagatcttgaggagcagcttaaccatttgcttctttggctatcaccaattaggaaccagctggagatctataaccaacccaatcaggagggacctttcgatgtgaaggaaaccgaaatcgccgtgcaggcaaaacagcccgatgtggaagaaattttgtcaaagggacagcacctatacaaggagaaaccggccactcagccagtgaaaagaaaactggaggacctttcaagcgaatggaaagctgtaaatcggctgctacaggagctgcgcgcaaaacagcccgatctagcaccaggtctcactaccattggagcatcccccacacagaccgttactttagtaacccagcctgtagtaaccaaggaaaccgcaatctcaaaactggagatgccatccagcctgatgctcgaggtaccagccctggcagatttcaatagggcttggacagagctgactgactggcttagcctgctcgaccaggttatcaaaagccaacgggtgatggtgggagatttagaagatataaatgagatgatcattaaacagaaagcaaccatgcaggacctggagcagcgccggccccaactggaggaactgatcaccgcagcccagaacctgaaaaacaaaactagcaaccaggaggctagaaccatcataacagatcgcatagagaggattcagaatcagtgggatgaggtgcaggagcatctgcagaaccgccggcagcagctcaacgaaatgctcaaagattctacccagtggctagaagccaaagaggaagcagagcaggttctaggacaggctcgcgccaaacttgaatcctggaaagagggcccatatacggtggacgccatccagaaaaagatcacagaaaccaagcagcttgccaaagacctcaggcagtggcaaaccaatgtagacgtggccaacgacctggcactaaagctgcttcgggactacagtgccgatgatactcggaaagtgcatatgataactgagaacatcaatgccagctggcgtagtatccataagagggtgtctgaacgggaggctgccctggaggaaacccatagactgctgcagcagtttcctctcgacctggagaagttcctcgcctggctaactgaagccgagacaaccgctaatgtgctgcaagatgccacacggaaggaacgcctcttggaagattctaagggtgtcaaagaactgatgaagcagtggcaggacttacagggggagatagaagctcatactgatgtctaccacaacctggacgaaaatagccaaaagatcctacggtcactggaaggttcagatgatgccgttcttctccaacgcagattggacaacatgaacttcaaatggagcgagctacggaagaagtccctcaacattaggagtcacttggaggcgtccagcgatcagtggaaacgccttcatctgtccctccaggagttgcttgtgtggctacagctgaaagacgacgaactctcgcgccaggctccaattggcggggacttccccgcggtgcagaaacagaatgatgtccatagagcatttaaaagggaactaaagaccaaagaaccagtgattatgagcaccctggagacagttcgcattttcctgaccgagcagccgctggaaggtctggaaaagctgtaccaggaacctagggaactcccccctgaggagcgcgcacagaacgtgacaaggctcctcaggaaacaagctgaggaagtgaacacagagtgggagaaactaaacctgcattctgctgactggcagcgcaagatcgacgagacactggaacggttacgggagcttcaggaggccactgacgagttagatcttaagctgcgccaggccgaggttataaaggggtcttggcaaccagtgggcgacctgctgatcgatagtctccaagatcacttggagaaggtgaaggctctgcggggggaaatcgccccactgaaggagaacgtctcccacgttaatgacttggcaagacagctgacaactctgggaattcagctctcaccatataatctaagcacactggaggacctgaatacacggtggaagctgctccaagtggcggtagaagaccgtgttaggcaactacacgaggcccacagagatttcggacccgcgagccaacattttctgagcacgtcagtgcaggggccctgggaacgagcaatatctccaaacaaagtgccctactacattaaccacgaaacacagacaacgtgctgggatcatcccaagatgacggagctgtaccagagcttagcggacctgaacaatgtccgattttcagcatatcgcacagcaatgaagttgaggagactccaaaaagcgctgtgtctggatctgttgtcactgagtgctgcttgtgacgcccttgatcaacacaatctgaaacagaatgatcagccaatggatattctccagatcattaattgtctgaccaccatctatgaccgtctggagcaggagcacaacaatctggtgaatgtacctttgtgtgtggacatgtgtctcaattggttattgaacgtttacgacactggccgcaccggtagaattagagtgctcagtttcaagaccggcattatttctctttgcaaagcccatttagaagataagtacaggtatctgtttaaacaggtggcatcctcaacaggcttctgtgaccagcgaaggttggggttgctgctccacgatagtatccaaattccccggcaactcggggaggtggcctcgttcggcgggtcgaacattgagccatcagttcgaagttgcttccagtttgctaacaataagcccgagatagaggccgccttattcctggactggatgcgcctcgaaccccagtccatggtgtggctgccggtactgcacagagtagcagccgctgagacagctaaacaccaggctaagtgtaatatatgtaaagaatgccccataatcggtttcagatataggtctcttaaacattttaactacgacatctgccagtcctgttttttttccggtcgagtggcgaaagggcataagatgcattatcctatggtcgaatattgtacgccaactactagcggtgaggatgtgcgtgatttcgctaaggtccttaagaataagttccggaccaagcgctatttcgccaagcatccacggatggggtacctgccggttcagaccgtgctcgaaggagacaacatggaaactcccgtgactcttatcaacttctggccagtcgactcagcacctgcaagctcacctcagctctcccacgacgacacacatagccggatcgagcactatgcgtctaggcttgctgagatggagaatagcaacgggtcgtatctgaacgactctatttccccgaacgagagcatagatgatgaacacctactcattcagcactactgccagtctcttaatcaggactccccgctgtcccaaccgcggagccctgcccagattttgatatccctggagtcggaagagcgcggagagctggaacgaattttggcggaccttgaagaagaaaaccgcaacctccaggctgagtatgaccgtttgaagcagcaacacgaacacaaggggctcagccccttaccctctcctccagaaatgatgccaaccagtcctcagtccccacgggatgccgagctgattgccgaggctaagttgctgaggcaacataagggaagactggaagcccggatgcaaattttagaagatcacaacaagcagttggagtctcaactacatcgactcagacaattgttagaacagccacaggccgaagccaaggtgaacgggaccaccgtgagctcccccagtacatctctgcaacggtctgacagctcccagcccatgctcctccgagtcgtgggtagccaaacatccgactcaatgggtgaggaagacctgttgtcgcctccccaggacaccagtacaggcttagaagaggttatggagcaactgaataactcatttccttccagtcggggtagaaacacaccagggaagcctatgagggaagacaccatgtag

SEQ ID NO: 142725 - DNA, 11058 bp, Artificial Sequence
  derived and/or modified sequence
atgctgtggtgggaggaggtggaggactgctacgagcgggaggacgtacagaagaaaacctttacaaaatgggtgaatgcacagttcagcaaatttgggaaacagcacatcgagaacctcttcagtgacctgcaggatggaaggaggctgctggatctccttgagggcttgaccggtcagaaactgccaaaggaaaagggatccacccgggtgcacgccctgaacaacgtgaacaaggccctgcgtgttctgcagaataataatgtggacctggtgaatattggctctacggacatcgtggacggaaatcataagttgactcttgggctcatttggaacatcatcctgcactggcaggtaaagaatgttatgaaaaatatcatggctgggttgcagcaaaccaattcagagaagatcctgctgtcatgggttagacagtcaactcgtaattacccccaggtcaatgtgataaacttcactacttcttggagtgatggcctagctctgaatgctttaatccactcacacaggcctgatctctttgattggaactctgttgtttgccagcaaagcgctacccagcgattagagcacgcttttaacatcgctcgctatcagctcggaatcgaaaagctccttgatccagaggacgtggacactacctaccccgacaagaagtccatcctgatgtacattacctccctcttccaggtgctgccccagcaagtgtcgatcgaggctattcaggaagttgagatgctcccacgtccccctaaggtaaccaaagaggagcatttccagctccaccatcaaatgcattattctcagcagattaccgtgtctcttgctcagggctacgagagaactagctctcccaagcccaggtttaagtcatatgcctacacacaggctgcatacgtcactacgagcgacccgacacgctccccattccccagtcagcacttggaggccccggaggataagtcctttgggtcatccttgatggagtcagaagtgaacctggatcggtaccagacggctctcgaggaggtgctgagctggcttctttctgcagaggacaccctgcaggctcaaggtgaaatttccaatgatgttgaggtggtcaaagatcagtttcacacccacgaaggatacatgatggacctgacagcgcatcaaggacgggttggcaatatattacaactgggctcaaagctgattgggactggaaagctgtccgaggacgaggagaccgaagttcaggagcagatgaatctgctgaacagccgttgggagtgcctaagagttgcctccatggaaaagcaatccaatctgcacagagtgcttatggacctgcaaaaccagaagttgaaagagctcaacgattggttgaccaaaaccgaggagaggacccggaagatggaggaggagccgctgggccccgatctggaggatctcaagagacaagtccagcagcataaagtgctgcaggaggacctggaacaggagcaggttcgagtgaactctttaacccacatggtggttgtggtggatgagagttccggggaccacgcgacagctgctctagaagaacagttaaaagttctgggggacagatgggccaacatctgcaggtggaccgaggatcggtgggtcctcctgcaagacatactcctcaagtggcagaggttaacagaggagcagtgtctttttagcgcctggcttagcgagaaagaagatgctgtgaataagatacacacaactggattcaaagatcagaatgagatgctgtccagtctccagaagctagctgtgctcaaagccgatctcgaaaagaaaaaacagtcaatgggcaaactgtacagtctcaaacaggacctcctctcaaccctgaagaacaagagcgtgactcagaagacagaagcatggcttgataactttgcccggtgctgggataacctggtgcagaaattagaaaaatccacggcacagatatcccaggcagttacaacgacccaaccatccctcactcagaccaccgtcatggagacggttacaaccgtaacaacacgcgagcagatccttgtgaaacacgctcaagaggagctgccacccccaccgccccaaaagaaaaggcagattactgtggactctgaaattaggaagcggcttgacgtggatattacagaattgcatagttggattaccaggtctgaagcagttcttcagtcaccagaattcgctattttccgcaaggagggcaacttctctgacctgaaagaaaaggtcaatgccattgagcgggagaaggcagagaagttcagaaagcttcaggacgcttctcgttctgcacaagccctagtggaacagatggtgaatgaaggtgtgaacgctgatagtatcaagcaagcttctgagcagctcaatagtagatggattgaattttgtcagctcctcagcgagaggctaaattggctggaataccagaataacatcatcgctttctacaaccagcttcaacaacttgaacagatgaccaccacagcggaaaactggctgaaaatccagccaacaacaccaagtgagccaaccgcaataaagtctcagctcaagatttgcaaagacgaggtgaaccggctttccgatctccaacctcaaatcgaacgtttgaagatccaaagcatcgccctcaaagagaagggccagggacctatgtttctggatgctgattttgttgccttcacaaatcatttcaagcaggtcttttcagatgttcaggctagagagaaggaactccaaacaatcttcgatactctgccaccaatgagatatcaggagacaatgtcagcaatacggacatgggttcagcagagcgaaacaaagctctctatcccccagttgtccgtgactgactacgagatcatggagcagagactcggagaactgcaggctctgcagtcttcactccaggaacagcaaagcggactctactacctatccactaccgtcaaggaaatgtctaaaaaggctccatcagaaatctcccgcaagtatcaatcagaattcgaggagatcgaaggcaggtggaaaaagctgagtagtcagctggttgaacattgtcagaagcttgaggaacagatgaataagttgcgaaaaattcagaatcacatacagactctaaagaagtggatggctgaggttgatgtgttcttgaaggaagagtggcccgcccttggcgactccgaaatcctgaaaaagcaactcaagcagtgcaggctgctcgtgtccgatatccagactatccagccgtcgctgaacagtgtaaacgaaggaggacagaaaattaagaacgaagctgaacccgaattcgcgagccgattggagactgaattgaaagaactcaacacccaatgggaccacatgtgccagcaagtgtatgctagaaaagaggctcttaagggagggttagaaaagaccgtatcactgcagaaagatttgagcgagatgcacgaatggatgacccaggccgaggaggagtatctggagcgcgattttgaatacaagacccccgacgagcttcagaaggcagtggaagagatgaagcgagccaaggaggaggcccaacagaaggaggcgaaggtgaaacttctgactgagagcgtgaactctgtgattgcacaagccccaccagtggctcaagaggcgctaaaaaaggagttagaaaccctgaccacaaactatcagtggctgtgcactcgcctgaatggaaaatgcaagacccttgaagaggtgtgggcctgttggcacgaactcctctcctacctggaaaaggccaataagtggctgaatgaagtggaatttaagctcaaaacaacagaaaacattccaggcggcgctgaagagatttcagaggtcctcgactctttggagaatctgatgagacacagtgaggacaatccaaaccagataaggatcctggctcaaacactgacggatggaggtgtaatggacgagctgatcaatgaagagctggagacattcaatagccggtggcgagaactccacgaggaagcggtgagacggcagaagctgttagagcaatcgatacagagcgcacaagaaacggagaaaagcctgcacttaattcaggagagcctcacgtttattgataagcagctcgcagcttacatcgctgataaagtggatgccgcccaaatgccacaggaggctcaaaagattcagtcggatctaacctctcatgaaattagcctggaagaaatgaagaaacacaaccagggcaaggaggccgcacagcgggtgctgagccagattgacgtggctcagaaaaaactgcaggacgtctcaatgaagtttaggttgttccagaaaccagccaacttcgagcagcgcctgcaggagtccaaaatgatcctggatgaggtcaagatgcaccttcccgccttggaaaccaaatctgtagaacaggaggttgtgcagtcacagctgaaccattgcgttaatttgtacaagagcttgagcgaagtcaagagcgaggtcgaaatggtaatcaaaactggccggcagatcgtgcaaaagaagcaaaccgaaaatcccaaggaactcgatgaaagggtgacagccctaaagctacattacaatgagctaggggcaaaggtcaccgaacgcaaacaacagctggaaaaatgtctgaagctgagccgcaaaatgaggaaggagatgaacgttctgactgaatggcttgccgccacagacatggagctgactaagcgtagtgccgttgaggggatgccctctaacttggatagcgaggtggcatggggcaaggctacccagaaagagatcgaaaagcagaaggtgcatcttaaatcaatcacggaagtgggcgaggccctgaaaacagtactcggaaaaaaggaaactctggtggaagacaaactgtctcttttgaactccaattggattgccgtcacttcaagggccgaagaatggcttaacttgttactggagtaccaaaaacacatggagaccttcgatcaaaacgtagatcatatcacgaagtggatcattcaggccgacaccctcctagacgagagcgagaaaaaaaagccgcaacagaaggaagacgttctgaaaaggcttaaagcagagttgaacgacatcaggcctaaggttgactccactagggaccaggccgcaaacctgatggctaaccgcggggatcattgccgcaagctggtggaaccacaaatctctgaattaaaccatcgttttgccgcgattagccatcgcattaagactggaaaggcctcaatacccttgaaagagctggaacagttcaattccgacattcagaaattactggagcctctggaggccgaaattcaacagggcgtcaatctgaaggaagaggacttcaacaaagacatgaacgaggacaatgagggcactgtgaaagagctcctgcagaggggagataatctgcaacagagaattacggacgagagaaagagggaggaaatcaagatcaaacagcagctgctgcaaactaagcataacgcgctgaaagatttgaggagccagaggcgtaagaaagcgctcgagatttcccaccagtggtaccagtacaagcggcaagccgatgatctcctgaaatgcctggacgacatcgagaaaaaactggctagcctgcctgaaccaagagatgaacgcaagatcaaagagattgatcgtgagctacaaaagaaaaaagaagagctgaacgccgtgagaagacaggctgagggactgagcgaagatggtgcagcgatggcagtggaaccaacccagattcagctgtccaagcgttggagggaaattgagtcaaagttcgcgcaatttagacggcttaatttcgctcaaatccacactgtgagggaggaaacaatgatggtcatgactgaagatatgccacttgagatcagctacgtccctagcacttacttgactgagattacacacgtttctcaagccttgttggaggtggaacagcttttgaacgcccctgatctatgcgccaaagacttcgaagacctgtttaaacaagaggagagcctcaagaacataaaggatagcttgcagcagagctcgggcaggatcgatataattcacagtaaaaagaccgccgccctgcaatcagcaacacccgtggagcgcgttaagctgcaggaggcactcagccagttggattttcaatgggagaaagtgaataagatgtacaaggacagacagggcaggttcgacagaagcgttgagaagtggaggcggtttcactacgacatcaaaattttcaaccagtggctcactgaagctgaacagtttctacgaaagactcaaataccagaaaactgggagcatgctaagtacaaatggtatcttattgcactcaaagacgggatcggacagcgacagacggtggtgcgcacactgaacgcgaccggtgaggaaatcattcaacagtcatctaagacagacgcctctatcctgcaagagaagttaggttctttgaacctcagatggcaggaagtgtgcaagcaactgtccgacagaaaaaagaggcttgaagagcagaagaatatcctgtcagaattccagagggacctgaatgagttcgtgctgtggctggaagaggccgacaatatcgccagcatcccacttgagccaggcaaagagcagcaactcaaggagaagttggagcaagtcaagctcctcgtcgaggagctgccattgaggcagggcattctgaaacagttgaacgaaactgggggacctgttctcgtttccgcgccaattagtcctgaggaacaggacaaactcgagaacaagctgaagcagaccaatttgcagtggattaaagtctctagggccttgcccgaaaaacagggagagatcgaagcccagatcaaagacctgggacagcttgagaagaagctcgaggacttggaggagcaactcaaccatctcttactgtggttgtcacctatacgcaaccagctggagatatacaaccagcctaaccaggaaggcccatttgacgttaaggagaccgagattgcagtgcaggctaaacagcctgacgttgaggaaatcttgtctaaggggcagcatctttataaggagaaacctgcaacccaacccgtgaaacgcaagctggaggacctgtctagcgaatggaaggctgttaacagattattgcaggaactgagggccaaacagcctgatttggctccaggcctgaccaccataggcgcatcccccacccagaccgtcaccctggtaacacagccagtggttacaaaggagacagcaataagcaagctggagatgccatcatctctcatgttggaggttccggcgctcgctgacttcaatcgggcgtggacggagctgacagattggctgagtctcctggaccaggtgatcaagtcccagcgggtgatggtcggtgacctcgaggatattaatgaaatgatcatcaaacaaaaggccacaatgcaggacctggagcaaaggaggccacagctggaggagctaattacagccgcacagaatttaaagaataagacatcaaaccaggaggctaggacaataatcaccgatcgtatagaacgtatccagaaccagtgggatgaggtgcaagaacatttgcagaacaggagacagcagctcaatgagatgttaaaggatagcacacaatggctggaggccaaagaagaggcggagcaggtcctgggacaagcccgtgctaagctggagtcatggaaggaaggcccttatactgtggatgccatccaaaagaaaatcaccgagactaaacaactggctaaagacctacgacagtggcagactaatgtagacgttgcaaatgacttggccttaaaattgctgcgcgactattcggccgacgataccagaaaggttcacatgattaccgagaatatcaacgctagctggaggtcgatacacaagcgcgttagcgaaagggaggctgcactcgaagagactcacagactcctgcaacagttccccctcgatctcgagaaatttctggcgtggctgaccgaagccgagacaaccgcaaacgtgctccaggacgcgactcgcaaagagcggctcctcgaagattctaagggagttaaagaacttatgaagcagtggcaagatcttcaaggcgagattgaagcacacaccgatgtctaccacaatctggatgagaacagtcaaaaaattctgcggagtctggagggatccgacgacgccgtcttgctgcagcgtcgcctggacaatatgaattttaaatggtctgaacttcggaagaagagccttaatatccgaagccacctggaagccagcagtgatcaatggaaaagattgcaccttagcttacaggagctactagtgtggctacaactgaaagatgatgagctgtccagacaggcacccatcggtggggatttcccagcagttcaaaaacagaatgatgtccacagagccttcaaaagagaactcaaaactaaagagcccgtaatcatgagcaccctcgagaccgtgaggatatttctaactgagcagccgttggaggggctcgagaaactgtatcaggagccgagagaacttccacccgaggagcgtgcgcagaacgtaactcggctcctgcgcaaacaggcggaggaagttaacacagaatgggaaaagctcaatctgcactccgccgattggcagcggaaaattgacgagacactagaaaggttaagagaactgcaggaggctaccgacgaactcgacctcaaattgcgtcaggctgaagtgatcaaaggttcgtggcagccagtgggagatttactgatcgactctctgcaggaccacctggaaaaggttaaggccttgaggggggaaatcgcaccacttaaggaaaacgttagccacgtgaatgatctggctcgacagctcactactctgggcattcagctgagcccttacaatttaagtacgctcgaagacctgaacactcgctggaagctcttacaagtggccgtcgaggatagggtcaggcaactccacgaagctcatagggactttgggcccgcctcccagcacttcctgagtacctccgtccaggggccgtgggagagagccatatcgcctaacaaagtcccttactatataaaccatgaaacccagacaacctgctgggaccatccaaagatgaccgagctgtaccaaagtctggcagacctgaacaatgtgcgtttcagcgcatatcggactgcaatgaaactccgccgtctgcagaaagccttatgtctcgacctgctgagcctctccgcagcatgcgatgcactcgatcagcacaatttgaagcagaatgaccaaccgatggatattctgcagataattaattgcctcactactatatacgatagactggagcaggagcacaacaacctggtgaacgtcccgctctgcgtggacatgtgtctgaactggcttctcaacgtgtacgatacaggaagaacaggcaggatacgggtgctcagttttaagaccggtatcatctccctgtgcaaagcacatctcgaggataaatataggtatctattcaagcaggtcgctagcagcaccggcttttgcgaccagcgcaggctcggattgctgctgcacgactcaatacagattccccggcaactgggtgaagttgccagctttggcggcagcaatatcgagccctcagtgaggtcttgttttcaatttgctaacaacaagcctgagatcgaagcagccttattcctggattggatgagacttgaaccacagtccatggtttggcttccagtgctccatcgggtggcagccgccgaaactgctaaacatcaggctaagtgtaacatctgtaaagaatgtccaatcattgggtttcggtatcgctcgctgaaacactttaattatgatatctgccagtcatgcttcttctccggccgggtcgcaaaaggtcataagatgcactatcccatggtggagtattgcacacctaccacatccggcgaggacgtccgtgacttcgctaaggtgttgaaaaacaagttcagaaccaagcgttatttcgcaaagcatcctagaatggggtatctgccagtgcagacagtgctggagggcgacaatatggagactcctgtgacacttatcaatttttggccggtcgattccgcaccagcttcgagtccacagttatctcacgacgacacccactctcggatcgaacattacgcctctagactggctgagatggaaaactctaatggatcttaccttaacgactccatctccccaaacgagagcatcgatgatgaacaccttctcatccaacactactgtcaaagtctgaaccaggatagtccactttcccaaccaaggagccctgctcagatcttaatatccttggaaagtgaagaacgcggtgagctggagagaattttggcagatcttgaggaagagaatcgaaatctacaggctgagtatgatcgtctgaagcagcagcacgagcataaggggctttctccactgccgtcaccgccagagatgatgccaacgtccccccaatccccaagggacgctgagcttatcgctgaggcaaagctattgcgccagcacaaagggagactggaggcgaggatgcagatccttgaggaccataacaaacaactcgaatcacaactgcacagactgagacaactgctcgagcagccacaggctgaggccaaggtaaatggtactacagtatcaagcccatctacaagcctgcagcggagtgattctagccagcctatgctccttagagtggtcggctcgcagacctctgatagtatgggcgaggaagacctcctgtcaccaccgcaggacacgagcaccggcctggaggaagttatggagcagctgaacaacagctttccatccagcagagggagaaataccccgggaaagccaatgagagaagacaccatgtag

SEQ ID NO: 142726 - DNA, 11058 bp, Artificial Sequence
  derived and/or modified sequence
atgctgtggtgggaggaagtggaagattgctacgaacgtgaggacgtccaaaagaaaacttttactaagtgggtgaatgcccagttctccaaattcggaaaacagcatattgagaacctgtttagtgatctacaggacggacgtagactgctcgatcttctcgaaggactcactggacaaaagctgcctaaagaaaagggaagtaccagagtacacgccctgaataatgtgaacaaagccctgagagtcctgcagaacaataacgttgatttagtcaacattggctccaccgacattgtggacgggaatcacaaactgaccctgggcctcatttggaacattattctgcactggcaagtcaaaaacgtgatgaaaaatatcatggcgggattgcagcagaccaatagtgaaaagattcttctgagttgggtgaggcagtccaccaggaattacccccaggttaacgttataaacttcacaaccagctggtctgatggacttgccctcaatgccctgattcacagccaccggccagacctgttcgactggaactctgttgtatgtcagcagtctgccactcagagacttgagcatgcattcaatatcgctcgctaccagcttggcattgagaaactgctcgaccccgaagacgtggatacaacctaccccgataaaaagtcgattctgatgtatatcacatccctctttcaggtccttccccagcaagtaagtatcgaggcaatccaggaggtggaaatgttgccaagaccacctaaggtcaccaaagaagaacattttcaacttcatcaccagatgcattattctcagcaaatcactgtgtcactggctcagggctacgagaggacctctagtcccaaacccaggtttaagtcttatgcctatacgcaggccgcttatgtgaccacttctgatcctacccgcagcccattcccctcccagcatctcgaagctcctgaggataagtcatttggaagctcattgatggagtcagaggtgaacctggataggtatcagaccgccctggaagaagtgctatcttggctgctatcggccgaagacaccctccaggctcagggtgagatatccaatgacgtcgaagtggttaaagatcagtttcacacccacgagggctacatgatggacctgacagcccatcagggacgcgtgggcaacattctccagctgggcagtaagctgataggcacgggcaagttgtcagaggatgaggagacagaggttcaggagcagatgaatctgctgaattcacggtgggagtgtctgagagttgcttccatggaaaagcagtctaatcttcacagagtcctgatggacctgcagaatcaaaaactcaaggagctgaacgattggttgacgaaaacagaggaacgaacacgaaagatggaggaagagccattgggacctgacctcgaagatctaaaaagacaggtccagcagcacaaggtgctacaggaagacctggagcaggaacaagtcagggttaattctctcacacacatggttgtcgttgtggacgagagttctggcgatcacgccactgccgctcttgaggagcagctcaaggtgctaggggaccggtgggccaatatatgccgttggaccgaggataggtgggttcttttacaggatatccttcttaagtggcaaaggctcacagaggagcagtgtcttttctctgcttggttaagcgagaaagaagatgctgttaacaagatacacactaccggcttcaaggaccagaatgagatgctgagttccctccagaagcttgcggttctgaaggctgacctggaaaaaaagaagcagagcatgggtaagctgtacagcttgaaacaggacctgctttctacactcaagaacaagtcagtgacacagaagacagaggcctggttggataactttgcccgatgttgggacaatttagtccaaaaattggaaaaaagtaccgctcaaatctcccaggctgtaaccacaacccagccttctctgacccaaactactgtgatggaaactgtgacgaccgtgaccacgagagagcaaatcctggtgaagcatgcacaggaagaactccctccccctccgcctcaaaagaaaaggcagataactgtggacagtgagattcgcaagcgcctggatgttgatattacagagctgcattcttggatcactcgctcagaggctgtcctccagtccccagaatttgccatctttcgtaaggaaggcaacttctctgatcttaaggaaaaggtgaacgccattgagcgggagaaagccgagaaatttcgcaagttacaggacgcttcccggagcgctcaggcactggtggagcagatggttaacgaaggagttaacgccgattctattaaacaagctagtgaacagttgaactcccgatggattgagttttgtcagttgctgtccgaacgactcaattggttggagtaccagaacaatatcattgccttctacaatcaactgcagcagctcgagcagatgacgaccacagctgagaattggttaaagatccagcccacaaccccctctgaacctacagcaatcaagtctcagcttaaaatttgcaaggatgaagttaataggctgtcagatttacagcctcagatagagcgcctcaagatccagagtatagcactaaaagagaagggccagggacctatgtttttggatgccgacttcgtcgcttttaccaaccattttaagcaggtgttcagcgatgtccaagcccgtgagaaggagctgcagaccatttttgataccctgccccctatgcgctatcaggaaacaatgtccgctattcgaacctgggtgcagcagtctgagactaagctgagcataccgcagctgtccgtgacggattatgaaataatggaacagaggctgggtgagctgcaagctttacagtcttctctccaggagcagcagagtggcctgtactacctgtccaccaccgtaaaagagatgtctaaaaaagcaccatccgaaatttctcgaaagtaccagtctgaattcgaagaaatagaggggaggtggaaaaagctctcgtcacagctggtggaacattgccagaaactcgaggaacagatgaataagctcagaaaaatacaaaatcacattcagacccttaagaagtggatggcagaggtcgacgtttttctgaaggaggaatggccagcactcggtgatagtgagatcctgaaaaagcagctgaagcaatgtcgcctgcttgtcagtgatatccagaccattcagccctctctcaatagcgtgaacgagggtggacagaagattaaaaatgaggcagaaccagaatttgctagccgactcgagacagagctgaaagagctcaatacacagtgggatcacatgtgccagcaggtctacgccaggaaggaggctttaaaaggcggactcgaaaagacagtctcactacagaaggacctgagtgaaatgcacgaatggatgacccaggcggaggaagagtatcttgagcgggattttgaatacaagactccagacgaactgcagaaagcagtggaagagatgaagcgggcaaaggaagaagcccagcagaaagaggcaaaagtcaaactcctgacggagtcagtgaatagcgtgatcgctcaggcccctcccgtagcccaggaggctctgaaaaaagaactcgagacccttactacgaattaccagtggctttgtacacggctaaacgggaagtgcaaaaccctggaagaggtatgggcttgctggcacgaactgctgtcatacctggagaaggccaataagtggttgaacgaagttgagttcaaactcaagactactgagaacatcccaggaggtgctgaagaaattagcgaagtgttggactcattggagaacctcatgagacactccgaggacaaccccaatcagatcagaattcttgcccagaccctgacagacggtggagtgatggatgaacttattaatgaagaactggaaacctttaattccaggtggcgcgagcttcatgaagaagcggttagacggcagaaactgctggagcagtccattcaatcagcccaagagaccgaaaagagtttgcacctgattcaggagagcctgaccttcattgataagcagctagccgcttatatcgcagataaagtggatgcagcccagatgcctcaggaagctcaaaagatccagagcgaccttacaagtcacgagatctcactcgaggaaatgaaaaaacacaaccagggcaaagaagctgcccagagagttctgagccaaatagatgtcgcccagaaaaagcttcaagatgtgtccatgaaatttcgcctgttccagaagcccgcaaatttcgaacagcggctgcaggaatccaagatgatattagatgaagtgaagatgcacctgccagcactggaaactaagtcggtggaacaggaggttgtgcagtcgcagcttaatcactgcgtcaatctctacaaatcgctttcagaggtcaagtcggaagttgagatggtcataaagacaggacgccagattgtgcagaagaagcagacggagaacccaaaagagctggatgaacgagttaccgctctaaagctgcattacaacgagttgggggcaaaagtgaccgagcggaagcaacaactagagaagtgccttaagctctccaggaagatgcgcaaagaaatgaatgtactgacagagtggttagcagccacggacatggagctgacgaagcgttctgccgtggagggcatgcccagcaatctggacagcgaggtcgcttgggggaaggctacgcagaaggagatcgagaagcagaaggtgcatttgaagtctattaccgaggtgggggaggccttaaagactgtgcttgggaaaaaggaaactctggtcgaagacaaactgagcctcctaaacagtaactggatagctgttacttccagagctgaggaatggcttaatctgctcctcgaataccagaaacacatggagactttcgatcagaacgtggatcacatcaccaagtggattatccaggctgacacactgttggatgagagcgaaaaaaagaagccacaacagaaagaagatgtcctgaaaaggctgaaagctgaactgaacgacatccgcccaaaggtggacagcacacgagatcaggccgctaacctcatggctaatcgcggtgaccactgtcgcaagttggtggagccacagattagcgagctcaatcaccggtttgctgcaatcagtcaccggattaagactgggaaggcctcaatccctctcaaagaactggagcagtttaactcagatatccagaagctcctggagcctctcgaagcagagatacaacagggcgttaaccttaaggaggaggacttcaacaaagacatgaatgaggataatgagggtaccgtgaaggagctccttcagcggggagacaatctccagcagaggattaccgacgagcgcaaacgggaagagatcaagattaagcaacagcttctgcagacgaagcacaatgcgttaaaagacctacgctcccagcggagaaaaaaagctctggagatttcccaccagtggtatcagtacaagaggcaagccgacgacctgctgaagtgcttagatgacatcgaaaaaaagttagcctcactgcccgagccacgcgatgaaagaaaaattaaggaaattgatagagagctgcagaagaagaaggaggagctgaacgctgtgcgcagacaagccgaaggactgtcagaggacggggcagcgatggcagtcgaacccactcaaattcagctgtcgaaacgatggcgggaaatagagtccaagtttgctcagtttcggcgacttaattttgcacagatccacactgtacgggaggaaacaatgatggtcatgactgaggatatgccactggagatcagttatgtgccttctacatacttgacggagataactcatgtatcccaggcccttctggaggtggaacagctgttgaacgctccagatctgtgtgcaaaggatttcgaggacctgtttaagcaggaggaatctctcaaaaacatcaaagacagcctgcagcagtccagtgggagaattgatattatccactctaagaagaccgccgctctgcagagcgctactcctgtggaacgggtcaaactccaggaggccctgtcgcagttggactttcagtgggagaaagtgaataaaatgtataaggaccgacaggggagatttgatcgatccgttgagaaatggcgaaggtttcactatgacatcaaaatttttaaccagtggttaactgaggctgagcagtttcttcgaaaaacgcagatcccggagaattgggagcatgctaaatataagtggtacttgaaggaattgcaagatggcatcgggcagagacagacagtggtgaggaccttaaatgccaccggggaggagattatacagcaaagcagcaagacagacgcctctatcctccaggaaaaattaggctcgctcaatctgaggtggcaagaggtgtgcaaacaactttccgaccgcaagaagcgcctggaggagcagaagaatattttgagcgaattccagagagacttaaacgagtttgttctctggcttgaagaagcagataatattgcgtctataccacttgagcctggcaaggaacaacagctgaaagagaagttggaacaggtcaagctcctggtagaggagctccccctgaggcagggaattttgaagcagttgaatgaaaccggtggccctgtcttagtttccgctcccatctcgcctgaggagcaggataaactcgagaacaagctaaaacagactaacctgcagtggatcaaagtttcccgtgctttgcctgagaaacagggcgagatcgaggctcagatcaaagaccttggccagctagaaaaaaagctggaggatttggaagaacaactgaatcatttgctgttgtggttgagccctatccgcaatcagttggaaatatacaaccagccaaaccaagagggcccatttgacgtgaaggaaaccgaaatcgccgtgcaggctaaacaaccagatgtggaagagattctctcaaaaggacagcatctgtacaaggaaaaacccgctacccagccagtaaagcgcaagctggaggatcttagtagcgagtggaaggcagtgaatcgcttgcttcaggaactgagggcaaagcagccagacttggccccaggactgacgacaatcggagcctcgcctacacaaaccgtgactctggttactcagcctgtggtcactaaagagactgcgatttccaagctggaaatgcctagctctctcatgctggaggtgcccgcacttgctgattttaacagggcttggaccgagctgactgactggctgagcttactagatcaggtgatcaaaagtcagcgggtaatggtcggcgatcttgaagacatcaacgaaatgattatcaagcagaaggcgacgatgcaggatctggagcaaagacggccacagcttgaggaactgatcactgccgctcagaaccttaagaacaaaacatctaaccaggaggcaaggaccattatcactgaccggatcgaacgcatacaaaaccaatgggacgaggttcaggagcacctacagaaccgacggcaacagctgaacgagatgctgaaggatagcacccagtggcttgaggccaaagaggaagcagaacaagtgttgggtcaggcaagagcaaaactcgagtcttggaaggagggaccatataccgtcgatgccatccaaaaaaaaatcaccgaaacaaaacagctggcaaaagatcttcgtcagtggcagactaacgttgacgttgcaaacgacctcgcccttaaactcctcagggactacagtgccgatgacacccgcaaagtccatatgattacggagaacatcaacgcatcatggcgctctattcataaacgagtgagtgaacgggaggcggctctggaagagactcataggctactgcagcaattcccgctagacctggagaaattcctggcttggctgaccgaagccgaaacgaccgctaacgtgctccaggacgcaactcgcaaggagagactgctcgaagactccaaaggggtgaaggagctcatgaagcaatggcaggatttgcaaggtgaaattgaagcccacaccgacgtgtaccataacctcgacgaaaactcccagaaaatattgagatcattggaagggtctgacgatgcagtgctattacagcgcaggctggataacatgaactttaagtggtcagagctgcggaaaaagagcctcaacatcaggtcccatttagaagcatcttcagaccaatggaaacggttacacctgagtttgcaagaactgcttgtctggttacaactaaaagatgatgaactcagccgtcaagcaccgatcggcggtgactttcccgcagtgcaaaagcagaacgacgttcatcgcgcatttaaaagagaactgaagacaaaagagccagtcataatgagcactctggaaaccgtgagaatatttcttacagagcagcctttggaaggcctggagaagctttaccaagagcctagagaactgccacctgaggaaagagcgcagaatgttacaaggttactgcgcaaacaggcagaggaagtgaatacggagtgggaaaaactgaatctgcactccgccgactggcagaggaagatcgacgagactctcgagaggcttcgggagctgcaagaagcaacagacgagctggatctgaaattgagacaggctgaggtgattaagggcagctggcaaccagtgggagatctgctcatcgactccctgcaggatcacctcgaaaaggtaaaagccctcaggggcgagatcgctccgctgaaggaaaatgtaagtcatgtgaacgacctggctcgccagctgacgaccctgggtattcaacttagtccctataatctgagtacactggaagatcttaacacccggtggaagctgctccaggtggcagtggaggacagggtgcgtcaactgcatgaagcccacagggattttggcccagcatctcaacactttctgtcgactagcgtccaaggtccttgggagcgggctatctcccctaacaaggtaccatattacatcaatcacgagacacagactacatgctgggatcatcccaagatgacagaattataccagtctctggcggatctgaacaatgtgcgcttcagcgcttacagaaccgctatgaaacttcggagactgcagaaagcactctgtctggatctcctgagcctctccgcagcatgcgatgctctggaccagcataatctaaagcagaatgatcagcctatggatatacttcagatcataaattgtctcaccactatatatgacaggttagagcaggagcacaacaacctggtgaacgtccccctgtgtgtcgatatgtgcttgaattggctgttaaacgtgtatgatacagggcgtacaggccgaattcgtgtcctgtccttcaagactggcatcatcagtttatgtaaggcacacctggaagataagtataggtacctgtttaagcaggtggcttcaagcactggcttttgtgaccaacgacgcttaggccttttgttgcacgatagcatacagatcccaaggcaactgggggaggtggcctcgtttggaggctcaaacatcgagccttcagtaagatcatgtttccaattcgcaaataacaaacccgagattgaagccgctttgttcctggactggatgagactcgagccccaatctatggtctggctgccggtgctgcatcgcgtcgccgctgcggagacggccaagcaccaggcgaagtgtaacatctgtaaggagtgccccatcattggctttaggtatagaagcctcaagcactttaactatgatatttgccagagctgcttcttctccgggagagtggcaaaggggcataagatgcactaccctatggtggaatactgtacccccacgacgagcggggaagatgttagggactttgcgaaggtgctaaagaataaattcagaacgaagcgttactttgccaagcatccccgaatgggttatttgccggtgcagactgtccttgagggtgataacatggaaacgcccgtgactctgattaacttctggcccgtagactccgctccagcatcctcccctcagctcagccatgacgacacgcactcccggatcgagcactacgcctctcgacttgccgagatggagaactctaacggctcttacctgaacgacagtattagccccaatgagagcattgacgatgagcacttactgattcaacactactgtcaaagtctgaaccaagatagtccactatcacagccacggagcccggctcagatccttatttctctcgagtccgaggagaggggagaactcgagagaatactcgctgatctggaagaggaaaatcgaaatttacaggcagaatatgacagacttaagcaacagcacgagcacaagggcctttcgcctcttcctagccctccagaaatgatgcccacctccccccaatctccaagagacgccgagctgattgcggaggcaaagctacttcggcaacataaggggcgactcgaggctcgcatgcagattttggaagatcacaacaagcagctcgaatcacagctgcaccgcttgcgacagcttttagagcagccgcaggctgaagcaaaggttaacggtactacagtgtcttcaccatcgacttcacttcagaggtcagactcttctcagccgatgctgttacgcgtggtgggctcacagactagtgactccatgggggaggaagacctcctatcgccccctcaggacacctcaacagggctcgaagaagtgatggagcaactaaataatagtttcccttcgtcccggggacgaaatacgcccggtaagccaatgcgcgaggatacaatgtag

SEQ ID NO: 142727 - DNA, 3678 bp, Artificial Sequence
  derived and/or modified sequence
atgcccagttccctgatgctagaggttcctgctcttgcagatttcaatagggcatggactgagctaaccgactggctcagcctgctggatcaggtcatcaaatcccagcgagtaatggtgggtgacctggaagatatcaatgaaatgatcattaaacaaaaggctacaatgcaggacctagagcagcggagaccccagctggaggaactgatcactgctgcccagaacctgaaaaacaaaacgtctaatcaggaggccaggaccattattacagacaggattgaacgcattcagaatcagtgggacgaagtgcaggagcatctccaaaatagacgtcagcagctaaacgaaatgctcaaagattctacacagtggctcgaggccaaggaagaggctgaacaggttcttggccaggccagggccaagctggaatcttggaaggaaggaccatatactgttgacgcaatccagaaaaagatcacagagacaaaacagcttgcaaaagatctacggcaatggcagacaaatgtggacgttgcaaacgacttagctcttaaactgcttagagactatagcgcagatgacactcgaaaagtgcacatgataaccgagaatataaatgcctcttggaggtccattcacaagcgcgtttccgaaagggaggcagccctggaggaaacacacagacttctccaacagtttcccctagacctggagaaatttctggcttggcttactgaggcagagactaccgcaaatgtgttgcaggacgctacacgcaaggagagactcctcgaagactccaaaggagtcaaggagcttatgaaacaatggcaggatcttcagggtgaaattgaagcgcataccgacgtctatcataacttggacgaaaactctcagaagatattacggtctcttgaggggagcgacgatgcagtgctactccagcgcaggctggataatatgaattttaagtggagtgagctgcggaagaagagtctcaatatcaggtctcacctggaagcaagctcagaccagtggaaacggctgcatctgtccctgcaagaacttctagtatggctgcagctgaaagacgatgagctgtcacgacaggcacccatcggtggcgattttccagccgttcagaagcagaacgatgtgcacagggccttcaagagggaactgaaaacaaaagagccagtgataatgtccacactagaaactgtcaggatctttctgacggagcagccccttgaaggcctggaaaagctgtaccaagagcctagggaactcccccctgaagagagagcccagaacgtgactagactcctccggaagcaagcagaagaggtcaataccgaatgggagaaactcaacctgcactctgccgattggcaacgcaaaattgatgagactctggagagactgcgggaacttcaggaagccaccgatgaactggacttgaagttaagacaggcagaggtcatcaaggggagttggcaaccagttggcgacctccttatcgattcattgcaggaccatctcgaaaaggtcaaagcattgaggggtgagatcgcacctctgaaagagaacgtgtcccatgtaaacgacctcgcgaggcaactaacgaccctggggattcagctctccccctacaatctttctacactggaggatctcaatacccgctggaagcttctccaggtggccgtggaggatagagttcgtcagctgcacgaagcccacagggactttgggccagcatctcagcattttctgtcaacttccgtccagggaccatgggagcgcgcaatctctcccaacaaagtcccttactatattaaccatgagacacagactacatgctgggaccatcccaaaatgaccgaactttaccagtccctggcagacctcaataatgtcagattctctgcctataggacggccatgaagctgcggcgacttcagaaggcgctgtgccttgatctcctgtccctcagcgctgcctgtgatgccctggatcagcacaatctgaagcagaacgatcaacccatggacatcttacaaataattaactgtctcaccactatatatgataggctcgagcaggaacacaataatttggtgaacgtgcctctgtgtgtcgacatgtgtttgaactggctacttaatgtgtacgacacaggcagaacaggccgaattcgcgtcctgtccttcaaaacaggtatcatctctctctgtaaggcccatctggaagacaagtataggtacctgttcaaacaggtagctagctctaccggcttctgcgaccagcggagattgggcctgctgctacacgacagcatccaaatccccaggcagctgggcgaggtagcaagctttgggggaagtaatatcgaaccgagcgttaggtcatgttttcagttcgccaataataagcccgaaatcgaagctgctctcttccttgattggatgaggcttgaaccccaatcaatggtgtggctccctgtgctgcacagggttgccgctgccgaaacagccaaacaccaggccaaatgcaatatctgtaaagagtgtcccataatcggcttcaggtaccgctccttgaaacattttaactatgacatttgccagagttgtttttttagcggtagagtagccaaagggcataaaatgcactaccctatggtggaatactgtacgcccaccacttcaggcgaagatgttagagacttcgccaaggtcttaaaaaacaagtttcgcactaaaaggtactttgccaagcatcctcggatgggttacttgcctgtccagaccgtccttgagggagacaatatggagacccctgttactctgatcaacttctggccggttgactctgccccagccagttctcctcagctctcccacgacgacacgcacagtagaatagaacattatgcctctagactcgccgaaatggagaactccaacggttcctacctgaatgactccatttcgccaaatgagagcattgatgacgagcacctgctcattcaacactactgtcagtccctcaaccaggattcccctttgtcccagcctcgctccccggctcaaatcctgattagccttgagagcgaggagaggggcgagctagagaggattctggcggacctcgaggaggagaaccgcaacctgcaggcagaatatgatcggctgaagcagcaacacgaacataaaggtctgtccccccttcccagcccacctgaaatgatgcccaccagcccacagagccctcgggacgccgagttgatcgcggaggctaagctcctgcggcagcataaggggagacttgaagccagaatgcagattttggaggaccacaacaaacagctggagtcccagctgcatcgcttgcgacagctgctggagcagcctcaagcagaggccaaggtcaacggtaccactgtcagctctccttcaacgagccttcagagatcagattcatctcaacccatgcttttgagggtggtcgggtctcagacaagcgattcaatgggtgaagaggacttgctgagcccacctcaggacactagcactggcttggaagaagtgatggaacagctgaataactcatttccgtcctcccggggtcggaatactcctgggaaacccatgagggaggataccatgtag

SEQ ID NO: 142728 - DNA, 10689 bp, Artificial Sequence
  derived and/or modified sequence
atgaaaaacatcatggcaggcctacagcaaacaaatagtgaaaagatcctgctcagttgggtacgtcaatctacaagaaactacccccaggtgaacgtgattaacttcactacttcctggtcggacggcctggcgttgaacgcactgattcattcgcaccgacctgacctcttcgattggaatagtgtcgtttgccagcagtctgcaacccaacgattggagcatgcttttaacatcgccagatatcagctggggattgagaaactactcgatcccgaggacgtcgacacaacttatcctgataagaaatctattctcatgtatattactagtctcttccaggttctccctcagcaagttagtattgaggctattcaggaggtggaaatgcttccgagaccccctaaggtcacgaaagaagagcatttccagctgcaccaccagatgcactactcacagcagatcaccgtctccctagcccagggctatgagagaacatcatctccaaaaccaagatttaaaagctacgcttatacccaggccgcttatgtgacgacaagcgaccctacccgttccccctttccatcccaacatcttgaagccccagaggacaaaagctttggaagctccctgatggagtctgaagtcaacctcgatagatatcagacggcattagaggaggtcctcagttggctgctttctgccgaagacacactgcaagctcaaggggaaatctctaatgacgtcgaagttgttaaggaccagttccatactcatgagggttatatgatggacctgaccgctcaccagggtcgcgtgggcaatatcctccaattgggctcaaaactcatcggaaccgggaagctgagtgaagacgaggaaaccgaagtgcaggagcagatgaacctgctgaattcaaggtgggagtgtctcagggtggcctccatggagaagcagtccaaccttcatagggttttgatggatcttcagaatcagaaattgaaagagttaaacgactggctgactaaaacggaagaaaggacgcgcaaaatggaggaagaacccctgggtcccgacctggaagatttaaagagacaggtacagcagcataaagtgcttcaggaggacctcgagcaggagcaggttcgagtgaacagtcttactcatatggtggtcgtcgtggacgagtcctccggggatcatgcgacagctgcattagaagagcagctaaaagtgcttggcgaccgctgggctaacatctgccgttggaccgaagatagatgggttctcctgcaggacattctgctcaagtggcagagactgaccgaagaacagtgtctcttctctgcgtggctctccgagaaagaggacgcggtgaacaagattcatacaacgggctttaaggaccaaaacgagatgcttagttcgctgcaaaaactcgcggtgcttaaagcggatctcgagaaaaagaagcagagcatgggcaagctgtactctcttaaacaggatctgctctcgactttgaaaaacaaaagcgttacccagaagacagaagcgtggctcgacaacttcgctcggtgttgggataatctggtgcagaagctagaaaaatcgacggcccagatttcgcaagccgtgacgacgacacagccttctctcacacaaacgaccgtgatggagacagtcactactgtgaccacccgagagcagatcctggtgaagcatgcccaggaagagctgcccccaccgcctccccagaaaaaaaggcagattaccgtggacagcgagatccggaagagactcgatgtggacattaccgagctgcacagttggatcactagatctgaggccgtgttacagtctccggaatttgcaatctttcgaaaagagggtaatttttctgacctgaaggagaaagtgaatgcgattgagcgagaaaaggccgaaaagttccgtaagctacaagacgcttcaagaagcgctcaggctctggtggagcagatggtaaacgagggagttaatgccgactcaatcaagcaagcatcggaacagctgaatagcagatggattgagttctgccagctgctgtcagagcggttgaactggttggaataccaaaataacataatcgctttttataaccaattgcagcagctcgagcaaatgaccaccaccgctgagaattggctcaagattcaaccaactacaccatcagagccaactgccatcaaaagccaactgaaaatctgcaaagacgaagtgaaccgactgagcgacctccagcctcagatagaacggctcaaaatacaaagcatcgccctgaaagaaaagggacagggccctatgtttttagatgcagatttcgtcgcctttacgaaccattttaagcaggtctttagcgatgtgcaggctcgagagaaagaactgcagacaatcttcgacacccttccccctatgcgctaccaggagaccatgtcagccattcggacctgggtgcagcaatccgagacgaagctttcgattccgcagctatctgtcacagactatgagattatggaacagaggttaggggagttgcaggccctgcaaagtagcctccaggagcagcagagcggactgtactatctgagcaccacagtgaaggaaatgtcaaaaaaggcccctagcgagatttcccgcaaatatcagtcagagtttgaggagattgaaggacgctggaagaaactgtctagccagctagtagagcactgccagaaactcgaggagcagatgaacaaactacggaagatccagaaccacattcagacgttgaagaaatggatggctgaagtggatgtgtttctgaaagaggaatggcctgccctgggtgacagtgaaattcttaaaaagcagctgaagcagtgtaggttgcttgtgagtgacatacagacgatccagcccagcctgaactccgtgaacgagggtgggcaaaaaattaaaaacgaggcagagccagaattcgcaagccggctggaaacagagcttaaagagctcaacacccagtgggaccacatgtgccagcaagtctatgccagaaaggaggccctgaagggcggtctggagaagacagtgtctctgcaaaaagatttaagcgagatgcacgaatggatgacacaggctgaggaggaatatttagaacgtgacttcgaatacaagacccccgatgagctgcagaaagccgtagaagaaatgaaacgcgctaaagaggaggcgcagcaaaaggaggccaaggtcaagttgttgacagagtcagtaaacagcgtaatcgctcaggctccaccagtggcgcaggaggcccttaaaaaggagctggagactctgacgacaaactatcagtggctatgtacaaggctgaacgggaagtgtaaaacactcgaggaggtgtgggcctgctggcacgagctgctcagctacctcgaaaaggccaacaagtggctgaacgaagttgagtttaaactcaaaactacagaaaatatcccgggaggcgctgaggaaatctccgaggtgcttgattccctcgaaaacctcatgcgccacagcgaggacaaccccaaccaaattcgcattctggcacaaacactgaccgatggaggggtaatggacgaactgataaatgaagaacttgaaactttcaattcccgatggcgggagctgcatgaagaggcagtaaggaggcagaagctgctggagcagtctatccaatcggcgcaagagaccgagaaaagcttgcacctgatccaggaaagccttaccttcatcgataagcaactagctgcctatattgcggacaaagtcgatgccgctcaaatgccacaagaggcccagaagatacagagcgacctcacctcacatgagatctccctagaggagatgaaaaaacataatcagggcaaggaagccgctcagagagtgttgtcgcaaattgacgtggcacagaaaaaacttcaggatgtgagtatgaaattccggctgtttcagaagcccgctaattttgagcaaaggctgcaggagagcaagatgatcctggatgaagtaaagatgcacttgccagctctcgagacaaaatctgttgagcaggaggtggtgcagtcacagctgaatcactgtgtcaatctctacaagtccctctctgaggtgaagtcagaagtagagatggtcatcaagactggtcggcaaattgtgcagaagaagcaaacagagaatccaaaggaactggacgagcgagtgaccgccctgaaactacactataacgagttaggggctaaggtcaccgagcgaaaacagcagcttgagaagtgcctaaagctcagtagaaagatgcggaaggagatgaacgtcctgaccgagtggttggccgctaccgacatggagcttacgaaaaggagtgctgttgagggcatgcccagtaatctcgactccgaagtcgcctggggtaaagcaacccagaaggaaatagagaagcaaaaagtacatctcaaatcgatcactgaggtgggagaggctctgaagactgtgttgggaaaaaaggaaacactggtggaggataaactctctttactcaattcgaactggattgctgtaacttcacgggcagaagaatggttaaacctgctgttagagtatcaaaagcacatggagacttttgaccagaacgtagaccacatcactaagtggatcatccaggcagatacgctgctcgacgaaagcgaaaagaagaagccccagcagaaggaggacgttctcaagagacttaaggctgaattaaacgacatcagacctaaggtggattcaacgcgagatcaagcagctaatttgatggctaataggggggaccactgccgaaagctggtggagccccaaatctctgagttgaaccatcggttcgcagctatatcccaccgaattaagacaggcaaggcaagtatcccattgaaagagctcgaacaatttaattccgatattcagaaactcctcgagcctctagaggccgaaatccagcagggcgtaaatttgaaagaagaagacttcaacaaggacatgaacgaggataacgaggggaccgtaaaggaactgctccagcggggagacaatctccagcaacggatcactgatgaaaggaaacgggaagaaattaaaataaagcaacagctgctccaaactaaacataacgccctgaaagacctgagatcccagaggcgcaagaaagcattagaaatctctcatcaatggtatcaatataagagacaagcagacgacttactgaagtgcttagatgatattgaaaaaaagcttgcttcactgcccgaaccacgcgacgagagaaagattaaagaaattgaccgcgaactgcagaagaagaaagaggagctgaatgcggtgcggcgacaggctgagggtctgagcgaagatggtgctgcaatggcagtggagccgactcaaattcagctgtccaaacgctggcgggagatcgagtccaaattcgcccagtttagaaggctcaactttgcgcagattcacactgttcgagaggaaacaatgatggtcatgactgaggatatgccgctggaaataagctatgtcccctctacctacctcactgagatcacacatgtgtcacaggccctgcttgaagtggagcagctgctaaatgcaccggatctgtgtgctaaagactttgaggatctgttcaagcaggaagagtctctgaaaaatattaaggattcgttgcagcagtcttccggcaggatcgatatcatccatagcaagaaaacagccgcactgcagtctgccactcccgttgaacgggtgaagctccaggaagccttgtcacagctcgattttcagtgggaaaaagtcaataagatgtataaggaccgtcaggggcgtttcgatcggtctgtggagaagtggcgacgttttcactacgatatcaaaatttttaaccagtggctcaccgaggctgaacagttcctgaggaagacccagattcccgaaaactgggagcatgccaagtataaatggtatctcatcgccttgaaagacggaatcggtcaaagacagacggttgtgagaactctgaatgccacaggtgaggaaattatccagcagagcagcaagacagatgctagcattctgcaggagaagcttgggagtctgaacttgcggtggcaggaggtgtgcaagcaactttccgaccggaagaaacgcttggaggaacagaaaaacattctctctgagtttcagcgggatctgaacgagtttgtgctgtggctcgaggaggccgacaatattgcgtccatccctcttgagcccggaaaagagcagcagttaaaagagaaactggagcaggtcaaactgctggtggaggagttgcccttgagacaaggcatcttgaagcagctgaacgagacaggcggtccggtgttagtgagcgccccaattagtccagaagaacaagacaaactcgaaaataaactcaagcagaccaacctacagtggattaaggtgtctcgagccctcccagagaaacagggggagattgaggctcagatcaaggatcttggccagctggaaaaaaaactggaggatctggaagaacagttgaaccatctcctactgtggctctccccaattaggaatcagctcgagatctataaccaacccaaccaggagggacccttcgacgtcaaggagaccgaaatagcggtgcaagctaaacaacccgatgtggaagagatcctgtcgaaagggcaacacctatacaaagagaagccagccacccagccagtgaagcggaaactcgaagacctgtcgtctgaatggaaagctgtcaaccgtctgttacaagaattgagagctaaacagcctgatttagctccagggttgactaccataggcgcatcgcccacgcaaactgtcacacttgtgacgcagcccgtggtgaccaaagaaaccgcgataagcaagctcgaaatgccttcctctctgatgctggaagtgccagctctcgctgactttaacagagcatggactgaactgaccgactggctgtctctcttggaccaggtgatcaaaagtcaacgcgtgatggtgggagaccttgaggacatcaatgaaatgatcatcaagcaaaaggccaccatgcaagacctcgaacagcggagaccccaattggaagagttgatcaccgcggctcagaacctgaagaacaaaacctctaatcaggaggcgcgaacaatcatcacagacaggattgagcgcattcagaaccagtgggacgaggtgcaagagcatcttcaaaatcggaggcagcagctcaatgaaatgcttaaagattccactcaatggctagaagcaaaagaggaagccgaacaggtgctcgggcaagcaagagccaaattagagtcttggaaagaaggtccttacactgtcgacgccatccagaagaaaattactgagactaagcagctcgcgaaggacctgaggcagtggcagaccaacgtcgacgtagccaacgacttggcattaaagctgctgcgggactactcagccgatgacacgagaaaagttcacatgatcacagagaacattaacgctagttggcgcagtatacataagagagtctccgaaagagaggcagctcttgaggaaacccaccgactgttgcagcagtttccccttgacctcgaaaagtttcttgcatggttgacagaagcggaaacgacggccaatgtgttgcaggacgctactaggaaagagcggttgttggaggatagcaagggtgtaaaggagttgatgaagcagtggcaggacctgcagggggagattgaagcccatacagacgtttatcacaaccttgatgaaaactcgcagaagattctgcgatcactcgaaggatccgatgatgcggtgttgctccagagacgactggacaacatgaatttcaagtggagcgagctgcgcaaaaagtccctgaatatcagaagccatctggaggcgtcatctgatcagtggaaacggctgcatttgtcattgcaggagctgctcgtctggctccagttgaaagatgatgaactgagccgacaagccccaatcgggggagatttccccgctgtccagaagcaaaatgacgttcaccgcgcttttaagcgcgagctgaaaaccaaagagccagtcattatgtcaacactggaaaccgtgagaattttcctgactgaacagccactcgagggactagaaaaactttaccaggaaccacgggaactgccacctgaggagagggctcagaacgtaacacggctgctcagaaagcaggcggaggaggtgaacactgagtgggagaaactgaatttgcattctgcagactggcagagaaagattgacgagaccttggaaagactgcgcgaactgcaggaagctaccgacgaactggacctgaaactgagacaggcagaggttataaagggatcctggcagcccgtcggcgatctgcttattgactcgttgcaggatcacctcgaaaaagtgaaagccctcagaggagaaattgctccactgaaagaaaacgtgagtcacgtcaatgatttggcacgccagctgaccaccctggggatccagttgagcccctataacctttccactctggaagacctcaataccaggtggaagttgctccaggtggcagtcgaagacagggtccgccaactccacgaggcacatagggattttggcccagcctctcagcactttctctccacttccgttcagggaccgtgggagagagccatctcacctaacaaggttccctattatattaaccatgagacacagactacctgttgggaccatccgaagatgactgagttatatcagagcctggctgatcttaacaatgtgcggttcagcgcatatcgcactgccatgaaactccgcaggctgcagaaggcactgtgcctggatctgctctccctgtccgccgcatgcgacgccctcgaccagcacaacctaaagcagaacgatcagcccatggatatcctgcagatcatcaactgtcttaccaccatctacgaccgcttggaacaggagcataacaacctggtcaatgtgcccctctgcgtggacatgtgtttgaactggctgctgaatgtctatgataccggccgtaccggacggatcagggttctttcctttaaaactggaattatctcactttgcaaagcacacctcgaagataaatatcgatacctttttaaacaggttgcttcaagcaccgggttctgcgaccagcggaggctggggctgcttctgcatgatagcatccagatcccccgacagcttggcgaggttgctagcttcggcggtagcaatatcgaaccgtctgtaagatcttgcttccaatttgcgaacaacaaacctgaaatcgaggccgctcttttcctcgactggatgcggttagagccacagagtatggtgtggctccccgtgctgcatcgcgtggctgctgccgagacagccaagcatcaggccaaatgtaacatctgtaaggagtgtcccattattggcttcagataccggtccttgaagcatttcaactatgacatatgccagagttgtttcttcagtggcagggtggcaaagggccacaagatgcattatcccatggtggagtactgcacaccgaccaccagcggtgaagacgtgcgggatttcgctaaggtgctgaaaaataagtttaggacaaaacgctacttcgctaagcatcctagaatggggtatctgccagtccagaccgtattggagggagataacatggagacacctgtcaccctgataaacttttggccagtcgacagcgctcccgcatcttctccgcaactgtcacacgatgacacacactctagaattgagcattacgcatctcgccttgctgaaatggaaaatagcaatggcagctaccttaatgattcaatcagtcctaatgaatcgatcgacgatgagcacctgctaatccaacactactgccaatcactgaaccaggacagccctttaagccagcccaggtcccccgctcagatactaataagcttggaaagcgaggagcggggtgagttggaacgcatcttggccgaccttgaagaagaaaaccgaaatctgcaggctgagtatgatcggctaaaacaacagcacgagcacaagggcctttcccccctcccttctccgccagagatgatgcctacctcaccacaatcccctcgcgatgctgagcttatagctgaagccaagcttctccggcagcacaagggccgactggaggcccgaatgcaaattctggaggaccataataagcaactcgaatcccagctccataggcttagacagctgcttgagcagccccaggccgaggccaaagtcaatggcactactgtgagtagcccaagcactagcctgcagagaagcgatagctcccagcccatgctgctcagagttgtgggcagccagactagtgactccatgggggaggaggacctgttaagtcccccacaggatacttccaccggactggaagaagtcatggagcagttgaataactcctttccgtccagccggggacgcaacactcctggcaaaccgatgagagaggacacaatgtag

SEQ ID NO: 142729 - DNA, 11058 bp, Artificial Sequence
  derived and/or modified sequence
atgctgtggtgggaagaggttgaagactgttacgagcgcgaggacgtgcaaaagaagacatttacaaagtgggtgaacgcgcagttctccaagtttggcaagcagcacatagaaaacctatttagcgaccttcaggatggccgtaggctcttagacctgctcgagggactgacaggccaaaagttgccgaaggagaaggggtctaccagggtccacgccctcaacaatgtcaacaaagccttacgagtcttgcagaataataacgtagatttagtcaatatcggttccacagatatcgtggacggaaatcataaattaaccttggggcttatctggaatatcatcctgcactggcaggtgaaaaatgttatgaaaaatataatggctgggctgcagcagacgaatagcgaaaaaatattgttgtcttgggtcaggcaaagcacacggaactacccccaggtgaatgtgattaactttaccaccagttggagtgacggccttgcactgaatgccttgattcactctcacagacctgatctctttgattggaacagtgtggtgtgccagcagtccgccacacagcgcctggaacacgccttcaacattgctaggtatcagttaggaattgagaagctgctggaccccgaggatgtagacacaacctatccagataaaaaatccatcctgatgtacatcactagcctctttcaggtgcttcctcagcaagtatctatagaggccatccaggaggttgaaatgctgcccaggccccctaaagtcactaaggaggaacattttcagctgcaccatcagatgcactattctcagcaaatcactgtctcactagcccagggttatgaacgtacatcatccccaaagcctcggttcaaatcctacgcttacacacaagcagcctacgtgactacgtctgatcctactaggtcaccattcccttctcaacacctcgaggccccagaagacaagtccttcggttcttctctcatggaaagtgaggttaatcttgaccgataccagaccgctcttgaggaagttctgtcctggctgctatcggccgaggacaccctccaggcacagggcgaaataagcaacgacgtggaggtcgtgaaggatcagttccacacacatgagggatacatgatggacctaaccgcccatcagggacgggtcggaaacatcttgcagctgggctctaaactgatcggtacgggaaaattgagcgaagacgaagagaccgaggtgcaggaacagatgaatttgttaaactctcggtgggaatgtctgcgggtcgcatctatggagaaacaaagtaacctgcaccgtgtattgatggatctccagaatcaaaaactgaaagaattgaatgattggcttacaaaaaccgaggagaggacaaggaagatggaagaggaaccactgggtcctgacttggaggacctgaaacgacaggtccagcagcacaaagtgctccaggaggaccttgaacaggaacaagttagagttaattccttgactcatatggtggtcgtggtggatgagtcgtctggcgatcatgctactgccgcattggaggagcaactgaaagtgctcggggaccggtgggctaatatctgtaggtggacggaagataggtgggtcctactccaggacatcttgctgaaatggcagcggctgaccgaggagcagtgtcttttttccgcatggttgtcggagaaggaagatgcggtgaataaaattcatactacaggatttaaggatcagaacgagatgctatcttccctccaaaagcttgctgtcctgaaggctgatctcgagaaaaaaaagcagagcatgggcaagctttactccctcaagcaggatcttctgtctactctcaagaataaatctgtcactcagaaaacagaagcgtggctggacaattttgcacggtgctgggataatcttgtgcagaagctggaaaaaagcacagcgcagatttcacaggccgttaccacgacccagccaagtcttactcagactacagtgatggagactgtgactacagtcacgacacgtgagcagattctggtcaaacacgcacaggaagaactgccccctcctcccccacagaagaagagacagatcaccgtggactctgaaattcgcaaaagactggatgtcgatatcaccgaattacactcctggataaccaggagtgaggccgtgctgcaaagccctgaattcgcgatttttcgtaaggaggggaacttttccgatctcaaagagaaagtgaacgcaatcgagcgggagaaggcagagaaattcagaaagctgcaagatgctagccgcagcgcacaggccctggtggagcagatggtcaacgaaggtgtgaacgccgattctatcaagcaggctagtgagcagctaaacagccggtggatcgaattctgtcagcttctctctgagagattgaactggctcgaatatcagaacaacatcattgcattctataaccaactgcagcagctcgagcagatgaccaccaccgctgagaactggctaaagatccagccaactactccttctgaaccaacagccatcaagtctcagctgaaaatttgtaaggatgaggtgaacaggctgtcagaccttcagccacagatagaaaggctgaaaattcagagcatagctctaaaagagaagggccagggtccgatgttcctcgacgccgatttcgtggccttcactaaccactttaaacaggtatttagcgatgtgcaggctagagagaaagaactacaaactatatttgacaccttgccgcctatgcgctaccaggaaacgatgagcgccatcaggacttgggtgcagcaaagtgaaaccaagctgtcaatcccacaactttcagtgacagactacgagatcatggaacagcgtctcggcgagcttcaggcccttcaatcttccctccaggaacagcagtccggactgtattatttgtcaaccaccgtgaaagagatgagcaagaaggccccttccgagatttcacggaaataccagagcgaattcgaagagatcgaaggaagatggaagaaactcagcagccagctcgtggaacactgccagaagcttgaggagcagatgaacaagcttcggaagattcagaaccatattcaaactctgaaaaaatggatggcagaagtcgatgtcttcctgaaggaagaatggccggctctgggagacagtgaaatcctgaagaaacagctgaagcagtgccgcctgctcgtgagcgatatacagaccatccagccctccctgaactctgtcaacgaaggcggtcaaaaaatcaaaaacgaggccgagccagagttcgcctccagactggagacagagctgaaggaactaaatacccagtgggatcatatgtgtcaacaggtgtacgctaggaaggaagccctaaagggtggcttagaaaagaccgtgagcctccagaaagacctgtcggaaatgcatgagtggatgacacaggcagaggaagagtatctggagcgcgacttcgaatacaagaccccagacgaactccagaaagccgtagaagagatgaagagggcaaaagaggaagctcagcagaaggaagctaaggtgaagttgctaaccgagagcgtgaattccgtgatcgcgcaggcgccaccagtggcgcaggaggccctcaagaaagagctggaaactctgacaacaaactatcaatggctgtgcactcggttaaacggcaaatgtaaaacattagaagaagtctgggcgtgttggcatgagctgctgtcgtacctggagaaggccaataaatggctgaatgaagtggaattcaaactcaagacaactgaaaacatacctggtggggctgaggaaatctctgaagtcctcgatagcctggaaaatctgatgagacatagcgaggacaatcctaaccagatacggatcctggctcaaacattgaccgatggaggcgtcatggatgaactaattaacgaggagctggaaacattcaactccaggtggagggagctgcacgaagaagctgtccgcaggcagaagctgctggagcaatcgatccaatctgcacaggagactgagaaaagtctgcatctgatccaggagagtcttacgtttatcgacaagcagttagcggcatacatagctgataaggtcgatgctgcacagatgccacaagaggcccagaaaatccagtcagatttgacatcccacgagatatctctggaagagatgaagaagcacaatcagggaaaagaagcagctcaaagagtactgagccagatagacgtagcccaaaagaagcttcaggatgtctccatgaagttccgcctgttccagaagcccgcaaactttgaacagcggctccaggaaagcaaaatgattctggatgaggtgaaaatgcatttgcctgctctagagacaaagtccgtggagcaggaagtggtgcaaagccagcttaatcattgtgtgaacctctacaaatctctcagtgaggtcaaatctgaagtcgaaatggtgatcaaaaccggtcgacagatcgtgcaaaaaaaacaaaccgagaatcctaaggaactggacgagcgggtgactgctctgaaactgcactataacgaattgggggcaaaagtaacagagcgcaaacagcagctggaaaaatgcttaaagctgagtcgtaaaatgcgcaaagagatgaatgtcttaaccgaatggctggccgctactgacatggagctgaccaagcgctctgccgtggagggaatgcccagcaacctggactctgaggtggcatgggggaaggctacgcagaaggagattgagaagcagaaggtgcacctcaaaagcattacagaagttggggaagctttaaaaactgtgttaggtaagaaagaaactctagtagaagacaagttgagtctcctcaactctaactggatagctgtgacaagtcgtgcagaggagtggcttaatttattgctggaataccagaagcacatggaaacttttgatcagaatgtggaccatatcaccaagtggattatccaagccgataccctgctggatgagagtgagaagaaaaagccccagcagaaagaggatgtcttgaaacggctcaaggcagagctcaacgatatccggccaaaggtggacagcaccagggaccaggccgcaaacctgatggccaaccggggtgatcactgccgaaagttggttgaaccacaaatatccgagctgaaccatcgcttcgctgccatcagccatagaatcaaaacagggaaggccagtatccctctcaaggaattagagcagtttaacagcgacatccaaaagcttctggaacctctggaagccgagattcagcagggggtgaatctcaaggaggaagatttcaataaggatatgaatgaagataatgagggcacggtgaaggaacttctgcaacgcggagacaaccttcagcagcggatcaccgacgaacgtaaacgggaggaaatcaagatcaagcagcaactgttacagaccaagcataacgcgctgaaagatctccgaagccaacgaaggaaaaaggccttggagatctcacatcagtggtatcagtacaaacgccaagctgatgatctactgaagtgcctagacgacatcgaaaagaagctggcctctttgccggagcctcgggatgaacggaagataaaggagatcgacagagaactgcagaaaaagaaagaagagctgaatgcggtgaggagacaggccgaaggcctctctgaagatggggctgcgatggccgtggaaccaactcaaatccagctatccaaacgttggcgggagatcgaaagcaagttcgctcagtttcggcgactcaatttcgcccagatccatacagtgcgcgaggagacaatgatggtcatgaccgaggacatgcctctagagatctcatacgtgccatcaacttacctgacagagataacacacgtgagccaggctttgctggaggttgagcagcttttaaacgcacctgatctgtgcgcgaaagactttgaggacctcttcaagcaggaggagtccctcaagaatatcaaagactctttgcaacagtcaagcggcaggatagatatcatccactcgaagaaaacagctgcccttcagagcgcgacaccagtggagcgagttaagctgcaggaggccttatcacaactggattttcaatgggagaaagttaataaaatgtacaaggaccggcagggccgattcgaccggtctgttgagaagtggagacgattccactatgatatcaagattttcaaccagtggctgaccgaggccgagcagtttctccgcaagacccaaatccccgagaattgggagcacgccaagtacaaatggtatctcatcgcactgaaagatggtatcgggcagcgacaaaccgtcgtccggactcttaacgcgaccggagaagagattattcaacagtcctctaaaacagacgccagtatacttcaggagaaattgggaagccttaatttgagatggcaggaagtatgcaagcagctgtccgatcggaagaaacggctggaggaacaaaagaacatcttgagtgagttccagcgcgaccttaatgagttcgtgctgtggctagaggaggcagataacatcgcttccatcccattggagccaggcaaagaacagcagcttaaagagaagctggaacaggttaaactgttggtggaggagctgccacttagacagggtatcttaaagcagctgaatgaaactgggggacctgtgcttgtgtccgcccctatctctccagaagaacaggataagttggaaaacaagctcaagcagactaacctccagtggattaaggtgtctagggccctccctgagaagcagggcgagatcgaggcacagatcaaggaccttggtcagctggaaaaaaagctggaagatctggaagagcagctcaatcacttactgttatggcttagccccattcggaaccagttggagatctataaccagccaaaccaggaagggcctttcgatgttaaggaaaccgagattgctgtgcaggcgaaacagcctgatgtggaggagatactgtctaagggccaacacttgtataaggagaagcctgcaacccagccagtcaagcgcaaactggaagatctgagtagcgagtggaaagcagtcaaccgactgcttcaggaacttcgggcaaaacagccggatctggccccaggcctcacaactattggagcaagcccgacacagaccgtgactttagtaacacaacctgtggtgactaaagaaaccgctatctccaagttggaaatgccttcgtctctgatgctcgaggtgccggctctggctgacttcaaccgcgcatggaccgagttaacggattggttatctctgctggaccaggtgattaaaagccagcgagttatggtaggtgacctggaagatatcaacgagatgattataaaacagaaagctacgatgcaggacctggagcagcggcgaccgcagctggaagagctcattaccgcggcacaaaatttgaaaaataagacttctaaccaagaagcgaggactataatcacagaccggattgagcgcattcaaaatcagtgggatgaagtacaagagcacctccaaaacaggaggcagcagctgaacgagatgctaaaggactccacccagtggctcgaggctaaggaagaggcagaacaggtcctggggcaggccagggcaaagctagagtcttggaaagaaggaccatataccgtggacgccattcaaaagaagatcactgaaaccaagcaattggcaaaggatctccggcagtggcagactaatgttgacgtggctaatgacctcgcactcaaactgttgcgagactactccgccgatgacacaaggaaagtacatatgataaccgagaacatcaatgcgtcatggcggagtattcacaagcgagtgtcagaacgcgaggccgcactggaggagacccaccgactcctgcaacagtttcccctcgacctggaaaaattccttgcctggctgacagaggccgaaactacggcgaatgtcctgcaagatgccaccagaaaggaacggctcctggaggatagcaaaggggttaaagaactgatgaagcaatggcaggacctgcagggagagatcgaagctcacacagacgtttaccataacctggatgagaactcccagaaaatcctacgctctctggagggctccgacgacgccgtgttgttgcagcggagactggacaacatgaactttaagtggagcgaacttagaaagaagagccttaatatacgaagccacttagaggcaagctccgatcagtggaaacgccttcacctctctctccaggagctgctggtgtggctccagctgaaggacgatgagctatcacgccaggccccaatcgggggagatttcccagcagtgcagaaacagaacgacgtgcaccgggcatttaaacgagaactgaaaacaaaagagcccgtcatcatgtctactctggaaacggtccggatcttcttgacagaacagccgcttgaaggtcttgaaaagctctatcaggagcctagagagttacccccagaggaacgcgcacagaacgtcacgaggctccttcgtaagcaggctgaggaagtgaacactgagtgggaaaaactaaacctacacagcgccgactggcagcgaaagatcgatgaaacattggagagactacgggaactccaggaagccacggacgagctggacctaaagttacgacaggcggaagtcatcaaaggcagttggcagccagtgggtgacctcctgatcgattctttgcaagaccatctggaaaaggtgaaagctctgagaggtgaaattgccccactgaaggaaaacgtgagccacgtgaatgacttagccaggcagctcacgaccctgggaatacagctgagtccgtataatctgagtacactggaggatctgaacacaaggtggaaactcttacaagtcgccgttgaggatagagtgagacagttgcatgaagcgcaccgagatttcggccctgcaagccagcactttctgtcgactagcgttcaaggcccttgggagagggccatctctcccaataaggtaccgtactacattaaccacgagacccagactacgtgttgggaccatccaaagatgaccgagctctaccagtctctcgctgatttaaataacgtgaggttctccgcatacaggacagccatgaagctgcggcgtctgcagaaagccctttgccttgaccttctgtctttatctgctgcatgcgatgccctcgaccagcacaatttgaagcaaaacgaccagcccatggatattttacaaatcataaactgcctgactaccatctatgatagactggagcaggagcacaacaacctcgttaatgtgcccctatgtgtcgatatgtgcctgaattggctgctgaatgtctatgacacaggaagaacggggcgtattcgggtgttgtccttcaaaaccggaattatatctctctgcaaggcgcacctggaggataagtatcgctacttattcaagcaggtagctagtagtaccggattttgtgaccagagacgtctaggcttgctcctccacgacagcatacaaatccccaggcaactgggggaggtcgcttccttcggcggaagcaatatagagccctcggtaaggtcctgtttccagtttgcgaataacaaaccagagattgaagctgcgctgttcctagattggatgcggctcgaacctcagagtatggtctggttgcctgttcttcacagagtggccgcagctgaaaccgcaaaacaccaggccaagtgtaacatttgcaaggaatgtcccatcatcggcttccggtatagaagcctgaagcattttaattacgacatttgccagtcctgctttttttccggccgtgtggccaagggccacaaaatgcattacccaatggtggagtactgtactccaaccacctctggagaagatgttcgagacttcgccaaagtgcttaagaataaatttaggacgaagcggtactttgccaagcatccccgtatgggctacctgcctgtacagaccgtgctagagggcgataacatggaaactcctgtgactctcataaatttctggccggtcgatagcgcccctgcctccagccctcaattgagccacgatgacacgcacagtaggatcgaacattacgcttctcgcctagccgagatggaaaactctaacgggtcctatctgaacgactccatatcacctaatgagtccattgatgacgaacacctcctgatacagcattactgtcagtctttgaatcaggattcacctctatcacagccgagatctcctgcccaaattcttatttccctggaatctgaagaaagaggagaattggagagaatcctggccgaccttgaagaggagaatcggaatctccaagccgaatatgatcggctgaagcagcagcacgagcacaaggggctgagtcccctgccctcaccacctgaaatgatgcccacctcgccacagtctccccgagatgctgaactgatagccgaagctaagctgctccggcagcacaagggccgtctggaggcacggatgcagatattggaagatcacaataaacaattggagtcacagctccaccgtttaaggcagctgttggagcagcctcaagccgaggccaaagtcaacggtactacggtgagttctccctctacctcactccagcgatcagactcttcccagccaatgttgctgagagtcgtggggagtcagactagtgatagcatgggtgaggaggacttattgagcccgccacaggacacgtccaccggcctcgaagaagtgatggagcagctgaataactctttcccttcgtctcgcggtaggaatactcccggaaagccaatgagggaggacactatgtaa

SEQ ID NO: 142730 - DNA, 11055 bp, Artificial Sequence
  derived and/or modified sequence
atgctgtggtgggaggaggtggaggactgctacgagcgcgaggacgtgcagaagaagaccttcaccaagtgggtgaacgcccagttcagcaagttcggcaagcagcacatcgagaacctgttcagcgacctgcaggacggccgccgcctgctggacctgctggagggcctgaccggccagaagctgcccaaggagaagggcagcacccgcgtgcacgccctgaacaacgtgaacaaggccctgcgcgtgctgcagaacaacaacgtggacctggtgaacatcggcagcaccgacatcgtggacggcaaccacaagctgaccctgggcctgatctggaacatcatcctgcactggcaggtgaagaacgtgatgaagaacatcatggccggcctgcagcagaccaacagcgagaagatcctgctgagctgggtgcgccagagcacccgcaactacccccaggtgaacgtgatcaacttcaccaccagctggagcgacggcctggccctgaacgccctgatccacagccaccgccccgacctgttcgactggaacagcgtggtgtgccagcagagcgccacccagcgcctggagcacgccttcaacatcgcccgctaccagctgggcatcgagaagctgctggaccccgaggacgtggacaccacctaccccgacaagaagagcatcctgatgtacatcaccagcctgttccaggtgctgccccagcaggtgagcatcgaggccatccaggaggtggagatgctgccccgcccccccaaggtgaccaaggaggagcacttccagctgcaccaccagatgcactacagccagcagatcaccgtgagcctggcccagggctacgagcgcaccagcagccccaagccccgcttcaagagctacgcctacacccaggccgcctacgtgaccaccagcgaccccacccgcagccccttccccagccagcacctggaggcccccgaggacaagagcttcggcagcagcctgatggagagcgaggtgaacctggaccgctaccagaccgccctggaggaggtgctgagctggctgctgagcgccgaggacaccctgcaggcccagggcgagatcagcaacgacgtggaggtggtgaaggaccagttccacacccacgagggctacatgatggacctgaccgcccaccagggccgcgtgggcaacatcctgcagctgggcagcaagctgatcggcaccggcaagctgagcgaggacgaggagaccgaggtgcaggagcagatgaacctgctgaacagccgctgggagtgcctgcgcgtggccagcatggagaagcagagcaacctgcaccgcgtgctgatggacctgcagaaccagaagctgaaggagctgaacgactggctgaccaagaccgaggagcgcacccgcaagatggaggaggagcccctgggccccgacctggaggacctgaagcgccaggtgcagcagcacaaggtgctgcaggaggacctggagcaggagcaggtgcgcgtgaacagcctgacccacatggtggtggtggtggacgagagcagcggcgaccacgccaccgccgccctggaggagcagctgaaggtgctgggcgaccgctgggccaacatctgccgctggaccgaggaccgctgggtgctgctgcaggacatcctgctgaagtggcagcgcctgaccgaggagcagtgcctgttcagcgcctggctgagcgagaaggaggacgccgtgaacaagatccacaccaccggcttcaaggaccagaacgagatgctgagcagcctgcagaagctggccgtgctgaaggccgacctggagaagaagaagcagagcatgggcaagctgtacagcctgaagcaggacctgctgagcaccctgaagaacaagagcgtgacccagaagaccgaggcctggctggacaacttcgcccgctgctgggacaacctggtgcagaagctggagaagagcaccgcccagatcagccaggccgtgaccaccacccagcccagcctgacccagaccaccgtgatggagaccgtgaccaccgtgaccacccgcgagcagatcctggtgaagcacgcccaggaggagctgccccccccccccccccagaagaagcgccagatcaccgtggacagcgagatccgcaagcgcctggacgtggacatcaccgagctgcacagctggatcacccgcagcgaggccgtgctgcagagccccgagttcgccatcttccgcaaggagggcaacttcagcgacctgaaggagaaggtgaacgccatcgagcgcgagaaggccgagaagttccgcaagctgcaggacgccagccgcagcgcccaggccctggtggagcagatggtgaacgagggcgtgaacgccgacagcatcaagcaggccagcgagcagctgaacagccgctggatcgagttctgccagctgctgagcgagcgcctgaactggctggagtaccagaacaacatcatcgccttctacaaccagctgcagcagctggagcagatgaccaccaccgccgagaactggctgaagatccagcccaccacccccagcgagcccaccgccatcaagagccagctgaagatctgcaaggacgaggtgaaccgcctgagcgacctgcagccccagatcgagcgcctgaagatccagagcatcgccctgaaggagaagggccagggccccatgttcctggacgccgacttcgtggccttcaccaaccacttcaagcaggtgttcagcgacgtgcaggcccgcgagaaggagctgcagaccatcttcgacaccctgccccccatgcgctaccaggagaccatgagcgccatccgcacctgggtgcagcagagcgagaccaagctgagcatcccccagctgagcgtgaccgactacgagatcatggagcagcgcctgggcgagctgcaggccctgcagagcagcctgcaggagcagcagagcggcctgtactacctgagcaccaccgtgaaggagatgagcaagaaggcccccagcgagatcagccgcaagtaccagagcgagttcgaggagatcgagggccgctggaagaagctgagcagccagctggtggagcactgccagaagctggaggagcagatgaacaagctgcgcaagatccagaaccacatccagaccctgaagaagtggatggccgaggtggacgtgttcctgaaggaggagtggcccgccctgggcgacagcgagatcctgaagaagcagctgaagcagtgccgcctgctggtgagcgacatccagaccatccagcccagcctgaacagcgtgaacgagggcggccagaagatcaagaacgaggccgagcccgagttcgccagccgcctggagaccgagctgaaggagctgaacacccagtgggaccacatgtgccagcaggtgtacgcccgcaaggaggccctgaagggcggcctggagaagaccgtgagcctgcagaaggacctgagcgagatgcacgagtggatgacccaggccgaggaggagtacctggagcgcgacttcgagtacaagacccccgacgagctgcagaaggccgtggaggagatgaagcgcgccaaggaggaggcccagcagaaggaggccaaggtgaagctgctgaccgagagcgtgaacagcgtgatcgcccaggccccccccgtggcccaggaggccctgaagaaggagctggagaccctgaccaccaactaccagtggctgtgcacccgcctgaacggcaagtgcaagaccctggaggaggtgtgggcctgctggcacgagctgctgagctacctggagaaggccaacaagtggctgaacgaggtggagttcaagctgaagaccaccgagaacatccccggcggcgccgaggagatcagcgaggtgctggacagcctggagaacctgatgcgccacagcgaggacaaccccaaccagatccgcatcctggcccagaccctgaccgacggcggcgtgatggacgagctgatcaacgaggagctggagaccttcaacagccgctggcgcgagctgcacgaggaggccgtgcgccgccagaagctgctggagcagagcatccagagcgcccaggagaccgagaagagcctgcacctgatccaggagagcctgaccttcatcgacaagcagctggccgcctacatcgccgacaaggtggacgccgcccagatgccccaggaggcccagaagatccagagcgacctgaccagccacgagatcagcctggaggagatgaagaagcacaaccagggcaaggaggccgcccagcgcgtgctgagccagatcgacgtggcccagaagaagctgcaggacgtgagcatgaagttccgcctgttccagaagcccgccaacttcgagcagcgcctgcaggagagcaagatgatcctggacgaggtgaagatgcacctgcccgccctggagaccaagagcgtggagcaggaggtggtgcagagccagctgaaccactgcgtgaacctgtacaagagcctgagcgaggtgaagagcgaggtggagatggtgatcaagaccggccgccagatcgtgcagaagaagcagaccgagaaccccaaggagctggacgagcgcgtgaccgccctgaagctgcactacaacgagctgggcgccaaggtgaccgagcgcaagcagcagctggagaagtgcctgaagctgagccgcaagatgcgcaaggagatgaacgtgctgaccgagtggctggccgccaccgacatggagctgaccaagcgcagcgccgtggagggcatgcccagcaacctggacagcgaggtggcctggggcaaggccacccagaaggagatcgagaagcagaaggtgcacctgaagagcatcaccgaggtgggcgaggccctgaagaccgtgctgggcaagaaggagaccctggtggaggacaagctgagcctgctgaacagcaactggatcgccgtgaccagccgcgccgaggagtggctgaacctgctgctggagtaccagaagcacatggagaccttcgaccagaacgtggaccacatcaccaagtggatcatccaggccgacaccctgctggacgagagcgagaagaagaagccccagcagaaggaggacgtgctgaagcgcctgaaggccgagctgaacgacatccgccccaaggtggacagcacccgcgaccaggccgccaacctgatggccaaccgcggcgaccactgccgcaagctggtggagccccagatcagcgagctgaaccaccgcttcgccgccatcagccaccgcatcaagaccggcaaggccagcatccccctgaaggagctggagcagttcaacagcgacatccagaagctgctggagcccctggaggccgagatccagcagggcgtgaacctgaaggaggaggacttcaacaaggacatgaacgaggacaacgagggcaccgtgaaggagctgctgcagcgcggcgacaacctgcagcagcgcatcaccgacgagcgcaagcgcgaggagatcaagatcaagcagcagctgctgcagaccaagcacaacgccctgaaggacctgcgcagccagcgccgcaagaaggccctggagatcagccaccagtggtaccagtacaagcgccaggccgacgacctgctgaagtgcctggacgacatcgagaagaagctggccagcctgcccgagccccgcgacgagcgcaagatcaaggagatcgaccgcgagctgcagaagaagaaggaggagctgaacgccgtgcgccgccaggccgagggcctgagcgaggacggcgccgccatggccgtggagcccacccagatccagctgagcaagcgctggcgcgagatcgagagcaagttcgcccagttccgccgcctgaacttcgcccagatccacaccgtgcgcgaggagaccatgatggtgatgaccgaggacatgcccctggagatcagctacgtgcccagcacctacctgaccgagatcacccacgtgagccaggccctgctggaggtggagcagctgctgaacgcccccgacctgtgcgccaaggacttcgaggacctgttcaagcaggaggagagcctgaagaacatcaaggacagcctgcagcagagcagcggccgcatcgacatcatccacagcaagaagaccgccgccctgcagagcgccacccccgtggagcgcgtgaagctgcaggaggccctgagccagctggacttccagtgggagaaggtgaacaagatgtacaaggaccgccagggccgcttcgaccgcagcgtggagaagtggcgccgcttccactacgacatcaagatcttcaaccagtggctgaccgaggccgagcagttcctgcgcaagacccagatccccgagaactgggagcacgccaagtacaagtggtacctgaaggagctgcaggacggcatcggccagcgccagaccgtggtgcgcaccctgaacgccaccggcgaggagatcatccagcagagcagcaagaccgacgccagcatcctgcaggagaagctgggcagcctgaacctgcgctggcaggaggtgtgcaagcagctgagcgaccgcaagaagcgcctggaggagcagaagaacatcctgagcgagttccagcgcgacctgaacgagttcgtgctgtggctggaggaggccgacaacatcgccagcatccccctggagcccggcaaggagcagcagctgaaggagaagctggagcaggtgaagctgctggtggaggagctgcccctgcgccagggcatcctgaagcagctgaacgagaccggcggccccgtgctggtgagcgcccccatcagccccgaggagcaggacaagctggagaacaagctgaagcagaccaacctgcagtggatcaaggtgagccgcgccctgcccgagaagcagggcgagatcgaggcccagatcaaggacctgggccagctggagaagaagctggaggacctggaggagcagctgaaccacctgctgctgtggctgagccccatccgcaaccagctggagatctacaaccagcccaaccaggagggccccttcgacgtgaaggagaccgagatcgccgtgcaggccaagcagcccgacgtggaggagatcctgagcaagggccagcacctgtacaaggagaagcccgccacccagcccgtgaagcgcaagctggaggacctgagcagcgagtggaaggccgtgaaccgcctgctgcaggagctgcgcgccaagcagcccgacctggcccccggcctgaccaccatcggcgccagccccacccagaccgtgaccctggtgacccagcccgtggtgaccaaggagaccgccatcagcaagctggagatgcccagcagcctgatgctggaggtgcccgccctggccgacttcaaccgcgcctggaccgagctgaccgactggctgagcctgctggaccaggtgatcaagagccagcgcgtgatggtgggcgacctggaggacatcaacgagatgatcatcaagcagaaggccaccatgcaggacctggagcagcgccgcccccagctggaggagctgatcaccgccgcccagaacctgaagaacaagaccagcaaccaggaggcccgcaccatcatcaccgaccgcatcgagcgcatccagaaccagtgggacgaggtgcaggagcacctgcagaaccgccgccagcagctgaacgagatgctgaaggacagcacccagtggctggaggccaaggaggaggccgagcaggtgctgggccaggcccgcgccaagctggagagctggaaggagggcccctacaccgtggacgccatccagaagaagatcaccgagaccaagcagctggccaaggacctgcgccagtggcagaccaacgtggacgtggccaacgacctggccctgaagctgctgcgcgactacagcgccgacgacacccgcaaggtgcacatgatcaccgagaacatcaacgccagctggcgcagcatccacaagcgcgtgagcgagcgcgaggccgccctggaggagacccaccgcctgctgcagcagttccccctggacctggagaagttcctggcctggctgaccgaggccgagaccaccgccaacgtgctgcaggacgccacccgcaaggagcgcctgctggaggacagcaagggcgtgaaggagctgatgaagcagtggcaggacctgcagggcgagatcgaggcccacaccgacgtgtaccacaacctggacgagaacagccagaagatcctgcgcagcctggagggcagcgacgacgccgtgctgctgcagcgccgcctggacaacatgaacttcaagtggagcgagctgcgcaagaagagcctgaacatccgcagccacctggaggccagcagcgaccagtggaagcgcctgcacctgagcctgcaggagctgctggtgtggctgcagctgaaggacgacgagctgagccgccaggcccccatcggcggcgacttccccgccgtgcagaagcagaacgacgtgcaccgcgccttcaagcgcgagctgaagaccaaggagcccgtgatcatgagcaccctggagaccgtgcgcatcttcctgaccgagcagcccctggagggcctggagaagctgtaccaggagccccgcgagctgccccccgaggagcgcgcccagaacgtgacccgcctgctgcgcaagcaggccgaggaggtgaacaccgagtgggagaagctgaacctgcacagcgccgactggcagcgcaagatcgacgagaccctggagcgcctgcgcgagctgcaggaggccaccgacgagctggacctgaagctgcgccaggccgaggtgatcaagggcagctggcagcccgtgggcgacctgctgatcgacagcctgcaggaccacctggagaaggtgaaggccctgcgcggcgagatcgcccccctgaaggagaacgtgagccacgtgaacgacctggcccgccagctgaccaccctgggcatccagctgagcccctacaacctgagcaccctggaggacctgaacacccgctggaagctgctgcaggtggccgtggaggaccgcgtgcgccagctgcacgaggcccaccgcgacttcggccccgccagccagcacttcctgagcaccagcgtgcagggcccctgggagcgcgccatcagccccaacaaggtgccctactacatcaaccacgagacccagaccacctgctgggaccaccccaagatgaccgagctgtaccagagcctggccgacctgaacaacgtgcgcttcagcgcctaccgcaccgccatgaagctgcgccgcctgcagaaggccctgtgcctggacctgctgagcctgagcgccgcctgcgacgccctggaccagcacaacctgaagcagaacgaccagcccatggacatcctgcagatcatcaactgcctgaccaccatctacgaccgcctggagcaggagcacaacaacctggtgaacgtgcccctgtgcgtggacatgtgcctgaactggctgctgaacgtgtacgacaccggccgcaccggccgcatccgcgtgctgagcttcaagaccggcatcatcagcctgtgcaaggcccacctggaggacaagtaccgctacctgttcaagcaggtggccagcagcaccggcttctgcgaccagcgccgcctgggcctgctgctgcacgacagcatccagatcccccgccagctgggcgaggtggccagcttcggcggcagcaacatcgagcccagcgtgcgcagctgcttccagttcgccaacaacaagcccgagatcgaggccgccctgttcctggactggatgcgcctggagccccagagcatggtgtggctgcccgtgctgcaccgcgtggccgccgccgagaccgccaagcaccaggccaagtgcaacatctgcaaggagtgccccatcatcggcttccgctaccgcagcctgaagcacttcaactacgacatctgccagagctgcttcttcagcggccgcgtggccaagggccacaagatgcactaccccatggtggagtactgcacccccaccaccagcggcgaggacgtgcgcgacttcgccaaggtgctgaagaacaagttccgcaccaagcgctacttcgccaagcacccccgcatgggctacctgcccgtgcagaccgtgctggagggcgacaacatggagacccccgtgaccctgatcaacttctggcccgtggacagcgcccccgccagcagcccccagctgagccacgacgacacccacagccgcatcgagcactacgccagccgcctggccgagatggagaacagcaacggcagctacctgaacgacagcatcagccccaacgagagcatcgacgacgagcacctgctgatccagcactactgccagagcctgaaccaggacagccccctgagccagccccgcagccccgcccagatcctgatcagcctggagagcgaggagcgcggcgagctggagcgcatcctggccgacctggaggaggagaaccgcaacctgcaggccgagtacgaccgcctgaagcagcagcacgagcacaagggcctgagccccctgcccagcccccccgagatgatgcccaccagcccccagagcccccgcgacgccgagctgatcgccgaggccaagctgctgcgccagcacaagggccgcctggaggcccgcatgcagatcctggaggaccacaacaagcagctggagagccagctgcaccgcctgcgccagctgctggagcagccccaggccgaggccaaggtgaacggcaccaccgtgagcagccccagcaccagcctgcagcgcagcgacagcagccagcccatgctgctgcgcgtggtgggcagccagaccagcgacagcatgggcgaggaggacctgctgagccccccccaggacaccagcaccggcctggaggaggtgatggagcagctgaacaacagcttccccagcagccgcggccgcaacacccccggcaagcccatgcgcgaggacaccatg

SEQ ID NO: 142731 - DNA, 3675 bp, Artificial Sequence
  derived and/or modified sequence
atgcccagcagcctgatgctggaggtgcccgccctggccgacttcaaccgcgcctggaccgagctgaccgactggctgagcctgctggaccaggtgatcaagagccagcgcgtgatggtgggcgacctggaggacatcaacgagatgatcatcaagcagaaggccaccatgcaggacctggagcagcgccgcccccagctggaggagctgatcaccgccgcccagaacctgaagaacaagaccagcaaccaggaggcccgcaccatcatcaccgaccgcatcgagcgcatccagaaccagtgggacgaggtgcaggagcacctgcagaaccgccgccagcagctgaacgagatgctgaaggacagcacccagtggctggaggccaaggaggaggccgagcaggtgctgggccaggcccgcgccaagctggagagctggaaggagggcccctacaccgtggacgccatccagaagaagatcaccgagaccaagcagctggccaaggacctgcgccagtggcagaccaacgtggacgtggccaacgacctggccctgaagctgctgcgcgactacagcgccgacgacacccgcaaggtgcacatgatcaccgagaacatcaacgccagctggcgcagcatccacaagcgcgtgagcgagcgcgaggccgccctggaggagacccaccgcctgctgcagcagttccccctggacctggagaagttcctggcctggctgaccgaggccgagaccaccgccaacgtgctgcaggacgccacccgcaaggagcgcctgctggaggacagcaagggcgtgaaggagctgatgaagcagtggcaggacctgcagggcgagatcgaggcccacaccgacgtgtaccacaacctggacgagaacagccagaagatcctgcgcagcctggagggcagcgacgacgccgtgctgctgcagcgccgcctggacaacatgaacttcaagtggagcgagctgcgcaagaagagcctgaacatccgcagccacctggaggccagcagcgaccagtggaagcgcctgcacctgagcctgcaggagctgctggtgtggctgcagctgaaggacgacgagctgagccgccaggcccccatcggcggcgacttccccgccgtgcagaagcagaacgacgtgcaccgcgccttcaagcgcgagctgaagaccaaggagcccgtgatcatgagcaccctggagaccgtgcgcatcttcctgaccgagcagcccctggagggcctggagaagctgtaccaggagccccgcgagctgccccccgaggagcgcgcccagaacgtgacccgcctgctgcgcaagcaggccgaggaggtgaacaccgagtgggagaagctgaacctgcacagcgccgactggcagcgcaagatcgacgagaccctggagcgcctgcgcgagctgcaggaggccaccgacgagctggacctgaagctgcgccaggccgaggtgatcaagggcagctggcagcccgtgggcgacctgctgatcgacagcctgcaggaccacctggagaaggtgaaggccctgcgcggcgagatcgcccccctgaaggagaacgtgagccacgtgaacgacctggcccgccagctgaccaccctgggcatccagctgagcccctacaacctgagcaccctggaggacctgaacacccgctggaagctgctgcaggtggccgtggaggaccgcgtgcgccagctgcacgaggcccaccgcgacttcggccccgccagccagcacttcctgagcaccagcgtgcagggcccctgggagcgcgccatcagccccaacaaggtgccctactacatcaaccacgagacccagaccacctgctgggaccaccccaagatgaccgagctgtaccagagcctggccgacctgaacaacgtgcgcttcagcgcctaccgcaccgccatgaagctgcgccgcctgcagaaggccctgtgcctggacctgctgagcctgagcgccgcctgcgacgccctggaccagcacaacctgaagcagaacgaccagcccatggacatcctgcagatcatcaactgcctgaccaccatctacgaccgcctggagcaggagcacaacaacctggtgaacgtgcccctgtgcgtggacatgtgcctgaactggctgctgaacgtgtacgacaccggccgcaccggccgcatccgcgtgctgagcttcaagaccggcatcatcagcctgtgcaaggcccacctggaggacaagtaccgctacctgttcaagcaggtggccagcagcaccggcttctgcgaccagcgccgcctgggcctgctgctgcacgacagcatccagatcccccgccagctgggcgaggtggccagcttcggcggcagcaacatcgagcccagcgtgcgcagctgcttccagttcgccaacaacaagcccgagatcgaggccgccctgttcctggactggatgcgcctggagccccagagcatggtgtggctgcccgtgctgcaccgcgtggccgccgccgagaccgccaagcaccaggccaagtgcaacatctgcaaggagtgccccatcatcggcttccgctaccgcagcctgaagcacttcaactacgacatctgccagagctgcttcttcagcggccgcgtggccaagggccacaagatgcactaccccatggtggagtactgcacccccaccaccagcggcgaggacgtgcgcgacttcgccaaggtgctgaagaacaagttccgcaccaagcgctacttcgccaagcacccccgcatgggctacctgcccgtgcagaccgtgctggagggcgacaacatggagacccccgtgaccctgatcaacttctggcccgtggacagcgcccccgccagcagcccccagctgagccacgacgacacccacagccgcatcgagcactacgccagccgcctggccgagatggagaacagcaacggcagctacctgaacgacagcatcagccccaacgagagcatcgacgacgagcacctgctgatccagcactactgccagagcctgaaccaggacagccccctgagccagccccgcagccccgcccagatcctgatcagcctggagagcgaggagcgcggcgagctggagcgcatcctggccgacctggaggaggagaaccgcaacctgcaggccgagtacgaccgcctgaagcagcagcacgagcacaagggcctgagccccctgcccagcccccccgagatgatgcccaccagcccccagagcccccgcgacgccgagctgatcgccgaggccaagctgctgcgccagcacaagggccgcctggaggcccgcatgcagatcctggaggaccacaacaagcagctggagagccagctgcaccgcctgcgccagctgctggagcagccccaggccgaggccaaggtgaacggcaccaccgtgagcagccccagcaccagcctgcagcgcagcgacagcagccagcccatgctgctgcgcgtggtgggcagccagaccagcgacagcatgggcgaggaggacctgctgagccccccccaggacaccagcaccggcctggaggaggtgatggagcagctgaacaacagcttccccagcagccgcggccgcaacacccccggcaagcccatgcgcgaggacaccatg

SEQ ID NO: 142732 - DNA, 11058 bp, Artificial Sequence
  derived and/or modified sequence
atgctgtggtgggaggaggtggaggactgctacgagagagaggacgtgcagaagaagaccttcaccaagtgggtgaacgcccagttcagcaagttcggcaagcagcacatcgagaacctgttcagcgacctgcaggacggcagaagactgctggacctgctggagggcctgaccggccagaagctgcccaaggagaagggcagcaccagagtgcacgccctgaacaacgtgaacaaggccctgagagtgctgcagaacaacaacgtggacctggtgaacatcggcagcaccgacatcgtggacggcaaccacaagctgaccctgggcctgatctggaacatcatcctgcactggcaggtgaagaacgtgatgaagaacatcatggccggcctgcagcagaccaacagcgagaagatcctgctgagctgggtgagacagagcaccagaaactacccccaggtgaacgtgatcaacttcaccaccagctggagcgacggcctggccctgaacgccctgatccacagccacagacccgacctgttcgactggaacagcgtggtgtgccagcagagcgccacccagagactggagcacgccttcaacatcgccagataccagctgggcatcgagaagctgctggaccccgaggacgtggacaccacctaccccgacaagaagagcatcctgatgtacatcaccagcctgttccaggtgctgccccagcaggtgagcatcgaggccatccaggaggtggagatgctgcccagaccccccaaggtgaccaaggaggagcacttccagctgcaccaccagatgcactacagccagcagatcaccgtgagcctggcccagggctacgagagaaccagcagccccaagcccagattcaagagctacgcctacacccaggccgcctacgtgaccaccagcgaccccaccagaagccccttccccagccagcacctggaggcccccgaggacaagagcttcggcagcagcctgatggagagcgaggtgaacctggacagataccagaccgccctggaggaggtgctgagctggctgctgagcgccgaggacaccctgcaggcccagggcgagatcagcaacgacgtggaggtggtgaaggaccagttccacacccacgagggctacatgatggacctgaccgcccaccagggcagagtgggcaacatcctgcagctgggcagcaagctgatcggcaccggcaagctgagcgaggacgaggagaccgaggtgcaggagcagatgaacctgctgaacagcagatgggagtgcctgagagtggccagcatggagaagcagagcaacctgcacagagtgctgatggacctgcagaaccagaagctgaaggagctgaacgactggctgaccaagaccgaggagagaaccagaaagatggaggaggagcccctgggccccgacctggaggacctgaagagacaggtgcagcagcacaaggtgctgcaggaggacctggagcaggagcaggtgagagtgaacagcctgacccacatggtggtggtggtggacgagagcagcggcgaccacgccaccgccgccctggaggagcagctgaaggtgctgggcgacagatgggccaacatctgcagatggaccgaggacagatgggtgctgctgcaggacatcctgctgaagtggcagagactgaccgaggagcagtgcctgttcagcgcctggctgagcgagaaggaggacgccgtgaacaagatccacaccaccggcttcaaggaccagaacgagatgctgagcagcctgcagaagctggccgtgctgaaggccgacctggagaagaagaagcagagcatgggcaagctgtacagcctgaagcaggacctgctgagcaccctgaagaacaagagcgtgacccagaagaccgaggcctggctggacaacttcgccagatgctgggacaacctggtgcagaagctggagaagagcaccgcccagatcagccaggccgtgaccaccacccagcccagcctgacccagaccaccgtgatggagaccgtgaccaccgtgaccaccagagagcagatcctggtgaagcacgcccaggaggagctgccccccccccccccccagaagaagagacagatcaccgtggacagcgagatcagaaagagactggacgtggacatcaccgagctgcacagctggatcaccagaagcgaggccgtgctgcagagccccgagttcgccatcttcagaaaggagggcaacttcagcgacctgaaggagaaggtgaacgccatcgagagagagaaggccgagaagttcagaaagctgcaggacgccagcagaagcgcccaggccctggtggagcagatggtgaacgagggcgtgaacgccgacagcatcaagcaggccagcgagcagctgaacagcagatggatcgagttctgccagctgctgagcgagagactgaactggctggagtaccagaacaacatcatcgccttctacaaccagctgcagcagctggagcagatgaccaccaccgccgagaactggctgaagatccagcccaccacccccagcgagcccaccgccatcaagagccagctgaagatctgcaaggacgaggtgaacagactgagcgacctgcagccccagatcgagagactgaagatccagagcatcgccctgaaggagaagggccagggccccatgttcctggacgccgacttcgtggccttcaccaaccacttcaagcaggtgttcagcgacgtgcaggccagagagaaggagctgcagaccatcttcgacaccctgccccccatgagataccaggagaccatgagcgccatcagaacctgggtgcagcagagcgagaccaagctgagcatcccccagctgagcgtgaccgactacgagatcatggagcagagactgggcgagctgcaggccctgcagagcagcctgcaggagcagcagagcggcctgtactacctgagcaccaccgtgaaggagatgagcaagaaggcccccagcgagatcagcagaaagtaccagagcgagttcgaggagatcgagggcagatggaagaagctgagcagccagctggtggagcactgccagaagctggaggagcagatgaacaagctgagaaagatccagaaccacatccagaccctgaagaagtggatggccgaggtggacgtgttcctgaaggaggagtggcccgccctgggcgacagcgagatcctgaagaagcagctgaagcagtgcagactgctggtgagcgacatccagaccatccagcccagcctgaacagcgtgaacgagggcggccagaagatcaagaacgaggccgagcccgagttcgccagcagactggagaccgagctgaaggagctgaacacccagtgggaccacatgtgccagcaggtgtacgccagaaaggaggccctgaagggcggcctggagaagaccgtgagcctgcagaaggacctgagcgagatgcacgagtggatgacccaggccgaggaggagtacctggagagagacttcgagtacaagacccccgacgagctgcagaaggccgtggaggagatgaagagagccaaggaggaggcccagcagaaggaggccaaggtgaagctgctgaccgagagcgtgaacagcgtgatcgcccaggccccccccgtggcccaggaggccctgaagaaggagctggagaccctgaccaccaactaccagtggctgtgcaccagactgaacggcaagtgcaagaccctggaggaggtgtgggcctgctggcacgagctgctgagctacctggagaaggccaacaagtggctgaacgaggtggagttcaagctgaagaccaccgagaacatccccggcggcgccgaggagatcagcgaggtgctggacagcctggagaacctgatgagacacagcgaggacaaccccaaccagatcagaatcctggcccagaccctgaccgacggcggcgtgatggacgagctgatcaacgaggagctggagaccttcaacagcagatggagagagctgcacgaggaggccgtgagaagacagaagctgctggagcagagcatccagagcgcccaggagaccgagaagagcctgcacctgatccaggagagcctgaccttcatcgacaagcagctggccgcctacatcgccgacaaggtggacgccgcccagatgccccaggaggcccagaagatccagagcgacctgaccagccacgagatcagcctggaggagatgaagaagcacaaccagggcaaggaggccgcccagagagtgctgagccagatcgacgtggcccagaagaagctgcaggacgtgagcatgaagttcagactgttccagaagcccgccaacttcgagcagagactgcaggagagcaagatgatcctggacgaggtgaagatgcacctgcccgccctggagaccaagagcgtggagcaggaggtggtgcagagccagctgaaccactgcgtgaacctgtacaagagcctgagcgaggtgaagagcgaggtggagatggtgatcaagaccggcagacagatcgtgcagaagaagcagaccgagaaccccaaggagctggacgagagagtgaccgccctgaagctgcactacaacgagctgggcgccaaggtgaccgagagaaagcagcagctggagaagtgcctgaagctgagcagaaagatgagaaaggagatgaacgtgctgaccgagtggctggccgccaccgacatggagctgaccaagagaagcgccgtggagggcatgcccagcaacctggacagcgaggtggcctggggcaaggccacccagaaggagatcgagaagcagaaggtgcacctgaagagcatcaccgaggtgggcgaggccctgaagaccgtgctgggcaagaaggagaccctggtggaggacaagctgagcctgctgaacagcaactggatcgccgtgaccagcagagccgaggagtggctgaacctgctgctggagtaccagaagcacatggagaccttcgaccagaacgtggaccacatcaccaagtggatcatccaggccgacaccctgctggacgagagcgagaagaagaagccccagcagaaggaggacgtgctgaagagactgaaggccgagctgaacgacatcagacccaaggtggacagcaccagagaccaggccgccaacctgatggccaacagaggcgaccactgcagaaagctggtggagccccagatcagcgagctgaaccacagattcgccgccatcagccacagaatcaagaccggcaaggccagcatccccctgaaggagctggagcagttcaacagcgacatccagaagctgctggagcccctggaggccgagatccagcagggcgtgaacctgaaggaggaggacttcaacaaggacatgaacgaggacaacgagggcaccgtgaaggagctgctgcagagaggcgacaacctgcagcagagaatcaccgacgagagaaagagagaggagatcaagatcaagcagcagctgctgcagaccaagcacaacgccctgaaggacctgagaagccagagaagaaagaaggccctggagatcagccaccagtggtaccagtacaagagacaggccgacgacctgctgaagtgcctggacgacatcgagaagaagctggccagcctgcccgagcccagagacgagagaaagatcaaggagatcgacagagagctgcagaagaagaaggaggagctgaacgccgtgagaagacaggccgagggcctgagcgaggacggcgccgccatggccgtggagcccacccagatccagctgagcaagagatggagagagatcgagagcaagttcgcccagttcagaagactgaacttcgcccagatccacaccgtgagagaggagaccatgatggtgatgaccgaggacatgcccctggagatcagctacgtgcccagcacctacctgaccgagatcacccacgtgagccaggccctgctggaggtggagcagctgctgaacgcccccgacctgtgcgccaaggacttcgaggacctgttcaagcaggaggagagcctgaagaacatcaaggacagcctgcagcagagcagcggcagaatcgacatcatccacagcaagaagaccgccgccctgcagagcgccacccccgtggagagagtgaagctgcaggaggccctgagccagctggacttccagtgggagaaggtgaacaagatgtacaaggacagacagggcagattcgacagaagcgtggagaagtggagaagattccactacgacatcaagatcttcaaccagtggctgaccgaggccgagcagttcctgagaaagacccagatccccgagaactgggagcacgccaagtacaagtggtacctgaaggagctgcaggacggcatcggccagagacagaccgtggtgagaaccctgaacgccaccggcgaggagatcatccagcagagcagcaagaccgacgccagcatcctgcaggagaagctgggcagcctgaacctgagatggcaggaggtgtgcaagcagctgagcgacagaaagaagagactggaggagcagaagaacatcctgagcgagttccagagagacctgaacgagttcgtgctgtggctggaggaggccgacaacatcgccagcatccccctggagcccggcaaggagcagcagctgaaggagaagctggagcaggtgaagctgctggtggaggagctgcccctgagacagggcatcctgaagcagctgaacgagaccggcggccccgtgctggtgagcgcccccatcagccccgaggagcaggacaagctggagaacaagctgaagcagaccaacctgcagtggatcaaggtgagcagagccctgcccgagaagcagggcgagatcgaggcccagatcaaggacctgggccagctggagaagaagctggaggacctggaggagcagctgaaccacctgctgctgtggctgagccccatcagaaaccagctggagatctacaaccagcccaaccaggagggccccttcgacgtgaaggagaccgagatcgccgtgcaggccaagcagcccgacgtggaggagatcctgagcaagggccagcacctgtacaaggagaagcccgccacccagcccgtgaagagaaagctggaggacctgagcagcgagtggaaggccgtgaacagactgctgcaggagctgagagccaagcagcccgacctggcccccggcctgaccaccatcggcgccagccccacccagaccgtgaccctggtgacccagcccgtggtgaccaaggagaccgccatcagcaagctggagatgcccagcagcctgatgctggaggtgcccgccctggccgacttcaacagagcctggaccgagctgaccgactggctgagcctgctggaccaggtgatcaagagccagagagtgatggtgggcgacctggaggacatcaacgagatgatcatcaagcagaaggccaccatgcaggacctggagcagagaagaccccagctggaggagctgatcaccgccgcccagaacctgaagaacaagaccagcaaccaggaggccagaaccatcatcaccgacagaatcgagagaatccagaaccagtgggacgaggtgcaggagcacctgcagaacagaagacagcagctgaacgagatgctgaaggacagcacccagtggctggaggccaaggaggaggccgagcaggtgctgggccaggccagagccaagctggagagctggaaggagggcccctacaccgtggacgccatccagaagaagatcaccgagaccaagcagctggccaaggacctgagacagtggcagaccaacgtggacgtggccaacgacctggccctgaagctgctgagagactacagcgccgacgacaccagaaaggtgcacatgatcaccgagaacatcaacgccagctggagaagcatccacaagagagtgagcgagagagaggccgccctggaggagacccacagactgctgcagcagttccccctggacctggagaagttcctggcctggctgaccgaggccgagaccaccgccaacgtgctgcaggacgccaccagaaaggagagactgctggaggacagcaagggcgtgaaggagctgatgaagcagtggcaggacctgcagggcgagatcgaggcccacaccgacgtgtaccacaacctggacgagaacagccagaagatcctgagaagcctggagggcagcgacgacgccgtgctgctgcagagaagactggacaacatgaacttcaagtggagcgagctgagaaagaagagcctgaacatcagaagccacctggaggccagcagcgaccagtggaagagactgcacctgagcctgcaggagctgctggtgtggctgcagctgaaggacgacgagctgagcagacaggcccccatcggcggcgacttccccgccgtgcagaagcagaacgacgtgcacagagccttcaagagagagctgaagaccaaggagcccgtgatcatgagcaccctggagaccgtgagaatcttcctgaccgagcagcccctggagggcctggagaagctgtaccaggagcccagagagctgccccccgaggagagagcccagaacgtgaccagactgctgagaaagcaggccgaggaggtgaacaccgagtgggagaagctgaacctgcacagcgccgactggcagagaaagatcgacgagaccctggagagactgagagagctgcaggaggccaccgacgagctggacctgaagctgagacaggccgaggtgatcaagggcagctggcagcccgtgggcgacctgctgatcgacagcctgcaggaccacctggagaaggtgaaggccctgagaggcgagatcgcccccctgaaggagaacgtgagccacgtgaacgacctggccagacagctgaccaccctgggcatccagctgagcccctacaacctgagcaccctggaggacctgaacaccagatggaagctgctgcaggtggccgtggaggacagagtgagacagctgcacgaggcccacagagacttcggccccgccagccagcacttcctgagcaccagcgtgcagggcccctgggagagagccatcagccccaacaaggtgccctactacatcaaccacgagacccagaccacctgctgggaccaccccaagatgaccgagctgtaccagagcctggccgacctgaacaacgtgagattcagcgcctacagaaccgccatgaagctgagaagactgcagaaggccctgtgcctggacctgctgagcctgagcgccgcctgcgacgccctggaccagcacaacctgaagcagaacgaccagcccatggacatcctgcagatcatcaactgcctgaccaccatctacgacagactggagcaggagcacaacaacctggtgaacgtgcccctgtgcgtggacatgtgcctgaactggctgctgaacgtgtacgacaccggcagaaccggcagaatcagagtgctgagcttcaagaccggcatcatcagcctgtgcaaggcccacctggaggacaagtacagatacctgttcaagcaggtggccagcagcaccggcttctgcgaccagagaagactgggcctgctgctgcacgacagcatccagatccccagacagctgggcgaggtggccagcttcggcggcagcaacatcgagcccagcgtgagaagctgcttccagttcgccaacaacaagcccgagatcgaggccgccctgttcctggactggatgagactggagccccagagcatggtgtggctgcccgtgctgcacagagtggccgccgccgagaccgccaagcaccaggccaagtgcaacatctgcaaggagtgccccatcatcggcttcagatacagaagcctgaagcacttcaactacgacatctgccagagctgcttcttcagcggcagagtggccaagggccacaagatgcactaccccatggtggagtactgcacccccaccaccagcggcgaggacgtgagagacttcgccaaggtgctgaagaacaagttcagaaccaagagatacttcgccaagcaccccagaatgggctacctgcccgtgcagaccgtgctggagggcgacaacatggagacccccgtgaccctgatcaacttctggcccgtggacagcgcccccgccagcagcccccagctgagccacgacgacacccacagcagaatcgagcactacgccagcagactggccgagatggagaacagcaacggcagctacctgaacgacagcatcagccccaacgagagcatcgacgacgagcacctgctgatccagcactactgccagagcctgaaccaggacagccccctgagccagcccagaagccccgcccagatcctgatcagcctggagagcgaggagagaggcgagctggagagaatcctggccgacctggaggaggagaacagaaacctgcaggccgagtacgacagactgaagcagcagcacgagcacaagggcctgagccccctgcccagcccccccgagatgatgcccaccagcccccagagccccagagacgccgagctgatcgccgaggccaagctgctgagacagcacaagggcagactggaggccagaatgcagatcctggaggaccacaacaagcagctggagagccagctgcacagactgagacagctgctggagcagccccaggccgaggccaaggtgaacggcaccaccgtgagcagccccagcaccagcctgcagagaagcgacagcagccagcccatgctgctgagagtggtgggcagccagaccagcgacagcatgggcgaggaggacctgctgagccccccccaggacaccagcaccggcctggaggaggtgatggagcagctgaacaacagcttccccagcagcagaggcagaaacacccccggcaagcccatgagagaggacaccatgtag

SEQ ID NO: 142733 - DNA, 3678 bp, Artificial Sequence
  derived and/or modified sequence
atgcccagcagcctgatgctggaggtgcccgccctggccgacttcaacagagcctggaccgagctgaccgactggctgagcctgctggaccaggtgatcaagagccagagagtgatggtgggcgacctggaggacatcaacgagatgatcatcaagcagaaggccaccatgcaggacctggagcagagaagaccccagctggaggagctgatcaccgccgcccagaacctgaagaacaagaccagcaaccaggaggccagaaccatcatcaccgacagaatcgagagaatccagaaccagtgggacgaggtgcaggagcacctgcagaacagaagacagcagctgaacgagatgctgaaggacagcacccagtggctggaggccaaggaggaggccgagcaggtgctgggccaggccagagccaagctggagagctggaaggagggcccctacaccgtggacgccatccagaagaagatcaccgagaccaagcagctggccaaggacctgagacagtggcagaccaacgtggacgtggccaacgacctggccctgaagctgctgagagactacagcgccgacgacaccagaaaggtgcacatgatcaccgagaacatcaacgccagctggagaagcatccacaagagagtgagcgagagagaggccgccctggaggagacccacagactgctgcagcagttccccctggacctggagaagttcctggcctggctgaccgaggccgagaccaccgccaacgtgctgcaggacgccaccagaaaggagagactgctggaggacagcaagggcgtgaaggagctgatgaagcagtggcaggacctgcagggcgagatcgaggcccacaccgacgtgtaccacaacctggacgagaacagccagaagatcctgagaagcctggagggcagcgacgacgccgtgctgctgcagagaagactggacaacatgaacttcaagtggagcgagctgagaaagaagagcctgaacatcagaagccacctggaggccagcagcgaccagtggaagagactgcacctgagcctgcaggagctgctggtgtggctgcagctgaaggacgacgagctgagcagacaggcccccatcggcggcgacttccccgccgtgcagaagcagaacgacgtgcacagagccttcaagagagagctgaagaccaaggagcccgtgatcatgagcaccctggagaccgtgagaatcttcctgaccgagcagcccctggagggcctggagaagctgtaccaggagcccagagagctgccccccgaggagagagcccagaacgtgaccagactgctgagaaagcaggccgaggaggtgaacaccgagtgggagaagctgaacctgcacagcgccgactggcagagaaagatcgacgagaccctggagagactgagagagctgcaggaggccaccgacgagctggacctgaagctgagacaggccgaggtgatcaagggcagctggcagcccgtgggcgacctgctgatcgacagcctgcaggaccacctggagaaggtgaaggccctgagaggcgagatcgcccccctgaaggagaacgtgagccacgtgaacgacctggccagacagctgaccaccctgggcatccagctgagcccctacaacctgagcaccctggaggacctgaacaccagatggaagctgctgcaggtggccgtggaggacagagtgagacagctgcacgaggcccacagagacttcggccccgccagccagcacttcctgagcaccagcgtgcagggcccctgggagagagccatcagccccaacaaggtgccctactacatcaaccacgagacccagaccacctgctgggaccaccccaagatgaccgagctgtaccagagcctggccgacctgaacaacgtgagattcagcgcctacagaaccgccatgaagctgagaagactgcagaaggccctgtgcctggacctgctgagcctgagcgccgcctgcgacgccctggaccagcacaacctgaagcagaacgaccagcccatggacatcctgcagatcatcaactgcctgaccaccatctacgacagactggagcaggagcacaacaacctggtgaacgtgcccctgtgcgtggacatgtgcctgaactggctgctgaacgtgtacgacaccggcagaaccggcagaatcagagtgctgagcttcaagaccggcatcatcagcctgtgcaaggcccacctggaggacaagtacagatacctgttcaagcaggtggccagcagcaccggcttctgcgaccagagaagactgggcctgctgctgcacgacagcatccagatccccagacagctgggcgaggtggccagcttcggcggcagcaacatcgagcccagcgtgagaagctgcttccagttcgccaacaacaagcccgagatcgaggccgccctgttcctggactggatgagactggagccccagagcatggtgtggctgcccgtgctgcacagagtggccgccgccgagaccgccaagcaccaggccaagtgcaacatctgcaaggagtgccccatcatcggcttcagatacagaagcctgaagcacttcaactacgacatctgccagagctgcttcttcagcggcagagtggccaagggccacaagatgcactaccccatggtggagtactgcacccccaccaccagcggcgaggacgtgagagacttcgccaaggtgctgaagaacaagttcagaaccaagagatacttcgccaagcaccccagaatgggctacctgcccgtgcagaccgtgctggagggcgacaacatggagacccccgtgaccctgatcaacttctggcccgtggacagcgcccccgccagcagcccccagctgagccacgacgacacccacagcagaatcgagcactacgccagcagactggccgagatggagaacagcaacggcagctacctgaacgacagcatcagccccaacgagagcatcgacgacgagcacctgctgatccagcactactgccagagcctgaaccaggacagccccctgagccagcccagaagccccgcccagatcctgatcagcctggagagcgaggagagaggcgagctggagagaatcctggccgacctggaggaggagaacagaaacctgcaggccgagtacgacagactgaagcagcagcacgagcacaagggcctgagccccctgcccagcccccccgagatgatgcccaccagcccccagagccccagagacgccgagctgatcgccgaggccaagctgctgagacagcacaagggcagactggaggccagaatgcagatcctggaggaccacaacaagcagctggagagccagctgcacagactgagacagctgctggagcagccccaggccgaggccaaggtgaacggcaccaccgtgagcagccccagcaccagcctgcagagaagcgacagcagccagcccatgctgctgagagtggtgggcagccagaccagcgacagcatgggcgaggaggacctgctgagccccccccaggacaccagcaccggcctggaggaggtgatggagcagctgaacaacagcttccccagcagcagaggcagaaacacccccggcaagcccatgagagaggacaccatgtag

SEQ ID NO: 142734 - DNA, 10689 bp, Artificial Sequence
  derived and/or modified sequence
atgaagaacatcatggccggcctgcagcagaccaacagcgagaagatcctgctgagctgggtgagacagagcaccagaaactacccccaggtgaacgtgatcaacttcaccaccagctggagcgacggcctggccctgaacgccctgatccacagccacagacccgacctgttcgactggaacagcgtggtgtgccagcagagcgccacccagagactggagcacgccttcaacatcgccagataccagctgggcatcgagaagctgctggaccccgaggacgtggacaccacctaccccgacaagaagagcatcctgatgtacatcaccagcctgttccaggtgctgccccagcaggtgagcatcgaggccatccaggaggtggagatgctgcccagaccccccaaggtgaccaaggaggagcacttccagctgcaccaccagatgcactacagccagcagatcaccgtgagcctggcccagggctacgagagaaccagcagccccaagcccagattcaagagctacgcctacacccaggccgcctacgtgaccaccagcgaccccaccagaagccccttccccagccagcacctggaggcccccgaggacaagagcttcggcagcagcctgatggagagcgaggtgaacctggacagataccagaccgccctggaggaggtgctgagctggctgctgagcgccgaggacaccctgcaggcccagggcgagatcagcaacgacgtggaggtggtgaaggaccagttccacacccacgagggctacatgatggacctgaccgcccaccagggcagagtgggcaacatcctgcagctgggcagcaagctgatcggcaccggcaagctgagcgaggacgaggagaccgaggtgcaggagcagatgaacctgctgaacagcagatgggagtgcctgagagtggccagcatggagaagcagagcaacctgcacagagtgctgatggacctgcagaaccagaagctgaaggagctgaacgactggctgaccaagaccgaggagagaaccagaaagatggaggaggagcccctgggccccgacctggaggacctgaagagacaggtgcagcagcacaaggtgctgcaggaggacctggagcaggagcaggtgagagtgaacagcctgacccacatggtggtggtggtggacgagagcagcggcgaccacgccaccgccgccctggaggagcagctgaaggtgctgggcgacagatgggccaacatctgcagatggaccgaggacagatgggtgctgctgcaggacatcctgctgaagtggcagagactgaccgaggagcagtgcctgttcagcgcctggctgagcgagaaggaggacgccgtgaacaagatccacaccaccggcttcaaggaccagaacgagatgctgagcagcctgcagaagctggccgtgctgaaggccgacctggagaagaagaagcagagcatgggcaagctgtacagcctgaagcaggacctgctgagcaccctgaagaacaagagcgtgacccagaagaccgaggcctggctggacaacttcgccagatgctgggacaacctggtgcagaagctggagaagagcaccgcccagatcagccaggccgtgaccaccacccagcccagcctgacccagaccaccgtgatggagaccgtgaccaccgtgaccaccagagagcagatcctggtgaagcacgcccaggaggagctgccccccccccccccccagaagaagagacagatcaccgtggacagcgagatcagaaagagactggacgtggacatcaccgagctgcacagctggatcaccagaagcgaggccgtgctgcagagccccgagttcgccatcttcagaaaggagggcaacttcagcgacctgaaggagaaggtgaacgccatcgagagagagaaggccgagaagttcagaaagctgcaggacgccagcagaagcgcccaggccctggtggagcagatggtgaacgagggcgtgaacgccgacagcatcaagcaggccagcgagcagctgaacagcagatggatcgagttctgccagctgctgagcgagagactgaactggctggagtaccagaacaacatcatcgccttctacaaccagctgcagcagctggagcagatgaccaccaccgccgagaactggctgaagatccagcccaccacccccagcgagcccaccgccatcaagagccagctgaagatctgcaaggacgaggtgaacagactgagcgacctgcagccccagatcgagagactgaagatccagagcatcgccctgaaggagaagggccagggccccatgttcctggacgccgacttcgtggccttcaccaaccacttcaagcaggtgttcagcgacgtgcaggccagagagaaggagctgcagaccatcttcgacaccctgccccccatgagataccaggagaccatgagcgccatcagaacctgggtgcagcagagcgagaccaagctgagcatcccccagctgagcgtgaccgactacgagatcatggagcagagactgggcgagctgcaggccctgcagagcagcctgcaggagcagcagagcggcctgtactacctgagcaccaccgtgaaggagatgagcaagaaggcccccagcgagatcagcagaaagtaccagagcgagttcgaggagatcgagggcagatggaagaagctgagcagccagctggtggagcactgccagaagctggaggagcagatgaacaagctgagaaagatccagaaccacatccagaccctgaagaagtggatggccgaggtggacgtgttcctgaaggaggagtggcccgccctgggcgacagcgagatcctgaagaagcagctgaagcagtgcagactgctggtgagcgacatccagaccatccagcccagcctgaacagcgtgaacgagggcggccagaagatcaagaacgaggccgagcccgagttcgccagcagactggagaccgagctgaaggagctgaacacccagtgggaccacatgtgccagcaggtgtacgccagaaaggaggccctgaagggcggcctggagaagaccgtgagcctgcagaaggacctgagcgagatgcacgagtggatgacccaggccgaggaggagtacctggagagagacttcgagtacaagacccccgacgagctgcagaaggccgtggaggagatgaagagagccaaggaggaggcccagcagaaggaggccaaggtgaagctgctgaccgagagcgtgaacagcgtgatcgcccaggccccccccgtggcccaggaggccctgaagaaggagctggagaccctgaccaccaactaccagtggctgtgcaccagactgaacggcaagtgcaagaccctggaggaggtgtgggcctgctggcacgagctgctgagctacctggagaaggccaacaagtggctgaacgaggtggagttcaagctgaagaccaccgagaacatccccggcggcgccgaggagatcagcgaggtgctggacagcctggagaacctgatgagacacagcgaggacaaccccaaccagatcagaatcctggcccagaccctgaccgacggcggcgtgatggacgagctgatcaacgaggagctggagaccttcaacagcagatggagagagctgcacgaggaggccgtgagaagacagaagctgctggagcagagcatccagagcgcccaggagaccgagaagagcctgcacctgatccaggagagcctgaccttcatcgacaagcagctggccgcctacatcgccgacaaggtggacgccgcccagatgccccaggaggcccagaagatccagagcgacctgaccagccacgagatcagcctggaggagatgaagaagcacaaccagggcaaggaggccgcccagagagtgctgagccagatcgacgtggcccagaagaagctgcaggacgtgagcatgaagttcagactgttccagaagcccgccaacttcgagcagagactgcaggagagcaagatgatcctggacgaggtgaagatgcacctgcccgccctggagaccaagagcgtggagcaggaggtggtgcagagccagctgaaccactgcgtgaacctgtacaagagcctgagcgaggtgaagagcgaggtggagatggtgatcaagaccggcagacagatcgtgcagaagaagcagaccgagaaccccaaggagctggacgagagagtgaccgccctgaagctgcactacaacgagctgggcgccaaggtgaccgagagaaagcagcagctggagaagtgcctgaagctgagcagaaagatgagaaaggagatgaacgtgctgaccgagtggctggccgccaccgacatggagctgaccaagagaagcgccgtggagggcatgcccagcaacctggacagcgaggtggcctggggcaaggccacccagaaggagatcgagaagcagaaggtgcacctgaagagcatcaccgaggtgggcgaggccctgaagaccgtgctgggcaagaaggagaccctggtggaggacaagctgagcctgctgaacagcaactggatcgccgtgaccagcagagccgaggagtggctgaacctgctgctggagtaccagaagcacatggagaccttcgaccagaacgtggaccacatcaccaagtggatcatccaggccgacaccctgctggacgagagcgagaagaagaagccccagcagaaggaggacgtgctgaagagactgaaggccgagctgaacgacatcagacccaaggtggacagcaccagagaccaggccgccaacctgatggccaacagaggcgaccactgcagaaagctggtggagccccagatcagcgagctgaaccacagattcgccgccatcagccacagaatcaagaccggcaaggccagcatccccctgaaggagctggagcagttcaacagcgacatccagaagctgctggagcccctggaggccgagatccagcagggcgtgaacctgaaggaggaggacttcaacaaggacatgaacgaggacaacgagggcaccgtgaaggagctgctgcagagaggcgacaacctgcagcagagaatcaccgacgagagaaagagagaggagatcaagatcaagcagcagctgctgcagaccaagcacaacgccctgaaggacctgagaagccagagaagaaagaaggccctggagatcagccaccagtggtaccagtacaagagacaggccgacgacctgctgaagtgcctggacgacatcgagaagaagctggccagcctgcccgagcccagagacgagagaaagatcaaggagatcgacagagagctgcagaagaagaaggaggagctgaacgccgtgagaagacaggccgagggcctgagcgaggacggcgccgccatggccgtggagcccacccagatccagctgagcaagagatggagagagatcgagagcaagttcgcccagttcagaagactgaacttcgcccagatccacaccgtgagagaggagaccatgatggtgatgaccgaggacatgcccctggagatcagctacgtgcccagcacctacctgaccgagatcacccacgtgagccaggccctgctggaggtggagcagctgctgaacgcccccgacctgtgcgccaaggacttcgaggacctgttcaagcaggaggagagcctgaagaacatcaaggacagcctgcagcagagcagcggcagaatcgacatcatccacagcaagaagaccgccgccctgcagagcgccacccccgtggagagagtgaagctgcaggaggccctgagccagctggacttccagtgggagaaggtgaacaagatgtacaaggacagacagggcagattcgacagaagcgtggagaagtggagaagattccactacgacatcaagatcttcaaccagtggctgaccgaggccgagcagttcctgagaaagacccagatccccgagaactgggagcacgccaagtacaagtggtacctgatcgccctgaaggacggcatcggccagagacagaccgtggtgagaaccctgaacgccaccggcgaggagatcatccagcagagcagcaagaccgacgccagcatcctgcaggagaagctgggcagcctgaacctgagatggcaggaggtgtgcaagcagctgagcgacagaaagaagagactggaggagcagaagaacatcctgagcgagttccagagagacctgaacgagttcgtgctgtggctggaggaggccgacaacatcgccagcatccccctggagcccggcaaggagcagcagctgaaggagaagctggagcaggtgaagctgctggtggaggagctgcccctgagacagggcatcctgaagcagctgaacgagaccggcggccccgtgctggtgagcgcccccatcagccccgaggagcaggacaagctggagaacaagctgaagcagaccaacctgcagtggatcaaggtgagcagagccctgcccgagaagcagggcgagatcgaggcccagatcaaggacctgggccagctggagaagaagctggaggacctggaggagcagctgaaccacctgctgctgtggctgagccccatcagaaaccagctggagatctacaaccagcccaaccaggagggccccttcgacgtgaaggagaccgagatcgccgtgcaggccaagcagcccgacgtggaggagatcctgagcaagggccagcacctgtacaaggagaagcccgccacccagcccgtgaagagaaagctggaggacctgagcagcgagtggaaggccgtgaacagactgctgcaggagctgagagccaagcagcccgacctggcccccggcctgaccaccatcggcgccagccccacccagaccgtgaccctggtgacccagcccgtggtgaccaaggagaccgccatcagcaagctggagatgcccagcagcctgatgctggaggtgcccgccctggccgacttcaacagagcctggaccgagctgaccgactggctgagcctgctggaccaggtgatcaagagccagagagtgatggtgggcgacctggaggacatcaacgagatgatcatcaagcagaaggccaccatgcaggacctggagcagagaagaccccagctggaggagctgatcaccgccgcccagaacctgaagaacaagaccagcaaccaggaggccagaaccatcatcaccgacagaatcgagagaatccagaaccagtgggacgaggtgcaggagcacctgcagaacagaagacagcagctgaacgagatgctgaaggacagcacccagtggctggaggccaaggaggaggccgagcaggtgctgggccaggccagagccaagctggagagctggaaggagggcccctacaccgtggacgccatccagaagaagatcaccgagaccaagcagctggccaaggacctgagacagtggcagaccaacgtggacgtggccaacgacctggccctgaagctgctgagagactacagcgccgacgacaccagaaaggtgcacatgatcaccgagaacatcaacgccagctggagaagcatccacaagagagtgagcgagagagaggccgccctggaggagacccacagactgctgcagcagttccccctggacctggagaagttcctggcctggctgaccgaggccgagaccaccgccaacgtgctgcaggacgccaccagaaaggagagactgctggaggacagcaagggcgtgaaggagctgatgaagcagtggcaggacctgcagggcgagatcgaggcccacaccgacgtgtaccacaacctggacgagaacagccagaagatcctgagaagcctggagggcagcgacgacgccgtgctgctgcagagaagactggacaacatgaacttcaagtggagcgagctgagaaagaagagcctgaacatcagaagccacctggaggccagcagcgaccagtggaagagactgcacctgagcctgcaggagctgctggtgtggctgcagctgaaggacgacgagctgagcagacaggcccccatcggcggcgacttccccgccgtgcagaagcagaacgacgtgcacagagccttcaagagagagctgaagaccaaggagcccgtgatcatgagcaccctggagaccgtgagaatcttcctgaccgagcagcccctggagggcctggagaagctgtaccaggagcccagagagctgccccccgaggagagagcccagaacgtgaccagactgctgagaaagcaggccgaggaggtgaacaccgagtgggagaagctgaacctgcacagcgccgactggcagagaaagatcgacgagaccctggagagactgagagagctgcaggaggccaccgacgagctggacctgaagctgagacaggccgaggtgatcaagggcagctggcagcccgtgggcgacctgctgatcgacagcctgcaggaccacctggagaaggtgaaggccctgagaggcgagatcgcccccctgaaggagaacgtgagccacgtgaacgacctggccagacagctgaccaccctgggcatccagctgagcccctacaacctgagcaccctggaggacctgaacaccagatggaagctgctgcaggtggccgtggaggacagagtgagacagctgcacgaggcccacagagacttcggccccgccagccagcacttcctgagcaccagcgtgcagggcccctgggagagagccatcagccccaacaaggtgccctactacatcaaccacgagacccagaccacctgctgggaccaccccaagatgaccgagctgtaccagagcctggccgacctgaacaacgtgagattcagcgcctacagaaccgccatgaagctgagaagactgcagaaggccctgtgcctggacctgctgagcctgagcgccgcctgcgacgccctggaccagcacaacctgaagcagaacgaccagcccatggacatcctgcagatcatcaactgcctgaccaccatctacgacagactggagcaggagcacaacaacctggtgaacgtgcccctgtgcgtggacatgtgcctgaactggctgctgaacgtgtacgacaccggcagaaccggcagaatcagagtgctgagcttcaagaccggcatcatcagcctgtgcaaggcccacctggaggacaagtacagatacctgttcaagcaggtggccagcagcaccggcttctgcgaccagagaagactgggcctgctgctgcacgacagcatccagatccccagacagctgggcgaggtggccagcttcggcggcagcaacatcgagcccagcgtgagaagctgcttccagttcgccaacaacaagcccgagatcgaggccgccctgttcctggactggatgagactggagccccagagcatggtgtggctgcccgtgctgcacagagtggccgccgccgagaccgccaagcaccaggccaagtgcaacatctgcaaggagtgccccatcatcggcttcagatacagaagcctgaagcacttcaactacgacatctgccagagctgcttcttcagcggcagagtggccaagggccacaagatgcactaccccatggtggagtactgcacccccaccaccagcggcgaggacgtgagagacttcgccaaggtgctgaagaacaagttcagaaccaagagatacttcgccaagcaccccagaatgggctacctgcccgtgcagaccgtgctggagggcgacaacatggagacccccgtgaccctgatcaacttctggcccgtggacagcgcccccgccagcagcccccagctgagccacgacgacacccacagcagaatcgagcactacgccagcagactggccgagatggagaacagcaacggcagctacctgaacgacagcatcagccccaacgagagcatcgacgacgagcacctgctgatccagcactactgccagagcctgaaccaggacagccccctgagccagcccagaagccccgcccagatcctgatcagcctggagagcgaggagagaggcgagctggagagaatcctggccgacctggaggaggagaacagaaacctgcaggccgagtacgacagactgaagcagcagcacgagcacaagggcctgagccccctgcccagcccccccgagatgatgcccaccagcccccagagccccagagacgccgagctgatcgccgaggccaagctgctgagacagcacaagggcagactggaggccagaatgcagatcctggaggaccacaacaagcagctggagagccagctgcacagactgagacagctgctggagcagccccaggccgaggccaaggtgaacggcaccaccgtgagcagccccagcaccagcctgcagagaagcgacagcagccagcccatgctgctgagagtggtgggcagccagaccagcgacagcatgggcgaggaggacctgctgagccccccccaggacaccagcaccggcctggaggaggtgatggagcagctgaacaacagcttccccagcagcagaggcagaaacacccccggcaagcccatgagagaggacaccatgtag

SEQ ID NO: 142735 - DNA, 11058 bp, Artificial Sequence
  derived and/or modified sequence
atgctgtggtgggaggaggtggaggactgctacgagagagaggacgtgcagaagaagaccttcaccaagtgggtgaacgcccagttcagcaagttcggcaagcagcacatcgagaacctgttcagcgacctgcaggacggcagaagactgctggacctgctggagggcctgaccggccagaagctgcccaaggagaagggcagcaccagagtgcacgccctgaacaacgtgaacaaggccctgagagtgctgcagaacaacaacgtggacctggtgaacatcggcagcaccgacatcgtggacggcaaccacaagctgaccctgggcctgatctggaacatcatcctgcactggcaggtgaagaacgtgatgaagaacatcatggccggcctgcagcagaccaacagcgagaagatcctgctgagctgggtgagacagagcaccagaaactacccccaggtgaacgtgatcaacttcaccaccagctggagcgacggcctggccctgaacgccctgatccacagccacagacccgacctgttcgactggaacagcgtggtgtgccagcagagcgccacccagagactggagcacgccttcaacatcgccagataccagctgggcatcgagaagctgctggaccccgaggacgtggacaccacctaccccgacaagaagagcatcctgatgtacatcaccagcctgttccaggtgctgccccagcaggtgagcatcgaggccatccaggaggtggagatgctgcccagaccccccaaggtgaccaaggaggagcacttccagctgcaccaccagatgcactacagccagcagatcaccgtgagcctggcccagggctacgagagaaccagcagccccaagcccagattcaagagctacgcctacacccaggccgcctacgtgaccaccagcgaccccaccagaagccccttccccagccagcacctggaggcccccgaggacaagagcttcggcagcagcctgatggagagcgaggtgaacctggacagataccagaccgccctggaggaggtgctgagctggctgctgagcgccgaggacaccctgcaggcccagggcgagatcagcaacgacgtggaggtggtgaaggaccagttccacacccacgagggctacatgatggacctgaccgcccaccagggcagagtgggcaacatcctgcagctgggcagcaagctgatcggcaccggcaagctgagcgaggacgaggagaccgaggtgcaggagcagatgaacctgctgaacagcagatgggagtgcctgagagtggccagcatggagaagcagagcaacctgcacagagtgctgatggacctgcagaaccagaagctgaaggagctgaacgactggctgaccaagaccgaggagagaaccagaaagatggaggaggagcccctgggccccgacctggaggacctgaagagacaggtgcagcagcacaaggtgctgcaggaggacctggagcaggagcaggtgagagtgaacagcctgacccacatggtggtggtggtggacgagagcagcggcgaccacgccaccgccgccctggaggagcagctgaaggtgctgggcgacagatgggccaacatctgcagatggaccgaggacagatgggtgctgctgcaggacatcctgctgaagtggcagagactgaccgaggagcagtgcctgttcagcgcctggctgagcgagaaggaggacgccgtgaacaagatccacaccaccggcttcaaggaccagaacgagatgctgagcagcctgcagaagctggccgtgctgaaggccgacctggagaagaagaagcagagcatgggcaagctgtacagcctgaagcaggacctgctgagcaccctgaagaacaagagcgtgacccagaagaccgaggcctggctggacaacttcgccagatgctgggacaacctggtgcagaagctggagaagagcaccgcccagatcagccaggccgtgaccaccacccagcccagcctgacccagaccaccgtgatggagaccgtgaccaccgtgaccaccagagagcagatcctggtgaagcacgcccaggaggagctgccccccccccccccccagaagaagagacagatcaccgtggacagcgagatcagaaagagactggacgtggacatcaccgagctgcacagctggatcaccagaagcgaggccgtgctgcagagccccgagttcgccatcttcagaaaggagggcaacttcagcgacctgaaggagaaggtgaacgccatcgagagagagaaggccgagaagttcagaaagctgcaggacgccagcagaagcgcccaggccctggtggagcagatggtgaacgagggcgtgaacgccgacagcatcaagcaggccagcgagcagctgaacagcagatggatcgagttctgccagctgctgagcgagagactgaactggctggagtaccagaacaacatcatcgccttctacaaccagctgcagcagctggagcagatgaccaccaccgccgagaactggctgaagatccagcccaccacccccagcgagcccaccgccatcaagagccagctgaagatctgcaaggacgaggtgaacagactgagcgacctgcagccccagatcgagagactgaagatccagagcatcgccctgaaggagaagggccagggccccatgttcctggacgccgacttcgtggccttcaccaaccacttcaagcaggtgttcagcgacgtgcaggccagagagaaggagctgcagaccatcttcgacaccctgccccccatgagataccaggagaccatgagcgccatcagaacctgggtgcagcagagcgagaccaagctgagcatcccccagctgagcgtgaccgactacgagatcatggagcagagactgggcgagctgcaggccctgcagagcagcctgcaggagcagcagagcggcctgtactacctgagcaccaccgtgaaggagatgagcaagaaggcccccagcgagatcagcagaaagtaccagagcgagttcgaggagatcgagggcagatggaagaagctgagcagccagctggtggagcactgccagaagctggaggagcagatgaacaagctgagaaagatccagaaccacatccagaccctgaagaagtggatggccgaggtggacgtgttcctgaaggaggagtggcccgccctgggcgacagcgagatcctgaagaagcagctgaagcagtgcagactgctggtgagcgacatccagaccatccagcccagcctgaacagcgtgaacgagggcggccagaagatcaagaacgaggccgagcccgagttcgccagcagactggagaccgagctgaaggagctgaacacccagtgggaccacatgtgccagcaggtgtacgccagaaaggaggccctgaagggcggcctggagaagaccgtgagcctgcagaaggacctgagcgagatgcacgagtggatgacccaggccgaggaggagtacctggagagagacttcgagtacaagacccccgacgagctgcagaaggccgtggaggagatgaagagagccaaggaggaggcccagcagaaggaggccaaggtgaagctgctgaccgagagcgtgaacagcgtgatcgcccaggccccccccgtggcccaggaggccctgaagaaggagctggagaccctgaccaccaactaccagtggctgtgcaccagactgaacggcaagtgcaagaccctggaggaggtgtgggcctgctggcacgagctgctgagctacctggagaaggccaacaagtggctgaacgaggtggagttcaagctgaagaccaccgagaacatccccggcggcgccgaggagatcagcgaggtgctggacagcctggagaacctgatgagacacagcgaggacaaccccaaccagatcagaatcctggcccagaccctgaccgacggcggcgtgatggacgagctgatcaacgaggagctggagaccttcaacagcagatggagagagctgcacgaggaggccgtgagaagacagaagctgctggagcagagcatccagagcgcccaggagaccgagaagagcctgcacctgatccaggagagcctgaccttcatcgacaagcagctggccgcctacatcgccgacaaggtggacgccgcccagatgccccaggaggcccagaagatccagagcgacctgaccagccacgagatcagcctggaggagatgaagaagcacaaccagggcaaggaggccgcccagagagtgctgagccagatcgacgtggcccagaagaagctgcaggacgtgagcatgaagttcagactgttccagaagcccgccaacttcgagcagagactgcaggagagcaagatgatcctggacgaggtgaagatgcacctgcccgccctggagaccaagagcgtggagcaggaggtggtgcagagccagctgaaccactgcgtgaacctgtacaagagcctgagcgaggtgaagagcgaggtggagatggtgatcaagaccggcagacagatcgtgcagaagaagcagaccgagaaccccaaggagctggacgagagagtgaccgccctgaagctgcactacaacgagctgggcgccaaggtgaccgagagaaagcagcagctggagaagtgcctgaagctgagcagaaagatgagaaaggagatgaacgtgctgaccgagtggctggccgccaccgacatggagctgaccaagagaagcgccgtggagggcatgcccagcaacctggacagcgaggtggcctggggcaaggccacccagaaggagatcgagaagcagaaggtgcacctgaagagcatcaccgaggtgggcgaggccctgaagaccgtgctgggcaagaaggagaccctggtggaggacaagctgagcctgctgaacagcaactggatcgccgtgaccagcagagccgaggagtggctgaacctgctgctggagtaccagaagcacatggagaccttcgaccagaacgtggaccacatcaccaagtggatcatccaggccgacaccctgctggacgagagcgagaagaagaagccccagcagaaggaggacgtgctgaagagactgaaggccgagctgaacgacatcagacccaaggtggacagcaccagagaccaggccgccaacctgatggccaacagaggcgaccactgcagaaagctggtggagccccagatcagcgagctgaaccacagattcgccgccatcagccacagaatcaagaccggcaaggccagcatccccctgaaggagctggagcagttcaacagcgacatccagaagctgctggagcccctggaggccgagatccagcagggcgtgaacctgaaggaggaggacttcaacaaggacatgaacgaggacaacgagggcaccgtgaaggagctgctgcagagaggcgacaacctgcagcagagaatcaccgacgagagaaagagagaggagatcaagatcaagcagcagctgctgcagaccaagcacaacgccctgaaggacctgagaagccagagaagaaagaaggccctggagatcagccaccagtggtaccagtacaagagacaggccgacgacctgctgaagtgcctggacgacatcgagaagaagctggccagcctgcccgagcccagagacgagagaaagatcaaggagatcgacagagagctgcagaagaagaaggaggagctgaacgccgtgagaagacaggccgagggcctgagcgaggacggcgccgccatggccgtggagcccacccagatccagctgagcaagagatggagagagatcgagagcaagttcgcccagttcagaagactgaacttcgcccagatccacaccgtgagagaggagaccatgatggtgatgaccgaggacatgcccctggagatcagctacgtgcccagcacctacctgaccgagatcacccacgtgagccaggccctgctggaggtggagcagctgctgaacgcccccgacctgtgcgccaaggacttcgaggacctgttcaagcaggaggagagcctgaagaacatcaaggacagcctgcagcagagcagcggcagaatcgacatcatccacagcaagaagaccgccgccctgcagagcgccacccccgtggagagagtgaagctgcaggaggccctgagccagctggacttccagtgggagaaggtgaacaagatgtacaaggacagacagggcagattcgacagaagcgtggagaagtggagaagattccactacgacatcaagatcttcaaccagtggctgaccgaggccgagcagttcctgagaaagacccagatccccgagaactgggagcacgccaagtacaagtggtacctgatcgccctgaaggacggcatcggccagagacagaccgtggtgagaaccctgaacgccaccggcgaggagatcatccagcagagcagcaagaccgacgccagcatcctgcaggagaagctgggcagcctgaacctgagatggcaggaggtgtgcaagcagctgagcgacagaaagaagagactggaggagcagaagaacatcctgagcgagttccagagagacctgaacgagttcgtgctgtggctggaggaggccgacaacatcgccagcatccccctggagcccggcaaggagcagcagctgaaggagaagctggagcaggtgaagctgctggtggaggagctgcccctgagacagggcatcctgaagcagctgaacgagaccggcggccccgtgctggtgagcgcccccatcagccccgaggagcaggacaagctggagaacaagctgaagcagaccaacctgcagtggatcaaggtgagcagagccctgcccgagaagcagggcgagatcgaggcccagatcaaggacctgggccagctggagaagaagctggaggacctggaggagcagctgaaccacctgctgctgtggctgagccccatcagaaaccagctggagatctacaaccagcccaaccaggagggccccttcgacgtgaaggagaccgagatcgccgtgcaggccaagcagcccgacgtggaggagatcctgagcaagggccagcacctgtacaaggagaagcccgccacccagcccgtgaagagaaagctggaggacctgagcagcgagtggaaggccgtgaacagactgctgcaggagctgagagccaagcagcccgacctggcccccggcctgaccaccatcggcgccagccccacccagaccgtgaccctggtgacccagcccgtggtgaccaaggagaccgccatcagcaagctggagatgcccagcagcctgatgctggaggtgcccgccctggccgacttcaacagagcctggaccgagctgaccgactggctgagcctgctggaccaggtgatcaagagccagagagtgatggtgggcgacctggaggacatcaacgagatgatcatcaagcagaaggccaccatgcaggacctggagcagagaagaccccagctggaggagctgatcaccgccgcccagaacctgaagaacaagaccagcaaccaggaggccagaaccatcatcaccgacagaatcgagagaatccagaaccagtgggacgaggtgcaggagcacctgcagaacagaagacagcagctgaacgagatgctgaaggacagcacccagtggctggaggccaaggaggaggccgagcaggtgctgggccaggccagagccaagctggagagctggaaggagggcccctacaccgtggacgccatccagaagaagatcaccgagaccaagcagctggccaaggacctgagacagtggcagaccaacgtggacgtggccaacgacctggccctgaagctgctgagagactacagcgccgacgacaccagaaaggtgcacatgatcaccgagaacatcaacgccagctggagaagcatccacaagagagtgagcgagagagaggccgccctggaggagacccacagactgctgcagcagttccccctggacctggagaagttcctggcctggctgaccgaggccgagaccaccgccaacgtgctgcaggacgccaccagaaaggagagactgctggaggacagcaagggcgtgaaggagctgatgaagcagtggcaggacctgcagggcgagatcgaggcccacaccgacgtgtaccacaacctggacgagaacagccagaagatcctgagaagcctggagggcagcgacgacgccgtgctgctgcagagaagactggacaacatgaacttcaagtggagcgagctgagaaagaagagcctgaacatcagaagccacctggaggccagcagcgaccagtggaagagactgcacctgagcctgcaggagctgctggtgtggctgcagctgaaggacgacgagctgagcagacaggcccccatcggcggcgacttccccgccgtgcagaagcagaacgacgtgcacagagccttcaagagagagctgaagaccaaggagcccgtgatcatgagcaccctggagaccgtgagaatcttcctgaccgagcagcccctggagggcctggagaagctgtaccaggagcccagagagctgccccccgaggagagagcccagaacgtgaccagactgctgagaaagcaggccgaggaggtgaacaccgagtgggagaagctgaacctgcacagcgccgactggcagagaaagatcgacgagaccctggagagactgagagagctgcaggaggccaccgacgagctggacctgaagctgagacaggccgaggtgatcaagggcagctggcagcccgtgggcgacctgctgatcgacagcctgcaggaccacctggagaaggtgaaggccctgagaggcgagatcgcccccctgaaggagaacgtgagccacgtgaacgacctggccagacagctgaccaccctgggcatccagctgagcccctacaacctgagcaccctggaggacctgaacaccagatggaagctgctgcaggtggccgtggaggacagagtgagacagctgcacgaggcccacagagacttcggccccgccagccagcacttcctgagcaccagcgtgcagggcccctgggagagagccatcagccccaacaaggtgccctactacatcaaccacgagacccagaccacctgctgggaccaccccaagatgaccgagctgtaccagagcctggccgacctgaacaacgtgagattcagcgcctacagaaccgccatgaagctgagaagactgcagaaggccctgtgcctggacctgctgagcctgagcgccgcctgcgacgccctggaccagcacaacctgaagcagaacgaccagcccatggacatcctgcagatcatcaactgcctgaccaccatctacgacagactggagcaggagcacaacaacctggtgaacgtgcccctgtgcgtggacatgtgcctgaactggctgctgaacgtgtacgacaccggcagaaccggcagaatcagagtgctgagcttcaagaccggcatcatcagcctgtgcaaggcccacctggaggacaagtacagatacctgttcaagcaggtggccagcagcaccggcttctgcgaccagagaagactgggcctgctgctgcacgacagcatccagatccccagacagctgggcgaggtggccagcttcggcggcagcaacatcgagcccagcgtgagaagctgcttccagttcgccaacaacaagcccgagatcgaggccgccctgttcctggactggatgagactggagccccagagcatggtgtggctgcccgtgctgcacagagtggccgccgccgagaccgccaagcaccaggccaagtgcaacatctgcaaggagtgccccatcatcggcttcagatacagaagcctgaagcacttcaactacgacatctgccagagctgcttcttcagcggcagagtggccaagggccacaagatgcactaccccatggtggagtactgcacccccaccaccagcggcgaggacgtgagagacttcgccaaggtgctgaagaacaagttcagaaccaagagatacttcgccaagcaccccagaatgggctacctgcccgtgcagaccgtgctggagggcgacaacatggagacccccgtgaccctgatcaacttctggcccgtggacagcgcccccgccagcagcccccagctgagccacgacgacacccacagcagaatcgagcactacgccagcagactggccgagatggagaacagcaacggcagctacctgaacgacagcatcagccccaacgagagcatcgacgacgagcacctgctgatccagcactactgccagagcctgaaccaggacagccccctgagccagcccagaagccccgcccagatcctgatcagcctggagagcgaggagagaggcgagctggagagaatcctggccgacctggaggaggagaacagaaacctgcaggccgagtacgacagactgaagcagcagcacgagcacaagggcctgagccccctgcccagcccccccgagatgatgcccaccagcccccagagccccagagacgccgagctgatcgccgaggccaagctgctgagacagcacaagggcagactggaggccagaatgcagatcctggaggaccacaacaagcagctggagagccagctgcacagactgagacagctgctggagcagccccaggccgaggccaaggtgaacggcaccaccgtgagcagccccagcaccagcctgcagagaagcgacagcagccagcccatgctgctgagagtggtgggcagccagaccagcgacagcatgggcgaggaggacctgctgagccccccccaggacaccagcaccggcctggaggaggtgatggagcagctgaacaacagcttccccagcagcagaggcagaaacacccccggcaagcccatgagagaggacaccatgtag

SEQ ID NO: 142736 - DNA, 13956 bp, Artificial Sequence
  derived and/or modified sequence
gggatcactcactttccccctacaggactcagatctgggaggcaattaccttcggagaaaaacgaataggaaaaactgaagtgttactttttttaaagctgctgaagtttgttggtttctcattgtttttaagcctactggagcaataaagtttgaagaacttttaccaggttttttttatcgctgccttgatatacacttttcaaaatgctttggtgggaagaagtagaggactgttatgaaagagaagatgttcaaaagaaaacattcacaaaatgggtaaatgcacaattttctaagtttgggaagcagcatattgagaacctcttcagtgacctacaggatgggaggcgcctcctagacctcctcgaaggcctgacagggcaaaaactgccaaaagaaaaaggatccacaagagttcatgccctgaacaatgtcaacaaggcactgcgggttttgcagaacaataatgttgatttagtgaatattggaagtactgacatcgtagatggaaatcataaactgactcttggtttgatttggaatataatcctccactggcaggtcaaaaatgtaatgaaaaatatcatggctggattgcaacaaaccaacagtgaaaagattctcctgagctgggtccgacaatcaactcgtaattatccacaggttaatgtaatcaacttcaccaccagctggtctgatggcctggctttgaatgctctcatccatagtcataggccagacctatttgactggaatagtgtggtttgccagcagtcagccacacaacgactggaacatgcattcaacatcgccagatatcaattaggcatagagaaactactcgatcctgaagatgttgataccacctatccagataagaagtccatcttaatgtacatcacatcactcttccaagttttgcctcaacaagtgagcattgaagccatccaggaagtggaaatgttgccaaggccacctaaagtgactaaagaagaacattttcagttacatcatcaaatgcactattctcaacagatcacggtcagtctagcacagggatatgagagaacttcttcccctaagcctcgattcaagagctatgcctacacacaggctgcttatgtcaccacctctgaccctacacggagcccatttccttcacagcatttggaagctcctgaagacaagtcatttggcagttcattgatggagagtgaagtaaacctggaccgttatcaaacagctttagaagaagtattatcgtggcttctttctgctgaggacacattgcaagcacaaggagagatttctaatgatgtggaagtggtgaaagaccagtttcatactcatgaggggtacatgatggatttgacagcccatcagggccgggttggtaatattctacaattgggaagtaagctgattggaacaggaaaattatcagaagatgaagaaactgaagtacaagagcagatgaatctcctaaattcaagatgggaatgcctcagggtagctagcatggaaaaacaaagcaatttacatagagttttaatggatctccagaatcagaaactgaaagagttgaatgactggctaacaaaaacagaagaaagaacaaggaaaatggaggaagagcctcttggacctgatcttgaagacctaaaacgccaagtacaacaacataaggtgcttcaagaagatctagaacaagaacaagtcagggtcaattctctcactcacatggtggtggtagttgatgaatctagtggagatcacgcaactgctgctttggaagaacaacttaaggtattgggagatcgatgggcaaacatctgtagatggacagaagaccgctgggttcttttacaagacatccttctcaaatggcaacgtcttactgaagaacagtgcctttttagtgcatggctttcagaaaaagaagatgcagtgaacaagattcacacaactggctttaaagatcaaaatgaaatgttatcaagtcttcaaaaactggccgttttaaaagcggatctagaaaagaaaaagcaatccatgggcaaactgtattcactcaaacaagatcttctttcaacactgaagaataagtcagtgacccagaagacggaagcatggctggataactttgcccggtgttgggataatttagtccaaaaacttgaaaagagtacagcacagatttcacaggctgtcaccaccactcagccatcactaacacagacaactgtaatggaaacagtaactacggtgaccacaagggaacagatcctggtaaagcatgctcaagaggaacttccaccaccacctccccaaaagaagaggcagattactgtggattctgaaattaggaaaaggttggatgttgatataactgaacttcacagctggattactcgctcagaagctgtgttgcagagtcctgaatttgcaatctttcggaaggaaggcaacttctcagacttaaaagaaaaagtcaatgccatagagcgagaaaaagctgagaagttcagaaaactgcaagatgccagcagatcagctcaggccctggtggaacagatggtgaatgagggtgttaatgcagatagcatcaaacaagcctcagaacaactgaacagccggtggatcgaattctgccagttgctaagtgagagacttaactggctggagtatcagaacaacatcatcgctttctataatcagctacaacaattggagcagatgacaactactgctgaaaactggttgaaaatccaacccaccaccccatcagagccaacagcaattaaaagtcagttaaaaatttgtaaggatgaagtcaaccggctatcagatcttcaacctcaaattgaacgattaaaaattcaaagcatagccctgaaagagaaaggacaaggacccatgttcctggatgcagactttgtggcctttacaaatcattttaagcaagtcttttctgatgtgcaggccagagagaaagagctacagacaatttttgacactttgccaccaatgcgctatcaggagaccatgagtgccatcaggacatgggtccagcagtcagaaaccaaactctccatacctcaacttagtgtcaccgactatgaaatcatggagcagagactcggggaattgcaggctttacaaagttctctgcaagagcaacaaagtggcctatactatctcagcaccactgtgaaagagatgtcgaagaaagcgccctctgaaattagccggaaatatcaatcagaatttgaagaaattgagggacgctggaagaagctctcctcccagctggttgagcattgtcaaaagctagaggagcaaatgaataaactccgaaaaattcagaatcacatacaaaccctgaagaaatggatggctgaagttgatgtttttctgaaggaggaatggcctgcccttggggattcagaaattctaaaaaagcagctgaaacagtgcagacttttagtcagtgatattcagacaattcagcccagtctaaacagtgtcaatgaaggtgggcagaagataaagaatgaagcagagccagagtttgcttcgagacttgagacagaactcaaagaacttaacactcagtgggatcacatgtgccaacaggtctatgccagaaaggaggccttgaagggaggtttggagaaaactgtaagcctccagaaagatctatcagagatgcacgaatggatgacacaagctgaagaagagtatcttgagagagattttgaatataaaactccagatgaattacagaaagcagttgaagagatgaagagagctaaagaagaggcccaacaaaaagaagcgaaagtgaaactccttactgagtctgtaaatagtgtcatagctcaagctccacctgtagcacaagaggccttaaaaaaggaacttgaaactctaaccaccaactaccagtggctctgcactaggctgaatgggaaatgcaagactttggaagaagtttgggcatgttggcatgagttattgtcatacttggagaaagcaaacaagtggctaaatgaagtagaatttaaacttaaaaccactgaaaacattcctggcggagctgaggaaatctctgaggtgctagattcacttgaaaatttgatgcgacattcagaggataacccaaatcagattcgcatattggcacagaccctaacagatggcggagtcatggatgagctaatcaatgaggaacttgagacatttaattctcgttggagggaactacatgaagaggctgtaaggaggcaaaagttgcttgaacagagcatccagtctgcccaggagactgaaaaatccttacacttaatccaggagtccctcacattcattgacaagcagttggcagcttatattgcagacaaggtggacgcagctcaaatgcctcaggaagcccagaaaatccaatctgatttgacaagtcatgagatcagtttagaagaaatgaagaaacataatcaggggaaggaggctgcccaaagagtcctgtctcagattgatgttgcacagaaaaaattacaagatgtctccatgaagtttcgattattccagaaaccagccaattttgagcagcgtctacaagaaagtaagatgattttagatgaagtgaagatgcacttgcctgcattggaaacaaagagtgtggaacaggaagtagtacagtcacagctaaatcattgtgtgaacttgtataaaagtctgagtgaagtgaagtctgaagtggaaatggtgataaagactggacgtcagattgtacagaaaaagcagacggaaaatcccaaagaacttgatgaaagagtaacagctttgaaattgcattataatgagctgggagcaaaggtaacagaaagaaagcaacagttggagaaatgcttgaaattgtcccgtaagatgcgaaaggaaatgaatgtcttgacagaatggctggcagctacagatatggaattgacaaagagatcagcagttgaaggaatgcctagtaatttggattctgaagttgcctggggaaaggctactcaaaaagagattgagaaacagaaggtgcacctgaagagtatcacagaggtaggagaggccttgaaaacagttttgggcaagaaggagacgttggtggaagataaactcagtcttctgaatagtaactggatagctgtcacctcccgagcagaagagtggttaaatcttttgttggaataccagaaacacatggaaacttttgaccagaatgtggaccacatcacaaagtggatcattcaggctgacacacttttggatgaatcagagaaaaagaaaccccagcaaaaagaagacgtgcttaagcgtttaaaggcagaactgaatgacatacgcccaaaggtggactctacacgtgaccaagcagcaaacttgatggcaaaccgcggtgaccactgcaggaaattagtagagccccaaatctcagagctcaaccatcgatttgcagccatttcacacagaattaagactggaaaggcctccattcctttgaaggaattggagcagtttaactcagatatacaaaaattgcttgaaccactggaggctgaaattcagcagggggtgaatctgaaagaggaagacttcaataaagatatgaatgaagacaatgagggtactgtaaaagaattgttgcaaagaggagacaacttacaacaaagaatcacagatgagagaaagcgagaggaaataaagataaaacagcagctgttacagacaaaacataatgctctcaaggatttgaggtctcaaagaagaaaaaaggctctagaaatttctcatcagtggtatcagtacaagaggcaggctgatgatctcctgaaatgcttggatgacattgaaaaaaaattagccagcctacctgagcccagagatgaaaggaaaataaaggaaattgatcgggaattgcagaagaagaaagaggagctgaatgcagtgcgtaggcaagctgagggcttgtctgaggatggggccgcaatggcagtggagccaactcagatccagctcagcaagcgctggcgggaaattgagagcaaatttgctcagtttcgaagactcaactttgcacaaattcacactgtccgtgaagaaacgatgatggtgatgactgaagacatgcctttggaaatttcttatgtgccttctacttatttgactgaaatcactcatgtctcacaagccctattagaagtggaacaacttctcaatgctcctgacctctgtgctaaggactttgaagatctctttaagcaagaggagtctctgaagaatataaaagatagtctacaacaaagctcaggtcggattgacattattcatagcaagaagacagcagcattgcaaagtgcaacgcctgtggaaagggtgaagctacaggaagctctctcccagcttgatttccaatgggaaaaagttaacaaaatgtacaaggaccgacaagggcgatttgacagatctgttgagaaatggcggcgttttcattatgatataaagatatttaatcagtggctaacagaagctgaacagtttctcagaaagacacaaattcctgagaattgggaacatgctaaatacaaatggtatcttaaggaactccaggatggcattgggcagcggcaaactgttgtcagaacattgaatgcaactggggaagaaataattcagcaatcctcaaaaacagatgccagtattctacaggaaaaattgggaagcctgaatctgcggtggcaggaggtctgcaaacagctgtcagacagaaaaaagaggctagaagaacaaaagaatatcttgtcagaatttcaaagagatttaaatgaatttgttttatggttggaggaagcagataacattgctagtatcccacttgaacctggaaaagagcagcaactaaaagaaaagcttgagcaagtcaagttactggtggaagagttgcccctgcgccagggaattctcaaacaattaaatgaaactggaggacccgtgcttgtaagtgctcccataagcccagaagagcaagataaacttgaaaataagctcaagcagacaaatctccagtggataaaggtttccagagctttacctgagaaacaaggagaaattgaagctcaaataaaagaccttgggcagcttgaaaaaaagcttgaagaccttgaagagcagttaaatcatctgctgctgtggttatctcctattaggaatcagttggaaatttataaccaaccaaaccaagaaggaccatttgacgttaaggaaactgaaatagcagttcaagctaaacaaccggatgtggaagagattttgtctaaagggcagcatttgtacaaggaaaaaccagccactcagccagtgaagaggaagttagaagatctgagctctgagtggaaggcggtaaaccgtttacttcaagagctgagggcaaagcagcctgacctagctcctggactgaccactattggagcctctcctactcagactgttactctggtgacacaacctgtggttactaaggaaactgccatctccaaactagaaatgccatcttccttgatgttggaggtacctgctctggcagatttcaaccgggcttggacagaacttaccgactggctttctctgcttgatcaagttataaaatcacagagggtgatggtgggtgaccttgaggatatcaacgagatgatcatcaagcagaaggcaacaatgcaggatttggaacagaggcgtccccagttggaagaactcattaccgctgcccaaaatttgaaaaacaagaccagcaatcaagaggctagaacaatcattacggatcgaattgaaagaattcagaatcagtgggatgaagtacaagaacaccttcagaaccggaggcaacagttgaatgaaatgttaaaggattcaacacaatggctggaagctaaggaagaagctgagcaggtcttaggacaggccagagccaagcttgagtcatggaaggagggtccctatacagtagatgcaatccaaaagaaaatcacagaaaccaagcagttggccaaagacctccgccagtggcagacaaatgtagatgtggcaaatgacttggccctgaaacttctccgggattattctgcagatgataccagaaaagtccacatgataacagagaatatcaatgcctcttggagaagcattcataaaagggtgagtgagcgagaggctgctttggaagaaactcatagattactgcaacagttccccctggacctggaaaagtttcttgcctggcttacagaagctgaaacaactgccaatgtcctacaggatgctacccgtaaggaaaggctcctagaagactccaagggagtaaaagagctgatgaaacaatggcaagacctccaaggtgaaattgaagctcacacagatgtttatcacaacctggatgaaaacagccaaaaaatcctgagatccctggaaggttccgatgatgcagtcctgttacaaagacgtttggataacatgaacttcaagtggagtgaacttcggaaaaagtctctcaacattaggtcccatttggaagccagttctgaccagtggaagcgtctgcacctttctctgcaggaacttctggtgtggctacagctgaaagatgatgaattaagccggcaggcacctattggaggcgactttccagcagttcagaagcagaacgatgtacatagggccttcaagagggaattgaaaactaaagaacctgtaatcatgagtactcttgagactgtacgaatatttctgacagagcagcctttggaaggactagagaaactctaccaggagcccagagagctgcctcctgaggagagagcccagaatgtcactcggcttctacgaaagcaggctgaggaggtcaatactgagtgggaaaaattgaacctgcactccgctgactggcagagaaaaatagatgagacccttgaaagactccgggaacttcaagaggccacggatgagctggacctcaagctgcgccaagctgaggtgatcaagggatcctggcagcccgtgggcgatctcctcattgactctctccaagatcacctcgagaaagtcaaggcacttcgaggagaaattgcgcctctgaaagagaacgtgagccacgtcaatgaccttgctcgccagcttaccactttgggcattcagctctcaccgtataacctcagcactctggaagacctgaacaccagatggaagcttctgcaggtggccgtcgaggaccgagtcaggcagctgcatgaagcccacagggactttggtccagcatctcagcactttctttccacgtctgtccagggtccctgggagagagccatctcgccaaacaaagtgccctactatatcaaccacgagactcaaacaacttgctgggaccatcccaaaatgacagagctctaccagtctttagctgacctgaataatgtcagattctcagcttataggactgccatgaaactccgaagactgcagaaggccctttgcttggatctcttgagcctgtcagctgcatgtgatgccttggaccagcacaacctcaagcaaaatgaccagcccatggatatcctgcagattattaattgtttgaccactatttatgaccgcctggagcaagagcacaacaatttggtcaacgtccctctctgcgtggatatgtgtctgaactggctgctgaatgtttatgatacgggacgaacagggaggatccgtgtcctgtcttttaaaactggcatcatttccctgtgtaaagcacatttggaagacaagtacagataccttttcaagcaagtggcaagttcaacaggattttgtgaccagcgcaggctgggcctccttctgcatgattctatccaaattccaagacagttgggtgaagttgcatcctttgggggcagtaacattgagccaagtgtccggagctgcttccaatttgctaataataagccagagatcgaagcggccctcttcctagactggatgagactggaaccccagtccatggtgtggctgcccgtcctgcacagagtggctgctgcagaaactgccaagcatcaggccaaatgtaacatctgcaaagagtgtccaatcattggattcaggtacaggagtctaaagcactttaattatgacatctgccaaagctgctttttttctggtcgagttgcaaaaggccataaaatgcactatcccatggtggaatattgcactccgactacatcaggagaagatgttcgagactttgccaaggtactaaaaaacaaatttcgaaccaaaaggtattttgcgaagcatccccgaatgggctacctgccagtgcagactgtcttagagggggacaacatggaaactcccgttactctgatcaacttctggccagtagattctgcgcctgcctcgtcccctcagctttcacacgatgatactcattcacgcattgaacattatgctagcaggctagcagaaatggaaaacagcaatggatcttatctaaatgatagcatctctcctaatgagagcatagatgatgaacatttgttaatccagcattactgccaaagtttgaaccaggactcccccctgagccagcctcgtagtcctgcccagatcttgatttccttagagagtgaggaaagaggggagctagagagaatcctagcagatcttgaggaagaaaacaggaatctgcaagcagaatatgaccgtctaaagcagcagcacgaacataaaggcctgtccccactgccgtcccctcctgaaatgatgcccacctctccccagagtccccgggatgctgagctcattgctgaggccaagctactgcgtcaacacaaaggccgcctggaagccaggatgcaaatcctggaagaccacaataaacagctggagtcacagttacacaggctaaggcagctgctggagcaaccccaggcagaggccaaagtgaatggcacaacggtgtcctctccttctacctctctacagaggtccgacagcagtcagcctatgctgctccgagtggttggcagtcaaacttcggactccatgggtgaggaagatcttctcagtcctccccaggacacaagcacagggttagaggaggtgatggagcaactcaacaactccttccctagttcaagaggaagaaatacccctggaaagccaatgagagaggacacaatgtaggaagtcttttccacatggcagatgatttgggcagagcgatggagtccttagtatcagtcatgacagatgaagaaggagcagaataaatgttttacaactcctgattcccgcatggtttttataatattcatacaacaaagaggattagacagtaagagtttacaagaaataaatctatatttttgtgaagggtagtggtattatactgtagatttcagtagtttctaagtctgttattgttttgttaacaatggcaggttttacacgtctatgcaattgtacaaaaaagttataagaaaactacatgtaaaatcttgatagctaaataacttgccatttctttatatggaacgcattttgggttgtttaaaaatttataacagttataaagaaagattgtaaactaaagtgtgctttataaaaaaaagttgtttataaaaacccctaaaaacaaaacaaacacacacacacacacatacacacacacacacaaaactttgaggcagcgcattgttttgcatccttttggcgtgatatccatatgaaattcatggctttttctttttttgcatattaaagataagacttcctctaccaccacaccaaatgactactacacactgctcatttgagaactgtcagctgagtggggcaggcttgagttttcatttcatatatctatatgtctataagtatataaatactatagttatatagataaagagatacgaatttctatagactgactttttccattttttaaatgttcatgtcacatcctaatagaaagaaattacttctagtcagtcatccaggcttacctgcttggtctagaatggatttttcccggagccggaagccaggaggaaactacaccacactaaaacattgtctacagctccagatgtttctcattttaaacaactttccactgacaacgaaagtaaagtaaagtattggatttttttaaagggaacatgtgaatgaatacacaggacttattatatcagagtgagtaatcggttggttggttgattgattgattgattgatacattcagcttcctgctgctagcaatgccacgatttagatttaatgatgcttcagtggaaatcaatcagaaggtattctgaccttgtgaacatcagaaggtattttttaactcccaagcagtagcaggacgatgatagggctggagggctatggattcccagcccatccctgtgaaggagtaggccactctttaagtgaaggattggatgattgttcataatacataaagttctctgtaattacaactaaattattatgccctcttctcacagtcaaaaggaactgggtggtttggtttttgttgcttttttagatttattgtcccatgtgggatgagtttttaaatgccacaagacataatttaaaataaataaactttgggaaaaggtgtaaaacagtagccccatcacatttgtgatactgacaggtatcaacccagaagcccatgaactgtgtttccatcctttgcatttctctgcgagtagttccacacaggtttgtaagtaagtaagaaagaaggcaaattgattcaaatgttacaaaaaaacccttcttggtggattagacaggttaaatatataaacaaacaaacaaaaattgctcaaaaaagaggagaaaagctcaagaggaaaagctaaggactggtaggaaaaagctttactctttcatgccattttatttctttttgatttttaaatcattcattcaatagataccaccgtgtgacctataattttgcaaatctgttacctctgacatcaagtgtaattagcttttggagagtgggctgacatcaagtgtaattagcttttggagagtgggttttgtccattattaataattaattaattaacatcaaacacggcttctcatgctatttctacctcactttggttttggggtgttcctgataattgtgcacacctgagttcacagcttcaccacttgtccattgcgttattttctttttcctttataattctttctttttccttcataattttcaaaagaaaacccaaagctctaaggtaacaaattaccaaattacatgaagatttggtttttgtcttgcatttttttcctttatgtgacgctggaccttttctttacccaaggatttttaaaactcagatttaaaacaaggggttactttacatcctactaagaagtttaagtaagtaagtttcattctaaaatcagaggtaaatagagtgcataaataattttgttttaatctttttgtttttcttttagacacattagctctggagtgagtctgtcataatatttgaacaaaaattgagagctttattgctgcattttaagcataattaatttggacattatttcgtgttgtgttctttataaccaccaagtattaaactgtaaatcataatgtaactgaagcataaacatcacatggcatgttttgtcattgttttcaggtactgagttcttacttgagtatcataatatattgtgttttaacaccaacactgtaacatttacgaattatttttttaaacttcagttttactgcattttcacaacatatcagacttcaccaaatatatgccttactattgtattatagtactgctttactgtgtatctcaataaagcacgcagttatgttac

SEQ ID NO: 142737 - DNA, 7410 bp, Artificial Sequence
  derived and/or modified sequence
acactagcaatggcaaagctttgtgcggaggcattgctggctgctctgaactaaaagcatccgtggggaccgaaagaggtttttgcacaccttattaaggaactccaggatggcattgggcagcggcaaactgttgtcagaacattgaatgcaactggggaagaaataattcagcaatcctcaaaaacagatgccagtattctacaggaaaaattgggaagcctgaatctgcggtggcaggaggtctgcaaacagctgtcagacagaaaaaagaggctagaagaacaaaagaatatcttgtcagaatttcaaagagatttaaatgaatttgttttatggttggaggaagcagataacattgctagtatcccacttgaacctggaaaagagcagcaactaaaagaaaagcttgagcaagtcaagttactggtggaagagttgcccctgcgccagggaattctcaaacaattaaatgaaactggaggacccgtgcttgtaagtgctcccataagcccagaagagcaagataaacttgaaaataagctcaagcagacaaatctccagtggataaaggtttccagagctttacctgagaaacaaggagaaattgaagctcaaataaaagaccttgggcagcttgaaaaaaagcttgaagaccttgaagagcagttaaatcatctgctgctgtggttatctcctattaggaatcagttggaaatttataaccaaccaaaccaagaaggaccatttgacgttaaggaaactgaaatagcagttcaagctaaacaaccggatgtggaagagattttgtctaaagggcagcatttgtacaaggaaaaaccagccactcagccagtgaagaggaagttagaagatctgagctctgagtggaaggcggtaaaccgtttacttcaagagctgagggcaaagcagcctgacctagctcctggactgaccactattggagcctctcctactcagactgttactctggtgacacaacctgtggttactaaggaaactgccatctccaaactagaaatgccatcttccttgatgttggaggtacctgctctggcagatttcaaccgggcttggacagaacttaccgactggctttctctgcttgatcaagttataaaatcacagagggtgatggtgggtgaccttgaggatatcaacgagatgatcatcaagcagaaggcaacaatgcaggatttggaacagaggcgtccccagttggaagaactcattaccgctgcccaaaatttgaaaaacaagaccagcaatcaagaggctagaacaatcattacggatcgaattgaaagaattcagaatcagtgggatgaagtacaagaacaccttcagaaccggaggcaacagttgaatgaaatgttaaaggattcaacacaatggctggaagctaaggaagaagctgagcaggtcttaggacaggccagagccaagcttgagtcatggaaggagggtccctatacagtagatgcaatccaaaagaaaatcacagaaaccaagcagttggccaaagacctccgccagtggcagacaaatgtagatgtggcaaatgacttggccctgaaacttctccgggattattctgcagatgataccagaaaagtccacatgataacagagaatatcaatgcctcttggagaagcattcataaaagggtgagtgagcgagaggctgctttggaagaaactcatagattactgcaacagttccccctggacctggaaaagtttcttgcctggcttacagaagctgaaacaactgccaatgtcctacaggatgctacccgtaaggaaaggctcctagaagactccaagggagtaaaagagctgatgaaacaatggcaagacctccaaggtgaaattgaagctcacacagatgtttatcacaacctggatgaaaacagccaaaaaatcctgagatccctggaaggttccgatgatgcagtcctgttacaaagacgtttggataacatgaacttcaagtggagtgaacttcggaaaaagtctctcaacattaggtcccatttggaagccagttctgaccagtggaagcgtctgcacctttctctgcaggaacttctggtgtggctacagctgaaagatgatgaattaagccggcaggcacctattggaggcgactttccagcagttcagaagcagaacgatgtacatagggccttcaagagggaattgaaaactaaagaacctgtaatcatgagtactcttgagactgtacgaatatttctgacagagcagcctttggaaggactagagaaactctaccaggagcccagagagctgcctcctgaggagagagcccagaatgtcactcggcttctacgaaagcaggctgaggaggtcaatactgagtgggaaaaattgaacctgcactccgctgactggcagagaaaaatagatgagacccttgaaagactccgggaacttcaagaggccacggatgagctggacctcaagctgcgccaagctgaggtgatcaagggatcctggcagcccgtgggcgatctcctcattgactctctccaagatcacctcgagaaagtcaaggcacttcgaggagaaattgcgcctctgaaagagaacgtgagccacgtcaatgaccttgctcgccagcttaccactttgggcattcagctctcaccgtataacctcagcactctggaagacctgaacaccagatggaagcttctgcaggtggccgtcgaggaccgagtcaggcagctgcatgaagcccacagggactttggtccagcatctcagcactttctttccacgtctgtccagggtccctgggagagagccatctcgccaaacaaagtgccctactatatcaaccacgagactcaaacaacttgctgggaccatcccaaaatgacagagctctaccagtctttagctgacctgaataatgtcagattctcagcttataggactgccatgaaactccgaagactgcagaaggccctttgcttggatctcttgagcctgtcagctgcatgtgatgccttggaccagcacaacctcaagcaaaatgaccagcccatggatatcctgcagattattaattgtttgaccactatttatgaccgcctggagcaagagcacaacaatttggtcaacgtccctctctgcgtggatatgtgtctgaactggctgctgaatgtttatgatacgggacgaacagggaggatccgtgtcctgtcttttaaaactggcatcatttccctgtgtaaagcacatttggaagacaagtacagataccttttcaagcaagtggcaagttcaacaggattttgtgaccagcgcaggctgggcctccttctgcatgattctatccaaattccaagacagttgggtgaagttgcatcctttgggggcagtaacattgagccaagtgtccggagctgcttccaatttgctaataataagccagagatcgaagcggccctcttcctagactggatgagactggaaccccagtccatggtgtggctgcccgtcctgcacagagtggctgctgcagaaactgccaagcatcaggccaaatgtaacatctgcaaagagtgtccaatcattggattcaggtacaggagtctaaagcactttaattatgacatctgccaaagctgctttttttctggtcgagttgcaaaaggccataaaatgcactatcccatggtggaatattgcactccgactacatcaggagaagatgttcgagactttgccaaggtactaaaaaacaaatttcgaaccaaaaggtattttgcgaagcatccccgaatgggctacctgccagtgcagactgtcttagagggggacaacatggaaactcccgttactctgatcaacttctggccagtagattctgcgcctgcctcgtcccctcagctttcacacgatgatactcattcacgcattgaacattatgctagcaggctagcagaaatggaaaacagcaatggatcttatctaaatgatagcatctctcctaatgagagcatagatgatgaacatttgttaatccagcattactgccaaagtttgaaccaggactcccccctgagccagcctcgtagtcctgcccagatcttgatttccttagagagtgaggaaagaggggagctagagagaatcctagcagatcttgaggaagaaaacaggaatctgcaagcagaatatgaccgtctaaagcagcagcacgaacataaaggcctgtccccactgccgtcccctcctgaaatgatgcccacctctccccagagtccccgggatgctgagctcattgctgaggccaagctactgcgtcaacacaaaggccgcctggaagccaggatgcaaatcctggaagaccacaataaacagctggagtcacagttacacaggctaaggcagctgctggagcaaccccaggcagaggccaaagtgaatggcacaacggtgtcctctccttctacctctctacagaggtccgacagcagtcagcctatgctgctccgagtggttggcagtcaaacttcggactccatgggtgaggaagatcttctcagtcctccccaggacacaagcacagggttagaggaggtgatggagcaactcaacaactccttccctagttcaagaggaagaaatacccctggaaagccaatgagagaggacacaatgtaggaagtcttttccacatggcagatgatttgggcagagcgatggagtccttagtatcagtcatgacagatgaagaaggagcagaataaatgttttacaactcctgattcccgcatggtttttataatattcatacaacaaagaggattagacagtaagagtttacaagaaataaatctatatttttgtgaagggtagtggtattatactgtagatttcagtagtttctaagtctgttattgttttgttaacaatggcaggttttacacgtctatgcaattgtacaaaaaagttataagaaaactacatgtaaaatcttgatagctaaataacttgccatttctttatatggaacgcattttgggttgtttaaaaatttataacagttataaagaaagattgtaaactaaagtgtgctttataaaaaaaagttgtttataaaaacccctaaaaacaaaacaaacacacacacacacacatacacacacacacacaaaactttgaggcagcgcattgttttgcatccttttggcgtgatatccatatgaaattcatggctttttctttttttgcatattaaagataagacttcctctaccaccacaccaaatgactactacacactgctcatttgagaactgtcagctgagtggggcaggcttgagttttcatttcatatatctatatgtctataagtatataaatactatagttatatagataaagagatacgaatttctatagactgactttttccattttttaaatgttcatgtcacatcctaatagaaagaaattacttctagtcagtcatccaggcttacctgcttggtctagaatggatttttcccggagccggaagccaggaggaaactacaccacactaaaacattgtctacagctccagatgtttctcattttaaacaactttccactgacaacgaaagtaaagtaaagtattggatttttttaaagggaacatgtgaatgaatacacaggacttattatatcagagtgagtaatcggttggttggttgattgattgattgattgatacattcagcttcctgctgctagcaatgccacgatttagatttaatgatgcttcagtggaaatcaatcagaaggtattctgaccttgtgaacatcagaaggtattttttaactcccaagcagtagcaggacgatgatagggctggagggctatggattcccagcccatccctgtgaaggagtaggccactctttaagtgaaggattggatgattgttcataatacataaagttctctgtaattacaactaaattattatgccctcttctcacagtcaaaaggaactgggtggtttggtttttgttgcttttttagatttattgtcccatgtgggatgagtttttaaatgccacaagacataatttaaaataaataaactttgggaaaaggtgtaaaacagtagccccatcacatttgtgatactgacaggtatcaacccagaagcccatgaactgtgtttccatcctttgcatttctctgcgagtagttccacacaggtttgtaagtaagtaagaaagaaggcaaattgattcaaatgttacaaaaaaacccttcttggtggattagacaggttaaatatataaacaaacaaacaaaaattgctcaaaaaagaggagaaaagctcaagaggaaaagctaaggactggtaggaaaaagctttactctttcatgccattttatttctttttgatttttaaatcattcattcaatagataccaccgtgtgacctataattttgcaaatctgttacctctgacatcaagtgtaattagcttttggagagtgggctgacatcaagtgtaattagcttttggagagtgggttttgtccattattaataattaattaattaacatcaaacacggcttctcatgctatttctacctcactttggttttggggtgttcctgataattgtgcacacctgagttcacagcttcaccacttgtccattgcgttattttctttttcctttataattctttctttttccttcataattttcaaaagaaaacccaaagctctaaggtaacaaattaccaaattacatgaagatttggtttttgtcttgcatttttttcctttatgtgacgctggaccttttctttacccaaggatttttaaaactcagatttaaaacaaggggttactttacatcctactaagaagtttaagtaagtaagtttcattctaaaatcagaggtaaatagagtgcataaataattttgttttaatctttttgtttttcttttagacacattagctctggagtgagtctgtcataatatttgaacaaaaattgagagctttattgctgcattttaagcataattaatttggacattatttcgtgttgtgttctttataaccaccaagtattaaactgtaaatcataatgtaactgaagcataaacatcacatggcatgttttgtcattgttttcaggtactgagttcttacttgagtatcataatatattgtgttttaacaccaacactgtaacatttacgaattatttttttaaacttcagttttactgcattttcacaacatatcagacttcaccaaatatatgccttactattgtattatagtactgctttactgtgtatctcaataaagcacgcagttatgttac

SEQ ID NO: 142738 - DNA, 13993 bp, Artificial Sequence
  derived and/or modified sequence
tcctggcatcagttactgtgttgactcactcagtgttgggatcactcactttccccctacaggactcagatctgggaggcaattaccttcggagaaaaacgaataggaaaaactgaagtgttactttttttaaagctgctgaagtttgttggtttctcattgtttttaagcctactggagcaataaagtttgaagaacttttaccaggttttttttatcgctgccttgatatacacttttcaaaatgctttggtgggaagaagtagaggactgttatgaaagagaagatgttcaaaagaaaacattcacaaaatgggtaaatgcacaattttctaagtttgggaagcagcatattgagaacctcttcagtgacctacaggatgggaggcgcctcctagacctcctcgaaggcctgacagggcaaaaactgccaaaagaaaaaggatccacaagagttcatgccctgaacaatgtcaacaaggcactgcgggttttgcagaacaataatgttgatttagtgaatattggaagtactgacatcgtagatggaaatcataaactgactcttggtttgatttggaatataatcctccactggcaggtcaaaaatgtaatgaaaaatatcatggctggattgcaacaaaccaacagtgaaaagattctcctgagctgggtccgacaatcaactcgtaattatccacaggttaatgtaatcaacttcaccaccagctggtctgatggcctggctttgaatgctctcatccatagtcataggccagacctatttgactggaatagtgtggtttgccagcagtcagccacacaacgactggaacatgcattcaacatcgccagatatcaattaggcatagagaaactactcgatcctgaagatgttgataccacctatccagataagaagtccatcttaatgtacatcacatcactcttccaagttttgcctcaacaagtgagcattgaagccatccaggaagtggaaatgttgccaaggccacctaaagtgactaaagaagaacattttcagttacatcatcaaatgcactattctcaacagatcacggtcagtctagcacagggatatgagagaacttcttcccctaagcctcgattcaagagctatgcctacacacaggctgcttatgtcaccacctctgaccctacacggagcccatttccttcacagcatttggaagctcctgaagacaagtcatttggcagttcattgatggagagtgaagtaaacctggaccgttatcaaacagctttagaagaagtattatcgtggcttctttctgctgaggacacattgcaagcacaaggagagatttctaatgatgtggaagtggtgaaagaccagtttcatactcatgaggggtacatgatggatttgacagcccatcagggccgggttggtaatattctacaattgggaagtaagctgattggaacaggaaaattatcagaagatgaagaaactgaagtacaagagcagatgaatctcctaaattcaagatgggaatgcctcagggtagctagcatggaaaaacaaagcaatttacatagagttttaatggatctccagaatcagaaactgaaagagttgaatgactggctaacaaaaacagaagaaagaacaaggaaaatggaggaagagcctcttggacctgatcttgaagacctaaaacgccaagtacaacaacataaggtgcttcaagaagatctagaacaagaacaagtcagggtcaattctctcactcacatggtggtggtagttgatgaatctagtggagatcacgcaactgctgctttggaagaacaacttaaggtattgggagatcgatgggcaaacatctgtagatggacagaagaccgctgggttcttttacaagacatccttctcaaatggcaacgtcttactgaagaacagtgcctttttagtgcatggctttcagaaaaagaagatgcagtgaacaagattcacacaactggctttaaagatcaaaatgaaatgttatcaagtcttcaaaaactggccgttttaaaagcggatctagaaaagaaaaagcaatccatgggcaaactgtattcactcaaacaagatcttctttcaacactgaagaataagtcagtgacccagaagacggaagcatggctggataactttgcccggtgttgggataatttagtccaaaaacttgaaaagagtacagcacagatttcacaggctgtcaccaccactcagccatcactaacacagacaactgtaatggaaacagtaactacggtgaccacaagggaacagatcctggtaaagcatgctcaagaggaacttccaccaccacctccccaaaagaagaggcagattactgtggattctgaaattaggaaaaggttggatgttgatataactgaacttcacagctggattactcgctcagaagctgtgttgcagagtcctgaatttgcaatctttcggaaggaaggcaacttctcagacttaaaagaaaaagtcaatgccatagagcgagaaaaagctgagaagttcagaaaactgcaagatgccagcagatcagctcaggccctggtggaacagatggtgaatgagggtgttaatgcagatagcatcaaacaagcctcagaacaactgaacagccggtggatcgaattctgccagttgctaagtgagagacttaactggctggagtatcagaacaacatcatcgctttctataatcagctacaacaattggagcagatgacaactactgctgaaaactggttgaaaatccaacccaccaccccatcagagccaacagcaattaaaagtcagttaaaaatttgtaaggatgaagtcaaccggctatcagatcttcaacctcaaattgaacgattaaaaattcaaagcatagccctgaaagagaaaggacaaggacccatgttcctggatgcagactttgtggcctttacaaatcattttaagcaagtcttttctgatgtgcaggccagagagaaagagctacagacaatttttgacactttgccaccaatgcgctatcaggagaccatgagtgccatcaggacatgggtccagcagtcagaaaccaaactctccatacctcaacttagtgtcaccgactatgaaatcatggagcagagactcggggaattgcaggctttacaaagttctctgcaagagcaacaaagtggcctatactatctcagcaccactgtgaaagagatgtcgaagaaagcgccctctgaaattagccggaaatatcaatcagaatttgaagaaattgagggacgctggaagaagctctcctcccagctggttgagcattgtcaaaagctagaggagcaaatgaataaactccgaaaaattcagaatcacatacaaaccctgaagaaatggatggctgaagttgatgtttttctgaaggaggaatggcctgcccttggggattcagaaattctaaaaaagcagctgaaacagtgcagacttttagtcagtgatattcagacaattcagcccagtctaaacagtgtcaatgaaggtgggcagaagataaagaatgaagcagagccagagtttgcttcgagacttgagacagaactcaaagaacttaacactcagtgggatcacatgtgccaacaggtctatgccagaaaggaggccttgaagggaggtttggagaaaactgtaagcctccagaaagatctatcagagatgcacgaatggatgacacaagctgaagaagagtatcttgagagagattttgaatataaaactccagatgaattacagaaagcagttgaagagatgaagagagctaaagaagaggcccaacaaaaagaagcgaaagtgaaactccttactgagtctgtaaatagtgtcatagctcaagctccacctgtagcacaagaggccttaaaaaaggaacttgaaactctaaccaccaactaccagtggctctgcactaggctgaatgggaaatgcaagactttggaagaagtttgggcatgttggcatgagttattgtcatacttggagaaagcaaacaagtggctaaatgaagtagaatttaaacttaaaaccactgaaaacattcctggcggagctgaggaaatctctgaggtgctagattcacttgaaaatttgatgcgacattcagaggataacccaaatcagattcgcatattggcacagaccctaacagatggcggagtcatggatgagctaatcaatgaggaacttgagacatttaattctcgttggagggaactacatgaagaggctgtaaggaggcaaaagttgcttgaacagagcatccagtctgcccaggagactgaaaaatccttacacttaatccaggagtccctcacattcattgacaagcagttggcagcttatattgcagacaaggtggacgcagctcaaatgcctcaggaagcccagaaaatccaatctgatttgacaagtcatgagatcagtttagaagaaatgaagaaacataatcaggggaaggaggctgcccaaagagtcctgtctcagattgatgttgcacagaaaaaattacaagatgtctccatgaagtttcgattattccagaaaccagccaattttgagcagcgtctacaagaaagtaagatgattttagatgaagtgaagatgcacttgcctgcattggaaacaaagagtgtggaacaggaagtagtacagtcacagctaaatcattgtgtgaacttgtataaaagtctgagtgaagtgaagtctgaagtggaaatggtgataaagactggacgtcagattgtacagaaaaagcagacggaaaatcccaaagaacttgatgaaagagtaacagctttgaaattgcattataatgagctgggagcaaaggtaacagaaagaaagcaacagttggagaaatgcttgaaattgtcccgtaagatgcgaaaggaaatgaatgtcttgacagaatggctggcagctacagatatggaattgacaaagagatcagcagttgaaggaatgcctagtaatttggattctgaagttgcctggggaaaggctactcaaaaagagattgagaaacagaaggtgcacctgaagagtatcacagaggtaggagaggccttgaaaacagttttgggcaagaaggagacgttggtggaagataaactcagtcttctgaatagtaactggatagctgtcacctcccgagcagaagagtggttaaatcttttgttggaataccagaaacacatggaaacttttgaccagaatgtggaccacatcacaaagtggatcattcaggctgacacacttttggatgaatcagagaaaaagaaaccccagcaaaaagaagacgtgcttaagcgtttaaaggcagaactgaatgacatacgcccaaaggtggactctacacgtgaccaagcagcaaacttgatggcaaaccgcggtgaccactgcaggaaattagtagagccccaaatctcagagctcaaccatcgatttgcagccatttcacacagaattaagactggaaaggcctccattcctttgaaggaattggagcagtttaactcagatatacaaaaattgcttgaaccactggaggctgaaattcagcagggggtgaatctgaaagaggaagacttcaataaagatatgaatgaagacaatgagggtactgtaaaagaattgttgcaaagaggagacaacttacaacaaagaatcacagatgagagaaagcgagaggaaataaagataaaacagcagctgttacagacaaaacataatgctctcaaggatttgaggtctcaaagaagaaaaaaggctctagaaatttctcatcagtggtatcagtacaagaggcaggctgatgatctcctgaaatgcttggatgacattgaaaaaaaattagccagcctacctgagcccagagatgaaaggaaaataaaggaaattgatcgggaattgcagaagaagaaagaggagctgaatgcagtgcgtaggcaagctgagggcttgtctgaggatggggccgcaatggcagtggagccaactcagatccagctcagcaagcgctggcgggaaattgagagcaaatttgctcagtttcgaagactcaactttgcacaaattcacactgtccgtgaagaaacgatgatggtgatgactgaagacatgcctttggaaatttcttatgtgccttctacttatttgactgaaatcactcatgtctcacaagccctattagaagtggaacaacttctcaatgctcctgacctctgtgctaaggactttgaagatctctttaagcaagaggagtctctgaagaatataaaagatagtctacaacaaagctcaggtcggattgacattattcatagcaagaagacagcagcattgcaaagtgcaacgcctgtggaaagggtgaagctacaggaagctctctcccagcttgatttccaatgggaaaaagttaacaaaatgtacaaggaccgacaagggcgatttgacagatctgttgagaaatggcggcgttttcattatgatataaagatatttaatcagtggctaacagaagctgaacagtttctcagaaagacacaaattcctgagaattgggaacatgctaaatacaaatggtatcttatagctcttaaggatggcattgggcagcggcaaactgttgtcagaacattgaatgcaactggggaagaaataattcagcaatcctcaaaaacagatgccagtattctacaggaaaaattgggaagcctgaatctgcggtggcaggaggtctgcaaacagctgtcagacagaaaaaagaggctagaagaacaaaagaatatcttgtcagaatttcaaagagatttaaatgaatttgttttatggttggaggaagcagataacattgctagtatcccacttgaacctggaaaagagcagcaactaaaagaaaagcttgagcaagtcaagttactggtggaagagttgcccctgcgccagggaattctcaaacaattaaatgaaactggaggacccgtgcttgtaagtgctcccataagcccagaagagcaagataaacttgaaaataagctcaagcagacaaatctccagtggataaaggtttccagagctttacctgagaaacaaggagaaattgaagctcaaataaaagaccttgggcagcttgaaaaaaagcttgaagaccttgaagagcagttaaatcatctgctgctgtggttatctcctattaggaatcagttggaaatttataaccaaccaaaccaagaaggaccatttgacgttaaggaaactgaaatagcagttcaagctaaacaaccggatgtggaagagattttgtctaaagggcagcatttgtacaaggaaaaaccagccactcagccagtgaagaggaagttagaagatctgagctctgagtggaaggcggtaaaccgtttacttcaagagctgagggcaaagcagcctgacctagctcctggactgaccactattggagcctctcctactcagactgttactctggtgacacaacctgtggttactaaggaaactgccatctccaaactagaaatgccatcttccttgatgttggaggtacctgctctggcagatttcaaccgggcttggacagaacttaccgactggctttctctgcttgatcaagttataaaatcacagagggtgatggtgggtgaccttgaggatatcaacgagatgatcatcaagcagaaggcaacaatgcaggatttggaacagaggcgtccccagttggaagaactcattaccgctgcccaaaatttgaaaaacaagaccagcaatcaagaggctagaacaatcattacggatcgaattgaaagaattcagaatcagtgggatgaagtacaagaacaccttcagaaccggaggcaacagttgaatgaaatgttaaaggattcaacacaatggctggaagctaaggaagaagctgagcaggtcttaggacaggccagagccaagcttgagtcatggaaggagggtccctatacagtagatgcaatccaaaagaaaatcacagaaaccaagcagttggccaaagacctccgccagtggcagacaaatgtagatgtggcaaatgacttggccctgaaacttctccgggattattctgcagatgataccagaaaagtccacatgataacagagaatatcaatgcctcttggagaagcattcataaaagggtgagtgagcgagaggctgctttggaagaaactcatagattactgcaacagttccccctggacctggaaaagtttcttgcctggcttacagaagctgaaacaactgccaatgtcctacaggatgctacccgtaaggaaaggctcctagaagactccaagggagtaaaagagctgatgaaacaatggcaagacctccaaggtgaaattgaagctcacacagatgtttatcacaacctggatgaaaacagccaaaaaatcctgagatccctggaaggttccgatgatgcagtcctgttacaaagacgtttggataacatgaacttcaagtggagtgaacttcggaaaaagtctctcaacattaggtcccatttggaagccagttctgaccagtggaagcgtctgcacctttctctgcaggaacttctggtgtggctacagctgaaagatgatgaattaagccggcaggcacctattggaggcgactttccagcagttcagaagcagaacgatgtacatagggccttcaagagggaattgaaaactaaagaacctgtaatcatgagtactcttgagactgtacgaatatttctgacagagcagcctttggaaggactagagaaactctaccaggagcccagagagctgcctcctgaggagagagcccagaatgtcactcggcttctacgaaagcaggctgaggaggtcaatactgagtgggaaaaattgaacctgcactccgctgactggcagagaaaaatagatgagacccttgaaagactccgggaacttcaagaggccacggatgagctggacctcaagctgcgccaagctgaggtgatcaagggatcctggcagcccgtgggcgatctcctcattgactctctccaagatcacctcgagaaagtcaaggcacttcgaggagaaattgcgcctctgaaagagaacgtgagccacgtcaatgaccttgctcgccagcttaccactttgggcattcagctctcaccgtataacctcagcactctggaagacctgaacaccagatggaagcttctgcaggtggccgtcgaggaccgagtcaggcagctgcatgaagcccacagggactttggtccagcatctcagcactttctttccacgtctgtccagggtccctgggagagagccatctcgccaaacaaagtgccctactatatcaaccacgagactcaaacaacttgctgggaccatcccaaaatgacagagctctaccagtctttagctgacctgaataatgtcagattctcagcttataggactgccatgaaactccgaagactgcagaaggccctttgcttggatctcttgagcctgtcagctgcatgtgatgccttggaccagcacaacctcaagcaaaatgaccagcccatggatatcctgcagattattaattgtttgaccactatttatgaccgcctggagcaagagcacaacaatttggtcaacgtccctctctgcgtggatatgtgtctgaactggctgctgaatgtttatgatacgggacgaacagggaggatccgtgtcctgtcttttaaaactggcatcatttccctgtgtaaagcacatttggaagacaagtacagataccttttcaagcaagtggcaagttcaacaggattttgtgaccagcgcaggctgggcctccttctgcatgattctatccaaattccaagacagttgggtgaagttgcatcctttgggggcagtaacattgagccaagtgtccggagctgcttccaatttgctaataataagccagagatcgaagcggccctcttcctagactggatgagactggaaccccagtccatggtgtggctgcccgtcctgcacagagtggctgctgcagaaactgccaagcatcaggccaaatgtaacatctgcaaagagtgtccaatcattggattcaggtacaggagtctaaagcactttaattatgacatctgccaaagctgctttttttctggtcgagttgcaaaaggccataaaatgcactatcccatggtggaatattgcactccgactacatcaggagaagatgttcgagactttgccaaggtactaaaaaacaaatttcgaaccaaaaggtattttgcgaagcatccccgaatgggctacctgccagtgcagactgtcttagagggggacaacatggaaactcccgttactctgatcaacttctggccagtagattctgcgcctgcctcgtcccctcagctttcacacgatgatactcattcacgcattgaacattatgctagcaggctagcagaaatggaaaacagcaatggatcttatctaaatgatagcatctctcctaatgagagcatagatgatgaacatttgttaatccagcattactgccaaagtttgaaccaggactcccccctgagccagcctcgtagtcctgcccagatcttgatttccttagagagtgaggaaagaggggagctagagagaatcctagcagatcttgaggaagaaaacaggaatctgcaagcagaatatgaccgtctaaagcagcagcacgaacataaaggcctgtccccactgccgtcccctcctgaaatgatgcccacctctccccagagtccccgggatgctgagctcattgctgaggccaagctactgcgtcaacacaaaggccgcctggaagccaggatgcaaatcctggaagaccacaataaacagctggagtcacagttacacaggctaaggcagctgctggagcaaccccaggcagaggccaaagtgaatggcacaacggtgtcctctccttctacctctctacagaggtccgacagcagtcagcctatgctgctccgagtggttggcagtcaaacttcggactccatgggtgaggaagatcttctcagtcctccccaggacacaagcacagggttagaggaggtgatggagcaactcaacaactccttccctagttcaagaggaagaaatacccctggaaagccaatgagagaggacacaatgtaggaagtcttttccacatggcagatgatttgggcagagcgatggagtccttagtatcagtcatgacagatgaagaaggagcagaataaatgttttacaactcctgattcccgcatggtttttataatattcatacaacaaagaggattagacagtaagagtttacaagaaataaatctatatttttgtgaagggtagtggtattatactgtagatttcagtagtttctaagtctgttattgttttgttaacaatggcaggttttacacgtctatgcaattgtacaaaaaagttataagaaaactacatgtaaaatcttgatagctaaataacttgccatttctttatatggaacgcattttgggttgtttaaaaatttataacagttataaagaaagattgtaaactaaagtgtgctttataaaaaaaagttgtttataaaaacccctaaaaacaaaacaaacacacacacacacacatacacacacacacacaaaactttgaggcagcgcattgttttgcatccttttggcgtgatatccatatgaaattcatggctttttctttttttgcatattaaagataagacttcctctaccaccacaccaaatgactactacacactgctcatttgagaactgtcagctgagtggggcaggcttgagttttcatttcatatatctatatgtctataagtatataaatactatagttatatagataaagagatacgaatttctatagactgactttttccattttttaaatgttcatgtcacatcctaatagaaagaaattacttctagtcagtcatccaggcttacctgcttggtctagaatggatttttcccggagccggaagccaggaggaaactacaccacactaaaacattgtctacagctccagatgtttctcattttaaacaactttccactgacaacgaaagtaaagtaaagtattggatttttttaaagggaacatgtgaatgaatacacaggacttattatatcagagtgagtaatcggttggttggttgattgattgattgattgatacattcagcttcctgctgctagcaatgccacgatttagatttaatgatgcttcagtggaaatcaatcagaaggtattctgaccttgtgaacatcagaaggtattttttaactcccaagcagtagcaggacgatgatagggctggagggctatggattcccagcccatccctgtgaaggagtaggccactctttaagtgaaggattggatgattgttcataatacataaagttctctgtaattacaactaaattattatgccctcttctcacagtcaaaaggaactgggtggtttggtttttgttgcttttttagatttattgtcccatgtgggatgagtttttaaatgccacaagacataatttaaaataaataaactttgggaaaaggtgtaaaacagtagccccatcacatttgtgatactgacaggtatcaacccagaagcccatgaactgtgtttccatcctttgcatttctctgcgagtagttccacacaggtttgtaagtaagtaagaaagaaggcaaattgattcaaatgttacaaaaaaacccttcttggtggattagacaggttaaatatataaacaaacaaacaaaaattgctcaaaaaagaggagaaaagctcaagaggaaaagctaaggactggtaggaaaaagctttactctttcatgccattttatttctttttgatttttaaatcattcattcaatagataccaccgtgtgacctataattttgcaaatctgttacctctgacatcaagtgtaattagcttttggagagtgggctgacatcaagtgtaattagcttttggagagtgggttttgtccattattaataattaattaattaacatcaaacacggcttctcatgctatttctacctcactttggttttggggtgttcctgataattgtgcacacctgagttcacagcttcaccacttgtccattgcgttattttctttttcctttataattctttctttttccttcataattttcaaaagaaaacccaaagctctaaggtaacaaattaccaaattacatgaagatttggtttttgtcttgcatttttttcctttatgtgacgctggaccttttctttacccaaggatttttaaaactcagatttaaaacaaggggttactttacatcctactaagaagtttaagtaagtaagtttcattctaaaatcagaggtaaatagagtgcataaataattttgttttaatctttttgtttttcttttagacacattagctctggagtgagtctgtcataatatttgaacaaaaattgagagctttattgctgcattttaagcataattaatttggacattatttcgtgttgtgttctttataaccaccaagtattaaactgtaaatcataatgtaactgaagcataaacatcacatggcatgttttgtcattgttttcaggtactgagttcttacttgagtatcataatatattgtgttttaacaccaacactgtaacatttacgaattatttttttaaacttcagttttactgcattttcacaacatatcagacttcaccaaatatatgccttactattgtattatagtactgctttactgtgtatctcaataaagcacgcagttatgttac

SEQ ID NO: 142739 - protein, 3681 aa, Artificial Sequence
  derived and/or modified sequence
MSEVSSDEREDVQKKTFTKWVNAQFSKFGKQHIENLFSDLQDGRRLLDLLEGLTGQKLPKEKGSTRVHALNNVNKALRVLQNNNVDLVNIGSTDIVDGNHKLTLGLIWNIILHWQVKNVMKNIMAGLQQTNSEKILLSWVRQSTRNYPQVNVINFTTSWSDGLALNALIHSHRPDLFDWNSVVCQQSATQRLEHAFNIARYQLGIEKLLDPEDVDTTYPDKKSILMYITSLFQVLPQQVSIEAIQEVEMLPRPPKVTKEEHFQLHHQMHYSQQITVSLAQGYERTSSPKPRFKSYAYTQAAYVTTSDPTRSPFPSQHLEAPEDKSFGSSLMESEVNLDRYQTALEEVLSWLLSAEDTLQAQGEISNDVEVVKDQFHTHEGYMMDLTAHQGRVGNILQLGSKLIGTGKLSEDEETEVQEQMNLLNSRWECLRVASMEKQSNLHRVLMDLQNQKLKELNDWLTKTEERTRKMEEEPLGPDLEDLKRQVQQHKVLQEDLEQEQVRVNSLTHMVVVVDESSGDHATAALEEQLKVLGDRWANICRWTEDRWVLLQDILLKWQRLTEEQCLFSAWLSEKEDAVNKIHTTGFKDQNEMLSSLQKLAVLKADLEKKKQSMGKLYSLKQDLLSTLKNKSVTQKTEAWLDNFARCWDNLVQKLEKSTAQISQAVTTTQPSLTQTTVMETVTTVTTREQILVKHAQEELPPPPPQKKRQITVDSEIRKRLDVDITELHSWITRSEAVLQSPEFAIFRKEGNFSDLKEKVNAIEREKAEKFRKLQDASRSAQALVEQMVNEGVNADSIKQASEQLNSRWIEFCQLLSERLNWLEYQNNIIAFYNQLQQLEQMTTTAENWLKIQPTTPSEPTAIKSQLKICKDEVNRLSDLQPQIERLKIQSIALKEKGQGPMFLDADFVAFTNHFKQVFSDVQAREKELQTIFDTLPPMRYQETMSAIRTWVQQSETKLSIPQLSVTDYEIMEQRLGELQALQSSLQEQQSGLYYLSTTVKEMSKKAPSEISRKYQSEFEEIEGRWKKLSSQLVEHCQKLEEQMNKLRKIQNHIQTLKKWMAEVDVFLKEEWPALGDSEILKKQLKQCRLLVSDIQTIQPSLNSVNEGGQKIKNEAEPEFASRLETELKELNTQWDHMCQQVYARKEALKGGLEKTVSLQKDLSEMHEWMTQAEEEYLERDFEYKTPDELQKAVEEMKRAKEEAQQKEAKVKLLTESVNSVIAQAPPVAQEALKKELETLTTNYQWLCTRLNGKCKTLEEVWACWHELLSYLEKANKWLNEVEFKLKTTENIPGGAEEISEVLDSLENLMRHSEDNPNQIRILAQTLTDGGVMDELINEELETFNSRWRELHEEAVRRQKLLEQSIQSAQETEKSLHLIQESLTFIDKQLAAYIADKVDAAQMPQEAQKIQSDLTSHEISLEEMKKHNQGKEAAQRVLSQIDVAQKKLQDVSMKFRLFQKPANFEQRLQESKMILDEVKMHLPALETKSVEQEVVQSQLNHCVNLYKSLSEVKSEVEMVIKTGRQIVQKKQTENPKELDERVTALKLHYNELGAKVTERKQQLEKCLKLSRKMRKEMNVLTEWLAATDMELTKRSAVEGMPSNLDSEVAWGKATQKEIEKQKVHLKSITEVGEALKTVLGKKETLVEDKLSLLNSNWIAVTSRAEEWLNLLLEYQKHMETFDQNVDHITKWIIQADTLLDESEKKKPQQKEDVLKRLKAELNDIRPKVDSTRDQAANLMANRGDHCRKLVEPQISELNHRFAAISHRIKTGKASIPLKELEQFNSDIQKLLEPLEAEIQQGVNLKEEDFNKDMNEDNEGTVKELLQRGDNLQQRITDERKREEIKIKQQLLQTKHNALKDLRSQRRKKALEISHQWYQYKRQADDLLKCLDDIEKKLASLPEPRDERKIKEIDRELQKKKEELNAVRRQAEGLSEDGAAMAVEPTQIQLSKRWREIESKFAQFRRLNFAQIHTVREETMMVMTEDMPLEISYVPSTYLTEITHVSQALLEVEQLLNAPDLCAKDFEDLFKQEESLKNIKDSLQQSSGRIDIIHSKKTAALQSATPVERVKLQEALSQLDFQWEKVNKMYKDRQGRFDRSVEKWRRFHYDIKIFNQWLTEAEQFLRKTQIPENWEHAKYKWYLKELQDGIGQRQTVVRTLNATGEEIIQQSSKTDASILQEKLGSLNLRWQEVCKQLSDRKKRLEEQKNILSEFQRDLNEFVLWLEEADNIASIPLEPGKEQQLKEKLEQVKLLVEELPLRQGILKQLNETGGPVLVSAPISPEEQDKLENKLKQTNLQWIKVSRALPEKQGEIEAQIKDLGQLEKKLEDLEEQLNHLLLWLSPIRNQLEIYNQPNQEGPFDVKETEIAVQAKQPDVEEILSKGQHLYKEKPATQPVKRKLEDLSSEWKAVNRLLQELRAKQPDLAPGLTTIGASPTQTVTLVTQPVVTKETAISKLEMPSSLMLEVPALADFNRAWTELTDWLSLLDQVIKSQRVMVGDLEDINEMIIKQKATMQDLEQRRPQLEELITAAQNLKNKTSNQEARTIITDRIERIQNQWDEVQEHLQNRRQQLNEMLKDSTQWLEAKEEAEQVLGQARAKLESWKEGPYTVDAIQKKITETKQLAKDLRQWQTNVDVANDLALKLLRDYSADDTRKVHMITENINASWRSIHKRVSEREAALEETHRLLQQFPLDLEKFLAWLTEAETTANVLQDATRKERLLEDSKGVKELMKQWQDLQGEIEAHTDVYHNLDENSQKILRSLEGSDDAVLLQRRLDNMNFKWSELRKKSLNIRSHLEASSDQWKRLHLSLQELLVWLQLKDDELSRQAPIGGDFPAVQKQNDVHRAFKRELKTKEPVIMSTLETVRIFLTEQPLEGLEKLYQEPRELPPEERAQNVTRLLRKQAEEVNTEWEKLNLHSADWQRKIDETLERLRELQEATDELDLKLRQAEVIKGSWQPVGDLLIDSLQDHLEKVKALRGEIAPLKENVSHVNDLARQLTTLGIQLSPYNLSTLEDLNTRWKLLQVAVEDRVRQLHEAHRDFGPASQHFLSTSVQGPWERAISPNKVPYYINHETQTTCWDHPKMTELYQSLADLNNVRFSAYRTAMKLRRLQKALCLDLLSLSAACDALDQHNLKQNDQPMDILQIINCLTTIYDRLEQEHNNLVNVPLCVDMCLNWLLNVYDTGRTGRIRVLSFKTGIISLCKAHLEDKYRYLFKQVASSTGFCDQRRLGLLLHDSIQIPRQLGEVASFGGSNIEPSVRSCFQFANNKPEIEAALFLDWMRLEPQSMVWLPVLHRVAAAETAKHQAKCNICKECPIIGFRYRSLKHFNYDICQSCFFSGRVAKGHKMHYPMVEYCTPTTSGEDVRDFAKVLKNKFRTKRYFAKHPRMGYLPVQTVLEGDNMETPVTLINFWPVDSAPASSPQLSHDDTHSRIEHYASRLAEMENSNGSYLNDSISPNESIDDEHLLIQHYCQSLNQDSPLSQPRSPAQILISLESEERGELERILADLEEENRNLQAEYDRLKQQHEHKGLSPLPSPPEMMPTSPQSPRDAELIAEAKLLRQHKGRLEARMQILEDHNKQLESQLHRLRQLLEQPQAEAKVNGTTVSSPSTSLQRSDSSQPMLLRVVGSQTSDSMGEEDLLSPPQDTSTGLEEVMEQLNNSFPSSRGRNTPGKPMREDTM

SEQ ID NO: 142740 - protein, 3677 aa, Artificial Sequence
  derived and/or modified sequence
ILDEREDVQKKTFTKWVNAQFSKFGKQHIENLFSDLQDGRRLLDLLEGLTGQKLPKEKGSTRVHALNNVNKALRVLQNNNVDLVNIGSTDIVDGNHKLTLGLIWNIILHWQVKNVMKNIMAGLQQTNSEKILLSWVRQSTRNYPQVNVINFTTSWSDGLALNALIHSHRPDLFDWNSVVCQQSATQRLEHAFNIARYQLGIEKLLDPEDVDTTYPDKKSILMYITSLFQVLPQQVSIEAIQEVEMLPRPPKVTKEEHFQLHHQMHYSQQITVSLAQGYERTSSPKPRFKSYAYTQAAYVTTSDPTRSPFPSQHLEAPEDKSFGSSLMESEVNLDRYQTALEEVLSWLLSAEDTLQAQGEISNDVEVVKDQFHTHEGYMMDLTAHQGRVGNILQLGSKLIGTGKLSEDEETEVQEQMNLLNSRWECLRVASMEKQSNLHRVLMDLQNQKLKELNDWLTKTEERTRKMEEEPLGPDLEDLKRQVQQHKVLQEDLEQEQVRVNSLTHMVVVVDESSGDHATAALEEQLKVLGDRWANICRWTEDRWVLLQDILLKWQRLTEEQCLFSAWLSEKEDAVNKIHTTGFKDQNEMLSSLQKLAVLKADLEKKKQSMGKLYSLKQDLLSTLKNKSVTQKTEAWLDNFARCWDNLVQKLEKSTAQISQAVTTTQPSLTQTTVMETVTTVTTREQILVKHAQEELPPPPPQKKRQITVDSEIRKRLDVDITELHSWITRSEAVLQSPEFAIFRKEGNFSDLKEKVNAIEREKAEKFRKLQDASRSAQALVEQMVNEGVNADSIKQASEQLNSRWIEFCQLLSERLNWLEYQNNIIAFYNQLQQLEQMTTTAENWLKIQPTTPSEPTAIKSQLKICKDEVNRLSDLQPQIERLKIQSIALKEKGQGPMFLDADFVAFTNHFKQVFSDVQAREKELQTIFDTLPPMRYQETMSAIRTWVQQSETKLSIPQLSVTDYEIMEQRLGELQALQSSLQEQQSGLYYLSTTVKEMSKKAPSEISRKYQSEFEEIEGRWKKLSSQLVEHCQKLEEQMNKLRKIQNHIQTLKKWMAEVDVFLKEEWPALGDSEILKKQLKQCRLLVSDIQTIQPSLNSVNEGGQKIKNEAEPEFASRLETELKELNTQWDHMCQQVYARKEALKGGLEKTVSLQKDLSEMHEWMTQAEEEYLERDFEYKTPDELQKAVEEMKRAKEEAQQKEAKVKLLTESVNSVIAQAPPVAQEALKKELETLTTNYQWLCTRLNGKCKTLEEVWACWHELLSYLEKANKWLNEVEFKLKTTENIPGGAEEISEVLDSLENLMRHSEDNPNQIRILAQTLTDGGVMDELINEELETFNSRWRELHEEAVRRQKLLEQSIQSAQETEKSLHLIQESLTFIDKQLAAYIADKVDAAQMPQEAQKIQSDLTSHEISLEEMKKHNQGKEAAQRVLSQIDVAQKKLQDVSMKFRLFQKPANFEQRLQESKMILDEVKMHLPALETKSVEQEVVQSQLNHCVNLYKSLSEVKSEVEMVIKTGRQIVQKKQTENPKELDERVTALKLHYNELGAKVTERKQQLEKCLKLSRKMRKEMNVLTEWLAATDMELTKRSAVEGMPSNLDSEVAWGKATQKEIEKQKVHLKSITEVGEALKTVLGKKETLVEDKLSLLNSNWIAVTSRAEEWLNLLLEYQKHMETFDQNVDHITKWIIQADTLLDESEKKKPQQKEDVLKRLKAELNDIRPKVDSTRDQAANLMANRGDHCRKLVEPQISELNHRFAAISHRIKTGKASIPLKELEQFNSDIQKLLEPLEAEIQQGVNLKEEDFNKDMNEDNEGTVKELLQRGDNLQQRITDERKREEIKIKQQLLQTKHNALKDLRSQRRKKALEISHQWYQYKRQADDLLKCLDDIEKKLASLPEPRDERKIKEIDRELQKKKEELNAVRRQAEGLSEDGAAMAVEPTQIQLSKRWREIESKFAQFRRLNFAQIHTVREETMMVMTEDMPLEISYVPSTYLTEITHVSQALLEVEQLLNAPDLCAKDFEDLFKQEESLKNIKDSLQQSSGRIDIIHSKKTAALQSATPVERVKLQEALSQLDFQWEKVNKMYKDRQGRFDRSVEKWRRFHYDIKIFNQWLTEAEQFLRKTQIPENWEHAKYKWYLKELQDGIGQRQTVVRTLNATGEEIIQQSSKTDASILQEKLGSLNLRWQEVCKQLSDRKKRLEEQKNILSEFQRDLNEFVLWLEEADNIASIPLEPGKEQQLKEKLEQVKLLVEELPLRQGILKQLNETGGPVLVSAPISPEEQDKLENKLKQTNLQWIKVSRALPEKQGEIEAQIKDLGQLEKKLEDLEEQLNHLLLWLSPIRNQLEIYNQPNQEGPFDVKETEIAVQAKQPDVEEILSKGQHLYKEKPATQPVKRKLEDLSSEWKAVNRLLQELRAKQPDLAPGLTTIGASPTQTVTLVTQPVVTKETAISKLEMPSSLMLEVPALADFNRAWTELTDWLSLLDQVIKSQRVMVGDLEDINEMIIKQKATMQDLEQRRPQLEELITAAQNLKNKTSNQEARTIITDRIERIQNQWDEVQEHLQNRRQQLNEMLKDSTQWLEAKEEAEQVLGQARAKLESWKEGPYTVDAIQKKITETKQLAKDLRQWQTNVDVANDLALKLLRDYSADDTRKVHMITENINASWRSIHKRVSEREAALEETHRLLQQFPLDLEKFLAWLTEAETTANVLQDATRKERLLEDSKGVKELMKQWQDLQGEIEAHTDVYHNLDENSQKILRSLEGSDDAVLLQRRLDNMNFKWSELRKKSLNIRSHLEASSDQWKRLHLSLQELLVWLQLKDDELSRQAPIGGDFPAVQKQNDVHRAFKRELKTKEPVIMSTLETVRIFLTEQPLEGLEKLYQEPRELPPEERAQNVTRLLRKQAEEVNTEWEKLNLHSADWQRKIDETLERLRELQEATDELDLKLRQAEVIKGSWQPVGDLLIDSLQDHLEKVKALRGEIAPLKENVSHVNDLARQLTTLGIQLSPYNLSTLEDLNTRWKLLQVAVEDRVRQLHEAHRDFGPASQHFLSTSVQGPWERAISPNKVPYYINHETQTTCWDHPKMTELYQSLADLNNVRFSAYRTAMKLRRLQKALCLDLLSLSAACDALDQHNLKQNDQPMDILQIINCLTTIYDRLEQEHNNLVNVPLCVDMCLNWLLNVYDTGRTGRIRVLSFKTGIISLCKAHLEDKYRYLFKQVASSTGFCDQRRLGLLLHDSIQIPRQLGEVASFGGSNIEPSVRSCFQFANNKPEIEAALFLDWMRLEPQSMVWLPVLHRVAAAETAKHQAKCNICKECPIIGFRYRSLKHFNYDICQSCFFSGRVAKGHKMHYPMVEYCTPTTSGEDVRDFAKVLKNKFRTKRYFAKHPRMGYLPVQTVLEGDNMETPVTLINFWPVDSAPASSPQLSHDDTHSRIEHYASRLAEMENSNGSYLNDSISPNESIDDEHLLIQHYCQSLNQDSPLSQPRSPAQILISLESEERGELERILADLEEENRNLQAEYDRLKQQHEHKGLSPLPSPPEMMPTSPQSPRDAELIAEAKLLRQHKGRLEARMQILEDHNKQLESQLHRLRQLLEQPQAEAKVNGTTVSSPSTSLQRSDSSQPMLLRVVGSQTSDSMGEEDLLSPPQDTSTGLEEVMEQLNNSFPSSRGRNTPGKPMREDTP

SEQ ID NO: 142741 - protein, 3562 aa, Artificial Sequence
  derived and/or modified sequence
MKNIMAGLQQTNSEKILLSWVRQSTRNYPQVNVINFTTSWSDGLALNALIHSHRPDLFDWNSVVCQQSATQRLEHAFNIARYQLGIEKLLDPEDVDTTYPDKKSILMYITSLFQVLPQQVSIEAIQEVEMLPRPPKVTKEEHFQLHHQMHYSQQITVSLAQGYERTSSPKPRFKSYAYTQAAYVTTSDPTRSPFPSQHLEAPEDKSFGSSLMESEVNLDRYQTALEEVLSWLLSAEDTLQAQGEISNDVEVVKDQFHTHEGYMMDLTAHQGRVGNILQLGSKLIGTGKLSEDEETEVQEQMNLLNSRWECLRVASMEKQSNLHRVLMDLQNQKLKELNDWLTKTEERTRKMEEEPLGPDLEDLKRQVQQHKVLQEDLEQEQVRVNSLTHMVVVVDESSGDHATAALEEQLKVLGDRWANICRWTEDRWVLLQDILLKWQRLTEEQCLFSAWLSEKEDAVNKIHTTGFKDQNEMLSSLQKLAVLKADLEKKKQSMGKLYSLKQDLLSTLKNKSVTQKTEAWLDNFARCWDNLVQKLEKSTAQISQAVTTTQPSLTQTTVMETVTTVTTREQILVKHAQEELPPPPPQKKRQITVDSEIRKRLDVDITELHSWITRSEAVLQSPEFAIFRKEGNFSDLKEKVNAIEREKAEKFRKLQDASRSAQALVEQMVNEGVNADSIKQASEQLNSRWIEFCQLLSERLNWLEYQNNIIAFYNQLQQLEQMTTTAENWLKIQPTTPSEPTAIKSQLKICKDEVNRLSDLQPQIERLKIQSIALKEKGQGPMFLDADFVAFTNHFKQVFSDVQAREKELQTIFDTLPPMRYQETMSAIRTWVQQSETKLSIPQLSVTDYEIMEQRLGELQALQSSLQEQQSGLYYLSTTVKEMSKKAPSEISRKYQSEFEEIEGRWKKLSSQLVEHCQKLEEQMNKLRKIQNHIQTLKKWMAEVDVFLKEEWPALGDSEILKKQLKQCRLLVSDIQTIQPSLNSVNEGGQKIKNEAEPEFASRLETELKELNTQWDHMCQQVYARKEALKGGLEKTVSLQKDLSEMHEWMTQAEEEYLERDFEYKTPDELQKAVEEMKRAKEEAQQKEAKVKLLTESVNSVIAQAPPVAQEALKKELETLTTNYQWLCTRLNGKCKTLEEVWACWHELLSYLEKANKWLNEVEFKLKTTENIPGGAEEISEVLDSLENLMRHSEDNPNQIRILAQTLTDGGVMDELINEELETFNSRWRELHEEAVRRQKLLEQSIQSAQETEKSLHLIQESLTFIDKQLAAYIADKVDAAQMPQEAQKIQSDLTSHEISLEEMKKHNQGKEAAQRVLSQIDVAQKKLQDVSMKFRLFQKPANFEQRLQESKMILDEVKMHLPALETKSVEQEVVQSQLNHCVNLYKSLSEVKSEVEMVIKTGRQIVQKKQTENPKELDERVTALKLHYNELGAKVTERKQQLEKCLKLSRKMRKEMNVLTEWLAATDMELTKRSAVEGMPSNLDSEVAWGKATQKEIEKQKVHLKSITEVGEALKTVLGKKETLVEDKLSLLNSNWIAVTSRAEEWLNLLLEYQKHMETFDQNVDHITKWIIQADTLLDESEKKKPQQKEDVLKRLKAELNDIRPKVDSTRDQAANLMANRGDHCRKLVEPQISELNHRFAAISHRIKTGKASIPLKELEQFNSDIQKLLEPLEAEIQQGVNLKEEDFNKDMNEDNEGTVKELLQRGDNLQQRITDERKREEIKIKQQLLQTKHNALKDLRSQRRKKALEISHQWYQYKRQADDLLKCLDDIEKKLASLPEPRDERKIKEIDRELQKKKEELNAVRRQAEGLSEDGAAMAVEPTQIQLSKRWREIESKFAQFRRLNFAQIHTVREETMMVMTEDMPLEISYVPSTYLTEITHVSQALLEVEQLLNAPDLCAKDFEDLFKQEESLKNIKDSLQQSSGRIDIIHSKKTAALQSATPVERVKLQEALSQLDFQWEKVNKMYKDRQGRFDRSVEKWRRFHYDIKIFNQWLTEAEQFLRKTQIPENWEHAKYKWYLIALKDGIGQRQTVVRTLNATGEEIIQQSSKTDASILQEKLGSLNLRWQEVCKQLSDRKKRLEEQKNILSEFQRDLNEFVLWLEEADNIASIPLEPGKEQQLKEKLEQVKLLVEELPLRQGILKQLNETGGPVLVSAPISPEEQDKLENKLKQTNLQWIKVSRALPEKQGEIEAQIKDLGQLEKKLEDLEEQLNHLLLWLSPIRNQLEIYNQPNQEGPFDVKETEIAVQAKQPDVEEILSKGQHLYKEKPATQPVKRKLEDLSSEWKAVNRLLQELRAKQPDLAPGLTTIGASPTQTVTLVTQPVVTKETAISKLEMPSSLMLEVPALADFNRAWTELTDWLSLLDQVIKSQRVMVGDLEDINEMIIKQKATMQDLEQRRPQLEELITAAQNLKNKTSNQEARTIITDRIERIQNQWDEVQEHLQNRRQQLNEMLKDSTQWLEAKEEAEQVLGQARAKLESWKEGPYTVDAIQKKITETKQLAKDLRQWQTNVDVANDLALKLLRDYSADDTRKVHMITENINASWRSIHKRVSEREAALEETHRLLQQFPLDLEKFLAWLTEAETTANVLQDATRKERLLEDSKGVKELMKQWQDLQGEIEAHTDVYHNLDENSQKILRSLEGSDDAVLLQRRLDNMNFKWSELRKKSLNIRSHLEASSDQWKRLHLSLQELLVWLQLKDDELSRQAPIGGDFPAVQKQNDVHRAFKRELKTKEPVIMSTLETVRIFLTEQPLEGLEKLYQEPRELPPEERAQNVTRLLRKQAEEVNTEWEKLNLHSADWQRKIDETLERLRELQEATDELDLKLRQAEVIKGSWQPVGDLLIDSLQDHLEKVKALRGEIAPLKENVSHVNDLARQLTTLGIQLSPYNLSTLEDLNTRWKLLQVAVEDRVRQLHEAHRDFGPASQHFLSTSVQGPWERAISPNKVPYYINHETQTTCWDHPKMTELYQSLADLNNVRFSAYRTAMKLRRLQKALCLDLLSLSAACDALDQHNLKQNDQPMDILQIINCLTTIYDRLEQEHNNLVNVPLCVDMCLNWLLNVYDTGRTGRIRVLSFKTGIISLCKAHLEDKYRYLFKQVASSTGFCDQRRLGLLLHDSIQIPRQLGEVASFGGSNIEPSVRSCFQFANNKPEIEAALFLDWMRLEPQSMVWLPVLHRVAAAETAKHQAKCNICKECPIIGFRYRSLKHFNYDICQSCFFSGRVAKGHKMHYPMVEYCTPTTSGEDVRDFAKVLKNKFRTKRYFAKHPRMGYLPVQTVLEGDNMETPVTLINFWPVDSAPASSPQLSHDDTHSRIEHYASRLAEMENSNGSYLNDSISPNESIDDEHLLIQHYCQSLNQDSPLSQPRSPAQILISLESEERGELERILADLEEENRNLQAEYDRLKQQHEHKGLSPLPSPPEMMPTSPQSPRDAELIAEAKLLRQHKGRLEARMQILEDHNKQLESQLHRLRQLLEQPQAEAKVNGTTVSSPSTSLQRSDSSQPMLLRVVGSQTSDSMGEEDLLSPPQDTSTGLEEVMEQLNNSFPSSRGRNTPGKPMREDTM

SEQ ID NO: 142742 - DNA, 14000 bp, Artificial Sequence
  derived and/or modified sequence
atgctgtctgtgaagctgaatctgtgagaacacctcactattcacggcaaccggagtggaagaaacaggtgcaaaaagattgtgtgtttgtctgcttttgtgaggctggtcagagattctgtgcctgctttatctgtgcttggctatgactctacctccaggtttaccataccccatagaatgtgtaagagaaaagtaccaacagggaaatcagcaaaaagctttcctatgaaggtgtgtagccagcctccgcagaatttgaaatgtctgaggtctcatctgatgaaagagaagatgttcaaaagaaaacattcacaaaatgggtaaatgcacaattttctaagtttgggaagcagcatattgagaacctcttcagtgacctacaggatgggaggcgcctcctagacctcctcgaaggcctgacagggcaaaaactgccaaaagaaaaaggatccacaagagttcatgccctgaacaatgtcaacaaggcactgcgggttttgcagaacaataatgttgatttagtgaatattggaagtactgacatcgtagatggaaatcataaactgactcttggtttgatttggaatataatcctccactggcaggtcaaaaatgtaatgaaaaatatcatggctggattgcaacaaaccaacagtgaaaagattctcctgagctgggtccgacaatcaactcgtaattatccacaggttaatgtaatcaacttcaccaccagctggtctgatggcctggctttgaatgctctcatccatagtcataggccagacctatttgactggaatagtgtggtttgccagcagtcagccacacaacgactggaacatgcattcaacatcgccagatatcaattaggcatagagaaactactcgatcctgaagatgttgataccacctatccagataagaagtccatcttaatgtacatcacatcactcttccaagttttgcctcaacaagtgagcattgaagccatccaggaagtggaaatgttgccaaggccacctaaagtgactaaagaagaacattttcagttacatcatcaaatgcactattctcaacagatcacggtcagtctagcacagggatatgagagaacttcttcccctaagcctcgattcaagagctatgcctacacacaggctgcttatgtcaccacctctgaccctacacggagcccatttccttcacagcatttggaagctcctgaagacaagtcatttggcagttcattgatggagagtgaagtaaacctggaccgttatcaaacagctttagaagaagtattatcgtggcttctttctgctgaggacacattgcaagcacaaggagagatttctaatgatgtggaagtggtgaaagaccagtttcatactcatgaggggtacatgatggatttgacagcccatcagggccgggttggtaatattctacaattgggaagtaagctgattggaacaggaaaattatcagaagatgaagaaactgaagtacaagagcagatgaatctcctaaattcaagatgggaatgcctcagggtagctagcatggaaaaacaaagcaatttacatagagttttaatggatctccagaatcagaaactgaaagagttgaatgactggctaacaaaaacagaagaaagaacaaggaaaatggaggaagagcctcttggacctgatcttgaagacctaaaacgccaagtacaacaacataaggtgcttcaagaagatctagaacaagaacaagtcagggtcaattctctcactcacatggtggtggtagttgatgaatctagtggagatcacgcaactgctgctttggaagaacaacttaaggtattgggagatcgatgggcaaacatctgtagatggacagaagaccgctgggttcttttacaagacatccttctcaaatggcaacgtcttactgaagaacagtgcctttttagtgcatggctttcagaaaaagaagatgcagtgaacaagattcacacaactggctttaaagatcaaaatgaaatgttatcaagtcttcaaaaactggccgttttaaaagcggatctagaaaagaaaaagcaatccatgggcaaactgtattcactcaaacaagatcttctttcaacactgaagaataagtcagtgacccagaagacggaagcatggctggataactttgcccggtgttgggataatttagtccaaaaacttgaaaagagtacagcacagatttcacaggctgtcaccaccactcagccatcactaacacagacaactgtaatggaaacagtaactacggtgaccacaagggaacagatcctggtaaagcatgctcaagaggaacttccaccaccacctccccaaaagaagaggcagattactgtggattctgaaattaggaaaaggttggatgttgatataactgaacttcacagctggattactcgctcagaagctgtgttgcagagtcctgaatttgcaatctttcggaaggaaggcaacttctcagacttaaaagaaaaagtcaatgccatagagcgagaaaaagctgagaagttcagaaaactgcaagatgccagcagatcagctcaggccctggtggaacagatggtgaatgagggtgttaatgcagatagcatcaaacaagcctcagaacaactgaacagccggtggatcgaattctgccagttgctaagtgagagacttaactggctggagtatcagaacaacatcatcgctttctataatcagctacaacaattggagcagatgacaactactgctgaaaactggttgaaaatccaacccaccaccccatcagagccaacagcaattaaaagtcagttaaaaatttgtaaggatgaagtcaaccggctatcaggtcttcaacctcaaattgaacgattaaaaattcaaagcatagccctgaaagagaaaggacaaggacccatgttcctggatgcagactttgtggcctttacaaatcattttaagcaagtcttttctgatgtgcaggccagagagaaagagctacagacaatttttgacactttgccaccaatgcgctatcaggagaccatgagtgccatcaggacatgggtccagcagtcagaaaccaaactctccatacctcaacttagtgtcaccgactatgaaatcatggagcagagactcggggaattgcaggctttacaaagttctctgcaagagcaacaaagtggcctatactatctcagcaccactgtgaaagagatgtcgaagaaagcgccctctgaaattagccggaaatatcaatcagaatttgaagaaattgagggacgctggaagaagctctcctcccagctggttgagcattgtcaaaagctagaggagcaaatgaataaactccgaaaaattcagaatcacatacaaaccctgaagaaatggatggctgaagttgatgtttttctgaaggaggaatggcctgcccttggggattcagaaattctaaaaaagcagctgaaacagtgcagacttttagtcagtgatattcagacaattcagcccagtctaaacagtgtcaatgaaggtgggcagaagataaagaatgaagcagagccagagtttgcttcgagacttgagacagaactcaaagaacttaacactcagtgggatcacatgtgccaacaggtctatgccagaaaggaggccttgaagggaggtttggagaaaactgtaagcctccagaaagatctatcagagatgcacgaatggatgacacaagctgaagaagagtatcttgagagagattttgaatataaaactccagatgaattacagaaagcagttgaagagatgaagagagctaaagaagaggcccaacaaaaagaagcgaaagtgaaactccttactgagtctgtaaatagtgtcatagctcaagctccacctgtagcacaagaggccttaaaaaaggaacttgaaactctaaccaccaactaccagtggctctgcactaggctgaatgggaaatgcaagactttggaagaagtttgggcatgttggcatgagttattgtcatacttggagaaagcaaacaagtggctaaatgaagtagaatttaaacttaaaaccactgaaaacattcctggcggagctgaggaaatctctgaggtgctagattcacttgaaaatttgatgcgacattcagaggataacccaaatcagattcgcatattggcacagaccctaacagatggcggagtcatggatgagctaatcaatgaggaacttgagacatttaattctcgttggagggaactacatgaagaggctgtaaggaggcaaaagttgcttgaacagagcatccagtctgcccaggagactgaaaaatccttacacttaatccaggagtccctcacattcattgacaagcagttggcagcttatattgcagacaaggtggacgcagctcaaatgcctcaggaagcccagaaaatccaatctgatttgacaagtcatgagatcagtttagaagaaatgaagaaacataatcaggggaaggaggctgcccaaagagtcctgtctcagattgatgttgcacagaaaaaattacaagatgtctccatgaagtttcgattattccagaaaccagccaattttgagcagcgtctacaagaaagtaagatgattttagatgaagtgaagatgcacttgcctgcattggaaacaaagagtgtggaacaggaagtagtacagtcacagctaaatcattgtgtgaacttgtataaaagtctgagtgaagtgaagtctgaagtggaaatggtgataaagactggacgtcagattgtacagaaaaagcagacggaaaatcccaaagaacttgatgaaagagtaacagctttgaaattgcattataatgagctgggagcaaaggtaacagaaagaaagcaacagttggagaaatgcttgaaattgtcccgtaagatgcgaaaggaaatgaatgtcttgacagaatggctggcagctacagatatggaattgacaaagagatcagcagttgaaggaatgcctagtaatttggattctgaagttgcctggggaaaggctactcaaaaagagattgagaaacagaaggtgcacctgaagagtatcacagaggtaggagaggccttgaaaacagttttgggcaagaaggagacgttggtggaagataaactcagtcttctgaatagtaactggatagctgtcacctcccgagcagaagagtggttaaatcttttgttggaataccagaaacacatggaaacttttgaccagaatgtggaccacatcacaaagtggatcattcaggctgacacacttttggatgaatcagagaaaaagaaaccccagcaaaaagaagacgtgcttaagcgtttaaaggcagaactgaatgacatacgcccaaaggtggactctacacgtgaccaagcagcaaacttgatggcaaaccgcggtgaccactgcaggaaattagtagagccccaaatctcagagctcaaccatcgatttgcagccatttcacacagaattaagactggaaaggcctccattcctttgaaggaattggagcagtttaactcagatatacaaaaattgcttgaaccactggaggctgaaattcagcagggggtgaatctgaaagaggaagacttcaataaagatatgaatgaagacaatgagggtactgtaaaagaattgttgcaaagaggagacaacttacaacaaagaatcacagatgagagaaagcgagaggaaataaagataaaacagcagctgttacagacaaaacataatgctctcaaggatttgaggtctcaaagaagaaaaaaggctctagaaatttctcatcagtggtatcagtacaagaggcaggctgatgatctcctgaaatgcttggatgacattgaaaaaaaattagccagcctacctgagcccagagatgaaaggaaaataaaggaaattgatcgggaattgcagaagaagaaagaggagctgaatgcagtgcgtaggcaagctgagggcttgtctgaggatggggccgcaatggcagtggagccaactcagatccagctcagcaagcgctggcgggaaattgagagcaaatttgctcagtttcgaagactcaactttgcacaaattcacactgtccgtgaagaaacgatgatggtgatgactgaagacatgcctttggaaatttcttatgtgccttctacttatttgactgaaatcactcatgtctcacaagccctattagaagtggaacaacttctcaatgctcctgacctctgtgctaaggactttgaagatctctttaagcaagaggagtctctgaagaatataaaagatagtctacaacaaagctcaggtcggattgacattattcatagcaagaagacagcagcattgcaaagtgcaacgcctgtggaaagggtgaagctacaggaagctctctcccagcttgatttccaatgggaaaaagttaacaaaatgtacaaggaccgacaagggcgatttgacagatctgttgagaaatggcggcgttttcattatgatataaagatatttaatcagtggctaacagaagctgaacagtttctcagaaagacacaaattcctgagaattgggaacatgctaaatacaaatggtatcttaaggaactccaggatggcattgggcagcggcaaactgttgtcagaacattgaatgcaactggggaagaaataattcagcaatcctcaaaaacagatgccagtattctacaggaaaaattgggaagcctgaatctgcggtggcaggaggtctgcaaacagctgtcagacagaaaaaagaggctagaagaacaaaagaatatcttgtcagaatttcaaagagatttaaatgaatttgttttatggttggaggaagcagataacattgctagtatcccacttgaacctggaaaagagcagcaactaaaagaaaagcttgagcaagtcaagttactggtggaagagttgcccctgcgccagggaattctcaaacaattaaatgaaactggaggacccgtgcttgtaagtgctcccataagcccagaagagcaagataaacttgaaaataagctcaagcagacaaatctccagtggataaaggtttccagagctttacctgagaaacaaggagaaattgaagctcaaataaaagaccttgggcagcttgaaaaaaagcttgaagaccttgaagagcagttaaatcatctgctgctgtggttatctcctattaggaatcagttggaaatttataaccaaccaaaccaagaaggaccatttgacgttcaggaaactgaaatagcagttcaagctaaacaaccggatgtggaagagattttgtctaaagggcagcatttgtacaaggaaaaaccagccactcagccagtgaagaggaagttagaagatctgagctctgagtggaaggcggtaaaccgtttacttcaagagctgagggcaaagcagcctgacctagctcctggactgaccactattggagcctctcctactcagactgttactctggtgacacaacctgtggttactaaggaaactgccatctccaaactagaaatgccatcttccttgatgttggaggtacctgctctggcagatttcaaccgggcttggacagaacttaccgactggctttctctgcttgatcaagttataaaatcacagagggtgatggtgggtgaccttgaggatatcaacgagatgatcatcaagcagaaggcaacaatgcaggatttggaacagaggcgtccccagttggaagaactcattaccgctgcccaaaatttgaaaaacaagaccagcaatcaagaggctagaacaatcattacggatcgaattgaaagaattcagaatcagtgggatgaagtacaagaacaccttcagaaccggaggcaacagttgaatgaaatgttaaaggattcaacacaatggctggaagctaaggaagaagctgagcaggtcttaggacaggccagagccaagcttgagtcatggaaggagggtccctatacagtagatgcaatccaaaagaaaatcacagaaaccaagcagttggccaaagacctccgccagtggcagacaaatgtagatgtggcaaatgacttggccctgaaacttctccgggattattctgcagatgataccagaaaagtccacatgataacagagaatatcaatgcctcttggagaagcattcataaaagggtgagtgagcgagaggctgctttggaagaaactcatagattactgcaacagttccccctggacctggaaaagtttcttgcctggcttacagaagctgaaacaactgccaatgtcctacaggatgctacccgtaaggaaaggctcctagaagactccaagggagtaaaagagctgatgaaacaatggcaagacctccaaggtgaaattgaagctcacacagatgtttatcacaacctggatgaaaacagccaaaaaatcctgagatccctggaaggttccgatgatgcagtcctgttacaaagacgtttggataacatgaacttcaagtggagtgaacttcggaaaaagtctctcaacattaggtcccatttggaagccagttctgaccagtggaagcgtctgcacctttctctgcaggaacttctggtgtggctacagctgaaagatgatgaattaagccggcaggcacctattggaggcgactttccagcagttcagaagcagaacgatgtacatagggccttcaagagggaattgaaaactaaagaacctgtaatcatgagtactcttgagactgtacgaatatttctgacagagcagcctttggaaggactagagaaactctaccaggagcccagagagctgcctcctgaggagagagcccagaatgtcactcggcttctacgaaagcaggctgaggaggtcaatactgagtgggaaaaattgaacctgcactccgctgactggcagagaaaaatagatgagacccttgaaagactccaggaacttcaagaggccacggatgagctggacctcaagctgcgccaagctgaggtgatcaagggatcctggcagcccgtgggcgatctcctcattgactctctccaagatcacctcgagaaagtcaaggcacttcgaggagaaattgcgcctctgaaagagaacgtgagccacgtcaatgaccttgctcgccagcttaccactttgggcattcagctctcaccgtataacctcagcactctggaagacctgaacaccagatggaagcttctgcaggtggccgtcgaggaccgagtcaggcagctgcatgaagcccacagggactttggtccagcatctcagcactttctttccacgtctgtccagggtccctgggagagagccatctcgccaaacaaagtgccctactatatcaaccacgagactcaaacaacttgctgggaccatcccaaaatgacagagctctaccagtctttagctgacctgaataatgtcagattctcagcttataggactgccatgaaactccgaagactgcagaaggccctttgcttggatctcttgagcctgtcagctgcatgtgatgccttggaccagcacaacctcaagcaaaatgaccagcccatggatatcctgcagattattaattgtttgaccactatttatgaccgcctggagcaagagcacaacaatttggtcaacgtccctctctgcgtggatatgtgtctgaactggctgctgaatgtttatgatacgggacgaacagggaggatccgtgtcctgtcttttaaaactggcatcatttccctgtgtaaagcacatttggaagacaagtacagataccttttcaagcaagtggcaagttcaacaggattttgtgaccagcgcaggctgggcctccttctgcatgattctatccaaattccaagacagttgggtgaagttgcatcctttgggggcagtaacattgagccaagtgtccggagctgcttccaatttgctaataataagccagagatcgaagcggccctcttcctagactggatgagactggaaccccagtccatggtgtggctgcccgtcctgcacagagtggctgctgcagaaactgccaagcatcaggccaaatgtaacatctgcaaagagtgtccaatcattggattcaggtacaggagtctaaagcactttaattatgacatctgccaaagctgctttttttctggtcgagttgcaaaaggccataaaatgcactatcccatggtggaatattgcactccgactacatcaggagaagatgttcgagactttgccaaggtactaaaaaacaaatttcgaaccaaaaggtattttgcgaagcatccccgaatgggctacctgccagtgcagactgtcttagagggggacaacatggaaactcccgttactctgatcaacttctggccagtagattctgcgcctgcctcgtcccctcagctttcacacgatgatactcattcacgcattgaacattatgctagcaggctagcagaaatggaaaacagcaatggatcttatctaaatgatagcatctctcctaatgagagcatagatgatgaacatttgttaatccagcattactgccaaagtttgaaccaggactcccccctgagccagcctcgtagtcctgcccagatcttgatttccttagagagtgaggaaagaggggagctagagagaatcctagcagatcttgaggaagaaaacaggaatctgcaagcagaatatgaccgtctaaagcagcagcacgaacataaaggcctgtccccactgccgtcccctcctgaaatgatgcccacctctccccagagtccccgggatgctgagctcattgctgaggccaagctactgcgtcaacacaaaggccgcctggaagccaggatgcaaatcctggaagaccacaataaacagctggagtcacagttacacaggctaaggcagctgctggagcaaccccaggcagaggccaaagtgaatggcacaacggtgtcctctccttctacctctctacagaggtccgacagcagtcagcctatgctgctccgagtggttggcagtcaaacttcggactccatgggtgaggaagatcttctcagtcctccccaggacacaagcacagggttagaggaggtgatggagcaactcaacaactccttccctagttcaagaggaagaaatacccctggaaagccaatgagagaggacacaatgtaggaagtcttttccacatggcagatgatttgggcagagcgatggagtccttagtatcagtcatgacagatgaagaaggagcagaataaatgttttacaactcctgattcccgcatggtttttataatattcatacaacaaagaggattagacagtaagagtttacaagaaataaatctatatttttgtgaagggtagtggtattatactgtagatttcagtagtttctaagtctgttattgttttgttaacaatggcaggttttacacgtctatgcaattgtacaaaaaagttataagaaaactacatgtaaaatcttgatagctaaataacttgccatttctttatatggaacgcattttgggttgtttaaaaatttataacagttataaagaaagattgtaaactaaagtgtgctttataaaaaaaagttgtttataaaaacccctaaaaacaaaacaaacacacacacacacacatacacacacacacacaaaactttgaggcagcgcattgttttgcatccttttggcgtgatatccatatgaaattcatggctttttctttttttgcatattaaagataagacttcctctaccaccacaccaaatgactactacacactgctcatttgagaactgtcagctgagtggggcaggcttgagttttcatttcatatatctatatgtctataagtatataaatactatagttatatagataaagagatacgaatttctatagactgactttttccattttttaaatgttcatgtcacatcctaatagaaagaaattacttctagtcagtcatccaggcttacctgcttggtctagaatggatttttcccggagccggaagccaggaggaaactacaccacactaaaacattgtctacagctccagatgtttctcattttaaacaactttccactgacaacgaaagtaaagtaaagtattggatttttttaaagggaacatgtgaatgaatacacaggacttattatatcagagtgagtaatcggttggttggttgattgattgattgattgatacattcagcttcctgctgctagcaatgccacgatttagatttaatgatgcttcagtggaaatcaatcagaaggtattctgaccttgtgaacatcagaaggtattttttaactcccaagcagtagcaggacgatgatagggctggagggctatggattcccagcccatccctgtgaaggagtaggccactctttaagtgaaggattggatgattgttcataatacataaagttctctgtaattacaactaaattattatgccctcttctcacagtcaaaaggaactgggtggtttggtttttgttgcttttttagatttattgtcccatgtgggatgagtttttaaatgccacaagacataatttaaaataaataaactttgggaaaaggtgtaaaacagtagccccatcacatttgtgatactgacaggtatcaacccagaagcccatgaactgtgtttccatcctttgcatttctctgcgagtagttccacacaggtttgtaagtaagtaagaaagaaggcaaattgattcaaatgttacaaaaaaacccttcttggtggattagacaggttaaatatataaacaaacaaacaaaaattgctcaaaaaagaggagaaaagctcaagaggaaaagctaaggactggtaggaaaaagctttactctttcatgccattttatttctttttgatttttaaatcattcattcaatagataccaccgtgtgacctataattttgcaaatctgttacctctgacatcaagtgtaattagcttttggagagtgggctgacatcaagtgtaattagcttttggagagtgggttttgtccattattaataattaattaattaacatcaaacacggcttctcatgctatttctacctcactttggttttggggtgttcctgataattgtgcacacctgagttcacagcttcaccacttgtccattgcgttattttctttttcctttataattctttctttttccttcataattttcaaaagaaaacccaaagctctaaggtaacaaattaccaaattacatgaagatttggtttttgtcttgcatttttttcctttatgtgacgctggaccttttctttacccaaggatttttaaaactcagatttaaaacaaggggttactttacatcctactaagaagtttaagtaagtaagtttcattctaaaatcagaggtaaatagagtgcataaataattttgttttaatctttttgtttttcttttagacacattagctctggagtgagtctgtcataatatttgaacaaaaattgagagctttattgctgcattttaagcataattaatttggacattatttcgtgttgtgttctttataaccaccaagtattaaactgtaaatcataatgtaactgaagcataaacatcacatggcatgttttgtcattgttttcaggtactgagttcttacttgagtatcataatatattgtgttttaacaccaacactgtaacatttacgaattatttttttaaacttcagttttactgcattttcacaacatatcagacttcaccaaatatatgccttactattgtattatagtactgctttactgtgtatctcaataaagcacgcagttatgttac

SEQ ID NO: 142743 - DNA, 11046 bp, Artificial Sequence
  derived and/or modified sequence
atgagtgaagtaagctctgacgagcgggaggacgtccagaaaaagactttcacaaagtgggtaaatgcccagtttagcaaatttggaaaacagcacattgaaaatctgtttagtgatcttcaggacggccggagactcttagacctcctggaaggacttaccgggcaaaaactgccgaaggagaagggctccacgagagtccacgccctgaacaatgtgaacaaggcactgcgggtcctgcagaataataatgtggatcttgtgaacatcggcagcacagacattgtcgatggcaaccacaaattaacactcggactgatttggaatatcatcctgcattggcaggttaagaatgtaatgaaaaatataatggcaggcctccagcagacaaatagcgaaaaaattctgctgagctgggttcggcaaagcacacggaattacccgcaagtaaatgtcataaattttactacctcttggagtgacggcctcgctctgaacgccctgattcacagccatcggccagacttgttcgactggaactccgtggtatgtcagcagagtgcgactcagcgactggagcatgccttcaacattgcaagataccagctgggcatcgagaaattgttggatcccgaggacgtagacacaacatacccagacaagaaatcgatactcatgtacataactagcctgttccaagtgctgcctcaacaggtgagcattgaggccattcaggaggtggaaatgctacctcgtcccccaaaggtgaccaaagaggagcatttccagttgcatcatcagatgcattactctcagcagattacagtttcactggcccagggctacgaacggacgtcttctcccaagccacgcttcaagagctacgcatacactcaggccgcttacgtgacaacttctgaccccacgcggtctccctttcccagccagcatctagaggctccagaagataagagctttgggagcagtctgatggagtccgaagttaacctggatagataccagaccgccttagaagaagtactctcttggttactgtcggccgaagacactctgcaagctcaaggagagatctctaacgacgtcgaagtcgttaaggatcagttccacactcacgaagggtacatgatggacttaacagctcaccaaggccgggtgggtaatatcctacagttggggtcgaaactcatagggacagggaaactaagtgaggatgaagaaaccgaagtgcaggagcaaatgaacttattgaactctcgttgggagtgtttgagagttgcgagcatggagaaacaatcgaacctccatcgggtactgatggatttacaaaaccaaaaactgaaagaactgaatgattggttgactaagacggaggaaagaactaggaaaatggaagaagaacctttggggcccgacctagaggacctaaagcggcaggtacagcaacataaggtgctgcaggaggatctagagcaagagcaagttagggtaaacagtctcacacacatggtggtggtcgtagatgaaagcagtggcgaccatgctaccgccgccttggaggagcaactgaaagtgttgggggataggtgggcaaatatctgtcggtggactgaggaccgctgggtgttgttacaggatatcctgctaaagtggcagaggctcacagaagagcagtgcctgtttagtgcttggctgagtgaaaaagaagatgcagtgaacaagatccacaccaccggatttaaggaccagaacgaaatgctgtcgtctcttcagaaactcgccgtccttaaggcagatcttgaaaagaagaaacaatccatggggaagctgtacagcctgaaacaagacttgctatcgacactaaagaataaatccgtcactcagaagacagaagcctggctcgataattttgccagatgttgggataacctcgtccagaaactggaaaaatccacggcccagatttctcaagccgtgaccacaactcagcctagccttactcaaaccaccgtgatggagaccgtgaccactgttacaactagagaacagatactggtgaagcacgctcaggaggagttgcccccaccacctccgcaaaagaaacggcagattacagtagacagcgagattaggaagcgcctggacgtggatatcactgaactgcattcttggattacaaggtccgaagccgtcctgcaatcgccagagttcgctatcttccgaaaagagggcaatttctctgacctgaaagaaaaagtgaatgccattgagagagagaaagctgagaagtttaggaaacttcaggacgcatcaagatccgcccaagccctcgtagaacagatggttaacgagggggtaaatgccgactctattaaacaggcatccgaacagctgaactcccggtggattgagttttgtcagctgctgagcgagcgccttaactggcttgagtatcaaaataacatcatcgcattttacaaccagctacagcagctcgagcagatgaccacgactgcggagaattggctgaaaattcaacccacgacacccagtgagcctacagccataaagtctcagctcaaaatttgtaaggatgaggttaaccgcctgtcagatcttcagccccaaattgagcgcctgaagatccagtctatcgcgctcaaagaaaaaggacaggggcccatgttcctggacgccgactttgttgcatttacaaatcacttcaagcaggtgtttagcgatgtgcaggcccgggaaaaggagttacagaccatatttgatacactgccccccatgcgttatcaggaaactatgtctgctatccgtacctgggtgcagcagtcagaaaccaaattatcaattcctcagctcagcgtaactgattatgagataatggagcagagactcggcgaactgcaggccctgcaatcaagcctgcaggaacagcagtccggactatattacctgtcaaccacggtgaaggaaatgtctaagaaggccccatccgaaatctcacggaagtatcagagtgagtttgaagagatcgagggaaggtggaagaagctctcttcccagttggttgagcattgtcagaagcttgaggaacaaatgaacaagctgcggaagattcagaaccacatccaaaccttgaagaaatggatggccgaggttgacgtcttccttaaagaagaatggccagccctgggcgattctgagattctaaaaaagcagctgaagcagtgtagactgctggtgtctgatattcaaactatccagccgagcctgaattctgtgaacgaaggaggccagaagatcaaaaacgaagcagaacccgaattcgccagcaggctcgagaccgagctcaaggagctaaacacccagtgggaccacatgtgtcaacaggtctacgcccgcaaagaggccctgaaaggcggactggaaaaaacagtgagcttgcagaaagatctgagcgagatgcatgagtggatgactcaggccgaggaggagtatttagagcgggactttgaatataaaactccggatgaactccagaaggctgttgaggagatgaaacgagctaaagaggaggctcaacagaaggaggcgaaggttaagcttctgactgagagtgtgaactctgtgatcgctcaggctccacccgtggcacaggaggcgctgaaaaaagagctggaaacactgactaccaactatcagtggctctgtacacgcttgaacggcaagtgtaaaaccctggaagaagtttgggcgtgttggcatgagctcctaagttacctagaaaaagctaataagtggttgaatgaggtggagttcaagctcaaaactaccgagaatatcccaggcggcgccgaagagatttccgaggtgttggattcactcgagaacctgatgcggcacagcgaggacaatcccaatcagattcgtattctggcacagacattgacagatggaggcgtcatggatgagcttatcaatgaggaattagagacttttaacagccggtggcgtgaactccatgaagaagctgtgagaagacagaaactgctcgagcagtccatccaatcggcccaagaaacagagaaaagcttacatctgattcaggaatccctaaccttcatcgacaaacaattggctgcctatatcgccgacaaggtcgatgctgctcaaatgccccaggaggcacagaaaatccaaagcgatctcacatctcatgagatctcgctcgaagagatgaaaaaacacaatcagggcaaggaggctgcccagagagttctgtcgcagatcgacgtcgctcagaagaaattgcaggatgttagcatgaagtttcgactgttccagaagccagctaacttcgagcaaagattgcaggaatcaaagatgattctggatgaagtaaaaatgcatctgcccgccctggagacaaagtccgtggagcaggaggtcgtacagtctcaattgaaccactgcgtcaatctgtataagtctttatccgaggtaaaaagcgaggtcgagatggtgattaagacgggcagacagatcgtacagaaaaaacagaccgagaatccaaaagaactcgacgaaagagtcacggccttgaagctacattataatgagctgggggccaaggtgaccgaacgtaaacagcagttagaaaagtgtcttaagcttagtaggaaaatgcgaaaggaaatgaatgtgcttaccgaatggctcgccgccaccgatatggagctgacgaaacgaagcgctgtcgaaggcatgccttctaatctggactcagaggtggcctgggggaaagcaacacaaaaggagattgagaaacaaaaagtccacctgaagagcatcacagaggtgggcgaagctctgaaaaccgtactggggaagaaggagacactggttgaagataaactgtctctgctgaacagcaattggattgccgtgacctccagagcagaggagtggttaaatcttttactcgaataccagaagcacatggagacctttgatcagaatgtggaccacattaccaagtggattattcaggccgataccttactggacgagtccgaaaaaaagaagccccaacagaaagaagacgttttaaagcgcctcaaggccgaactgaatgacattaggccaaaagttgattccaccagagaccaggccgctaatctgatggccaatcggggggatcattgcaggaagttggtggaaccccagatcagcgagctgaaccatcggtttgctgccatcagtcaccgcattaaaacagggaaggcctccatccctctgaaagaactggagcaattcaactccgacattcagaaattgctggaaccgctggaagccgaaatccagcagggtgtgaacttgaaggaggaagattttaacaaggatatgaacgaggataacgagggaacagtgaaagagttactgcaaagaggggataatctgcagcagaggatcacagacgagcggaaacgcgaagagatcaagatcaaacagcagctgttacaaaccaagcacaacgccctaaaagatctgcgctcccagcgccggaaaaaggcactggagatctctcatcagtggtaccagtacaagcgccaggctgatgatctcctcaagtgtctggatgatatcgaaaaaaagctcgcttcacttcctgaacctcgtgatgagcggaaaattaaggagatcgaccgggaactccagaagaaaaaagaggagcttaatgccgtcagacgtcaagcggaaggcctaagcgaggatggggccgccatggccgtggagcctacacaaattcagctctcgaagcggtggagggaaatcgagtctaaatttgcacaattcaggaggctgaatttcgcccagatccacactgtccgcgaggagacgatgatggtgatgactgaagatatgccactggaaatatcgtacgtgccctccacttatttgacagaaatcacacatgtgtcccaggcactcctggaggtggaacaactcttaaatgcgcctgacctgtgcgctaaggattttgaggatttattcaaacaggaggaatccttaaagaacattaaggactccctacagcagagcagtgggaggatagatataatccacagcaaaaaaactgccgcgcttcagtccgccactcccgtcgagcgggtgaagcttcaggaagccctgagccagttggactttcaatgggaaaaggtcaacaagatgtataaggaccgtcaggggcgctttgataggagtgtggagaaatggcggcgattccactacgatatcaagatttttaatcaatggctcaccgaggccgaacaatttctgcgcaaaactcagattcccgagaactgggaacatgcgaaatataagtggtatctgaaggagctgcaggatggaattggtcaacggcagactgtggtgcgtaccttgaatgccaccggggaggagatcatccaacagtcatctaaaactgatgccagcatccttcaagagaagcttggctctctgaatctgaggtggcaagaggtctgtaagcagctcagcgaccggaagaagcgccttgaagagcagaagaacattctgtctgaattccagagggatttgaatgaatttgtgttatggctcgaggaggcagacaacatcgcctcaatcccccttgagccaggtaaggagcagcagctcaaggaaaaactggaacaggttaagttactggtcgaagagttacctctaaggcagggtatcctcaaacagctaaatgagacaggcgggcctgtgttggttagcgcccccatctcgccagaagaacaggacaagctcgaaaacaagctcaagcagacgaatctgcagtggataaaagtgtctcgggccctgcctgagaagcaaggcgaaatcgaagcccagataaaggacttagggcaactcgagaaaaagttggaggatctggaggagcagctaaaccatctcctgctgtggctgagccctataagaaatcaattggaaatttataaccagccgaaccaggaagggcctttcgatgtgaaggaaacagagatagccgtccaggcaaaacagccggatgtggaggaaatcctgtcaaagggccagcatctgtacaaggagaaaccggccactcaacccgtaaagcgcaaactggaggacttgagctctgagtggaaagcagtcaataggcttctgcaagagctgcgcgctaaacaacccgacctggcgccaggattgactacaataggcgcaagcccaactcagaccgtgaccttggtaacccagccggtggtcactaaggagacagctattagcaagctagaaatgccttcaagccttatgctagaggtaccggccttggctgattttaatcgcgcatggactgagctaacagactggctctccctcctggaccaagtcattaagtctcagcgcgtgatggtgggagatctcgaggatataaatgaaatgatcatcaagcagaaagccactatgcaagatctagagcagcggcgaccacagctggaggagctcattaccgcagcccagaacttaaaaaacaaaaccagcaaccaggaggctagaacgatcattactgaccgcattgagcggatccagaaccagtgggacgaggtgcaggaacatctgcaaaaccgcaggcagcagctaaatgagatgctgaaggactctacccaatggttagaggccaaggaggaggccgagcaggtgctcggtcaggctcgcgcgaagcttgaaagctggaaagagggaccttatacagttgacgcgatacagaaaaagatcacagagaccaagcagttggccaaggaccttagacagtggcagaccaacgttgacgtggctaatgacctggcacttaagctgttgcgcgactactccgctgacgatacgaggaaagtgcacatgatcactgagaatattaatgctagttggaggtcgattcataagagggtgagtgagagggaagccgccttagaggaaacccaccgcctcctccagcaattccccttagacttagaaaagttcctggcatggctcactgaagccgagacaacagctaacgtgctgcaagacgcgacgcgtaaagagcgtctgttagaggattccaaaggtgtgaaagaactcatgaaacagtggcaagaccttcaaggcgagatcgaggctcatacggatgtataccacaatctcgatgaaaatagccagaaaatactgaggtccctcgaggggagcgacgacgctgtgctgctccagcggcgcttagataacatgaactttaaatggtcagagcttagaaagaagtctctgaacattagatcacatctcgaggccagtagcgaccaatggaagcgcctgcatctctcactgcaggaacttctcgtgtggctgcagctgaaagacgacgagctgtctaggcaagctcctataggaggagatttcccagccgtacagaagcagaacgacgtgcatcgcgccttcaaaagagagcttaagactaaagagcccgtgataatgagtaccttggaaaccgtgaggatctttctcacagagcagccgcttgagggcctcgaaaaattgtaccaggaaccccgcgagttaccccctgaggagagagctcagaacgtaacaagactcctgaggaagcaggctgaagaggtcaatactgaatgggagaagctgaatcttcattcggccgattggcagaggaagattgacgagacattagagagacttagggaactgcaggaggccacagacgagttggacctgaaactgcggcaggcagaagtaattaaggggtcctggcagccagttggggatctgctcatagactccctccaggaccacctggaaaaagtcaaagccctgcgtggcgaaatcgcccccctgaaagagaatgtcagccacgtgaatgacctcgcaaggcaactcacaacgctagggattcaactgtcaccatataacctgtccactcttgaagatctgaatactcggtggaaactcttgcaggtcgccgttgaagatagagtgcggcagcttcacgaggcgcaccgggacttcgggcctgcaagccagcattttctatccacatccgtccaagggccgtgggagagagctatctcccctaacaaagtcccatactacattaaccatgaaacccaaacaacctgttgggaccatccaaagatgacggagctgtatcagagcctcgcggacctgaacaacgtcaggttttccgcctaccggaccgcgatgaaactgcgcagactgcagaaagcactgtgcttggacctcttatcacttagcgcagcttgcgatgccctcgaccagcataaccttaaacagaacgaccagcctatggatatcctgcaaatcatcaattgcttaactacaatttatgaccggctggaacaggagcataacaacttggtgaacgtgcccttatgtgtagatatgtgtttgaactggttgctcaacgtctatgacacaggacgaactggacggataagagttctttcgttcaagaccggaatcatcagcttgtgcaaggctcatctcgaggacaagtataggtaccttttcaaacaggttgcctcttcaacggggttctgcgaccagaggcgcttaggcctgctgctccacgattctatccaaattccccggcagttgggtgaagtcgcctctttcggcggaagcaatatcgagcccagtgtaaggtcatgttttcagttcgccaacaacaaaccagaaatcgaagcggccctgttcttggattggatgcgtttggagccgcagtctatggtgtggctaccagtcctccatcgggtggcagctgctgaaaccgcaaaacaccaagctaagtgcaacatctgcaaagagtgcccaatcattggattccgttatcggtcacttaagcattttaactacgacatttgccagagctgcttcttttcaggccgagttgccaagggccacaagatgcactatcctatggtagagtactgtacaccaacaacctccggagaggacgtaagggactttgcgaaggtgcttaagaacaaattccgcaccaaacggtacttcgccaaacacccccgtatggggtacttgccagtgcaaacagtgctggagggtgacaacatggaaaccccagtgactctgatcaacttctggccagtcgacagtgcgcccgcatccagtcctcagctgtcccatgacgacacgcactcccgcatcgagcactacgcatcaagacttgccgaaatggagaattctaacggttcctaccttaatgattccatcagtcctaacgaatccattgacgacgaacacctgctgatccaacactattgccagtccttgaaccaggatagtccattaagccagccacgttcccctgctcaaatcttgataagtctagaatctgaagagcgcggagagctggaacgcatccttgctgatctggaagaagaaaatcgcaatttacaggctgaatatgatcgacttaagcaacagcacgaacataagggtctcagtcctttgccttcacctcccgaaatgatgcctactagcccacagtcaccacgcgacgccgagttgattgccgaagccaaacttctgcgtcagcataaaggtcgtttagaagcccggatgcagatacttgaggatcataacaagcagctcgagtctcaactgcaccgactgaggcaactcctggagcagccgcaggccgaagccaaagtaaatggtaccacggtcagcagccctagcacaagtctgcaacggtccgactcatctcagccaatgctgctccgcgtggtcggaagtcagacttcagattccatgggggaggaggatctcttgagtccgcctcaggatacgagtacagggctcgaagaggtgatggagcagctgaataactcttttccatctagcaggggccgaaatactcccgggaagcctatgcgcgaagataccatgtag

SEQ ID NO: 142744 - DNA, 11046 bp, Artificial Sequence
  derived and/or modified sequence
atgtctgaggtgtccagtgatgagcgggaggatgtgcagaagaagaccttcaccaagtgggtgaatgcccagttcagcaagtttgggaagcagcacatcgagaacctcttcagtgacctgcaggacggccggcggctgctggacctgctggagggcctgaccggccagaagctgcccaaggagaagggcagcaccagggtgcacgccctgaacaacgtgaacaaggccctgcgggtgctgcagaacaacaacgtggacctggtgaacatcggcagcacagacatcgtggatggcaaccacaagctgaccctgggcctcatctggaacatcatcctgcactggcaggtgaagaatgtgatgaagaacatcatggccggcctgcagcagaccaacagcgagaagatcctgctgtcctgggtgcggcagagcaccaggaactacccccaggtgaatgtcatcaacttcaccacctcctggagcgatggcctggccctgaatgccctgatccacagccacaggccagacctgtttgactggaacagcgtggtgtgccagcagagcgccacccagaggctggagcacgccttcaacatcgcccgctaccagctgggcatcgagaagctgctggaccctgaagatgtggacaccacctacccagacaagaagagcatcctgatgtacatcaccagcctcttccaggtgctgccccagcaggtgtccattgaggccatccaggaggtggagatgctgcccaggcctcccaaggtgaccaaggaggagcacttccagctgcaccaccagatgcactacagccagcagatcaccgtgtccctggcccagggctatgaaagaaccagcagccccaagccccgcttcaagagctatgcctacacccaggccgcctacgtgaccaccagtgaccccaccaggagccccttccccagccagcacctggaggcccctgaggacaagagctttggcagcagcctgatggagagcgaggtgaacctggaccgctaccagacagccctggaggaggtgctgtcctggctgctgtctgctgaggacaccctgcaggcccagggcgagatcagcaatgatgtggaggtggtgaaggaccagttccacacccatgagggctacatgatggacctgacagcccaccagggccgggtgggcaacatcctgcagctgggcagcaagctgattggaacaggcaagctgtctgaagatgaggagacagaggtgcaggagcagatgaacctgctgaacagccgctgggagtgcctgcgggtggcctccatggagaagcagagcaacctgcaccgggtgctgatggacctgcagaaccagaagctgaaggagctgaatgactggctgaccaagacagaggagaggaccaggaagatggaggaggagcccctgggccctgacctggaggacctgaagaggcaggtgcagcagcacaaggtgctgcaggaggacctggagcaggagcaggtgcgggtgaacagcctgacccacatggtggtggtggtggatgagagcagcggggaccacgccacagctgccctggaggagcagctgaaggtgctgggggaccgctgggccaacatctgccgctggacagaggaccgctgggtgctgctgcaggacatcctgctgaagtggcagaggctgacagaggagcagtgcctcttcagcgcctggctgtctgagaaggaggatgctgtgaacaagatccacaccaccggcttcaaggaccagaatgagatgctgagcagcctgcagaagctggccgtgctgaaggctgacctggagaagaagaagcagagcatgggcaagctgtacagcctgaagcaggacctgctgagcaccctgaagaacaagtctgtgacccagaagacagaggcctggctggacaactttgcccgctgctgggacaacctggtgcagaagctggagaagagcacagcccagatcagccaggccgtgaccaccacccagcccagcctgacccagaccaccgtgatggagaccgtgaccaccgtgaccacccgggagcagatcctggtgaagcacgcccaggaggagctgcccccacctccaccccagaagaagaggcagatcaccgtggacagcgagatcaggaagaggctggatgtggacatcacagagctgcacagctggatcaccaggtctgaggccgtgctgcagagccctgagtttgccatcttcaggaaggagggcaacttcagtgacctgaaggagaaggtgaatgccatcgagcgggagaaggccgagaagttcaggaagctgcaggatgccagccgcagcgcccaggccctggtggagcagatggtgaatgaaggagtgaatgctgacagcatcaagcaggccagcgagcagctgaacagccgctggattgagttctgccagctgctgtctgagcggctgaactggctggagtaccagaacaacatcatcgccttctacaaccagctgcagcagctggagcagatgaccaccacagctgagaactggctgaagatccagcccaccaccccatctgagcccacagccatcaagagccagctgaagatctgcaaggatgaggtgaaccggctgagtgacctgcagccccagatcgagcggctgaagatccagagcatcgccctgaaggagaagggccagggccccatgttcctggatgctgactttgtggccttcaccaaccacttcaagcaggtgttcagtgatgtgcaggcccgggagaaggagctgcagaccatctttgacaccctgccccccatgagataccaggagaccatgtctgccatccgcacctgggtgcagcagagcgagaccaagctgagcatcccccagctgtctgtgacagattatgagatcatggagcagaggctgggggagctgcaggccctgcagagcagcctgcaggagcagcagagcggcctgtactacctgagcaccaccgtgaaggagatgagcaagaaggcccccagcgagatcagcaggaagtaccagagcgagtttgaggagattgagggccgctggaagaagctgagcagccagctggtggagcactgccagaagctggaggagcagatgaacaagctgaggaagatccagaaccacatccagaccctgaagaagtggatggccgaggtggatgtgttcctgaaggaggagtggccagccctgggggacagcgagatcctgaagaagcagctgaagcagtgccgcctgctggtgtctgacatccagaccatccagcccagcctgaacagcgtgaatgaaggaggccagaagatcaagaatgaagctgagcctgagtttgccagccggctggagacagagctgaaggagctgaacacccagtgggaccacatgtgccagcaggtgtatgccaggaaggaggccctgaagggcggcctggagaagacagtgtccctgcagaaggacctgtctgagatgcatgagtggatgacccaggccgaggaggagtacctggagcgggactttgagtacaagaccccagatgagctgcagaaggctgtggaggagatgaagagggccaaggaggaggcccagcagaaggaggccaaggtgaagctgctgacagagagcgtgaacagcgtgattgcccaggcccctcctgtggcccaggaggccctgaagaaggagctggagaccctgaccaccaactaccagtggctgtgcacccggctgaatggcaagtgcaagaccctggaggaggtgtgggcctgctggcatgagctgctgagctacctggagaaggccaacaagtggctgaatgaggtggagttcaagctgaagaccacagagaacatccctgggggcgctgaggagatcagcgaggtgctggacagcctggagaacctgatgaggcacagcgaggacaaccccaaccagatccgcatcctggcccagaccctgacagatggcggcgtgatggatgagctgatcaatgaggagctggagaccttcaacagccgctggagggagctgcacgaggaggccgtgcggcggcagaagctgctggagcagagcatccagagcgcccaggagacagagaagagcctgcacctgatccaggagagcctgaccttcatcgacaagcagctggccgcctacatcgctgacaaggtggatgctgcccagatgccccaggaggcccagaagatccagagcgacctgaccagccatgagatcagcctggaggagatgaagaagcacaaccagggcaaggaggccgcccagagggtgctgagccagattgatgtggcccagaagaagctgcaggatgtgtccatgaagttccgcctcttccagaagccagccaactttgagcagaggctgcaggagagcaagatgatcctggatgaggtgaagatgcacctgcctgccctggagaccaagtctgtggagcaggaggtggtgcagagccagctgaaccactgtgtgaacctgtacaagagcctgtctgaggtgaagtctgaggtggagatggtgatcaagacaggccggcagatcgtgcagaagaagcagacagagaaccccaaggagctggatgagcgggtgacagccctgaagctgcactacaatgagctgggcgccaaggtgacagagaggaagcagcagctggagaagtgcctgaagctgagcaggaagatgaggaaggagatgaatgtgctgacagagtggctggccgccacagacatggagctgaccaagaggtctgctgtggagggcatgcccagcaacctggacagcgaggtggcctggggcaaggccacccagaaggagattgagaagcagaaggtgcacctgaagagcatcacagaggtgggggaggccctgaagacagtgctgggcaagaaggagaccctggtggaggacaagctgagcctgctgaacagcaactggattgctgtgaccagcagagctgaggagtggctgaacctgctgctggagtaccagaagcacatggagacctttgaccagaatgtggaccacatcaccaagtggatcatccaggccgacaccctgctggatgaaagtgagaagaagaagccccagcagaaggaggatgtgctgaagaggctgaaggccgagctgaatgacatccggcccaaggtggacagcacccgggaccaggccgccaacctgatggccaacagaggagaccactgcaggaagctggtggagccccagatcagcgagctgaaccacagatttgctgccatcagccaccgcatcaagacaggcaaggccagcatccccctgaaggagctggagcagttcaacagcgacatccagaagctgctggagcccctggaggccgagatccagcagggcgtgaacctgaaggaggaggacttcaacaaggacatgaatgaagataatgaaggaacagtgaaggagctgctgcagagaggagacaacctgcagcagaggatcacagatgagaggaagcgggaggagatcaagatcaagcagcagctgctgcagaccaagcacaatgccctgaaggacctgcggagccagaggaggaagaaggccctggagatcagccaccagtggtaccagtacaagaggcaggctgatgacctgctgaagtgcctggatgacatcgagaagaagctggccagcctgcctgagcccagagatgagaggaagatcaaggagattgaccgggagctgcagaagaagaaggaggagctgaatgctgtgcggcggcaggccgagggcctgtctgaagatggagctgccatggctgtggagcccacccagatccagctgagcaagcgctggagagaaattgagagcaagtttgcccagttccggcggctgaactttgcccagatccacacagtgcgggaggagaccatgatggtgatgacagaggacatgcccctggagatctcctatgtgcccagcacctacctgacagagatcacccacgtgtcccaggccctgctggaggtggagcagctgctgaatgccccagacctgtgtgccaaggactttgaagatctcttcaagcaggaggagagcctgaagaacatcaaggacagcctgcagcagagcagcggcagaattgacatcatccacagcaagaagacagctgccctgcagagcgccacccctgtggagcgggtgaagctgcaggaggccctgagccagctggacttccagtgggagaaggtgaacaagatgtacaaggaccggcagggccgctttgacagatctgtggagaagtggaggcgcttccactatgacatcaagatcttcaaccagtggctgacagaagctgagcagttcctgaggaagacccagatccctgagaactgggagcacgccaagtacaagtggtacctgaaggagctgcaggacggcatcggccagaggcagacagtggtgaggaccctgaatgccactggagaggagatcatccagcagagcagcaagacagatgccagcatcctgcaggagaagctgggcagcctgaacctgcgctggcaggaggtgtgcaagcagctgagtgacaggaagaagaggctggaggagcagaagaacatcctgtctgagttccagagggacctgaatgaatttgtgctgtggctggaggaggccgacaacatcgccagcatccccctggagcccgggaaggagcagcagctgaaggagaagctggagcaggtgaagctgctggtggaggagctgcccctgcggcagggcatcctgaagcagctgaatgaaacaggaggccctgtgctggtgtctgcccccatcagccctgaggagcaggacaagctggagaacaagctgaagcagaccaacctgcagtggatcaaggtgtcccgggccctgcctgagaagcagggcgagattgaggcccagatcaaggacctgggccagctggagaagaagctggaggacctggaggagcagctgaaccacctgctgctgtggctgagccccatccggaaccagctggagatctacaaccagcccaaccaggagggcccctttgatgtgaaggagacagaaattgctgtgcaggccaagcagccagatgtggaggagatcctgagcaagggccagcacctgtacaaggagaagccagccacccagcctgtgaagaggaagctggaggacctgagcagcgagtggaaggctgtgaaccggctgctgcaggagctgcgggccaagcagcctgacctggcccctggcctgaccaccatcggggccagccccacccagacagtgaccctggtgacccagcctgtggtgaccaaggagacagccatcagcaagctggagatgcccagcagcctgatgctggaggtgcctgccctggccgacttcaacagagcctggacagagctgacagactggctgagcctgctggaccaggtgatcaagagccagagggtgatggtgggggacctggaggacatcaatgagatgatcatcaagcagaaggccaccatgcaggacctggagcagaggcggccccagctggaggagctgatcacagctgcccagaacctgaagaacaagaccagcaaccaggaggcccggaccatcatcacagaccgcatcgagcgcatccagaaccagtgggatgaggtgcaggagcacctgcagaacagacggcagcagctgaatgagatgctgaaggacagcacccagtggctggaggccaaggaggaggccgagcaggtgctgggccaggcccgggccaagctggagagctggaaggagggcccctacacagtggatgccatccagaagaagatcacagagaccaagcagctggccaaggacctgcggcagtggcagaccaacgtggatgtggccaatgacctggccctgaagctgctgcgggactacagcgcagatgacaccaggaaggtgcacatgatcacagagaacatcaatgcctcctggaggagcatccacaagagggtgtctgagcgggaggccgccctggaggagacccaccggctgctgcagcagttccccctggacctggagaagttcctggcctggctgacagaggccgagaccacagccaacgtgctgcaggatgccaccaggaaggagcggctgctggaggacagcaaaggagtgaaggagctgatgaagcagtggcaggacctgcagggcgagattgaggcccacacagatgtgtaccacaacctggatgagaacagccagaagatcctgcggagcctggagggcagtgatgatgctgtgctgctgcagaggcggctggacaacatgaacttcaagtggagcgagctgaggaagaagagcctgaacatccgcagccacctggaggccagcagtgaccagtggaagaggctgcacctgagcctgcaggagctgctggtgtggctgcagctgaaggatgatgagctgagccggcaggcccccatcggcggggacttccctgctgtgcagaagcagaatgatgtgcaccgggccttcaagcgggagctgaagaccaaggagcccgtcatcatgagcaccctggagaccgtgcgcatcttcctgacagagcagcccctggagggcctggagaagctgtaccaggagccccgggagctgcccccagaggagcgggcccagaatgtgacccggctgctgaggaagcaggccgaggaggtgaacacagagtgggagaagctgaacctgcacagcgctgactggcagaggaagattgatgagaccctggagcggctgcgggagctgcaggaggccacagatgagctggacctgaagctgcggcaggccgaggtgatcaagggctcctggcagcctgtgggggacctgctgattgacagcctgcaggaccacctggagaaggtgaaggccctgcggggggagatcgcccccctgaaggaaaatgtgagccacgtgaatgacctggcccggcagctgaccaccctgggcatccagctgagcccctacaacctgagcaccctggaggacctgaacacccgctggaagctgctgcaggtggccgtggaggacagagtgcggcagctgcacgaggcccaccgggactttggacctgccagccagcacttcctgagcacctctgtgcagggcccctgggagcgggccatcagccccaacaaggtgccctactacatcaaccacgagacccagaccacctgctgggaccaccccaagatgacagagctgtaccagagcctggccgacctgaacaacgtgcgcttcagcgcctacagaacagccatgaagctgcggcggctgcagaaggccctgtgcctggacctgctgagcctgtctgctgcctgtgatgccctggaccagcacaacctgaagcagaatgaccagcccatggacatcctgcagatcatcaactgcctgaccaccatctatgaccggctggagcaggagcacaacaacctggtgaatgtgcccctgtgtgtggacatgtgcctgaactggctgctgaatgtgtatgacaccggccgcacaggccgcatccgggtgctgtccttcaagacaggcatcatcagcctgtgcaaggcccacctggaggacaagtaccgctacctgttcaagcaggtggccagcagcacaggcttctgtgaccagaggcggctgggcctgctgctgcatgacagcatccagatcccccggcagctgggggaggtggccagctttggaggcagcaacatcgagcccagcgtgcgcagctgcttccagtttgccaacaacaagccagaaattgaggccgccctcttcctggactggatgaggctggagccccagagcatggtgtggctgcctgtgctgcaccgggtggccgctgctgagacagccaagcaccaggccaagtgcaacatctgcaaggagtgccccatcatcggcttccgctaccgcagcctgaagcacttcaactatgacatctgccagagctgcttcttcagcggccgggtggccaagggccacaagatgcactaccccatggtggagtactgcacccccaccaccagcggagaagatgtgcgggactttgccaaggtgctgaagaacaagttccgcaccaagcgctactttgccaagcaccccaggatgggctacctgcctgtgcagacagtgctggagggggacaacatggagacccctgtgaccctcatcaacttctggcctgtggacagcgccccagccagcagcccccagctgagccatgatgacacccacagcagaattgagcactacgccagccggctggccgagatggagaacagcaatggcagctacctgaatgacagcatcagccccaatgaaagcattgatgatgagcacctgctgatccagcactactgccagagcctgaaccaggacagccccctgagccagcccaggagccctgcccagatcctgatcagcctggagagcgaggagcggggggagctggagcgcatcctggccgacctggaggaggagaacagaaacctgcaggccgagtatgaccggctgaagcagcagcacgagcacaagggcctgagccccctgcccagccccccagagatgatgcccaccagcccccagagccccagagatgctgagctgattgctgaggccaagctgctgcggcagcacaagggccgcctggaggccaggatgcagatcctggaggaccacaacaagcagctggagagccagctgcaccggctgcggcagctgctggagcagccccaggccgaggccaaggtgaatggcaccaccgtgagcagccccagcaccagcctgcagaggagtgacagcagccagcccatgctgctgcgggtggtgggcagccagaccagtgacagcatgggagaggaggacctgctgagccccccccaggacaccagcacaggcctggaggaggtgatggagcagctgaacaacagcttccccagcagccggggcaggaacacccctgggaagcccatgagggaggacaccatgtag

SEQ ID NO: 142745 - DNA, 11046 bp, Artificial Sequence
  derived and/or modified sequence
atgagcgaggtgagcagcgacgagcgggaggacgtgcagaagaagacttttaccaaatgggtaaacgcccagttctcaaaatttggcaaacaacatatcgagaacttgtttagcgaccttcaggatgggagacggctgctcgacctcctggaaggcctcactggtcagaaactccccaaggaaaaagggagcacaagagtccatgctctgaacaacgtgaacaaagccctgcgagtactgcaaaataacaacgtcgatctggtaaatataggctcgacagatatagtggatggcaaccataagttaacactgggcctcatctggaacattattctgcattggcaggtgaaaaacgtaatgaagaatattatggctggtctgcagcagacaaactccgaaaaaatcctattatcctgggtccggcagtcaaccaggaattatccccaggttaatgtcatcaacttcaccacgtcgtggagtgatgggttagcacttaacgcactcattcattctcacaggcccgatctctttgactggaattcagtagtctgccagcaaagtgccacacagcgcctggagcacgcatttaacatagccagataccagctggggattgaaaaactgctggaccccgaggacgtggacacaacttatcccgacaaaaaatccattttgatgtacatcactagcctgtttcaggtgctcccccagcaagtgagtatcgaggccattcaggaggtggagatgctcccccggccacctaaggtcaccaaggaggagcacttccagctccatcaccagatgcactacagtcagcagattacggtatcactggcgcagggttacgagaggacttcgtcccccaagccacgtttcaagagttacgcatacacccaggccgcctacgttacaacttccgatcctacacggtcaccattcccttcccagcacctagaagccccagaggataaatcctttggatcttctttgatggagagcgaggtcaacttggatcggtatcaaacagccctggaggaggtgctgagctggctcctgagcgcggaagacacactgcaggcgcagggagagatctctaacgatgttgaggtggtgaaagatcagtttcacacgcatgagggatacatgatggatttgacagcgcaccagggacgggtgggtaatatactgcaattaggctctaagttgattgggaccggcaagctgtccgaggacgaagaaacagaagtgcaagagcagatgaacctgctgaatagccgctgggagtgcctgcgggtggctagtatggagaagcagtctaacctgcaccgtgtgctcatggaccttcaaaaccaaaagctgaaagaattaaacgattggttaaccaagacagaggagaggacgaggaaaatggaggaagaacctctcggcccagacctcgaggacctgaaacgccaggtccaacagcacaaggtactgcaggaagacctggagcaggaacaggtaagggtcaatagtctgacccatatggttgtcgtggtcgacgaatcctctggagaccatgcaacagccgcactcgaagagcagctcaaagtcctgggcgatagatgggccaacatttgtcggtggaccgaagacagatgggttctactccaggacatcctgctcaagtggcagcgccttactgaggagcagtgtctgttcagtgcatggctctccgaaaaggaggacgcagtgaataagatccacaccaccggctttaaagaccagaacgagatgctcagtagtctgcagaagctcgctgtcttgaaggccgacctggagaaaaagaagcagtccatgggaaagctctacagtctgaagcaggatctcctaagtaccctgaagaataagtccgtgactcagaagacagaggcctggctggataattttgccagatgttgggataacttagtccagaagctggaaaaatccacggcgcaaatcagccaggctgtgaccaccacacaacccagtctgacccagaccaccgttatggaaaccgtgacaaccgtgaccacacgtgagcagatcttagttaagcacgcgcaggaggagctgccgcctcccccgccacagaaaaagcgacagattaccgtcgactctgaaatcagaaagagactggatgtagatataactgagctgcattcctggatcacacggagcgaggcagtgctacagtcccccgagtttgccattttcagaaaagagggtaatttctccgatctgaaggagaaagtcaatgccatagaaagggagaaggctgagaaatttcggaagttacaggacgcctcacggtctgcacaagccctggtcgagcagatggtcaacgagggagtaaacgccgattccatcaagcaggcctcagagcagctgaacagccggtggattgagttttgccaactcttgagtgagcgcctcaattggttagagtatcagaataatataatagcattttacaaccagttacagcagttagagcagatgaccacgaccgccgaaaactggttaaagatacaacccaccacaccttccgaaccgactgccatcaaatcacagctgaagatatgtaaggatgaggtgaaccggcttagcgatctgcagccacaaatcgagagactaaagatacagagcatcgctctgaaggagaagggccaggggccaatgttcctggatgcggatttcgtggccttcacaaatcattttaagcaggtgttctcagatgtgcaagcccgagagaaagagctccagacgatcttcgacacactgccccctatgagataccaggaaaccatgtccgccatccgtacatgggtgcagcaatccgagacaaagctcagtattccccaattgagcgtcacggattacgagatcatggagcagcggctgggggagcttcaggccctgcaaagtagtctccaggagcagcagagcggcctgtactatctgagcaccaccgtgaaggagatgtctaagaaagccccttctgaaatatcccgaaagtaccagtctgagtttgaggaaatcgagggcagatggaagaagctgtccagtcagctcgtcgaacactgccagaaattagaagagcagatgaataagctccgaaagattcaaaatcacatccaaaccctgaaaaagtggatggccgaagtggatgtatttctgaaggaggagtggccagctttgggcgactccgaaattctgaaaaaacagctgaagcagtgcagactgctggtgtctgatattcagacaatccagccaagtttgaactctgtgaacgaggggggccagaagattaaaaacgaggccgaaccagagttcgcaagcagactggagaccgaacttaaagagctcaacacccagtgggatcacatgtgccagcaagtctacgccaggaaagaagccttgaagggaggtctggaaaaaacagtgtccttgcagaaggatctgtccgaaatgcacgagtggatgacgcaggccgaggaggaatatctcgagagagacttcgagtacaagacccctgacgagctccagaaggctgtggaggagatgaagcgagcgaaagaagaggcccagcagaaggaagccaaagttaagctcctgactgaatcggtgaatagcgttattgcacaggcccccccagttgcacaagaagcgctgaagaaggaactggagactcttaccacaaactaccagtggctatgcacacgcttgaacgggaaatgtaagacgctagaagaagtgtgggcctgctggcatgagctattgtcgtacctggagaaagcgaataagtggctgaacgaggtcgagtttaagttgaagactaccgagaacatccctggaggagccgaagaaatcagcgaggtgctggattctctagagaatttgatgcgacacagtgaggataatcctaatcaaattagaattctggctcagaccctgacggacgggggggtgatggacgaactcatcaatgaggagcttgaaacgtttaattctcgctggcgagagcttcatgaggaggctgtgcggcgccagaagctgctcgagcaatcaattcaaagcgctcaggaaaccgagaagagtctgcacctgatacaggagagtttgacctttattgataaacagttggcagcttatatagcagacaaagtggacgccgctcagatgccccaggaggcacagaagattcagtccgatcttacctcccatgagatttctctcgaggaaatgaaaaagcacaaccagggcaaggaggccgcccagcgggtgctgtcacagattgatgtggcacaaaaaaagcttcaagatgtgagcatgaagttccgactcttccagaaaccggcaaactttgagcagcgcttacaggaatccaagatgattttagatgaggtcaaaatgcacctgccagccctggagaccaaaagcgtcgagcaggaagtagtgcaatcacagctgaaccattgtgtgaatttatacaagagcctgtcagaggtcaaatcagaggttgaaatggtgatcaagactggccggcagatcgttcagaaaaagcagaccgagaaccccaaggagttagacgagagagtgactgctctcaagctccactataacgagctgggtgccaaagtgactgaacgcaagcaacaattagagaagtgcctgaaactgtcacgtaagatgaggaaagagatgaatgtccttaccgagtggctggccgcaacagacatggagctcacgaagcgtagcgccgttgagggaatgccaagcaacttggattctgaggtggcctggggcaaggcaacccaaaaggagatcgagaaacagaaggttcacttgaagtcaattaccgaagtgggcgaggccctgaagacagtattggggaaaaaggaaacactggtcgaggataagttatcccttctgaactcaaactggatcgccgtgacctcccgagccgaagaatggcttaatctcttgctagaatatcaaaaacatatggagacattcgatcagaatgtggaccacatcacaaaatggattattcaagcagacaccctgcttgatgagtcagaaaagaagaaacctcagcagaaggaggatgttttgaaacgactcaaggctgagctaaatgacatccgaccaaaggtcgattctacccgtgaccaggctgccaatttgatggctaaccggggagaccactgtcgaaaactggtggagcctcaaattagtgaactgaaccatagattcgccgccatctcccacaggatcaaaaccggtaaggcatctattcctctcaaggagctggaacagtttaactccgacatccagaagctgttagagcccctggaagccgagatccagcagggagtcaacctgaaagaagaggattttaataaagatatgaacgaagacaacgagggcacagtgaaggagctcctacaaaggggtgacaatctgcagcaacgtatcacagatgaaaggaaacgggaggagattaagattaagcagcagttactgcagaccaaacataacgcactgaaggacctgagaagtcagcgcaggaagaaggctcttgaaatttcccatcagtggtaccagtataagcgccaggccgatgatctgttgaagtgtcttgatgatatcgagaaaaagttagcttccctaccggaacctcgtgatgagaggaaaattaaagaaatagacagggagttgcagaagaagaaagaggaactaaacgcagttcggcggcaggctgaagggctcagtgaagacggggccgctatggcagtggagcccacccaaatccaactgtcaaaacgatggcgcgaaatcgaaagtaaattcgcccagtttaggcgccttaattttgcccagatccacacagtacgagaagagacaatgatggtgatgactgaagatatgcctctcgaaatcagctacgtgcctagcacctatcttacggaaattacacacgtctctcaggcactccttgaggtggaacagctgctgaatgctcccgatctgtgcgcgaaggattttgaagatctatttaagcaggaagaaagcctgaaaaatatcaaggactctctgcagcagagcagtgggcgcattgacatcatccatagcaagaagaccgcggcgctccagagcgctacaccagttgaaagagtgaagctgcaggaagccctgagccagttagacttccaatgggagaaggtgaataagatgtacaaggatcggcagggtcgatttgaccgatcggtagaaaagtggcggagatttcattatgacataaagatatttaatcagtggctcacagaggccgaacagttcctaagaaagactcagatacccgagaattgggaacacgctaaatacaagtggtatttgaaggagctgcaagacgggattggacaacggcagaccgtggtccggactttgaacgcgactggagaggaaatcatacagcagagttcaaagactgatgcgtccatactgcaggagaagttgggctctttgaatctaagatggcaagaggtatgcaagcaactgtccgaccgaaagaagagactggaggagcagaagaacatcctgtcggagttccagcgtgatctaaatgaatttgtactgtggttggaagaagcagataatatcgcctccataccactggagcctggcaaagaacagcagcttaaggaaaaactggaacaggttaaacttctggtggaggagctccctctgcggcaaggcatcttgaagcagctcaatgaaaccggcggcccagtcctggtaagcgctcctatttcccctgaggaacaggacaaactcgagaacaaactgaaacagaccaacctacagtggattaaagtttcaagggctctaccagaaaaacagggggaaatagaagctcagataaaagacctaggtcaactggagaaaaaacttgaggatttggaagagcaactgaaccacctgctcctgtggctgtctccaatcaggaatcagttagagatctacaatcaaccgaaccaggagggtccttttgatgtcaaagagaccgaaattgctgtgcaggccaaacagcccgatgtcgaggagatcctgtcaaagggccagcacctttataaagagaaaccagcaacacagcctgtgaaacgaaaactggaggacctttcatcggaatggaaagcggtcaatagactgctacaggaactccgggctaaacagccggacctagcccccgggctgactacaattggcgcctctcccacccagactgtgacactggttactcagccagtcgtaacaaaagaaacagcaatttctaagctggagatgccatcatcactgatgctagaagtgcctgcccttgctgacttcaatagggcatggacagaattaacagactggctttccctgcttgatcaagtgattaaatcccagcgggtgatggtgggtgatctggaggatattaatgagatgatcatcaaacaaaaagctacgatgcaagatctggaacagagacgaccacaactagaggagctgattaccgctgcccagaatctgaagaacaagacctcaaaccaggaagcacgaaccattatcacggaccggattgagcgcatacagaaccagtgggatgaagtgcaagagcacttgcagaaccggcggcagcaactcaacgaaatgttaaaggattccacacaatggctggaggcgaaggaagaggccgaacaggtgttggggcaggctcgagccaagctggagtcctggaaagagggaccctacacagtggatgctattcagaagaaaataactgagaccaaacaattggctaaggacctcaggcagtggcagacgaatgtcgacgttgctaacgatctcgctctcaaactcttacgggactactccgccgatgatacacgcaaggtgcacatgattactgaaaacatcaatgcctcctggaggagcatccacaaacgggtatccgaacgggaagccgcattagaagaaacccaccgactgctccaacagtttccacttgatctggagaaatttctggcgtggctgacagaggcagaaacgaccgccaacgtcctccaggatgccacccgaaaagagcgcttacttgaggatagcaaaggggtcaaggagctcatgaaacagtggcaggatctccagggcgaaatcgaagcccacacagacgtctaccacaaccttgatgagaatagtcagaagatactacgcagtctggaggggagtgatgacgcagtcctgctgcaacgacgcctggacaacatgaacttcaaatggtctgaattgcgaaaaaaatcactcaatattagatcccaccttgaagctagctccgatcagtggaaaaggttgcatctcagtctgcaggaactactggtgtggctccaactaaaggatgatgaactttctcggcaggcccctataggtggcgattttcccgccgtgcagaaacagaacgacgttcacagagccttcaaaagggagctcaagaccaaggagccagtgattatgagtactttagagaccgtcagaatctttctgactgaacagcccctggaaggtctggaaaaactgtatcaggagccacgggagttgcctcctgaagagagagcccagaatgtaactcgcctccttcgaaaacaagccgaggaggttaatacagagtgggagaagctgaacctgcattctgccgactggcagaggaaaattgatgagaccctcgagcggctgcgagagctccaagaggctaccgacgaacttgaccttaagttaagacaagccgaagttattaagggatcttggcagcccgtgggcgatctcctgatcgatagccttcaggatcacctcgaaaaggtcaaagcactccggggtgaaatcgctcccctgaaggagaacgtatcccatgtgaacgatctggcacgccagctgacgactttgggcattcagctgtctccatacaatctgtcaactctggaggatctcaacactcgctggaagttgctccaggttgcggtcgaggaccgcgtgcggcaactgcacgaagctcatagggactttggaccagcatctcagcactttctctccaccagtgtccaagggccctgggagagagcaatcagccccaacaaagtcccctactacatcaaccatgaaacacagacgacttgttgggaccacccgaagatgacagaactttaccaatccctggctgacctgaataatgtgcgattcagtgcctaccgcaccgcaatgaagcttcggaggttacaaaaagcgttgtgcctggatctgttgtccctgtccgctgcatgcgacgcactggaccagcataatctgaaacagaatgatcaacccatggatatcttgcagattatcaattgcttgacaacgatttatgacaggctcgaacaagaacataacaatctggtcaacgtaccgctgtgcgttgatatgtgccttaattggttgcttaatgtatatgacaccgggagaactggccgcatccgtgtgctgtctttcaagaccggcatcatcagcctctgtaaagctcaccttgaggataaataccggtacctcttcaagcaggtggcatctagcaccggcttttgtgaccagaggcgattgggcctcctgctgcacgattcaattcaaattcccaggcagcttggagaggtggcatcatttggtgggtccaacatagaaccctccgtgagatcctgttttcagttcgcaaacaacaaacccgagattgaggccgcactgtttctggactggatgagactcgaaccacagagcatggtttggcttccagtgctgcaccgggttgctgcagctgagacggcaaaacatcaagcaaagtgcaacatttgtaaggagtgccctatcatcgggtttcggtatagaagcttgaagcacttcaactatgatatatgtcagtcctgttttttcagcggaagggtcgcaaagggacacaagatgcattaccccatggttgagtactgtactccaacaacatctggagaggatgtgcgggattttgccaaagttctaaaaaataagttccggaccaaaagatatttcgcaaagcaccctcgcatgggatacctgcccgttcaaaccgtgctggagggtgataacatggagacacccgtgactctcattaacttttggcctgtggacagtgctccagcttcatctcctcagctgtcacacgatgatacccacagccggatcgagcactacgctagtcgattggcggagatggagaatagcaatggctcttacctgaatgactccatctctccaaatgaatcaattgatgacgagcatttactaattcagcactattgtcagagcctgaatcaggattccccactgtcacaaccgcgaagccccgcgcaaatacttattagcctggagtctgaagagcgcggagagctggaacggatcctggccgacctagaggaggaaaacaggaacttacaggccgaatatgaccgcctgaagcagcagcatgagcataaaggactctcacctcttccatccccacctgaaatgatgccgacgagcccgcagagcccgagggatgcagagcttatcgcggaggctaaactgcttaggcagcataagggcaggctggaggcaagaatgcagattctggaagaccataacaagcaacttgaaagccaactgcatcgcctgaggcagcttctcgagcagcctcaggccgaagccaaggtgaacggcaccactgtgagcagcccgagcactagtcttcagagaagtgattcatcccagcccatgctactccgtgtggtcggctcacagactagcgactcaatgggtgaggaggaccttctgagccctcctcaagacacatccaccgggttggaagaggtgatggagcaactgaataatagctttcccagttcccgaggcagaaatacaccaggcaagccaatgcgtgaggacacgatgtag

SEQ ID NO: 142746 - DNA, 11046 bp, Artificial Sequence
  derived and/or modified sequence
atgagtgaggtatcatccgatgaaagagaggatgtgcagaaaaagacttttaccaagtgggtcaatgctcaatttagcaaatttggtaagcagcacatcgaaaacctgttttctgatctccaggacgggaggcggctgctggatctcctggaaggcttgactggccaaaagctccctaaggaaaaaggctccacccgcgtgcacgccctgaacaacgtaaataaggcccttagagttctgcagaacaacaacgttgatctcgtgaatattggctccacggacattgtcgatggcaaccacaagctcacattaggccttatatggaacatcattcttcactggcaggttaaaaacgtaatgaagaacattatggcgggactgcagcagaccaactccgagaaaattctcctttcatgggtgcgacagtcgacccgaaattacccccaagtcaacgtgatcaacttcactacctcctggagcgatgggcttgccctgaacgccctgatccactctcaccggccagacctgtttgactggaatagcgttgtatgccagcaatcggctacgcagaggcttgagcacgcatttaatatcgctcggtaccaactgggcatcgaaaagctgcttgatcccgaggacgtggataccacctacccagacaaaaaaagcattctgatgtacattaccagcttgttccaagtgttgccgcagcaggttagtatcgaagctatccaagaggtagaaatgctcccccgtccccctaaggtgaccaaggaagaacattttcagctccaccaccagatgcattactctcagcagattactgtctctctggctcagggatacgaacgcacaagctcgcccaaaccacgtttcaagtcttacgcttacacccaagctgcttacgtcacaacatccgacccaacgcgatcccccttccccagccagcacttggaagccccagaggacaagagcttcggaagttccttgatggaatccgaggtgaatctcgatagataccaaactgccctggaagaagtgctcagctggttgctgagcgcagaggacacattgcaggcgcagggagaaatcagcaatgatgtcgaagtggtcaaagatcagtttcatacacacgaaggatatatgatggatctgacagcacatcaggggagagtgggaaatatcctgcaattgggctcgaagctaatcggtactggcaagctctccgaagacgaagagaccgaagttcaggagcagatgaaccttcttaactcacggtgggagtgcttaagggtggcttccatggagaagcaatctaacctacaccgtgtcctgatggatctgcagaatcaaaagttgaaggaactgaatgactggcttacaaaaacagaagaacgcacccgtaaaatggaggaggagcctctaggtcccgatctggaagatctgaagcgccaggtacagcagcataaggtcctgcaggaggatctggaacaggagcaggtaagggtcaattccctcactcatatggttgtggttgtggacgaaagtagcggagaccatgccactgccgctctggaagaacagctcaaggtgctcggcgacagatgggccaacatctgccgctggacagaagaccgatgggtactcttgcaagatatcctcctcaaatggcaacggttgactgaagaacagtgcctgttcagtgcatggctttccgagaaggaagatgcggtgaataagatccacacaaccggattcaaggatcagaacgagatgcttagctcgctgcagaaactggcagtcctgaaagccgacctggagaaaaagaagcagtcgatgggaaaactatatagcctgaaacaggacctgctatctactctgaagaacaagtccgtcactcagaagactgaagcctggctggataacttcgcacggtgctgggacaacctggtgcagaagcttgagaaaagtacagcccagatttctcaggccgtcaccactacgcagccaagcttaacccagactacagtgatggagacagtaacaacggtgacaaccagggaacaaattcttgttaagcacgcccaggaggagttacccccacccccaccccagaaaaagcgccagataacagtggacagtgagatccgtaaacgcctagacgtggatattaccgagctgcattcatggattacaagaagcgaggcagtgttgcagtcccctgagttcgccatatttcgaaaagaaggaaacttcagtgacttaaaagagaaggtaaacgcgatcgagcgagagaaagccgagaagtttcgcaaattgcaggatgcctccaggtccgcgcaggccctggtggagcagatggtgaatgagggcgtgaatgccgatagtatcaagcaagcgtcagaacagctgaactctagatggatagaattctgccagctgttgtccgaacggcttaattggcttgaatatcagaataacattatagctttttacaatcaattacagcaactggagcagatgacaaccaccgccgagaactggctgaaaatccaacccactactccatctgagcctaccgcgattaagtcccaactcaaaatttgcaaggacgaggtgaatcggctgtccgacctgcagccccagatcgaacgcctgaagattcaaagcatcgccctgaaggaaaaaggacagggccctatgtttcttgatgctgacttcgtagcattcacaaaccatttcaaacaggtgttctcagatgtgcaggcacgggagaaagagctgcagaccatctttgacaccctgccacctatgcggtatcaggagacgatgagtgccatcagaacatgggtgcagcaatctgagacaaagttgagtattcctcagctcagtgtgaccgactacgaaatcatggaacaacgtctgggagaactccaagccctgcagagcagcctccaggagcagcaatcgggtctgtactatctatccactaccgtgaaggagatgagcaagaaggccccaagtgaaatctctcggaagtatcagtctgagttcgaggagattgaagggaggtggaagaagttgagcagccagctagtcgagcattgccagaagctcgaagagcaaatgaacaagctccgaaaaatccagaaccacatccagacgctgaagaagtggatggcagaggttgacgtgttcctgaaagaagagtggccagcattgggtgattctgaaattctaaagaagcagttgaagcagtgtcgccttctagttagcgatatccagaccatccaaccctccctgaactccgttaacgagggcggacagaaaatcaagaacgaggcggagccggagtttgcctcaaggctggaaaccgaactcaaagagctgaacacacaatgggaccacatgtgtcaacaggtgtatgccagaaaagaggccttgaaagggggactagagaagacagtgtccttacagaaagacttgtctgagatgcatgagtggatgactcaggccgaggaagagtaccttgagagggacttcgagtacaagacgccggatgaactgcaaaaggcagtggaagagatgaaaagagccaaagaggaagcacagcagaaggaggctaaagtcaagttgctgactgagagcgtgaactcagtcattgcccaggcccctccagtcgcccaggaagcgctcaagaaggagctggagacactcactactaactaccagtggctgtgtaccagactgaatggcaagtgtaaaaccctcgaggaagtatgggcgtgctggcacgagctgctgtcctacctcgaaaaggctaacaaatggctcaatgaggtggaattcaagctgaagacaacagagaacatccctggaggggctgaggaaatctccgaggttctggattctctggaaaaccttatgcgacactcagaagacaaccccaatcagattcggatacttgcccagacgttgaccgacgggggtgtcatggatgagttgataaatgaagaattagagaccttcaactcgagatggcgggagttacacgaggaggcagtgcgcaggcagaagctgttagagcagtcaattcagtctgctcaggaaactgaaaagagcctccacctcattcaggagagtcttacattcatcgacaagcagctagccgcatacattgcagataaagtagacgccgctcagatgcctcaagaggctcagaaaattcagagcgacctgacttcccacgagatcagtctggaagagatgaagaagcacaaccaaggaaaggaagccgcacagagggtgttgtcacagatcgacgtcgctcaaaagaaactgcaggatgtgagcatgaaatttcgcctctttcagaaaccagccaacttcgagcaacggctgcaggaaagtaaaatgatccttgacgaagtgaagatgcacttgcctgcccttgagaccaagagtgttgagcaggaggttgttcaatcacaactgaaccattgcgtgaatctctacaagtcactgagtgaagtgaagagtgaggtcgagatggtgattaaaaccggcagacaaatcgttcagaagaagcagactgagaaccctaaggagctggatgaacgagtaaccgctttgaagctgcactataacgaattaggggctaaagtgaccgaacggaagcagcagcttgagaagtgtcttaagctaagtcgcaagatgcgcaaagaaatgaatgtgttaacggagtggctggctgccacagacatggagctgaccaaacgttccgcagtggagggcatgcccagcaacctggacagcgaagtcgcgtgggggaaagctacccagaaggagatagaaaaacagaaggttcatctcaagagcatcactgaggtcggtgaggccctgaagaccgtgctgggcaagaaggagactctggtcgaggacaaactcagtctattgaatagcaattggatagcagtgacctctagagcagaggaatggctaaacctgttacttgaataccagaagcatatggaaacttttgaccagaacgttgaccacattaccaaatggattattcaggccgataccctgctggacgaaagcgagaagaagaagcctcagcagaaggaggacgtgttgaaacgactcaaggccgaattaaatgatatcagaccaaaagttgattccacccgtgatcaggctgctaatctgatggccaaccggggtgaccactgtcgtaagctggtggagcctcaaattagcgagttgaatcacaggttcgcagcgataagccatcgcatcaaaactggtaaggcttcaatccccctcaaggagcttgagcagtttaactctgacatccagaagctgctcgagccgttggaagcagaaatacagcagggcgtgaaccttaaagaagaagatttcaacaaggacatgaatgaggacaatgaggggaccgtgaaagagctcctacagcggggtgacaacctacagcagcggattactgacgagaggaaaagggaggaaatcaagattaagcagcagctgctgcagaccaagcacaatgccctaaaagacctgaggagtcagcgccgaaagaaagctctagagattagccaccagtggtaccagtacaaaagacaggctgacgatctgttaaaatgtctcgacgacattgagaaaaagttagcctctcttccagagcccagagatgaaagaaagatcaaagaaatcgacagagagctgcaaaagaagaaggaggaattaaatgctgttagacgccaggctgagggcctgtccgaagacggagctgccatggctgtggagccaactcagattcaactttccaagcggtggcgggaaatagagagcaaattcgcccagtttcgcaggctgaacttcgctcagatccacactgtcagagaggagacgatgatggtaatgactgaggacatgccacttgaaatctcttatgtaccctccacatatctcactgagatcacccacgtgtcccaggctttgctggaggttgagcaactgttgaacgccccagacctgtgcgctaaggacttcgaagatctgttcaagcaagaagagagcctgaaaaatataaaggacagcttgcagcagtctagtggcaggatcgatattatccattctaaaaaaactgctgctcttcagagcgccacacctgtggagcgggtaaagctgcaagaggctctcagtcaattagatttccaatgggaaaaggtgaataagatgtataaagaccgacaaggaaggttcgaccgcagcgtggagaagtggcggcgatttcactatgacatcaagattttcaaccagtggctcacagaggccgaacaatttctcagaaaaactcagattccagagaactgggaacatgcaaagtacaaatggtatctgaaggagctgcaggatggcattgggcagcgacagactgtcgtcagaacattaaacgccacgggtgaggagattatccagcagagttctaaaacagatgccagcattctgcaggaaaagctggggagcctaaaccttagatggcaagaagtatgcaagcagctctctgaccgtaaaaaaaggcttgaggagcaaaagaatatactttcagagttccagagggatctcaacgaattcgttctttggctggaggaagccgacaacatcgcctcaatcccattggagcctggtaaggaacaacaactcaaggaaaagttagagcaagtcaagctgcttgttgaagagctgccactgcgccaggggatccttaaacagctcaacgagacaggaggtccagttctggtaagtgccccaatttcccctgaggaacaagacaagctggagaacaaactcaagcagacaaatctgcaatggattaaggtttccagggctctccccgaaaagcaaggggagatcgaggctcaaatcaaagatctgggccaactggaaaaaaaactcgaggatctagaggaacagctgaatcatctcctgttgtggctgagcccaatcaggaatcaactggaaatctataaccagcctaaccaggaaggtccatttgacgtgaaggagacagagatagccgtacaagcaaaacagcccgatgtggaggagattctctcaaaggggcagcatctgtacaaggaaaagccagccacccagccagtgaagcgcaaactcgaggacctgagcagtgagtggaaagcagtgaaccgcctgctccaggaattacgtgcaaagcaacccgatctggcccctggactgacaacaataggcgctagcccgacacagaccgtgaccctggtcacacagcccgtggtgaccaaagagaccgctatctccaaactcgagatgccatcctcccttatgctggaagtgcccgcactcgccgactttaaccgggcatggacggaactcacagactggctgagtctactggatcaagtgataaagagccaacgagttatggtcggagacttagaggacattaatgagatgatcataaaacagaaggcaactatgcaggatctcgaacaaaggcgaccccagttagaggaattaataacggcagcccagaatctgaagaacaagacgagtaaccaggaggcacggaccattatcactgataggatcgagagaattcagaaccaatgggatgaggttcaggaacatctccaaaatagacgccaacagctgaacgagatgcttaaagacagcacccagtggctggaagccaaggaggaggctgagcaggtgttgggccaagcacgagccaagctcgagtcttggaaagaaggcccttacacagtggatgctatccagaagaagattacagagacaaagcagctggccaaggatctgagacagtggcaaaccaacgtcgatgtcgctaatgatctggcactcaagttattaagagactacagcgccgacgacaccaggaaggtccacatgatcaccgaaaacatcaacgcctcttggcggtcaattcataagagggtctctgaacgcgaggctgcactggaagaaacccacagattgctccagcaattcccactcgacctggaaaagtttctcgcctggcttaccgaagccgaaaccacagccaacgttttacaggatgccactcggaaggaacggctgctggaggacagtaaaggcgtcaaggagctcatgaaacagtggcaggatctccagggggagatagaggcacacacagatgtttaccataaccttgacgagaatagtcagaagatcttgagatcactcgaaggaagtgacgatgctgtgctcctacagaggcgtctggacaatatgaacttcaagtggagtgaactgaggaaaaagtccctcaatatcaggtcacatttggaagcctcaagtgatcaatggaagcggctgcacttatcactccaggaactgctcgtgtggctccaacttaaggatgatgaactctcgcgtcaggcaccaatcggcggagatttcccagcggtgcagaagcagaacgacgtgcacagagcatttaaacgagaattgaaaactaaagagcctgttattatgtcgactctcgaaaccgtacgaatctttttaacagaacagccccttgagggactggagaagttgtaccaggaacctagagagctgcctcccgaagagagagcgcagaatgtcacccgcttgctacgaaaacaggccgaggaggtcaatacggagtgggaaaagctgaacctccactcagctgattggcagcgaaaaatcgatgagacactggaaagactaagagaactccaggaagcaacagatgaactggatctgaagctgcgccaggctgaagtcattaagggctcctggcagcccgtaggcgacttgctcatcgactcactccaggatcacttggaaaaagtgaaagcgctcaggggtgagattgcaccgttgaaagaaaacgtcagccacgtgaacgacctcgctagacagctcactacacttggtattcaactgagcccttacaatctttcaaccctcgaggacctgaatacacggtggaaactgctgcaagtggccgtggaggatcgggtcaggcaactgcacgaggcccaccgggatttcggtcccgcttctcagcacttcctcagtacttccgttcaggggccatgggagagagccatttcacccaataaagtcccttactatatcaaccatgagacccaaactacctgttgggatcaccccaaaatgactgaactttaccagagcttggccgacttgaacaatgtgcgctttagtgcatataggaccgcaatgaaactgcgaaggctgcaaaaagccctttgtctcgacctgctgtctctgagcgccgcttgtgacgccctcgatcagcacaatctcaagcagaacgatcaaccaatggacattttacagatcataaattgccttactacaatatatgaccgcctcgaacaggagcataataatttggtcaatgttcctctgtgcgtggacatgtgcctgaattggctgctgaacgtatacgataccgggcgaacaggccgaatccgggtcctgtcttttaagactggtatcatttccctatgtaaggcgcatctcgaggataagtacagatacctgttcaagcaagtcgcctcctcgaccggcttctgcgatcagaggaggctaggtctgctcctgcatgactctattcagatccccagacagctcggcgaggtagcttccttcggaggaagcaacattgagccatccgtgcgctcatgttttcaattcgccaacaacaaaccggaaattgaggctgctttgtttctggattggatgagacttgaacctcagtcgatggtatggttgcctgtgctgcatcgagtggcagccgctgaaacagctaagcatcaagccaaatgcaacatctgcaaggaatgccccatcattggattccgttataggtcacttaaacattttaactatgatatctgtcagagttgctttttttcaggaagagtggccaagggacataagatgcattatccaatggtggagtattgtacacccacaacttctggcgaagatgtgagggacttcgccaaagttctaaaaaataaatttagaactaagaggtattttgctaaacacccgcgtatgggttatctgccagtccagaccgtcctggagggggacaacatggaaactcccgtgaccctgattaacttttggccagtggacagcgcacccgcaagcagccctcagctgagccatgacgacacgcatagcaggattgagcactacgcaagtcgtctggctgagatggagaactccaacgggagctacctcaacgactccatctctcccaacgaatctatcgatgacgagcacctgctgatccagcactattgtcagtcactgaatcaggattccccactgtcccaaccacggtctcccgctcagatcttaatcagtctggagtccgaggaacggggagagcttgagaggatcctggcagatctcgaagaagaaaatcgaaacttacaggccgagtatgaccgcctcaagcagcagcatgagcacaaaggattatccccactccctagcccaccagaaatgatgcctacaagcccacagtcccccagggacgctgagctcattgccgaggcgaaacttttgaggcaacataagggaaggcttgaagcgcgtatgcagatcctggaggaccacaacaagcagctagaatctcagttgcacaggctgcgacaactgttggagcagccgcaggccgaagctaaggtgaacggcaccacagtgtcttcacccagcacaagcctccagcgcagtgattcgtcacagcctatgctgctgcgagtggtgggaagccaaacctctgattcaatgggggaggaagacctcctcagtcctccacaggataccagcacgggcctcgaagaggtgatggagcagctgaacaacagcttcccatcgtctcggggtcgcaatactccaggcaagcccatgcgagaagatacgatgtag

SEQ ID NO: 142747 - DNA, 11043 bp, Artificial Sequence
  derived and/or modified sequence
atgagcgaggtgagcagcgacgagcgcgaggacgtgcagaagaagaccttcaccaagtgggtgaacgcccagttcagcaagttcggcaagcagcacatcgagaacctgttcagcgacctgcaggacggccgccgcctgctggacctgctggagggcctgaccggccagaagctgcccaaggagaagggcagcacccgcgtgcacgccctgaacaacgtgaacaaggccctgcgcgtgctgcagaacaacaacgtggacctggtgaacatcggcagcaccgacatcgtggacggcaaccacaagctgaccctgggcctgatctggaacatcatcctgcactggcaggtgaagaacgtgatgaagaacatcatggccggcctgcagcagaccaacagcgagaagatcctgctgagctgggtgcgccagagcacccgcaactacccccaggtgaacgtgatcaacttcaccaccagctggagcgacggcctggccctgaacgccctgatccacagccaccgccccgacctgttcgactggaacagcgtggtgtgccagcagagcgccacccagcgcctggagcacgccttcaacatcgcccgctaccagctgggcatcgagaagctgctggaccccgaggacgtggacaccacctaccccgacaagaagagcatcctgatgtacatcaccagcctgttccaggtgctgccccagcaggtgagcatcgaggccatccaggaggtggagatgctgccccgcccccccaaggtgaccaaggaggagcacttccagctgcaccaccagatgcactacagccagcagatcaccgtgagcctggcccagggctacgagcgcaccagcagccccaagccccgcttcaagagctacgcctacacccaggccgcctacgtgaccaccagcgaccccacccgcagccccttccccagccagcacctggaggcccccgaggacaagagcttcggcagcagcctgatggagagcgaggtgaacctggaccgctaccagaccgccctggaggaggtgctgagctggctgctgagcgccgaggacaccctgcaggcccagggcgagatcagcaacgacgtggaggtggtgaaggaccagttccacacccacgagggctacatgatggacctgaccgcccaccagggccgcgtgggcaacatcctgcagctgggcagcaagctgatcggcaccggcaagctgagcgaggacgaggagaccgaggtgcaggagcagatgaacctgctgaacagccgctgggagtgcctgcgcgtggccagcatggagaagcagagcaacctgcaccgcgtgctgatggacctgcagaaccagaagctgaaggagctgaacgactggctgaccaagaccgaggagcgcacccgcaagatggaggaggagcccctgggccccgacctggaggacctgaagcgccaggtgcagcagcacaaggtgctgcaggaggacctggagcaggagcaggtgcgcgtgaacagcctgacccacatggtggtggtggtggacgagagcagcggcgaccacgccaccgccgccctggaggagcagctgaaggtgctgggcgaccgctgggccaacatctgccgctggaccgaggaccgctgggtgctgctgcaggacatcctgctgaagtggcagcgcctgaccgaggagcagtgcctgttcagcgcctggctgagcgagaaggaggacgccgtgaacaagatccacaccaccggcttcaaggaccagaacgagatgctgagcagcctgcagaagctggccgtgctgaaggccgacctggagaagaagaagcagagcatgggcaagctgtacagcctgaagcaggacctgctgagcaccctgaagaacaagagcgtgacccagaagaccgaggcctggctggacaacttcgcccgctgctgggacaacctggtgcagaagctggagaagagcaccgcccagatcagccaggccgtgaccaccacccagcccagcctgacccagaccaccgtgatggagaccgtgaccaccgtgaccacccgcgagcagatcctggtgaagcacgcccaggaggagctgccccccccccccccccagaagaagcgccagatcaccgtggacagcgagatccgcaagcgcctggacgtggacatcaccgagctgcacagctggatcacccgcagcgaggccgtgctgcagagccccgagttcgccatcttccgcaaggagggcaacttcagcgacctgaaggagaaggtgaacgccatcgagcgcgagaaggccgagaagttccgcaagctgcaggacgccagccgcagcgcccaggccctggtggagcagatggtgaacgagggcgtgaacgccgacagcatcaagcaggccagcgagcagctgaacagccgctggatcgagttctgccagctgctgagcgagcgcctgaactggctggagtaccagaacaacatcatcgccttctacaaccagctgcagcagctggagcagatgaccaccaccgccgagaactggctgaagatccagcccaccacccccagcgagcccaccgccatcaagagccagctgaagatctgcaaggacgaggtgaaccgcctgagcgacctgcagccccagatcgagcgcctgaagatccagagcatcgccctgaaggagaagggccagggccccatgttcctggacgccgacttcgtggccttcaccaaccacttcaagcaggtgttcagcgacgtgcaggcccgcgagaaggagctgcagaccatcttcgacaccctgccccccatgcgctaccaggagaccatgagcgccatccgcacctgggtgcagcagagcgagaccaagctgagcatcccccagctgagcgtgaccgactacgagatcatggagcagcgcctgggcgagctgcaggccctgcagagcagcctgcaggagcagcagagcggcctgtactacctgagcaccaccgtgaaggagatgagcaagaaggcccccagcgagatcagccgcaagtaccagagcgagttcgaggagatcgagggccgctggaagaagctgagcagccagctggtggagcactgccagaagctggaggagcagatgaacaagctgcgcaagatccagaaccacatccagaccctgaagaagtggatggccgaggtggacgtgttcctgaaggaggagtggcccgccctgggcgacagcgagatcctgaagaagcagctgaagcagtgccgcctgctggtgagcgacatccagaccatccagcccagcctgaacagcgtgaacgagggcggccagaagatcaagaacgaggccgagcccgagttcgccagccgcctggagaccgagctgaaggagctgaacacccagtgggaccacatgtgccagcaggtgtacgcccgcaaggaggccctgaagggcggcctggagaagaccgtgagcctgcagaaggacctgagcgagatgcacgagtggatgacccaggccgaggaggagtacctggagcgcgacttcgagtacaagacccccgacgagctgcagaaggccgtggaggagatgaagcgcgccaaggaggaggcccagcagaaggaggccaaggtgaagctgctgaccgagagcgtgaacagcgtgatcgcccaggccccccccgtggcccaggaggccctgaagaaggagctggagaccctgaccaccaactaccagtggctgtgcacccgcctgaacggcaagtgcaagaccctggaggaggtgtgggcctgctggcacgagctgctgagctacctggagaaggccaacaagtggctgaacgaggtggagttcaagctgaagaccaccgagaacatccccggcggcgccgaggagatcagcgaggtgctggacagcctggagaacctgatgcgccacagcgaggacaaccccaaccagatccgcatcctggcccagaccctgaccgacggcggcgtgatggacgagctgatcaacgaggagctggagaccttcaacagccgctggcgcgagctgcacgaggaggccgtgcgccgccagaagctgctggagcagagcatccagagcgcccaggagaccgagaagagcctgcacctgatccaggagagcctgaccttcatcgacaagcagctggccgcctacatcgccgacaaggtggacgccgcccagatgccccaggaggcccagaagatccagagcgacctgaccagccacgagatcagcctggaggagatgaagaagcacaaccagggcaaggaggccgcccagcgcgtgctgagccagatcgacgtggcccagaagaagctgcaggacgtgagcatgaagttccgcctgttccagaagcccgccaacttcgagcagcgcctgcaggagagcaagatgatcctggacgaggtgaagatgcacctgcccgccctggagaccaagagcgtggagcaggaggtggtgcagagccagctgaaccactgcgtgaacctgtacaagagcctgagcgaggtgaagagcgaggtggagatggtgatcaagaccggccgccagatcgtgcagaagaagcagaccgagaaccccaaggagctggacgagcgcgtgaccgccctgaagctgcactacaacgagctgggcgccaaggtgaccgagcgcaagcagcagctggagaagtgcctgaagctgagccgcaagatgcgcaaggagatgaacgtgctgaccgagtggctggccgccaccgacatggagctgaccaagcgcagcgccgtggagggcatgcccagcaacctggacagcgaggtggcctggggcaaggccacccagaaggagatcgagaagcagaaggtgcacctgaagagcatcaccgaggtgggcgaggccctgaagaccgtgctgggcaagaaggagaccctggtggaggacaagctgagcctgctgaacagcaactggatcgccgtgaccagccgcgccgaggagtggctgaacctgctgctggagtaccagaagcacatggagaccttcgaccagaacgtggaccacatcaccaagtggatcatccaggccgacaccctgctggacgagagcgagaagaagaagccccagcagaaggaggacgtgctgaagcgcctgaaggccgagctgaacgacatccgccccaaggtggacagcacccgcgaccaggccgccaacctgatggccaaccgcggcgaccactgccgcaagctggtggagccccagatcagcgagctgaaccaccgcttcgccgccatcagccaccgcatcaagaccggcaaggccagcatccccctgaaggagctggagcagttcaacagcgacatccagaagctgctggagcccctggaggccgagatccagcagggcgtgaacctgaaggaggaggacttcaacaaggacatgaacgaggacaacgagggcaccgtgaaggagctgctgcagcgcggcgacaacctgcagcagcgcatcaccgacgagcgcaagcgcgaggagatcaagatcaagcagcagctgctgcagaccaagcacaacgccctgaaggacctgcgcagccagcgccgcaagaaggccctggagatcagccaccagtggtaccagtacaagcgccaggccgacgacctgctgaagtgcctggacgacatcgagaagaagctggccagcctgcccgagccccgcgacgagcgcaagatcaaggagatcgaccgcgagctgcagaagaagaaggaggagctgaacgccgtgcgccgccaggccgagggcctgagcgaggacggcgccgccatggccgtggagcccacccagatccagctgagcaagcgctggcgcgagatcgagagcaagttcgcccagttccgccgcctgaacttcgcccagatccacaccgtgcgcgaggagaccatgatggtgatgaccgaggacatgcccctggagatcagctacgtgcccagcacctacctgaccgagatcacccacgtgagccaggccctgctggaggtggagcagctgctgaacgcccccgacctgtgcgccaaggacttcgaggacctgttcaagcaggaggagagcctgaagaacatcaaggacagcctgcagcagagcagcggccgcatcgacatcatccacagcaagaagaccgccgccctgcagagcgccacccccgtggagcgcgtgaagctgcaggaggccctgagccagctggacttccagtgggagaaggtgaacaagatgtacaaggaccgccagggccgcttcgaccgcagcgtggagaagtggcgccgcttccactacgacatcaagatcttcaaccagtggctgaccgaggccgagcagttcctgcgcaagacccagatccccgagaactgggagcacgccaagtacaagtggtacctgaaggagctgcaggacggcatcggccagcgccagaccgtggtgcgcaccctgaacgccaccggcgaggagatcatccagcagagcagcaagaccgacgccagcatcctgcaggagaagctgggcagcctgaacctgcgctggcaggaggtgtgcaagcagctgagcgaccgcaagaagcgcctggaggagcagaagaacatcctgagcgagttccagcgcgacctgaacgagttcgtgctgtggctggaggaggccgacaacatcgccagcatccccctggagcccggcaaggagcagcagctgaaggagaagctggagcaggtgaagctgctggtggaggagctgcccctgcgccagggcatcctgaagcagctgaacgagaccggcggccccgtgctggtgagcgcccccatcagccccgaggagcaggacaagctggagaacaagctgaagcagaccaacctgcagtggatcaaggtgagccgcgccctgcccgagaagcagggcgagatcgaggcccagatcaaggacctgggccagctggagaagaagctggaggacctggaggagcagctgaaccacctgctgctgtggctgagccccatccgcaaccagctggagatctacaaccagcccaaccaggagggccccttcgacgtgaaggagaccgagatcgccgtgcaggccaagcagcccgacgtggaggagatcctgagcaagggccagcacctgtacaaggagaagcccgccacccagcccgtgaagcgcaagctggaggacctgagcagcgagtggaaggccgtgaaccgcctgctgcaggagctgcgcgccaagcagcccgacctggcccccggcctgaccaccatcggcgccagccccacccagaccgtgaccctggtgacccagcccgtggtgaccaaggagaccgccatcagcaagctggagatgcccagcagcctgatgctggaggtgcccgccctggccgacttcaaccgcgcctggaccgagctgaccgactggctgagcctgctggaccaggtgatcaagagccagcgcgtgatggtgggcgacctggaggacatcaacgagatgatcatcaagcagaaggccaccatgcaggacctggagcagcgccgcccccagctggaggagctgatcaccgccgcccagaacctgaagaacaagaccagcaaccaggaggcccgcaccatcatcaccgaccgcatcgagcgcatccagaaccagtgggacgaggtgcaggagcacctgcagaaccgccgccagcagctgaacgagatgctgaaggacagcacccagtggctggaggccaaggaggaggccgagcaggtgctgggccaggcccgcgccaagctggagagctggaaggagggcccctacaccgtggacgccatccagaagaagatcaccgagaccaagcagctggccaaggacctgcgccagtggcagaccaacgtggacgtggccaacgacctggccctgaagctgctgcgcgactacagcgccgacgacacccgcaaggtgcacatgatcaccgagaacatcaacgccagctggcgcagcatccacaagcgcgtgagcgagcgcgaggccgccctggaggagacccaccgcctgctgcagcagttccccctggacctggagaagttcctggcctggctgaccgaggccgagaccaccgccaacgtgctgcaggacgccacccgcaaggagcgcctgctggaggacagcaagggcgtgaaggagctgatgaagcagtggcaggacctgcagggcgagatcgaggcccacaccgacgtgtaccacaacctggacgagaacagccagaagatcctgcgcagcctggagggcagcgacgacgccgtgctgctgcagcgccgcctggacaacatgaacttcaagtggagcgagctgcgcaagaagagcctgaacatccgcagccacctggaggccagcagcgaccagtggaagcgcctgcacctgagcctgcaggagctgctggtgtggctgcagctgaaggacgacgagctgagccgccaggcccccatcggcggcgacttccccgccgtgcagaagcagaacgacgtgcaccgcgccttcaagcgcgagctgaagaccaaggagcccgtgatcatgagcaccctggagaccgtgcgcatcttcctgaccgagcagcccctggagggcctggagaagctgtaccaggagccccgcgagctgccccccgaggagcgcgcccagaacgtgacccgcctgctgcgcaagcaggccgaggaggtgaacaccgagtgggagaagctgaacctgcacagcgccgactggcagcgcaagatcgacgagaccctggagcgcctgcgcgagctgcaggaggccaccgacgagctggacctgaagctgcgccaggccgaggtgatcaagggcagctggcagcccgtgggcgacctgctgatcgacagcctgcaggaccacctggagaaggtgaaggccctgcgcggcgagatcgcccccctgaaggagaacgtgagccacgtgaacgacctggcccgccagctgaccaccctgggcatccagctgagcccctacaacctgagcaccctggaggacctgaacacccgctggaagctgctgcaggtggccgtggaggaccgcgtgcgccagctgcacgaggcccaccgcgacttcggccccgccagccagcacttcctgagcaccagcgtgcagggcccctgggagcgcgccatcagccccaacaaggtgccctactacatcaaccacgagacccagaccacctgctgggaccaccccaagatgaccgagctgtaccagagcctggccgacctgaacaacgtgcgcttcagcgcctaccgcaccgccatgaagctgcgccgcctgcagaaggccctgtgcctggacctgctgagcctgagcgccgcctgcgacgccctggaccagcacaacctgaagcagaacgaccagcccatggacatcctgcagatcatcaactgcctgaccaccatctacgaccgcctggagcaggagcacaacaacctggtgaacgtgcccctgtgcgtggacatgtgcctgaactggctgctgaacgtgtacgacaccggccgcaccggccgcatccgcgtgctgagcttcaagaccggcatcatcagcctgtgcaaggcccacctggaggacaagtaccgctacctgttcaagcaggtggccagcagcaccggcttctgcgaccagcgccgcctgggcctgctgctgcacgacagcatccagatcccccgccagctgggcgaggtggccagcttcggcggcagcaacatcgagcccagcgtgcgcagctgcttccagttcgccaacaacaagcccgagatcgaggccgccctgttcctggactggatgcgcctggagccccagagcatggtgtggctgcccgtgctgcaccgcgtggccgccgccgagaccgccaagcaccaggccaagtgcaacatctgcaaggagtgccccatcatcggcttccgctaccgcagcctgaagcacttcaactacgacatctgccagagctgcttcttcagcggccgcgtggccaagggccacaagatgcactaccccatggtggagtactgcacccccaccaccagcggcgaggacgtgcgcgacttcgccaaggtgctgaagaacaagttccgcaccaagcgctacttcgccaagcacccccgcatgggctacctgcccgtgcagaccgtgctggagggcgacaacatggagacccccgtgaccctgatcaacttctggcccgtggacagcgcccccgccagcagcccccagctgagccacgacgacacccacagccgcatcgagcactacgccagccgcctggccgagatggagaacagcaacggcagctacctgaacgacagcatcagccccaacgagagcatcgacgacgagcacctgctgatccagcactactgccagagcctgaaccaggacagccccctgagccagccccgcagccccgcccagatcctgatcagcctggagagcgaggagcgcggcgagctggagcgcatcctggccgacctggaggaggagaaccgcaacctgcaggccgagtacgaccgcctgaagcagcagcacgagcacaagggcctgagccccctgcccagcccccccgagatgatgcccaccagcccccagagcccccgcgacgccgagctgatcgccgaggccaagctgctgcgccagcacaagggccgcctggaggcccgcatgcagatcctggaggaccacaacaagcagctggagagccagctgcaccgcctgcgccagctgctggagcagccccaggccgaggccaaggtgaacggcaccaccgtgagcagccccagcaccagcctgcagcgcagcgacagcagccagcccatgctgctgcgcgtggtgggcagccagaccagcgacagcatgggcgaggaggacctgctgagccccccccaggacaccagcaccggcctggaggaggtgatggagcagctgaacaacagcttccccagcagccgcggccgcaacacccccggcaagcccatgcgcgaggacaccatg

SEQ ID NO: 142748 - DNA, 11046 bp, Artificial Sequence
  derived and/or modified sequence
atgagcgaggtgagcagcgacgagagagaggacgtgcagaagaagaccttcaccaagtgggtgaacgcccagttcagcaagttcggcaagcagcacatcgagaacctgttcagcgacctgcaggacggcagaagactgctggacctgctggagggcctgaccggccagaagctgcccaaggagaagggcagcaccagagtgcacgccctgaacaacgtgaacaaggccctgagagtgctgcagaacaacaacgtggacctggtgaacatcggcagcaccgacatcgtggacggcaaccacaagctgaccctgggcctgatctggaacatcatcctgcactggcaggtgaagaacgtgatgaagaacatcatggccggcctgcagcagaccaacagcgagaagatcctgctgagctgggtgagacagagcaccagaaactacccccaggtgaacgtgatcaacttcaccaccagctggagcgacggcctggccctgaacgccctgatccacagccacagacccgacctgttcgactggaacagcgtggtgtgccagcagagcgccacccagagactggagcacgccttcaacatcgccagataccagctgggcatcgagaagctgctggaccccgaggacgtggacaccacctaccccgacaagaagagcatcctgatgtacatcaccagcctgttccaggtgctgccccagcaggtgagcatcgaggccatccaggaggtggagatgctgcccagaccccccaaggtgaccaaggaggagcacttccagctgcaccaccagatgcactacagccagcagatcaccgtgagcctggcccagggctacgagagaaccagcagccccaagcccagattcaagagctacgcctacacccaggccgcctacgtgaccaccagcgaccccaccagaagccccttccccagccagcacctggaggcccccgaggacaagagcttcggcagcagcctgatggagagcgaggtgaacctggacagataccagaccgccctggaggaggtgctgagctggctgctgagcgccgaggacaccctgcaggcccagggcgagatcagcaacgacgtggaggtggtgaaggaccagttccacacccacgagggctacatgatggacctgaccgcccaccagggcagagtgggcaacatcctgcagctgggcagcaagctgatcggcaccggcaagctgagcgaggacgaggagaccgaggtgcaggagcagatgaacctgctgaacagcagatgggagtgcctgagagtggccagcatggagaagcagagcaacctgcacagagtgctgatggacctgcagaaccagaagctgaaggagctgaacgactggctgaccaagaccgaggagagaaccagaaagatggaggaggagcccctgggccccgacctggaggacctgaagagacaggtgcagcagcacaaggtgctgcaggaggacctggagcaggagcaggtgagagtgaacagcctgacccacatggtggtggtggtggacgagagcagcggcgaccacgccaccgccgccctggaggagcagctgaaggtgctgggcgacagatgggccaacatctgcagatggaccgaggacagatgggtgctgctgcaggacatcctgctgaagtggcagagactgaccgaggagcagtgcctgttcagcgcctggctgagcgagaaggaggacgccgtgaacaagatccacaccaccggcttcaaggaccagaacgagatgctgagcagcctgcagaagctggccgtgctgaaggccgacctggagaagaagaagcagagcatgggcaagctgtacagcctgaagcaggacctgctgagcaccctgaagaacaagagcgtgacccagaagaccgaggcctggctggacaacttcgccagatgctgggacaacctggtgcagaagctggagaagagcaccgcccagatcagccaggccgtgaccaccacccagcccagcctgacccagaccaccgtgatggagaccgtgaccaccgtgaccaccagagagcagatcctggtgaagcacgcccaggaggagctgccccccccccccccccagaagaagagacagatcaccgtggacagcgagatcagaaagagactggacgtggacatcaccgagctgcacagctggatcaccagaagcgaggccgtgctgcagagccccgagttcgccatcttcagaaaggagggcaacttcagcgacctgaaggagaaggtgaacgccatcgagagagagaaggccgagaagttcagaaagctgcaggacgccagcagaagcgcccaggccctggtggagcagatggtgaacgagggcgtgaacgccgacagcatcaagcaggccagcgagcagctgaacagcagatggatcgagttctgccagctgctgagcgagagactgaactggctggagtaccagaacaacatcatcgccttctacaaccagctgcagcagctggagcagatgaccaccaccgccgagaactggctgaagatccagcccaccacccccagcgagcccaccgccatcaagagccagctgaagatctgcaaggacgaggtgaacagactgagcgacctgcagccccagatcgagagactgaagatccagagcatcgccctgaaggagaagggccagggccccatgttcctggacgccgacttcgtggccttcaccaaccacttcaagcaggtgttcagcgacgtgcaggccagagagaaggagctgcagaccatcttcgacaccctgccccccatgagataccaggagaccatgagcgccatcagaacctgggtgcagcagagcgagaccaagctgagcatcccccagctgagcgtgaccgactacgagatcatggagcagagactgggcgagctgcaggccctgcagagcagcctgcaggagcagcagagcggcctgtactacctgagcaccaccgtgaaggagatgagcaagaaggcccccagcgagatcagcagaaagtaccagagcgagttcgaggagatcgagggcagatggaagaagctgagcagccagctggtggagcactgccagaagctggaggagcagatgaacaagctgagaaagatccagaaccacatccagaccctgaagaagtggatggccgaggtggacgtgttcctgaaggaggagtggcccgccctgggcgacagcgagatcctgaagaagcagctgaagcagtgcagactgctggtgagcgacatccagaccatccagcccagcctgaacagcgtgaacgagggcggccagaagatcaagaacgaggccgagcccgagttcgccagcagactggagaccgagctgaaggagctgaacacccagtgggaccacatgtgccagcaggtgtacgccagaaaggaggccctgaagggcggcctggagaagaccgtgagcctgcagaaggacctgagcgagatgcacgagtggatgacccaggccgaggaggagtacctggagagagacttcgagtacaagacccccgacgagctgcagaaggccgtggaggagatgaagagagccaaggaggaggcccagcagaaggaggccaaggtgaagctgctgaccgagagcgtgaacagcgtgatcgcccaggccccccccgtggcccaggaggccctgaagaaggagctggagaccctgaccaccaactaccagtggctgtgcaccagactgaacggcaagtgcaagaccctggaggaggtgtgggcctgctggcacgagctgctgagctacctggagaaggccaacaagtggctgaacgaggtggagttcaagctgaagaccaccgagaacatccccggcggcgccgaggagatcagcgaggtgctggacagcctggagaacctgatgagacacagcgaggacaaccccaaccagatcagaatcctggcccagaccctgaccgacggcggcgtgatggacgagctgatcaacgaggagctggagaccttcaacagcagatggagagagctgcacgaggaggccgtgagaagacagaagctgctggagcagagcatccagagcgcccaggagaccgagaagagcctgcacctgatccaggagagcctgaccttcatcgacaagcagctggccgcctacatcgccgacaaggtggacgccgcccagatgccccaggaggcccagaagatccagagcgacctgaccagccacgagatcagcctggaggagatgaagaagcacaaccagggcaaggaggccgcccagagagtgctgagccagatcgacgtggcccagaagaagctgcaggacgtgagcatgaagttcagactgttccagaagcccgccaacttcgagcagagactgcaggagagcaagatgatcctggacgaggtgaagatgcacctgcccgccctggagaccaagagcgtggagcaggaggtggtgcagagccagctgaaccactgcgtgaacctgtacaagagcctgagcgaggtgaagagcgaggtggagatggtgatcaagaccggcagacagatcgtgcagaagaagcagaccgagaaccccaaggagctggacgagagagtgaccgccctgaagctgcactacaacgagctgggcgccaaggtgaccgagagaaagcagcagctggagaagtgcctgaagctgagcagaaagatgagaaaggagatgaacgtgctgaccgagtggctggccgccaccgacatggagctgaccaagagaagcgccgtggagggcatgcccagcaacctggacagcgaggtggcctggggcaaggccacccagaaggagatcgagaagcagaaggtgcacctgaagagcatcaccgaggtgggcgaggccctgaagaccgtgctgggcaagaaggagaccctggtggaggacaagctgagcctgctgaacagcaactggatcgccgtgaccagcagagccgaggagtggctgaacctgctgctggagtaccagaagcacatggagaccttcgaccagaacgtggaccacatcaccaagtggatcatccaggccgacaccctgctggacgagagcgagaagaagaagccccagcagaaggaggacgtgctgaagagactgaaggccgagctgaacgacatcagacccaaggtggacagcaccagagaccaggccgccaacctgatggccaacagaggcgaccactgcagaaagctggtggagccccagatcagcgagctgaaccacagattcgccgccatcagccacagaatcaagaccggcaaggccagcatccccctgaaggagctggagcagttcaacagcgacatccagaagctgctggagcccctggaggccgagatccagcagggcgtgaacctgaaggaggaggacttcaacaaggacatgaacgaggacaacgagggcaccgtgaaggagctgctgcagagaggcgacaacctgcagcagagaatcaccgacgagagaaagagagaggagatcaagatcaagcagcagctgctgcagaccaagcacaacgccctgaaggacctgagaagccagagaagaaagaaggccctggagatcagccaccagtggtaccagtacaagagacaggccgacgacctgctgaagtgcctggacgacatcgagaagaagctggccagcctgcccgagcccagagacgagagaaagatcaaggagatcgacagagagctgcagaagaagaaggaggagctgaacgccgtgagaagacaggccgagggcctgagcgaggacggcgccgccatggccgtggagcccacccagatccagctgagcaagagatggagagagatcgagagcaagttcgcccagttcagaagactgaacttcgcccagatccacaccgtgagagaggagaccatgatggtgatgaccgaggacatgcccctggagatcagctacgtgcccagcacctacctgaccgagatcacccacgtgagccaggccctgctggaggtggagcagctgctgaacgcccccgacctgtgcgccaaggacttcgaggacctgttcaagcaggaggagagcctgaagaacatcaaggacagcctgcagcagagcagcggcagaatcgacatcatccacagcaagaagaccgccgccctgcagagcgccacccccgtggagagagtgaagctgcaggaggccctgagccagctggacttccagtgggagaaggtgaacaagatgtacaaggacagacagggcagattcgacagaagcgtggagaagtggagaagattccactacgacatcaagatcttcaaccagtggctgaccgaggccgagcagttcctgagaaagacccagatccccgagaactgggagcacgccaagtacaagtggtacctgaaggagctgcaggacggcatcggccagagacagaccgtggtgagaaccctgaacgccaccggcgaggagatcatccagcagagcagcaagaccgacgccagcatcctgcaggagaagctgggcagcctgaacctgagatggcaggaggtgtgcaagcagctgagcgacagaaagaagagactggaggagcagaagaacatcctgagcgagttccagagagacctgaacgagttcgtgctgtggctggaggaggccgacaacatcgccagcatccccctggagcccggcaaggagcagcagctgaaggagaagctggagcaggtgaagctgctggtggaggagctgcccctgagacagggcatcctgaagcagctgaacgagaccggcggccccgtgctggtgagcgcccccatcagccccgaggagcaggacaagctggagaacaagctgaagcagaccaacctgcagtggatcaaggtgagcagagccctgcccgagaagcagggcgagatcgaggcccagatcaaggacctgggccagctggagaagaagctggaggacctggaggagcagctgaaccacctgctgctgtggctgagccccatcagaaaccagctggagatctacaaccagcccaaccaggagggccccttcgacgtgaaggagaccgagatcgccgtgcaggccaagcagcccgacgtggaggagatcctgagcaagggccagcacctgtacaaggagaagcccgccacccagcccgtgaagagaaagctggaggacctgagcagcgagtggaaggccgtgaacagactgctgcaggagctgagagccaagcagcccgacctggcccccggcctgaccaccatcggcgccagccccacccagaccgtgaccctggtgacccagcccgtggtgaccaaggagaccgccatcagcaagctggagatgcccagcagcctgatgctggaggtgcccgccctggccgacttcaacagagcctggaccgagctgaccgactggctgagcctgctggaccaggtgatcaagagccagagagtgatggtgggcgacctggaggacatcaacgagatgatcatcaagcagaaggccaccatgcaggacctggagcagagaagaccccagctggaggagctgatcaccgccgcccagaacctgaagaacaagaccagcaaccaggaggccagaaccatcatcaccgacagaatcgagagaatccagaaccagtgggacgaggtgcaggagcacctgcagaacagaagacagcagctgaacgagatgctgaaggacagcacccagtggctggaggccaaggaggaggccgagcaggtgctgggccaggccagagccaagctggagagctggaaggagggcccctacaccgtggacgccatccagaagaagatcaccgagaccaagcagctggccaaggacctgagacagtggcagaccaacgtggacgtggccaacgacctggccctgaagctgctgagagactacagcgccgacgacaccagaaaggtgcacatgatcaccgagaacatcaacgccagctggagaagcatccacaagagagtgagcgagagagaggccgccctggaggagacccacagactgctgcagcagttccccctggacctggagaagttcctggcctggctgaccgaggccgagaccaccgccaacgtgctgcaggacgccaccagaaaggagagactgctggaggacagcaagggcgtgaaggagctgatgaagcagtggcaggacctgcagggcgagatcgaggcccacaccgacgtgtaccacaacctggacgagaacagccagaagatcctgagaagcctggagggcagcgacgacgccgtgctgctgcagagaagactggacaacatgaacttcaagtggagcgagctgagaaagaagagcctgaacatcagaagccacctggaggccagcagcgaccagtggaagagactgcacctgagcctgcaggagctgctggtgtggctgcagctgaaggacgacgagctgagcagacaggcccccatcggcggcgacttccccgccgtgcagaagcagaacgacgtgcacagagccttcaagagagagctgaagaccaaggagcccgtgatcatgagcaccctggagaccgtgagaatcttcctgaccgagcagcccctggagggcctggagaagctgtaccaggagcccagagagctgccccccgaggagagagcccagaacgtgaccagactgctgagaaagcaggccgaggaggtgaacaccgagtgggagaagctgaacctgcacagcgccgactggcagagaaagatcgacgagaccctggagagactgagagagctgcaggaggccaccgacgagctggacctgaagctgagacaggccgaggtgatcaagggcagctggcagcccgtgggcgacctgctgatcgacagcctgcaggaccacctggagaaggtgaaggccctgagaggcgagatcgcccccctgaaggagaacgtgagccacgtgaacgacctggccagacagctgaccaccctgggcatccagctgagcccctacaacctgagcaccctggaggacctgaacaccagatggaagctgctgcaggtggccgtggaggacagagtgagacagctgcacgaggcccacagagacttcggccccgccagccagcacttcctgagcaccagcgtgcagggcccctgggagagagccatcagccccaacaaggtgccctactacatcaaccacgagacccagaccacctgctgggaccaccccaagatgaccgagctgtaccagagcctggccgacctgaacaacgtgagattcagcgcctacagaaccgccatgaagctgagaagactgcagaaggccctgtgcctggacctgctgagcctgagcgccgcctgcgacgccctggaccagcacaacctgaagcagaacgaccagcccatggacatcctgcagatcatcaactgcctgaccaccatctacgacagactggagcaggagcacaacaacctggtgaacgtgcccctgtgcgtggacatgtgcctgaactggctgctgaacgtgtacgacaccggcagaaccggcagaatcagagtgctgagcttcaagaccggcatcatcagcctgtgcaaggcccacctggaggacaagtacagatacctgttcaagcaggtggccagcagcaccggcttctgcgaccagagaagactgggcctgctgctgcacgacagcatccagatccccagacagctgggcgaggtggccagcttcggcggcagcaacatcgagcccagcgtgagaagctgcttccagttcgccaacaacaagcccgagatcgaggccgccctgttcctggactggatgagactggagccccagagcatggtgtggctgcccgtgctgcacagagtggccgccgccgagaccgccaagcaccaggccaagtgcaacatctgcaaggagtgccccatcatcggcttcagatacagaagcctgaagcacttcaactacgacatctgccagagctgcttcttcagcggcagagtggccaagggccacaagatgcactaccccatggtggagtactgcacccccaccaccagcggcgaggacgtgagagacttcgccaaggtgctgaagaacaagttcagaaccaagagatacttcgccaagcaccccagaatgggctacctgcccgtgcagaccgtgctggagggcgacaacatggagacccccgtgaccctgatcaacttctggcccgtggacagcgcccccgccagcagcccccagctgagccacgacgacacccacagcagaatcgagcactacgccagcagactggccgagatggagaacagcaacggcagctacctgaacgacagcatcagccccaacgagagcatcgacgacgagcacctgctgatccagcactactgccagagcctgaaccaggacagccccctgagccagcccagaagccccgcccagatcctgatcagcctggagagcgaggagagaggcgagctggagagaatcctggccgacctggaggaggagaacagaaacctgcaggccgagtacgacagactgaagcagcagcacgagcacaagggcctgagccccctgcccagcccccccgagatgatgcccaccagcccccagagccccagagacgccgagctgatcgccgaggccaagctgctgagacagcacaagggcagactggaggccagaatgcagatcctggaggaccacaacaagcagctggagagccagctgcacagactgagacagctgctggagcagccccaggccgaggccaaggtgaacggcaccaccgtgagcagccccagcaccagcctgcagagaagcgacagcagccagcccatgctgctgagagtggtgggcagccagaccagcgacagcatgggcgaggaggacctgctgagccccccccaggacaccagcaccggcctggaggaggtgatggagcagctgaacaacagcttccccagcagcagaggcagaaacacccccggcaagcccatgagagaggacaccatgtag

SEQ ID NO: 142749 - DNA, 13932 bp, Artificial Sequence
  derived and/or modified sequence
gtgcaaaaagattgtgtgtttgtctgcttttgtgaggctggtcagagattctgtgcctgctttatctgtgcttggctatgactctacctccaggtttaccataccccatagaatgtgtaagagaaaagtaccaacagggaaatcagcaaaaagctttcctatgaaggtgtgtagccagcctccgcagaatttgaaatgtctgaggtctcatctgatgaaagagaagatgttcaaaagaaaacattcacaaaatgggtaaatgcacaattttctaagtttgggaagcagcatattgagaacctcttcagtgacctacaggatgggaggcgcctcctagacctcctcgaaggcctgacagggcaaaaactgccaaaagaaaaaggatccacaagagttcatgccctgaacaatgtcaacaaggcactgcgggttttgcagaacaataatgttgatttagtgaatattggaagtactgacatcgtagatggaaatcataaactgactcttggtttgatttggaatataatcctccactggcaggtcaaaaatgtaatgaaaaatatcatggctggattgcaacaaaccaacagtgaaaagattctcctgagctgggtccgacaatcaactcgtaattatccacaggttaatgtaatcaacttcaccaccagctggtctgatggcctggctttgaatgctctcatccatagtcataggccagacctatttgactggaatagtgtggtttgccagcagtcagccacacaacgactggaacatgcattcaacatcgccagatatcaattaggcatagagaaactactcgatcctgaagatgttgataccacctatccagataagaagtccatcttaatgtacatcacatcactcttccaagttttgcctcaacaagtgagcattgaagccatccaggaagtggaaatgttgccaaggccacctaaagtgactaaagaagaacattttcagttacatcatcaaatgcactattctcaacagatcacggtcagtctagcacagggatatgagagaacttcttcccctaagcctcgattcaagagctatgcctacacacaggctgcttatgtcaccacctctgaccctacacggagcccatttccttcacagcatttggaagctcctgaagacaagtcatttggcagttcattgatggagagtgaagtaaacctggaccgttatcaaacagctttagaagaagtattatcgtggcttctttctgctgaggacacattgcaagcacaaggagagatttctaatgatgtggaagtggtgaaagaccagtttcatactcatgaggggtacatgatggatttgacagcccatcagggccgggttggtaatattctacaattgggaagtaagctgattggaacaggaaaattatcagaagatgaagaaactgaagtacaagagcagatgaatctcctaaattcaagatgggaatgcctcagggtagctagcatggaaaaacaaagcaatttacatagagttttaatggatctccagaatcagaaactgaaagagttgaatgactggctaacaaaaacagaagaaagaacaaggaaaatggaggaagagcctcttggacctgatcttgaagacctaaaacgccaagtacaacaacataaggtgcttcaagaagatctagaacaagaacaagtcagggtcaattctctcactcacatggtggtggtagttgatgaatctagtggagatcacgcaactgctgctttggaagaacaacttaaggtattgggagatcgatgggcaaacatctgtagatggacagaagaccgctgggttcttttacaagacatccttctcaaatggcaacgtcttactgaagaacagtgcctttttagtgcatggctttcagaaaaagaagatgcagtgaacaagattcacacaactggctttaaagatcaaaatgaaatgttatcaagtcttcaaaaactggccgttttaaaagcggatctagaaaagaaaaagcaatccatgggcaaactgtattcactcaaacaagatcttctttcaacactgaagaataagtcagtgacccagaagacggaagcatggctggataactttgcccggtgttgggataatttagtccaaaaacttgaaaagagtacagcacagatttcacaggctgtcaccaccactcagccatcactaacacagacaactgtaatggaaacagtaactacggtgaccacaagggaacagatcctggtaaagcatgctcaagaggaacttccaccaccacctccccaaaagaagaggcagattactgtggattctgaaattaggaaaaggttggatgttgatataactgaacttcacagctggattactcgctcagaagctgtgttgcagagtcctgaatttgcaatctttcggaaggaaggcaacttctcagacttaaaagaaaaagtcaatgccatagagcgagaaaaagctgagaagttcagaaaactgcaagatgccagcagatcagctcaggccctggtggaacagatggtgaatgagggtgttaatgcagatagcatcaaacaagcctcagaacaactgaacagccggtggatcgaattctgccagttgctaagtgagagacttaactggctggagtatcagaacaacatcatcgctttctataatcagctacaacaattggagcagatgacaactactgctgaaaactggttgaaaatccaacccaccaccccatcagagccaacagcaattaaaagtcagttaaaaatttgtaaggatgaagtcaaccggctatcagatcttcaacctcaaattgaacgattaaaaattcaaagcatagccctgaaagagaaaggacaaggacccatgttcctggatgcagactttgtggcctttacaaatcattttaagcaagtcttttctgatgtgcaggccagagagaaagagctacagacaatttttgacactttgccaccaatgcgctatcaggagaccatgagtgccatcaggacatgggtccagcagtcagaaaccaaactctccatacctcaacttagtgtcaccgactatgaaatcatggagcagagactcggggaattgcaggctttacaaagttctctgcaagagcaacaaagtggcctatactatctcagcaccactgtgaaagagatgtcgaagaaagcgccctctgaaattagccggaaatatcaatcagaatttgaagaaattgagggacgctggaagaagctctcctcccagctggttgagcattgtcaaaagctagaggagcaaatgaataaactccgaaaaattcagaatcacatacaaaccctgaagaaatggatggctgaagttgatgtttttctgaaggaggaatggcctgcccttggggattcagaaattctaaaaaagcagctgaaacagtgcagacttttagtcagtgatattcagacaattcagcccagtctaaacagtgtcaatgaaggtgggcagaagataaagaatgaagcagagccagagtttgcttcgagacttgagacagaactcaaagaacttaacactcagtgggatcacatgtgccaacaggtctatgccagaaaggaggccttgaagggaggtttggagaaaactgtaagcctccagaaagatctatcagagatgcacgaatggatgacacaagctgaagaagagtatcttgagagagattttgaatataaaactccagatgaattacagaaagcagttgaagagatgaagagagctaaagaagaggcccaacaaaaagaagcgaaagtgaaactccttactgagtctgtaaatagtgtcatagctcaagctccacctgtagcacaagaggccttaaaaaaggaacttgaaactctaaccaccaactaccagtggctctgcactaggctgaatgggaaatgcaagactttggaagaagtttgggcatgttggcatgagttattgtcatacttggagaaagcaaacaagtggctaaatgaagtagaatttaaacttaaaaccactgaaaacattcctggcggagctgaggaaatctctgaggtgctagattcacttgaaaatttgatgcgacattcagaggataacccaaatcagattcgcatattggcacagaccctaacagatggcggagtcatggatgagctaatcaatgaggaacttgagacatttaattctcgttggagggaactacatgaagaggctgtaaggaggcaaaagttgcttgaacagagcatccagtctgcccaggagactgaaaaatccttacacttaatccaggagtccctcacattcattgacaagcagttggcagcttatattgcagacaaggtggacgcagctcaaatgcctcaggaagcccagaaaatccaatctgatttgacaagtcatgagatcagtttagaagaaatgaagaaacataatcaggggaaggaggctgcccaaagagtcctgtctcagattgatgttgcacagaaaaaattacaagatgtctccatgaagtttcgattattccagaaaccagccaattttgagcagcgtctacaagaaagtaagatgattttagatgaagtgaagatgcacttgcctgcattggaaacaaagagtgtggaacaggaagtagtacagtcacagctaaatcattgtgtgaacttgtataaaagtctgagtgaagtgaagtctgaagtggaaatggtgataaagactggacgtcagattgtacagaaaaagcagacggaaaatcccaaagaacttgatgaaagagtaacagctttgaaattgcattataatgagctgggagcaaaggtaacagaaagaaagcaacagttggagaaatgcttgaaattgtcccgtaagatgcgaaaggaaatgaatgtcttgacagaatggctggcagctacagatatggaattgacaaagagatcagcagttgaaggaatgcctagtaatttggattctgaagttgcctggggaaaggctactcaaaaagagattgagaaacagaaggtgcacctgaagagtatcacagaggtaggagaggccttgaaaacagttttgggcaagaaggagacgttggtggaagataaactcagtcttctgaatagtaactggatagctgtcacctcccgagcagaagagtggttaaatcttttgttggaataccagaaacacatggaaacttttgaccagaatgtggaccacatcacaaagtggatcattcaggctgacacacttttggatgaatcagagaaaaagaaaccccagcaaaaagaagacgtgcttaagcgtttaaaggcagaactgaatgacatacgcccaaaggtggactctacacgtgaccaagcagcaaacttgatggcaaaccgcggtgaccactgcaggaaattagtagagccccaaatctcagagctcaaccatcgatttgcagccatttcacacagaattaagactggaaaggcctccattcctttgaaggaattggagcagtttaactcagatatacaaaaattgcttgaaccactggaggctgaaattcagcagggggtgaatctgaaagaggaagacttcaataaagatatgaatgaagacaatgagggtactgtaaaagaattgttgcaaagaggagacaacttacaacaaagaatcacagatgagagaaagcgagaggaaataaagataaaacagcagctgttacagacaaaacataatgctctcaaggatttgaggtctcaaagaagaaaaaaggctctagaaatttctcatcagtggtatcagtacaagaggcaggctgatgatctcctgaaatgcttggatgacattgaaaaaaaattagccagcctacctgagcccagagatgaaaggaaaataaaggaaattgatcgggaattgcagaagaagaaagaggagctgaatgcagtgcgtaggcaagctgagggcttgtctgaggatggggccgcaatggcagtggagccaactcagatccagctcagcaagcgctggcgggaaattgagagcaaatttgctcagtttcgaagactcaactttgcacaaattcacactgtccgtgaagaaacgatgatggtgatgactgaagacatgcctttggaaatttcttatgtgccttctacttatttgactgaaatcactcatgtctcacaagccctattagaagtggaacaacttctcaatgctcctgacctctgtgctaaggactttgaagatctctttaagcaagaggagtctctgaagaatataaaagatagtctacaacaaagctcaggtcggattgacattattcatagcaagaagacagcagcattgcaaagtgcaacgcctgtggaaagggtgaagctacaggaagctctctcccagcttgatttccaatgggaaaaagttaacaaaatgtacaaggaccgacaagggcgatttgacagatctgttgagaaatggcggcgttttcattatgatataaagatatttaatcagtggctaacagaagctgaacagtttctcagaaagacacaaattcctgagaattgggaacatgctaaatacaaatggtatcttaaggaactccaggatggcattgggcagcggcaaactgttgtcagaacattgaatgcaactggggaagaaataattcagcaatcctcaaaaacagatgccagtattctacaggaaaaattgggaagcctgaatctgcggtggcaggaggtctgcaaacagctgtcagacagaaaaaagaggctagaagaacaaaagaatatcttgtcagaatttcaaagagatttaaatgaatttgttttatggttggaggaagcagataacattgctagtatcccacttgaacctggaaaagagcagcaactaaaagaaaagcttgagcaagtcaagttactggtggaagagttgcccctgcgccagggaattctcaaacaattaaatgaaactggaggacccgtgcttgtaagtgctcccataagcccagaagagcaagataaacttgaaaataagctcaagcagacaaatctccagtggataaaggtttccagagctttacctgagaaacaaggagaaattgaagctcaaataaaagaccttgggcagcttgaaaaaaagcttgaagaccttgaagagcagttaaatcatctgctgctgtggttatctcctattaggaatcagttggaaatttataaccaaccaaaccaagaaggaccatttgacgttaaggaaactgaaatagcagttcaagctaaacaaccggatgtggaagagattttgtctaaagggcagcatttgtacaaggaaaaaccagccactcagccagtgaagaggaagttagaagatctgagctctgagtggaaggcggtaaaccgtttacttcaagagctgagggcaaagcagcctgacctagctcctggactgaccactattggagcctctcctactcagactgttactctggtgacacaacctgtggttactaaggaaactgccatctccaaactagaaatgccatcttccttgatgttggaggtacctgctctggcagatttcaaccgggcttggacagaacttaccgactggctttctctgcttgatcaagttataaaatcacagagggtgatggtgggtgaccttgaggatatcaacgagatgatcatcaagcagaaggcaacaatgcaggatttggaacagaggcgtccccagttggaagaactcattaccgctgcccaaaatttgaaaaacaagaccagcaatcaagaggctagaacaatcattacggatcgaattgaaagaattcagaatcagtgggatgaagtacaagaacaccttcagaaccggaggcaacagttgaatgaaatgttaaaggattcaacacaatggctggaagctaaggaagaagctgagcaggtcttaggacaggccagagccaagcttgagtcatggaaggagggtccctatacagtagatgcaatccaaaagaaaatcacagaaaccaagcagttggccaaagacctccgccagtggcagacaaatgtagatgtggcaaatgacttggccctgaaacttctccgggattattctgcagatgataccagaaaagtccacatgataacagagaatatcaatgcctcttggagaagcattcataaaagggtgagtgagcgagaggctgctttggaagaaactcatagattactgcaacagttccccctggacctggaaaagtttcttgcctggcttacagaagctgaaacaactgccaatgtcctacaggatgctacccgtaaggaaaggctcctagaagactccaagggagtaaaagagctgatgaaacaatggcaagacctccaaggtgaaattgaagctcacacagatgtttatcacaacctggatgaaaacagccaaaaaatcctgagatccctggaaggttccgatgatgcagtcctgttacaaagacgtttggataacatgaacttcaagtggagtgaacttcggaaaaagtctctcaacattaggtcccatttggaagccagttctgaccagtggaagcgtctgcacctttctctgcaggaacttctggtgtggctacagctgaaagatgatgaattaagccggcaggcacctattggaggcgactttccagcagttcagaagcagaacgatgtacatagggccttcaagagggaattgaaaactaaagaacctgtaatcatgagtactcttgagactgtacgaatatttctgacagagcagcctttggaaggactagagaaactctaccaggagcccagagagctgcctcctgaggagagagcccagaatgtcactcggcttctacgaaagcaggctgaggaggtcaatactgagtgggaaaaattgaacctgcactccgctgactggcagagaaaaatagatgagacccttgaaagactccgggaacttcaagaggccacggatgagctggacctcaagctgcgccaagctgaggtgatcaagggatcctggcagcccgtgggcgatctcctcattgactctctccaagatcacctcgagaaagtcaaggcacttcgaggagaaattgcgcctctgaaagagaacgtgagccacgtcaatgaccttgctcgccagcttaccactttgggcattcagctctcaccgtataacctcagcactctggaagacctgaacaccagatggaagcttctgcaggtggccgtcgaggaccgagtcaggcagctgcatgaagcccacagggactttggtccagcatctcagcactttctttccacgtctgtccagggtccctgggagagagccatctcgccaaacaaagtgccctactatatcaaccacgagactcaaacaacttgctgggaccatcccaaaatgacagagctctaccagtctttagctgacctgaataatgtcagattctcagcttataggactgccatgaaactccgaagactgcagaaggccctttgcttggatctcttgagcctgtcagctgcatgtgatgccttggaccagcacaacctcaagcaaaatgaccagcccatggatatcctgcagattattaattgtttgaccactatttatgaccgcctggagcaagagcacaacaatttggtcaacgtccctctctgcgtggatatgtgtctgaactggctgctgaatgtttatgatacgggacgaacagggaggatccgtgtcctgtcttttaaaactggcatcatttccctgtgtaaagcacatttggaagacaagtacagataccttttcaagcaagtggcaagttcaacaggattttgtgaccagcgcaggctgggcctccttctgcatgattctatccaaattccaagacagttgggtgaagttgcatcctttgggggcagtaacattgagccaagtgtccggagctgcttccaatttgctaataataagccagagatcgaagcggccctcttcctagactggatgagactggaaccccagtccatggtgtggctgcccgtcctgcacagagtggctgctgcagaaactgccaagcatcaggccaaatgtaacatctgcaaagagtgtccaatcattggattcaggtacaggagtctaaagcactttaattatgacatctgccaaagctgctttttttctggtcgagttgcaaaaggccataaaatgcactatcccatggtggaatattgcactccgactacatcaggagaagatgttcgagactttgccaaggtactaaaaaacaaatttcgaaccaaaaggtattttgcgaagcatccccgaatgggctacctgccagtgcagactgtcttagagggggacaacatggaaactcccgttactctgatcaacttctggccagtagattctgcgcctgcctcgtcccctcagctttcacacgatgatactcattcacgcattgaacattatgctagcaggctagcagaaatggaaaacagcaatggatcttatctaaatgatagcatctctcctaatgagagcatagatgatgaacatttgttaatccagcattactgccaaagtttgaaccaggactcccccctgagccagcctcgtagtcctgcccagatcttgatttccttagagagtgaggaaagaggggagctagagagaatcctagcagatcttgaggaagaaaacaggaatctgcaagcagaatatgaccgtctaaagcagcagcacgaacataaaggcctgtccccactgccgtcccctcctgaaatgatgcccacctctccccagagtccccgggatgctgagctcattgctgaggccaagctactgcgtcaacacaaaggccgcctggaagccaggatgcaaatcctggaagaccacaataaacagctggagtcacagttacacaggctaaggcagctgctggagcaaccccaggcagaggccaaagtgaatggcacaacggtgtcctctccttctacctctctacagaggtccgacagcagtcagcctatgctgctccgagtggttggcagtcaaacttcggactccatgggtgaggaagatcttctcagtcctccccaggacacaagcacagggttagaggaggtgatggagcaactcaacaactccttccctagttcaagaggaagaaatacccctggaaagccaatgagagaggacacaatgtaggaagtcttttccacatggcagatgatttgggcagagcgatggagtccttagtatcagtcatgacagatgaagaaggagcagaataaatgttttacaactcctgattcccgcatggtttttataatattcatacaacaaagaggattagacagtaagagtttacaagaaataaatctatatttttgtgaagggtagtggtattatactgtagatttcagtagtttctaagtctgttattgttttgttaacaatggcaggttttacacgtctatgcaattgtacaaaaaagttataagaaaactacatgtaaaatcttgatagctaaataacttgccatttctttatatggaacgcattttgggttgtttaaaaatttataacagttataaagaaagattgtaaactaaagtgtgctttataaaaaaaagttgtttataaaaacccctaaaaacaaaacaaacacacacacacacacatacacacacacacacaaaactttgaggcagcgcattgttttgcatccttttggcgtgatatccatatgaaattcatggctttttctttttttgcatattaaagataagacttcctctaccaccacaccaaatgactactacacactgctcatttgagaactgtcagctgagtggggcaggcttgagttttcatttcatatatctatatgtctataagtatataaatactatagttatatagataaagagatacgaatttctatagactgactttttccattttttaaatgttcatgtcacatcctaatagaaagaaattacttctagtcagtcatccaggcttacctgcttggtctagaatggatttttcccggagccggaagccaggaggaaactacaccacactaaaacattgtctacagctccagatgtttctcattttaaacaactttccactgacaacgaaagtaaagtaaagtattggatttttttaaagggaacatgtgaatgaatacacaggacttattatatcagagtgagtaatcggttggttggttgattgattgattgattgatacattcagcttcctgctgctagcaatgccacgatttagatttaatgatgcttcagtggaaatcaatcagaaggtattctgaccttgtgaacatcagaaggtattttttaactcccaagcagtagcaggacgatgatagggctggagggctatggattcccagcccatccctgtgaaggagtaggccactctttaagtgaaggattggatgattgttcataatacataaagttctctgtaattacaactaaattattatgccctcttctcacagtcaaaaggaactgggtggtttggtttttgttgcttttttagatttattgtcccatgtgggatgagtttttaaatgccacaagacataatttaaaataaataaactttgggaaaaggtgtaaaacagtagccccatcacatttgtgatactgacaggtatcaacccagaagcccatgaactgtgtttccatcctttgcatttctctgcgagtagttccacacaggtttgtaagtaagtaagaaagaaggcaaattgattcaaatgttacaaaaaaacccttcttggtggattagacaggttaaatatataaacaaacaaacaaaaattgctcaaaaaagaggagaaaagctcaagaggaaaagctaaggactggtaggaaaaagctttactctttcatgccattttatttctttttgatttttaaatcattcattcaatagataccaccgtgtgacctataattttgcaaatctgttacctctgacatcaagtgtaattagcttttggagagtgggctgacatcaagtgtaattagcttttggagagtgggttttgtccattattaataattaattaattaacatcaaacacggcttctcatgctatttctacctcactttggttttggggtgttcctgataattgtgcacacctgagttcacagcttcaccacttgtccattgcgttattttctttttcctttataattctttctttttccttcataattttcaaaagaaaacccaaagctctaaggtaacaaattaccaaattacatgaagatttggtttttgtcttgcatttttttcctttatgtgacgctggaccttttctttacccaaggatttttaaaactcagatttaaaacaaggggttactttacatcctactaagaagtttaagtaagtaagtttcattctaaaatcagaggtaaatagagtgcataaataattttgttttaatctttttgtttttcttttagacacattagctctggagtgagtctgtcataatatttgaacaaaaattgagagctttattgctgcattttaagcataattaatttggacattatttcgtgttgtgttctttataaccaccaagtattaaactgtaaatcataatgtaactgaagcataaacatcacatggcatgttttgtcattgttttcaggtactgagttcttacttgagtatcataatatattgtgttttaacaccaacactgtaacatttacgaattatttttttaaacttcagttttactgcattttcacaacatatcagacttcaccaaatatatgccttactattgtattatagtactgctttactgtgtatctcaataaagcacgcagttatgttac

SEQ ID NO: 142750 - protein, 1225 aa, Artificial Sequence
  derived and/or modified sequence
MPSSLMLEVPALADFNRAWTELTDWLSLLDQVIKSQRVMVGDLEDINEMIIKQKATMQDLEQRRPQLEELITAAQNLKNKTSNQEARTIITDRIERIQNQWDEVQEHLQNRRQQLNEMLKDSTQWLEAKEEAEQVLGQARAKLESWKEGPYTVDAIQKKITETKQLAKDLRQWQTNVDVANDLALKLLRDYSADDTRKVHMITENINASWRSIHKRVSEREAALEETHRLLQQFPLDLEKFLAWLTEAETTANVLQDATRKERLLEDSKGVKELMKQWQDLQGEIEAHTDVYHNLDENSQKILRSLEGSDDAVLLQRRLDNMNFKWSELRKKSLNIRSHLEASSDQWKRLHLSLQELLVWLQLKDDELSRQAPIGGDFPAVQKQNDVHRAFKRELKTKEPVIMSTLETVRIFLTEQPLEGLEKLYQEPRELPPEERAQNVTRLLRKQAEEVNTEWEKLNLHSADWQRKIDETLERLRELQEATDELDLKLRQAEVIKGSWQPVGDLLIDSLQDHLEKVKALRGEIAPLKENVSHVNDLARQLTTLGIQLSPYNLSTLEDLNTRWKLLQVAVEDRVRQLHEAHRDFGPASQHFLSTSVQGPWERAISPNKVPYYINHETQTTCWDHPKMTELYQSLADLNNVRFSAYRTAMKLRRLQKALCLDLLSLSAACDALDQHNLKQNDQPMDILQIINCLTTIYDRLEQEHNNLVNVPLCVDMCLNWLLNVYDTGRTGRIRVLSFKTGIISLCKAHLEDKYRYLFKQVASSTGFCDQRRLGLLLHDSIQIPRQLGEVASFGGSNIEPSVRSCFQFANNKPEIEAALFLDWMRLEPQSMVWLPVLHRVAAAETAKHQAKCNICKECPIIGFRYRSLKHFNYDICQSCFFSGRVAKGHKMHYPMVEYCTPTTSGEDVRDFAKVLKNKFRTKRYFAKHPRMGYLPVQTVLEGDNMETPVTLINFWPVDSAPASSPQLSHDDTHSRIEHYASRLAEMENSNGSYLNDSISPNESIDDEHLLIQHYCQSLNQDSPLSQPRSPAQILISLESEERGELERILADLEEENRNLQAEYDRLKQQHEHKGLSPLPSPPEMMPTSPQSPRDAELIAEAKLLRQHKGRLEARMQILEDHNKQLESQLHRLRQLLEQPQAEAKVNGTTVSSPSTSLQRSDSSQPMLLRVVGSQTSDSMGEEDLLSPPQDTSTGLEEVMEQLNNSFPSSRGRNTPGKPMREDTM

SEQ ID NO: 142751 - protein, 2344 aa, Artificial Sequence
  derived and/or modified sequence
MTEMILLIFFPAYFLNAVRRQKLLEQSIQSAQETEKSLHLIQESLTFIDKQLAAYIADKVDAAQMPQEAQKIQSDLTSHEISLEEMKKHNQGKEAAQRVLSQIDVAQKKLQDVSMKFRLFQKPANFEQRLQESKMILDEVKMHLPALETKSVEQEVVQSQLNHCVNLYKSLSEVKSEVEMVIKTGRQIVQKKQTENPKELDERVTALKLHYNELGAKVTERKQQLEKCLKLSRKMRKEMNVLTEWLAATDMELTKRSAVEGMPSNLDSEVAWGKATQKEIEKQKVHLKSITEVGEALKTVLGKKETLVEDKLSLLNSNWIAVTSRAEEWLNLLLEYQKHMETFDQNVDHITKWIIQADTLLDESEKKKPQQKEDVLKRLKAELNDIRPKVDSTRDQAANLMANRGDHCRKLVEPQISELNHRFAAISHRIKTGKASIPLKELEQFNSDIQKLLEPLEAEIQQGVNLKEEDFNKDMNEDNEGTVKELLQRGDNLQQRITDERKREEIKIKQQLLQTKHNALKDLRSQRRKKALEISHQWYQYKRQADDLLKCLDDIEKKLASLPEPRDERKIKEIDRELQKKKEELNAVRRQAEGLSEDGAAMAVEPTQIQLSKRWREIESKFAQFRRLNFAQIHTVREETMMVMTEDMPLEISYVPSTYLTEITHVSQALLEVEQLLNAPDLCAKDFEDLFKQEESLKNIKDSLQQSSGRIDIIHSKKTAALQSATPVERVKLQEALSQLDFQWEKVNKMYKDRQGRFDRSVEKWRRFHYDIKIFNQWLTEAEQFLRKTQIPENWEHAKYKWYLKELQDGIGQRQTVVRTLNATGEEIIQQSSKTDASILQEKLGSLNLRWQEVCKQLSDRKKRLEEQKNILSEFQRDLNEFVLWLEEADNIASIPLEPGKEQQLKEKLEQVKLLVEELPLRQGILKQLNETGGPVLVSAPISPEEQDKLENKLKQTNLQWIKVSRALPEKQGEIEAQIKDLGQLEKKLEDLEEQLNHLLLWLSPIRNQLEIYNQPNQEGPFDVKETEIAVQAKQPDVEEILSKGQHLYKEKPATQPVKRKLEDLSSEWKAVNRLLQELRAKQPDLAPGLTTIGASPTQTVTLVTQPVVTKETAISKLEMPSSLMLEVPALADFNRAWTELTDWLSLLDQVIKSQRVMVGDLEDINEMIIKQKATMQDLEQRRPQLEELITAAQNLKNKTSNQEARTIITDRIERIQNQWDEVQEHLQNRRQQLNEMLKDSTQWLEAKEEAEQVLGQARAKLESWKEGPYTVDAIQKKITETKQLAKDLRQWQTNVDVANDLALKLLRDYSADDTRKVHMITENINASWRSIHKRVSEREAALEETHRLLQQFPLDLEKFLAWLTEAETTANVLQDATRKERLLEDSKGVKELMKQWQDLQGEIEAHTDVYHNLDENSQKILRSLEGSDDAVLLQRRLDNMNFKWSELRKKSLNIRSHLEASSDQWKRLHLSLQELLVWLQLKDDELSRQAPIGGDFPAVQKQNDVHRAFKRELKTKEPVIMSTLETVRIFLTEQPLEGLEKLYQEPRELPPEERAQNVTRLLRKQAEEVNTEWEKLNLHSADWQRKIDETLERLRELQEATDELDLKLRQAEVIKGSWQPVGDLLIDSLQDHLEKVKALRGEIAPLKENVSHVNDLARQLTTLGIQLSPYNLSTLEDLNTRWKLLQVAVEDRVRQLHEAHRDFGPASQHFLSTSVQGPWERAISPNKVPYYINHETQTTCWDHPKMTELYQSLADLNNVRFSAYRTAMKLRRLQKALCLDLLSLSAACDALDQHNLKQNDQPMDILQIINCLTTIYDRLEQEHNNLVNVPLCVDMCLNWLLNVYDTGRTGRIRVLSFKTGIISLCKAHLEDKYRYLFKQVASSTGFCDQRRLGLLLHDSIQIPRQLGEVASFGGSNIEPSVRSCFQFANNKPEIEAALFLDWMRLEPQSMVWLPVLHRVAAAETAKHQAKCNICKECPIIGFRYRSLKHFNYDICQSCFFSGRVAKGHKMHYPMVEYCTPTTSGEDVRDFAKVLKNKFRTKRYFAKHPRMGYLPVQTVLEGDNMETPVTLINFWPVDSAPASSPQLSHDDTHSRIEHYASRLAEMENSNGSYLNDSISPNESIDDEHLLIQHYCQSLNQDSPLSQPRSPAQILISLESEERGELERILADLEEENRNLQAEYDRLKQQHEHKGLSPLPSPPEMMPTSPQSPRDAELIAEAKLLRQHKGRLEARMQILEDHNKQLESQLHRLRQLLEQPQAEAKVNGTTVSSPSTSLQRSDSSQPMLLRVVGSQTSDSMGEEDLLSPPQDTSTGLEEVMEQLNNSFPSSRGRNTPGKPMREDTP

SEQ ID NO: 142752 - DNA, 9771 bp, Artificial Sequence
  derived and/or modified sequence
taatgagatcaggaggaacattcgacctgagaaagacagattgcaatgactgagatgattttgctaattttttttccagcctatttccttaatgctgtaaggaggcaaaagttgcttgaacagagcatccagtctgcccaggagactgaaaaatccttacacttaatccaggagtccctcacattcattgacaagcagttggcagcttatattgcagacaaggtggacgcagctcaaatgcctcaggaagcccagaaaatccaatctgatttgacaagtcatgagatcagtttagaagaaatgaagaaacataatcaggggaaggaggctgcccaaagagtcctgtctcagattgatgttgcacagaaaaaattacaagatgtctccatgaagtttcgattattccagaaaccagccaattttgagcagcgtctacaagaaagtaagatgattttagatgaagtgaagatgcacttgcctgcattggaaacaaagagtgtggaacaggaagtagtacagtcacagctaaatcattgtgtgaacttgtataaaagtctgagtgaagtgaagtctgaagtggaaatggtgataaagactggacgtcagattgtacagaaaaagcagacggaaaatcccaaagaacttgatgaaagagtaacagctttgaaattgcattataatgagctgggagcaaaggtaacagaaagaaagcaacagttggagaaatgcttgaaattgtcccgtaagatgcgaaaggaaatgaatgtcttgacagaatggctggcagctacagatatggaattgacaaagagatcagcagttgaaggaatgcctagtaatttggattctgaagttgcctggggaaaggctactcaaaaagagattgagaaacagaaggtgcacctgaagagtatcacagaggtaggagaggccttgaaaacagttttgggcaagaaggagacgttggtggaagataaactcagtcttctgaatagtaactggatagctgtcacctcccgagcagaagagtggttaaatcttttgttggaataccagaaacacatggaaacttttgaccagaatgtggaccacatcacaaagtggatcattcaggctgacacacttttggatgaatcagagaaaaagaaaccccagcaaaaagaagacgtgcttaagcgtttaaaggcagaactgaatgacatacgcccaaaggtggactctacacgtgaccaagcagcaaacttgatggcaaaccgcggtgaccactgcaggaaattagtagagccccaaatctcagagctcaaccatcgatttgcagccatttcacacagaattaagactggaaaggcctccattcctttgaaggaattggagcagtttaactcagatatacaaaaattgcttgaaccactggaggctgaaattcagcagggggtgaatctgaaagaggaagacttcaataaagatatgaatgaagacaatgagggtactgtaaaagaattgttgcaaagaggagacaacttacaacaaagaatcacagatgagagaaagcgagaggaaataaagataaaacagcagctgttacagacaaaacataatgctctcaaggatttgaggtctcaaagaagaaaaaaggctctagaaatttctcatcagtggtatcagtacaagaggcaggctgatgatctcctgaaatgcttggatgacattgaaaaaaaattagccagcctacctgagcccagagatgaaaggaaaataaaggaaattgatcgggaattgcagaagaagaaagaggagctgaatgcagtgcgtaggcaagctgagggcttgtctgaggatggggccgcaatggcagtggagccaactcagatccagctcagcaagcgctggcgggaaattgagagcaaatttgctcagtttcgaagactcaactttgcacaaattcacactgtccgtgaagaaacgatgatggtgatgactgaagacatgcctttggaaatttcttatgtgccttctacttatttgactgaaatcactcatgtctcacaagccctattagaagtggaacaacttctcaatgctcctgacctctgtgctaaggactttgaagatctctttaagcaagaggagtctctgaagaatataaaagatagtctacaacaaagctcaggtcggattgacattattcatagcaagaagacagcagcattgcaaagtgcaacgcctgtggaaagggtgaagctacaggaagctctctcccagcttgatttccaatgggaaaaagttaacaaaatgtacaaggaccgacaagggcgatttgacagatctgttgagaaatggcggcgttttcattatgatataaagatatttaatcagtggctaacagaagctgaacagtttctcagaaagacacaaattcctgagaattgggaacatgctaaatacaaatggtatcttaaggaactccaggatggcattgggcagcggcaaactgttgtcagaacattgaatgcaactggggaagaaataattcagcaatcctcaaaaacagatgccagtattctacaggaaaaattgggaagcctgaatctgcggtggcaggaggtctgcaaacagctgtcagacagaaaaaagaggctagaagaacaaaagaatatcttgtcagaatttcaaagagatttaaatgaatttgttttatggttggaggaagcagataacattgctagtatcccacttgaacctggaaaagagcagcaactaaaagaaaagcttgagcaagtcaagttactggtggaagagttgcccctgcgccagggaattctcaaacaattaaatgaaactggaggacccgtgcttgtaagtgctcccataagcccagaagagcaagataaacttgaaaataagctcaagcagacaaatctccagtggataaaggtttccagagctttacctgagaaacaaggagaaattgaagctcaaataaaagaccttgggcagcttgaaaaaaagcttgaagaccttgaagagcagttaaatcatctgctgctgtggttatctcctattaggaatcagttggaaatttataaccaaccaaaccaagaaggaccatttgacgttcaggaaactgaaatagcagttcaagctaaacaaccggatgtggaagagattttgtctaaagggcagcatttgtacaaggaaaaaccagccactcagccagtgaagaggaagttagaagatctgagctctgagtggaaggcggtaaaccgtttacttcaagagctgagggcaaagcagcctgacctagctcctggactgaccactattggagcctctcctactcagactgttactctggtgacacaacctgtggttactaaggaaactgccatctccaaactagaaatgccatcttccttgatgttggaggtacctgctctggcagatttcaaccgggcttggacagaacttaccgactggctttctctgcttgatcaagttataaaatcacagagggtgatggtgggtgaccttgaggatatcaacgagatgatcatcaagcagaaggcaacaatgcaggatttggaacagaggcgtccccagttggaagaactcattaccgctgcccaaaatttgaaaaacaagaccagcaatcaagaggctagaacaatcattacggatcgaattgaaagaattcagaatcagtgggatgaagtacaagaacaccttcagaaccggaggcaacagttgaatgaaatgttaaaggattcaacacaatggctggaagctaaggaagaagctgagcaggtcttaggacaggccagagccaagcttgagtcatggaaggagggtccctatacagtagatgcaatccaaaagaaaatcacagaaaccaagcagttggccaaagacctccgccagtggcagacaaatgtagatgtggcaaatgacttggccctgaaacttctccgggattattctgcagatgataccagaaaagtccacatgataacagagaatatcaatgcctcttggagaagcattcataaaagggtgagtgagcgagaggctgctttggaagaaactcatagattactgcaacagttccccctggacctggaaaagtttcttgcctggcttacagaagctgaaacaactgccaatgtcctacaggatgctacccgtaaggaaaggctcctagaagactccaagggagtaaaagagctgatgaaacaatggcaagacctccaaggtgaaattgaagctcacacagatgtttatcacaacctggatgaaaacagccaaaaaatcctgagatccctggaaggttccgatgatgcagtcctgttacaaagacgtttggataacatgaacttcaagtggagtgaacttcggaaaaagtctctcaacattaggtcccatttggaagccagttctgaccagtggaagcgtctgcacctttctctgcaggaacttctggtgtggctacagctgaaagatgatgaattaagccggcaggcacctattggaggcgactttccagcagttcagaagcagaacgatgtacatagggccttcaagagggaattgaaaactaaagaacctgtaatcatgagtactcttgagactgtacgaatatttctgacagagcagcctttggaaggactagagaaactctaccaggagcccagagagctgcctcctgaggagagagcccagaatgtcactcggcttctacgaaagcaggctgaggaggtcaatactgagtgggaaaaattgaacctgcactccgctgactggcagagaaaaatagatgagacccttgaaagactccaggaacttcaagaggccacggatgagctggacctcaagctgcgccaagctgaggtgatcaagggatcctggcagcccgtgggcgatctcctcattgactctctccaagatcacctcgagaaagtcaaggcacttcgaggagaaattgcgcctctgaaagagaacgtgagccacgtcaatgaccttgctcgccagcttaccactttgggcattcagctctcaccgtataacctcagcactctggaagacctgaacaccagatggaagcttctgcaggtggccgtcgaggaccgagtcaggcagctgcatgaagcccacagggactttggtccagcatctcagcactttctttccacgtctgtccagggtccctgggagagagccatctcgccaaacaaagtgccctactatatcaaccacgagactcaaacaacttgctgggaccatcccaaaatgacagagctctaccagtctttagctgacctgaataatgtcagattctcagcttataggactgccatgaaactccgaagactgcagaaggccctttgcttggatctcttgagcctgtcagctgcatgtgatgccttggaccagcacaacctcaagcaaaatgaccagcccatggatatcctgcagattattaattgtttgaccactatttatgaccgcctggagcaagagcacaacaatttggtcaacgtccctctctgcgtggatatgtgtctgaactggctgctgaatgtttatgatacgggacgaacagggaggatccgtgtcctgtcttttaaaactggcatcatttccctgtgtaaagcacatttggaagacaagtacagataccttttcaagcaagtggcaagttcaacaggattttgtgaccagcgcaggctgggcctccttctgcatgattctatccaaattccaagacagttgggtgaagttgcatcctttgggggcagtaacattgagccaagtgtccggagctgcttccaatttgctaataataagccagagatcgaagcggccctcttcctagactggatgagactggaaccccagtccatggtgtggctgcccgtcctgcacagagtggctgctgcagaaactgccaagcatcaggccaaatgtaacatctgcaaagagtgtccaatcattggattcaggtacaggagtctaaagcactttaattatgacatctgccaaagctgctttttttctggtcgagttgcaaaaggccataaaatgcactatcccatggtggaatattgcactccgactacatcaggagaagatgttcgagactttgccaaggtactaaaaaacaaatttcgaaccaaaaggtattttgcgaagcatccccgaatgggctacctgccagtgcagactgtcttagagggggacaacatggaaactcccgttactctgatcaacttctggccagtagattctgcgcctgcctcgtcccctcagctttcacacgatgatactcattcacgcattgaacattatgctagcaggctagcagaaatggaaaacagcaatggatcttatctaaatgatagcatctctcctaatgagagcatagatgatgaacatttgttaatccagcattactgccaaagtttgaaccaggactcccccctgagccagcctcgtagtcctgcccagatcttgatttccttagagagtgaggaaagaggggagctagagagaatcctagcagatcttgaggaagaaaacaggaatctgcaagcagaatatgaccgtctaaagcagcagcacgaacataaaggcctgtccccactgccgtcccctcctgaaatgatgcccacctctccccagagtccccgggatgctgagctcattgctgaggccaagctactgcgtcaacacaaaggccgcctggaagccaggatgcaaatcctggaagaccacaataaacagctggagtcacagttacacaggctaaggcagctgctggagcaaccccaggcagaggccaaagtgaatggcacaacggtgtcctctccttctacctctctacagaggtccgacagcagtcagcctatgctgctccgagtggttggcagtcaaacttcggactccatgggtgaggaagatcttctcagtcctccccaggacacaagcacagggttagaggaggtgatggagcaactcaacaactccttccctagttcaagaggaagaaatacccctggaaagccaatgagagaggacacaatgtaggaagtcttttccacatggcagatgatttgggcagagcgatggagtccttagtatcagtcatgacagatgaagaaggagcagaataaatgttttacaactcctgattcccgcatggtttttataatattcatacaacaaagaggattagacagtaagagtttacaagaaataaatctatatttttgtgaagggtagtggtattatactgtagatttcagtagtttctaagtctgttattgttttgttaacaatggcaggttttacacgtctatgcaattgtacaaaaaagttataagaaaactacatgtaaaatcttgatagctaaataacttgccatttctttatatggaacgcattttgggttgtttaaaaatttataacagttataaagaaagattgtaaactaaagtgtgctttataaaaaaaagttgtttataaaaacccctaaaaacaaaacaaacacacacacacacacatacacacacacacacaaaactttgaggcagcgcattgttttgcatccttttggcgtgatatccatatgaaattcatggctttttctttttttgcatattaaagataagacttcctctaccaccacaccaaatgactactacacactgctcatttgagaactgtcagctgagtggggcaggcttgagttttcatttcatatatctatatgtctataagtatataaatactatagttatatagataaagagatacgaatttctatagactgactttttccattttttaaatgttcatgtcacatcctaatagaaagaaattacttctagtcagtcatccaggcttacctgcttggtctagaatggatttttcccggagccggaagccaggaggaaactacaccacactaaaacattgtctacagctccagatgtttctcattttaaacaactttccactgacaacgaaagtaaagtaaagtattggatttttttaaagggaacatgtgaatgaatacacaggacttattatatcagagtgagtaatcggttggttggttgattgattgattgattgatacattcagcttcctgctgctagcaatgccacgatttagatttaatgatgcttcagtggaaatcaatcagaaggtattctgaccttgtgaacatcagaaggtattttttaactcccaagcagtagcaggacgatgatagggctggagggctatggattcccagcccatccctgtgaaggagtaggccactctttaagtgaaggattggatgattgttcataatacataaagttctctgtaattacaactaaattattatgccctcttctcacagtcaaaaggaactgggtggtttggtttttgttgcttttttagatttattgtcccatgtgggatgagtttttaaatgccacaagacataatttaaaataaataaactttgggaaaaggtgtaaaacagtagccccatcacatttgtgatactgacaggtatcaacccagaagcccatgaactgtgtttccatcctttgcatttctctgcgagtagttccacacaggtttgtaagtaagtaagaaagaaggcaaattgattcaaatgttacaaaaaaacccttcttggtggattagacaggttaaatatataaacaaacaaacaaaaattgctcaaaaaagaggagaaaagctcaagaggaaaagctaaggactggtaggaaaaagctttactctttcatgccattttatttctttttgatttttaaatcattcattcaatagataccaccgtgtgacctataattttgcaaatctgttacctctgacatcaagtgtaattagcttttggagagtgggctgacatcaagtgtaattagcttttggagagtgggttttgtccattattaataattaattaattaacatcaaacacggcttctcatgctatttctacctcactttggttttggggtgttcctgataattgtgcacacctgagttcacagcttcaccacttgtccattgcgttattttctttttcctttataattctttctttttccttcataattttcaaaagaaaacccaaagctctaaggtaacaaattaccaaattacatgaagatttggtttttgtcttgcatttttttcctttatgtgacgctggaccttttctttacccaaggatttttaaaactcagatttaaaacaaggggttactttacatcctactaagaagtttaagtaagtaagtttcattctaaaatcagaggtaaatagagtgcataaataattttgttttaatctttttgtttttcttttagacacattagctctggagtgagtctgtcataatatttgaacaaaaattgagagctttattgctgcattttaagcataattaatttggacattatttcgtgttgtgttctttataaccaccaagtattaaactgtaaatcataatgtaactgaagcataaacatcacatggcatgttttgtcattgttttcaggtactgagttcttacttgagtatcataatatattgtgttttaacaccaacactgtaacatttacgaattatttttttaaacttcagttttactgcattttcacaacatatcagacttcaccaaatatatgccttactattgtattatagtactgctttactgtgtatctcaataaagcacgcagttatgttac

SEQ ID NO: 142753 - DNA, 7035 bp, Artificial Sequence
  derived and/or modified sequence
atgacggagatgatactgctgattttcttcccggcgtacttcttgaacgcagtgcggcgccagaagctgctcgaacagagtatccagagtgcacaggaaacagagaaatcgctgcatctgattcaggagagtctcaccttcattgacaaacagttggctgcctacatcgccgacaaagttgacgctgctcagatgccacaggaggcccagaagattcaaagtgatttaacttcccacgagatctccctcgaggaaatgaagaagcacaatcagggcaaggaggccgcacagagagtgctgtcccagattgacgtcgcccaaaagaaactgcaggatgtcagtatgaagttccgtctgtttcagaaacccgccaatttcgaacagagattacaggagtcaaagatgatcttagatgaggtaaagatgcacctgccagccctggaaaccaagtccgtggagcaggaagtggtgcaatcccagctcaatcattgcgtgaatctctacaagagtctgtctgaggtgaaaagcgaagtagagatggtcatcaagacggggagacaaattgtccaaaaaaagcaaaccgagaacccaaaagagctggacgaaagagtaacagcgctcaaactacactacaatgaacttggcgccaaggtaactgagaggaaacagcagctggagaagtgcctgaagctgagccgaaagatgagaaaggagatgaacgtactgacagagtggctggcagcaactgacatggaacttaccaagcgaagcgccgttgaaggtatgccgtctaatctggatagcgaggtcgcttggggcaaggctacacagaaggagatcgaaaaacagaaagtgcatctcaaatccatcaccgaggtcggtgaggccctcaagacagtgttgggaaaaaaagagactctggtggaggataagttatccctgctgaattccaattggatcgccgttacttccagggctgaagagtggttaaacctcttgttggaataccagaagcacatggaaacatttgaccagaatgtggaccatatcaccaagtggatcattcaggctgacaccttgctcgatgagtctgagaagaagaagccgcagcagaaggaggacgtgctcaaaagactcaaggcagagctgaacgacatcagacctaaggtagacagtacgagggaccaagcagccaacctgatggctaaccgaggggaccattgtcggaagctggtggaaccacagattagtgaattgaatcatcggttcgctgcgatttctcatcgcattaaaactggcaaggctagcattccgctgaaggaactggagcagtttaatagcgatatccagaagcttttagagccactggaggcggaaatccagcagggagtaaacttgaaggaggaagatttcaataaggatatgaacgaggacaatgagggaactgtaaaggaactgctgcaacgtggcgataacttacagcaaagaataacagacgaaaggaagagggaggagataaaaatcaaacaacaactactacagaccaagcacaacgctctgaaggaccttaggtcacagcgtcggaagaaggccctagagatttcgcatcagtggtatcagtataaaagacaggctgacgatcttttgaagtgcctggacgatatagagaagaagctcgcaagcttgccagaaccccgcgatgaaagaaaaatcaaggaaattgatagggaactgcagaaaaagaaggaggagctgaacgccgtacggcggcaagctgagggcctctctgaagatggcgcagctatggccgttgagcctacgcagattcaattaagcaagcgctggcgcgagatcgagagcaaattcgcacaatttcgccgccttaatttcgcccaaatccatacagtgagggaagagacaatgatggttatgaccgaggatatgcccttggaaattagctacgttccgtccacttacctcaccgaaattacacacgtgtctcaggccctccttgaagttgagcagctattgaacgccccagatctctgtgcaaaggactttgaggacttgtttaaacaggaggaatcactgaaaaacatcaaggattctctgcagcagtcctcgggaaggatcgacatcattcactcgaagaagaccgcagcattgcagtcagcgacaccagtggagagggtcaagctccaagaggcactgagccagctcgatttccagtgggagaaggtgaacaaaatgtataaagatcggcaaggtcgatttgatcggtccgtggaaaagtggaggcgtttccactatgatataaaaatctttaaccagtggctgaccgaagccgagcagtttttacgcaagacgcagatccctgaaaactgggagcacgctaaatataagtggtatctgaaggaactacaggacggcatcggccagcgtcagacggttgtgcgcactttgaatgccacaggcgaggaaatcattcagcagtcttctaagacagatgcatccatcctgcaggagaaactggggtcccttaatctgcgctggcaggaggtttgcaagcagctgagtgatcggaaaaaaaggttagaagagcaaaagaacatcctttcagaatttcagagagacctgaacgaattcgtcttgtggctagaggaagccgacaacatcgcctccattccactggagccaggcaaagagcagcaacttaaggagaagcttgaacaggtgaagctcctggtggaggagctgcccctcagacaagggattcttaagcagctcaatgagacgggaggtcctgttttagtatctgcccctattagtccagaggagcaggataagttggagaataagttgaagcagaccaatctgcagtggatcaaagtgtcacgtgccttgcctgagaaacaaggcgagattgaggcacagataaaggacctgggccagttggaaaagaagctcgaggacctggaggaacaacttaatcatctgctgctgtggctgtcaccaatccgaaaccagcttgagatttacaatcagcctaaccaagaggggccctttgacgtgaaggaaactgagatcgccgtgcaggccaaacaaccagacgtggaagagatcctgtccaagggtcagcacctttacaaagaaaaacctgccacccagccagtgaaacgaaaacttgaggatttgagcagcgagtggaaggcagtaaaccgactcctgcaggaactccgcgccaaacagccagatctggccccaggtcttacaacaattggagcgagcccaactcaaaccgtgacgcttgtgactcagccagttgttaccaaagagaccgccatatcgaaactagagatgccgtcaagcttgatgctggaagtgccagcacttgcagactttaatcgcgcctggactgagctgacagactggctgtcactgctagaccaggtgattaagtcccagcgcgttatggttggcgacctggaagatataaatgagatgattattaaacaaaaagccactatgcaggacctggaacagagacgccctcagctcgaggaacttataactgctgcgcagaatttaaagaacaagacgtcaaatcaggaggcccgtacgatcatcactgaccgaatagagcgtatccagaatcagtgggatgaggtgcaggagcatcttcagaatagacgccagcagttgaacgagatgcttaaggattcaacgcagtggctggaagcaaaggaggaggcggaacaggtgctgggccaggctagagccaagctcgagtcatggaaagagggcccttatacggtcgacgcaatccagaaaaagattaccgaaaccaagcagctggcaaaggatttgcggcagtggcagacgaatgtggatgttgctaacgatttggccctgaagctcctgagggattacagcgccgacgatacacgtaaagtgcacatgatcacggagaatatcaacgcctcttggagatctatccacaagagggtatccgaacgcgaagctgccttggaggagacccaccggctccttcagcagttccctttggatttggagaagttcttagcctggctcaccgaggcagagacaacagccaacgttttgcaggatgcgactaggaaggagcggcttcttgaggactctaaaggagtaaaggagctgatgaagcagtggcaagaccttcagggggagattgaggcccatacagatgtctatcacaatcttgacgagaattcccagaaaattttgcgctctctggagggctcagacgatgcggtgctacttcagagaaggctcgacaatatgaatttcaaatggagcgaactacgaaaaaagtcactgaacattcgctctcacttagaagcaagttccgaccagtggaagcgactccacctcagcttgcaggaactgctggtgtggttgcagttgaaagacgatgaactgtcacgccaggcaccaattggaggtgacttccccgcagtccaaaagcagaacgacgtccatagggcttttaagagggagctgaagactaaagaacctgtgatcatgagtactctggaaactgtgcgaatattcttgacagagcagcccctggagggcctagagaagttgtatcaggagcctagagagttgccaccagaggagagagcccagaacgtcacacgccttctgcggaagcaggctgaggaagtgaacactgaatgggagaaactgaaccttcacagtgccgattggcagcgaaaaattgacgagaccctcgagagactccgcgagctgcaagaggcaacggacgaattagatctgaagctgcgccaggccgaagtgatcaagggaagctggcagccagtcggtgatctgcttattgattccctccaagaccaccttgagaaagtgaaggccttgcgaggggaaatcgcaccgctgaaagaaaatgtgagccatgtgaatgacctggcaagacagctgacaacactggggatccagctgtcaccatataacctatctacacttgaagatctgaacacccgctggaagctgctgcaggtggctgtggaggatcgcgtccggcagcttcacgaagcacatagagactttggccccgcaagtcagcactttttatctacctcagtccaagggccgtgggagcgcgctattagccccaacaaggtgccatattatattaatcatgaaacccagacaacgtgctgggaccacccgaagatgactgagctctatcagtcactggccgacctaaacaacgtgcgattctcagcttatagaaccgccatgaagctaaggaggcttcagaaagccctgtgcttagatctcctgtcccttagtgctgcatgcgacgcgctggaccagcacaacttgaaacagaacgatcaacctatggacatcctccagattatcaactgccttaccaccatatacgatagactggagcaggaacacaacaaccttgtgaatgtgcctttgtgcgtggatatgtgtctcaactggctgctcaacgtttacgatacaggtagaacaggacgcatccgggtgctgtccttcaagaccggtatcatatctctgtgtaaggctcatctggaagacaaataccgctatctattcaaacaagttgctagctccacagggttttgtgatcagagaagactggggctcctgttgcatgacagtattcagatacccaggcagctgggtgaggtggcttctttcggcgggtccaacatcgagccttcagtgaggtcctgctttcagtttgcgaacaacaagcctgagatagaggcagccctgtttcttgactggatgcggctggagcctcaaagcatggtttggctccccgtgctgcatcgcgtggccgccgccgaaaccgccaaacatcaggccaagtgtaatatatgtaaggagtgcccaattattggctttcgctatcgttcactcaagcatttcaattatgacatctgtcagtcctgcttcttcagcggccgcgttgccaaaggtcacaaaatgcactatcccatggtcgaatactgcacacccaccactagcggcgaggatgtgcgcgactttgctaaggtcttgaaaaacaaatttcggaccaaacggtatttcgccaagcacccacgaatgggctacctgccagtacagacagtgctcgaaggcgataatatggagacacctgtgacactgatcaatttctggccagtggatagtgcccctgcctcatcaccacagctgagccacgacgatacacactccagaatagaacattatgccagtaggctcgctgagatggagaactcaaacggctcttacttaaatgattccatatcacctaacgaaagcatcgacgacgagcacttactgatacagcattactgccagtccctcaatcaagacagtcccctatcacagccgcgtagccctgcccagatcctgatatcactagagtccgaggagaggggggagttggagcggatcctggcagacttggaggaggagaacagaaacctacaagccgagtacgacagactcaaacagcaacacgagcacaagggcctatcgcccttgccgagtccccctgaaatgatgccaacatctcctcagagcccacgggatgccgagctgatcgcagaggctaaacttctgcggcagcataagggtagactggaagcccgtatgcagatcctagaggatcacaacaaacagctggagagccagctgcatagactgcgtcagctactggaacaaccgcaggcagaggctaaagtcaatggtacaaccgtgtcaagcccctccacgtcactgcaacgcagtgattcctctcaacccatgctgctgcgtgtcgttggttcacagacgagcgactcgatgggggaagaggatctgctcagccctccccaggacacttctaccggactggaagaggtgatggagcagctcaacaacagctttccctccagcaggggccgaaacaccccagggaaaccaatgcgcgaagacaccccttag

SEQ ID NO: 142754 - DNA, 7035 bp, Artificial Sequence
  derived and/or modified sequence
atgacagagatgatcctgctgatcttcttccctgcctacttcctgaatgctgtgcggcggcagaagctgctggagcagagcatccagagcgcccaggagacagagaagagcctgcacctgatccaggagagcctgaccttcatcgacaagcagctggccgcctacatcgctgacaaggtggatgctgcccagatgccccaggaggcccagaagatccagagcgacctgaccagccatgagatcagcctggaggagatgaagaagcacaaccagggcaaggaggccgcccagagggtgctgagccagattgatgtggcccagaagaagctgcaggatgtgtccatgaagttccgcctcttccagaagccagccaactttgagcagaggctgcaggagagcaagatgatcctggatgaggtgaagatgcacctgcctgccctggagaccaagtctgtggagcaggaggtggtgcagagccagctgaaccactgtgtgaacctgtacaagagcctgtctgaggtgaagtctgaggtggagatggtgatcaagacaggccggcagatcgtgcagaagaagcagacagagaaccccaaggagctggatgagcgggtgacagccctgaagctgcactacaatgagctgggcgccaaggtgacagagaggaagcagcagctggagaagtgcctgaagctgagcaggaagatgaggaaggagatgaatgtgctgacagagtggctggccgccacagacatggagctgaccaagaggtctgctgtggagggcatgcccagcaacctggacagcgaggtggcctggggcaaggccacccagaaggagattgagaagcagaaggtgcacctgaagagcatcacagaggtgggggaggccctgaagacagtgctgggcaagaaggagaccctggtggaggacaagctgagcctgctgaacagcaactggattgctgtgaccagcagagctgaggagtggctgaacctgctgctggagtaccagaagcacatggagacctttgaccagaatgtggaccacatcaccaagtggatcatccaggccgacaccctgctggatgagagcgagaagaagaagccccagcagaaggaggatgtgctgaagaggctgaaggccgagctgaatgacatccggcccaaggtggacagcacccgggaccaggccgccaacctgatggccaacagaggagaccactgcaggaagctggtggagccccagatcagcgagctgaaccacagatttgctgccatcagccaccgcatcaagacaggcaaggccagcatccccctgaaggagctggagcagttcaacagcgacatccagaagctgctggagcccctggaggccgagatccagcagggcgtgaacctgaaggaggaggacttcaacaaggacatgaatgaagataatgaaggcaccgtgaaggagctgctgcagagaggagacaacctgcagcagaggatcacagatgagaggaagcgggaggagatcaagatcaagcagcagctgctgcagaccaagcacaatgccctgaaggacctgcggagccagaggaggaagaaggccctggagatcagccaccagtggtaccagtacaagaggcaggctgatgacctgctgaagtgcctggatgacatcgagaagaagctggccagcctgcctgagcccagagatgagaggaagatcaaggagattgaccgggagctgcagaagaagaaggaggagctgaatgctgtgcggcggcaggccgagggcctgtctgaagatggagctgccatggctgtggagcccacccagatccagctgagcaagcgctggagagaaattgagagcaagtttgcccagttccggcggctgaactttgcccagatccacacagtgcgggaggagaccatgatggtgatgacagaggacatgcccctggagatctcctatgtgcccagcacctacctgacagagatcacccacgtgtcccaggccctgctggaggtggagcagctgctgaatgccccagacctgtgtgccaaggactttgaggacctcttcaagcaggaggagagcctgaagaacatcaaggacagcctgcagcagagcagcggcagaattgacatcatccacagcaagaagacagctgccctgcagagcgccacccctgtggagcgggtgaagctgcaggaggccctgagccagctggacttccagtgggagaaggtgaacaagatgtacaaggaccggcagggccgctttgacagatctgtggagaagtggaggcgcttccactatgacatcaagatcttcaaccagtggctgacagaggccgagcagttcctgaggaagacccagatccctgagaactgggagcacgccaagtacaagtggtacctgaaggagctgcaggacggcatcggccagaggcagacagtggtgaggaccctgaatgccaccggggaggagatcatccagcagagcagcaagacagatgccagcatcctgcaggagaagctgggcagcctgaacctgcgctggcaggaggtgtgcaagcagctgagtgacaggaagaagaggctggaggagcagaagaacatcctgtctgagttccagagggacctgaatgaatttgtgctgtggctggaggaggccgacaacatcgccagcatccccctggagcccgggaaggagcagcagctgaaggagaagctggagcaggtgaagctgctggtggaggagctgcccctgcggcagggcatcctgaagcagctgaatgagaccggcggccctgtgctggtgtctgcccccatcagccctgaggagcaggacaagctggagaacaagctgaagcagaccaacctgcagtggatcaaggtgtcccgggccctgcctgagaagcagggcgagattgaggcccagatcaaggacctgggccagctggagaagaagctggaggacctggaggagcagctgaaccacctgctgctgtggctgagccccatccggaaccagctggagatctacaaccagcccaaccaggagggcccctttgatgtgaaggagacagaaattgctgtgcaggccaagcagccagatgtggaggagatcctgagcaagggccagcacctgtacaaggagaagccagccacccagcctgtgaagaggaagctggaggacctgagcagcgagtggaaggctgtgaaccggctgctgcaggagctgcgggccaagcagcctgacctggcccctggcctgaccaccatcggggccagccccacccagacagtgaccctggtgacccagcctgtggtgaccaaggagacagccatcagcaagctggagatgcccagcagcctgatgctggaggtgcctgccctggccgacttcaacagagcctggacagagctgacagactggctgagcctgctggaccaggtgatcaagagccagagggtgatggtgggggacctggaggacatcaatgagatgatcatcaagcagaaggccaccatgcaggacctggagcagaggcggccccagctggaggagctgatcacagctgcccagaacctgaagaacaagaccagcaaccaggaggcccggaccatcatcacagacagaattgagcgcatccagaaccagtgggatgaggtgcaggagcacctgcagaacagacggcagcagctgaatgagatgctgaaggacagcacccagtggctggaggccaaggaggaggccgagcaggtgctgggccaggcccgggccaagctggagagctggaaggagggcccctacacagtggatgccatccagaagaagatcacagagaccaagcagctggccaaggacctgcggcagtggcagaccaacgtggatgtggccaatgacctggccctgaagctgctgcgggactacagcgcagatgacaccaggaaggtgcacatgatcacagagaacatcaatgcctcctggaggagcatccacaagagggtgtctgagcgggaggccgccctggaggagacccaccggctgctgcagcagttccccctggacctggagaagttcctggcctggctgacagaagctgagaccacagccaacgtgctgcaggatgccaccaggaaggagcggctgctggaggacagcaagggcgtgaaggagctgatgaagcagtggcaggacctgcagggcgagattgaggcccacacagatgtgtaccacaacctggatgagaacagccagaagatcctgcggagcctggagggcagtgatgatgctgtgctgctgcagaggcggctggacaacatgaacttcaagtggagcgagctgaggaagaagagcctgaacatccgcagccacctggaggccagcagtgaccagtggaagaggctgcacctgagcctgcaggagctgctggtgtggctgcagctgaaggatgatgagctgagccggcaggcccccatcggcggggacttccctgctgtgcagaagcagaatgatgtgcaccgggccttcaagcgggagctgaagaccaaggagcctgtgatcatgagcaccctggagaccgtgcgcatcttcctgacagagcagcccctggagggcctggagaagctgtaccaggagccccgggagctgcccccagaggagcgggcccagaatgtgacccggctgctgaggaagcaggccgaggaggtgaacacagagtgggagaagctgaacctgcacagcgctgactggcagaggaagattgatgagaccctggagcggctgcgggagctgcaggaggccacagatgagctggacctgaagctgcggcaggccgaggtgatcaagggctcctggcagcctgtgggggacctgctgattgacagcctgcaggaccacctggagaaggtgaaggccctgcggggggagatcgcccccctgaaggaaaatgtgagccacgtgaatgacctggcccggcagctgaccaccctgggcatccagctgagcccctacaacctgagcaccctggaggacctgaacacccgctggaagctgctgcaggtggccgtggaggacagagtgcggcagctgcacgaggcccaccgggactttggacctgccagccagcacttcctgagcacctctgtgcagggcccctgggagcgggccatcagccccaacaaggtgccctactacatcaaccacgagacccagaccacctgctgggaccaccccaagatgacagagctgtaccagagcctggccgacctgaacaacgtgcgcttcagcgcctacagaacagccatgaagctgcggcggctgcagaaggccctgtgcctggacctgctgagcctgtctgctgcctgtgatgccctggaccagcacaacctgaagcagaatgaccagcccatggacatcctgcagatcatcaactgcctgaccaccatctatgaccggctggagcaggagcacaacaacctggtgaatgtgcccctgtgtgtggacatgtgcctgaactggctgctgaatgtgtatgacaccggccgcacaggccgcatccgggtgctgtccttcaagacaggcatcatcagcctgtgcaaggcccacctggaggacaagtaccgctacctgttcaagcaggtggccagcagcacaggcttctgtgaccagaggcggctgggcctgctgctgcatgacagcatccagatcccccggcagctgggggaggtggccagctttggaggcagcaacatcgagcccagcgtgcgcagctgcttccagtttgccaacaacaagccagaaattgaagctgccctcttcctggactggatgaggctggagccccagagcatggtgtggctgcctgtgctgcaccgggtggccgctgctgagacagccaagcaccaggccaagtgcaacatctgcaaggaatgtcccatcatcggcttccgctaccgcagcctgaagcacttcaactatgacatctgccagagctgcttcttcagcggccgggtggccaagggccacaagatgcactaccccatggtggagtactgcacccccaccaccagcggggaggatgtgcgggactttgccaaggtgctgaagaacaagttccgcaccaagcgctactttgccaagcaccccaggatgggctacctgcctgtgcagacagtgctggagggggacaacatggagacccctgtgaccctcatcaacttctggcctgtggacagcgccccagccagcagcccccagctgagccatgatgacacccacagccgcatcgagcactacgccagccggctggccgagatggagaacagcaatggcagctacctgaatgacagcatcagccccaatgaaagcattgatgatgagcacctgctgatccagcactactgccagagcctgaaccaggacagccccctgagccagcccaggagccctgcccagatcctgatcagcctggagagcgaggagcggggggagctggagcgcatcctggccgacctggaggaggagaacagaaacctgcaggccgagtatgaccggctgaagcagcagcacgagcacaagggcctgagccccctgcccagccccccagagatgatgcccaccagcccccagagccccagagatgctgagctgattgctgaggccaagctgctgcggcagcacaagggccgcctggaggccaggatgcagatcctggaggaccacaacaagcagctggagagccagctgcaccggctgcggcagctgctggagcagccccaggccgaggccaaggtgaatggcaccaccgtgagcagccccagcaccagcctgcagaggagtgacagcagccagcccatgctgctgcgggtggtgggcagccagaccagtgacagcatgggagaggaggacctgctgagccccccccaggacaccagcacaggcctggaggaggtgatggagcagctgaacaacagcttccccagcagccggggcaggaacaccccaggcaagcccatgagggaggacaccccctag

SEQ ID NO: 142755 - DNA, 7035 bp, Artificial Sequence
  derived and/or modified sequence
atgaccgagatgatcctgctgatcttcttccccgcctacttcctgaacgctgttcggcgccagaagttgctggagcaaagcatccaaagtgcccaggaaacggaaaagagcctgcatctaattcaggagtcattgacattcattgataaacagctggccgcctatatcgctgacaaagtggatgccgcccagatgccccaggaggcccaaaaaattcagagcgacctgacaagtcacgaaatatccctggaggagatgaaaaagcataatcaggggaaggaggccgcccagcgggtactttcccagatcgacgtggcccagaagaaactccaggacgttagcatgaaatttcgccttttccaaaaaccggcaaacttcgaacaacgtttacaggagtccaagatgatccttgacgaggtcaagatgcatctgcctgctttggagacaaaaagcgtagaacaggaggtcgtccaaagtcaactgaatcactgtgtaaacctctacaagtccctgagtgaggtgaagagcgaggtcgagatggtcatcaagacaggccgccagatcgtgcagaagaagcagacagagaatcccaaggagctggacgaacgcgtcaccgcactgaaactacactacaatgagctcggcgccaaagtgaccgaacggaagcagcaattagagaaatgtcttaaactctctcggaaaatgagaaaagagatgaacgtgcttactgaatggctggccgctaccgatatggagttaactaagcgttcggcagtcgagggcatgccatcaaacttggacagcgaagtggcctgggggaaggccacccaaaaggaaatcgaaaaacagaaggtgcatctcaagagcatcacagaagttggagaggccctgaaaaccgtcttaggaaaaaaagagacgctggttgaagataaactcagcctgctcaacagtaactggatcgcagtgacttccagagccgaggagtggctcaacctgctcctcgaatatcagaagcacatggaaaccttcgatcaaaatgtggatcatataaccaagtggataattcaggctgacacgctactggacgagtcagaaaaaaaaaagcctcagcaaaaggaagacgtactgaagcgcctcaaggcagaacttaatgatatcaggcccaaagtggactctacccgcgatcaagctgccaacctgatggcaaacaggggtgaccactgtcggaaactggtcgagcctcagatatccgaactaaaccatcggtttgccgcaatatcacacagaattaagactgggaaagcaagtatccccttaaaggagttggaacagttcaacagcgacattcagaagctcctcgagcctttagaggccgagatccaacaaggagtgaatctgaaagaggaggacttcaataaagacatgaacgaggacaatgaaggcaccgttaaagagcttctgcagaggggcgacaatctgcagcagaggataaccgatgaacggaagagggaggaaattaagattaaacaacaactgctccagactaagcataacgctctcaaggacctacgcagccaaaggcggaagaaagccctggagatctcacatcagtggtaccagtataagcgccaggccgatgatctgctcaagtgcctggatgacattgaaaagaaactggcttccctgccagaacctcgcgacgaacggaagatcaaggaaattgaccgcgaactccagaagaaaaaggaggaactcaatgccgtgcgccggcaggctgagggactctctgaagatggggccgcaatggccgtcgagccaacacagattcagctttctaaaaggtggagggagatagagtccaaatttgcccaattccggcggctgaattttgctcagatccatacagtcagagaggagactatgatggtgatgacagaggacatgcctcttgaaatatcttatgttccctcaacctacctcacggaaataacacatgtttcacaggcgttgctggaggtggagcagctcctaaatgctcctgatttgtgcgcaaaggatttcgaggatcttttcaagcaggaggaatcacttaagaatataaaagactcgctccagcagagctccggcagaattgacattattcacagcaaaaagacggccgccctgcagagtgccactcctgtcgaaagggtgaagcttcaggaagccctgtctcaattagatttccagtgggagaaagtgaacaagatgtataaagaccgccagggcaggtttgaccggtctgtggagaaatggcgaaggttccattacgacatcaaaatttttaatcaatggctcacggaggcagagcagtttctgcggaagacacagataccagaaaattgggaacacgccaagtataaatggtacctgaaggagctccaagacggcatcggccagcgccagaccgtggtaaggacactcaacgcaaccggcgaggagatcattcaacaatcctcaaagacggacgcgagcattctgcaggaaaaactgggctctctgaatctaagatggcaggaagtctgtaagcagctctccgaccgaaagaagaggctcgaggaacagaaaaacattctctcggagttccagcgggacttgaatgagtttgtgctttggctggaagaggccgataatatcgcctcgattcccctggaacctggaaaagaacagcagttaaaggagaagctggagcaggtgaaattgctcgttgaagagctgccattgcgacaggggatcttgaaacagctgaatgaaaccggtggccctgtccttgtgagcgcgccaatttccccagaggaacaggacaagctggagaataaactcaaacagactaatctccagtggataaaagtgtcaagggctctccctgagaagcagggcgaaatcgaggctcagatcaaggatctgggacagttagagaaaaagctggaggatttagaggaacagttgaatcatcttctgctctggctttcccccatccgtaaccagcttgagatctacaatcagcctaatcaggagggcccctttgatgtgaaagagaccgaaattgccgtgcaagccaaacagcctgatgtggaagagatactcagtaaaggacagcatttgtataaggagaagcccgctacacagccagtgaagaggaaacttgaagatctgtcatctgagtggaaggcggtcaaccggctccttcaggaactcagagctaaacagcctgatctggctccgggcttgaccaccattggagcatctccaacccagacggtcacattagtcacacagccagttgttaccaaggagactgctatctcaaagctggaaatgccgtcttctttaatgttagaagttcctgcgttagcagattttaacagagcatggacagagctgacagactggctcagtctgctcgaccaggtcatcaagagccagagagtgatggttggcgatctggaggatatcaacgaaatgattatcaagcaaaaggccacaatgcaagatctcgagcagaggaggccacagctcgaagagctgatcacagctgcccagaatttgaaaaacaagaccagcaatcaggaggctcgtactattattactgatcgaatcgagcggatccagaaccaatgggacgaggtccaagagcaccttcagaatcggaggcagcagttgaatgagatgttaaaggattctacccagtggctagaagccaaggaggaagccgagcaggtgctaggccaggccagagcgaagctagagagttggaaggaaggaccatacacagtagatgccatccagaagaagataactgagacaaagcagctcgccaaggatctgaggcagtggcagaccaacgtggatgtggccaacgatctcgccctgaagcttctgcgggactactctgcagatgataccagaaaagtccacatgattactgaaaacattaacgcctcttggcggagtattcataaaagagtctcagaacgggaagctgctctcgaggaaactcataggcttctgcaacaatttccactcgatctcgagaagttcctcgcctggctgacagaggctgaaacgactgcgaacgtccttcaggacgccactcgaaaagagagactgctggaagactccaaaggcgttaaggaactcatgaagcagtggcaggacctccaaggagagatagaagcgcacacagacgtgtaccacaatctcgacgaaaacagtcagaaaattctgcggtcattagagggctccgatgacgctgtgctgctgcaacggagattagataacatgaattttaaatggtctgagcttagaaagaaatccctgaacatccgcagtcacctcgaggcgagctctgatcaatggaaaagattgcatctctccctgcaggaactgttggtatggttgcaactgaaggatgatgaacttagcaggcaggcccccatcggtggcgacttccccgccgttcagaaacaaaatgatgtacaccgggcttttaagagagaattgaaaaccaaagagcctgtgattatgtccacgctggagaccgtacgcatcttcctcacagaacagccactggaaggtttggagaaactctatcaggagccccgggagctgccgcccgaggagcgcgcccaaaacgtgactcgactgttgcggaagcaggcagaagaggtgaatacagagtgggaaaaactgaacctccattcagcggattggcaacgcaagatcgatgagacattggaaaggctacgcgagctgcaggaggccaccgatgagctcgatctgaagctgaggcaggcagaagtgattaagggttcatggcagcccgtgggcgacctgttgattgatagcttacaggatcatctggagaaggtaaaggcacttaggggcgaaattgctccactcaaagagaacgttagtcacgtcaacgatctggcgaggcagctgacaacgctggggattcagctgtctccttacaatctgagtactctagaggatctaaacacgcgatggaagctcctccaggtggccgtggaagatagagtccgacagctgcacgaggctcatcgagatttcggtccggcctctcagcacttcctatccacctcggtgcagggaccttgggagcgcgctattagccccaataaagttccgtactatattaatcatgaaactcagactacatgctgggaccaccctaaaatgaccgaactttaccagtccctcgctgacttgaataatgtccggttcagcgcgtacagaaccgccatgaagctcagaaggcttcagaaggccctctgtctggatctgttgtccctttccgcagcctgcgatgcccttgaccagcacaatctaaaacagaatgatcagccaatggacattttgcaaatcatcaactgcctgaccaccatctatgatagactagagcaagagcataacaacctagttaatgtccccctttgtgtggacatgtgtcttaattggctcctgaatgtgtacgatactggccggaccggtcggatcagagttctctctttcaaaacgggcataatttcgctctgtaaggcccaccttgaggataagtaccgctatctgtttaagcaggtcgcaagctcgaccggtttttgtgatcaacggcggctgggcctgttattgcacgacagtattcaaatccctagacaacttggggaagtggcctcctttgggggcagtaacatcgagccatccgtaagatcatgtttccagttcgctaacaacaaaccggagatcgaagctgcactatttctcgattggatgagactggagccgcagtctatggtttggcttccggtcctccaccgcgtggccgctgctgagactgcaaagcatcaagctaagtgtaacatctgcaaggaatgtcccattatcggatttcgataccggtctttgaagcactttaattacgatatctgccaatcttgctttttttccgggagagtggctaagggacacaaaatgcactatcccatggtggagtactgtacacccacaacttcaggagaggatgtgagggacttcgctaaggtcctaaaaaacaaattccgtaccaagagatactttgcgaaacaccccaggatgggctatctgccggtgcagacagttctcgaaggcgataatatggaaaccccagtgacactcattaatttttggcccgtggactccgcgcctgcttcttcacctcaactatcgcacgatgatacacattctcggatcgagcactacgcaagtcgtttggccgaaatggaaaactccaatggcagctatctgaatgattcgataagtccaaatgagagtatcgacgatgagcatctcctgattcagcactattgtcagtctctgaaccaagactcacccctttcacagccccgctccccagctcaaatccttatatccttagaatccgaagagcgaggcgaacttgaacggattctggcggatctggaagaggaaaatagaaacttacaagcggaatatgatcgtttaaaacagcagcatgagcataaggggctgtcaccgctcccaagcccgcctgaaatgatgcctacgagccctcagtcgccccgggacgctgaactaatcgctgaagccaagctgctgcgacagcacaaaggtcggctcgaagccaggatgcagatcctggaggaccacaataaacagctggagagccagctgcacaggctccgccaactactggagcagccgcaggcggaggccaaagtcaatggtactacggtctcgagcccttccaccagtttgcaacggagcgatagctcacagcccatgcttctgagagtcgtcgggtcccagacgtccgattcgatgggtgaggaagaccttctctcgccaccccaggacacgtctactggactagaggaagtcatggagcagctaaacaacagttttccttccagcagaggcaggaatacacccgggaagcccatgagggaagacacaccctag

SEQ ID NO: 142756 - DNA, 7034 bp, Artificial Sequence
  derived and/or modified sequence
atgaccgagatgattctgctgatcttcttcccggcttattttctgaacgccgtgaggcgacagaagcttctggagcagagcatccaatcagctcaggaaacagagaaatctctgcatctaatccaagaatccctgaccttcatcgacaagcagctggcagcttatatagccgacaaagtggacgctgcacaaatgccccaggaagcccaaaagatccagagcgacctgacatcgcacgagattagtctcgaggaaatgaaaaaacataatcagggcaaagaagctgcccagagagtcctcagccaaattgatgttgcccagaagaagttacaggatgtcagtatgaagttcagactgtttcagaaaccggctaattttgagcaacgcctccaagagtctaaaatgattcttgacgaggtgaagatgcacctgcccgctctggaaaccaagagtgttgaacaagaagtcgttcagagccaactcaatcactgcgtaaatctgtataaaagcctctcagaggtcaaaagcgaggtagaaatggtcatcaagacagggaggcagattgtgcagaagaagcagactgagaaccctaaggagttagacgagagggtgactgcgctcaagctgcattacaacgagctcggagcaaaggtgaccgagaggaaacagcagctggagaagtgtctgaaactgtcccggaaaatgcgcaaggaaatgaatgttctgacagagtggctggcagccactgacatggaactaactaagcgctccgctgtggagggcatgccaagtaacctcgactctgaggtcgcgtggggtaaggccacccaaaaggaaatcgaaaagcagaaagtccacctaaaaagcattaccgaggtgggggaagcactcaaaacagtgctcggtaaaaaagagaccctggtcgaagacaaattgagccttttgaacagtaactggatagcagtcacaagtagagccgaggagtggctgaacctgttgctggaataccagaagcatatggaaaccttcgaccagaacgtggatcacatcaccaagtggattattcaggctgacaccctgttagacgaaagtgagaagaaaaaaccccaacaaaaggaagatgtgttaaagcgactgaaggccgagttaaatgacatccggcctaaagttgattccacaagagaccaggccgcaaatcttatggcaaacaggggggaccactgccgaaagctcgtcgaaccacagatatccgagctgaatcatcgtttcgcggctatcagtcacagaattaagaccggtaaggcgtctatccctctgaaagagctcgagcagtttaacagtgatatccagaagctactggagccgctggaggccgaaatacagcaaggcgttaacttgaaagaagaggactttaataaggatatgaacgaggacaatgagggaacagttaaggagctcctacagcgcggtgacaacctacagcagcgcatcacggatgagcgaaagcgggaggagatcaagatcaagcagcaactgttacaaaccaaacacaacgcgcttaaagacctccgctcacagcggagaaaaaaagcactggagatctctcatcagtggtatcagtataagcgccaggccgacgatctgctgaaatgcttagacgatatagagaagaagctagcatccctgccagaaccaagggatgaaagaaagataaaggagattgatagagagcttcagaagaaaaaggaagagctgaacgccgtgcgtagacaagccgagggcctgtcagaggatggcgctgctatggctgtcgaacctactcagatccagctctccaagaggtggcgggagattgagagtaagttcgctcaattcagacgattgaacttcgcgcagatacatacagttcgggaggagaccatgatggtcatgactgaagacatgcctttggaaattagttacgtccctagcacctatctgacagagattacgcacgtcagccaagccctcctggaggtggagcagctcctgaatgctcctgatctgtgtgccaaagatttcgaggatctctttaagcaggaggagagccttaaaaacattaaggattcgctgcagcaaagcagtgggaggatcgacataatccacagcaagaagaccgctgctttgcagagcgctacccctgtggagagggtaaaactccaggaggccctaagccagctagactttcaatgggagaaggtgaacaagatgtacaaagatcgacagggtcggttcgatcgctctgtcgaaaagtggaggcgattccactatgacattaaaatctttaaccaatggctaaccgaggcagaacaatttctcagaaagacacaaatccctgagaactgggagcacgccaagtataagtggtacctgaaagagctccaggatggaataggccagaggcagacagtagttcgcactctgaatgccaccggcgaggagatcatccagcagagctctaagaccgacgcctctatcttgcaggaaaagctagggtcattgaatctgcgctggcaggaggtttgtaaacaactgtccgacaggaagaaacgtcttgaggagcaaaagaacatcctgtccgagttccagcgagatctcaatgagtttgtcctgtggctcgaggaggcagacaacatcgccagtatacccctggaacccggaaaggagcagcagctgaaagaaaaactggaacaggtgaagcttttagtggaggaactgcctttaagacaggggattctgaaacagctgaacgaaacgggcggacctgttctggtttccgcaccgatctcacctgaggagcaggataaactggagaataagctaaagcagacaaatctacagtggatcaaggtgagtcgtgctctcccagagaagcagggggagatcgaagctcagattaaggacctaggacagctcgagaagaaactggaggatttggaggaacagctaaaccacctgctgctgtggctaagccccattagaaaccagctggaaatctacaaccaacccaaccaggagggcccttttgacgtaaaggaaactgagatcgccgtacaggctaagcaacccgacgtcgaggaaatcctatctaaaggacaacacctctataaggaaaagccagccacccagccagttaagcgcaagttggaagacctgagctctgaatggaaggcagtgaatcgcttgcttcaggaactgcgggcaaagcagcccgatctggcccctggcctcaccacaatcggggcttctcccacccagaccgtaacattagtcacccaacctgttgtaaccaaggaaactgccatctccaaactggaaatgccatcctctttgatgctggaggttcctgccctggctgacttcaacagagcctggacagagctgacagactggttgagtctgctcgaccaggttatcaaatctcagagagttatggtgggcgatctggaagatatcaatgagatgataattaaacagaaggcaaccatgcaggacctcgaacagcgcaggccacagctcgaagagctgattaccgcggctcagaacctgaagaataagacgagcaatcaggaggcgagaactattatcacagacaggattgagcgaatccagaaccagtgggatgaggtccaggaacacctgcagaatcgacggcaacagctgaatgaaatgttaaaggattctacccagtggctcgaagctaaggaggaggcagagcaagtgctgggacaggcaagagccaaacttgagtcttggaaggaaggtccttacacagtagacgcaatccaaaagaagataaccgaaacaaagcaactcgcaaaggacttgaggcagtggcagaccaacgtagacgttgccaatgatcttgccttaaagctcctgcgggattattcagccgatgatacaaggaaagtacacatgatcacagaaaatattaacgcttcttggaggtcaattcacaagcgggtcagtgaacgggaagctgcgctcgaggagacccaccggctgcttcaacagttccctttggatttggagaaatttctggcctggttgactgaggcagagactacagccaatgtgttgcaggacgctactcgcaaggagagactgctcgaagactccaagggggtaaaagagttgatgaagcagtggcaggaccttcagggggaaattgaagctcatacggatgtgtaccacaacctcgatgagaatagtcaaaaaatactgcgttcacttgagggatccgacgacgccgtactcctgcagagaagactagacaacatgaacttcaagtggtcagagctaagaaaaaaaagtctaaacatcaggagtcacttggaggcatcctccgaccagtggaagcgtctccacctaagcctgcaggagctcttagtctggctgcagctcaaggatgatgaactgtcccggcaagccccaatcggcggagattttcctgctgtacagaaacagaacgatgtgcatagagccttcaaaagggagctcaaaacaaaggaaccagtcatcatgtcaacattggagacagtcaggattttcctgacggaacagccactggagggacttgaaaaactgtatcaagagcccagggagctgcccccagaagagagagcccaaaatgtcactcgactgttgcggaagcaggccgaagaagtgaacactgagtgggaaaagctgaatctgcatagtgctgattggcagaggaaaattgacgaaaccctggaacgcctacgcgaactgcaggaggctacggatgaactggatttgaagctgcgacaggccgaagtcatcaagggttcttggcagcctgttggcgatctactaatcgattcgcttcaagaccacttggagaaagtgaaagctctcaggggagaaatcgctcccttaaaggaaaatgtgagccacgtcaatgacctggccaggcaattaactaccttgggaatacaactctctccttacaacctttccacactggaagacctgaacacgagatggaaactcctgcaagtggctgtggaggatcgggtgcggcaattgcacgaggcccatagagattttggacccgctagccaacatttcttgagcacatcagtccagggaccctgggagagggcaatctcccctaataaggtcccctattatattaaccatgaaacacagaccacctgctgggaccacccaaagatgactgagttgtaccagtcacttgctgacttaaataacgtccgattctcagcttatcggaccgcgatgaagctgagacggctgcagaaagccctctgtcttgacctgctgtctctgtcagcggcttgcgacgctctggatcagcataacctcaaacaaaatgatcagcctatggatatcctccagatcataaactgcctgactacaatttacgatcggcttgaacaggagcataataatctggttaacgtgcctctgtgcgtcgacatgtgcctaaattggctgctcaacgtgtacgataccggtcgtacagggaggatacgagtcttgagtttcaagacagggataatcagcctgtgtaaagcgcaccttgaagacaagtatcggtacctgttcaagcaggtcgcgagttcaactgggttttgcgaccagagaagactcggcttgcttctacacgactctattcaaatacctcgacagctgggcgaagtggcttctttcggcggaagtaatatcgagccttcagtgcgctcttgcttccagtttgcaaataacaagcccgagattgaggccgctctgttcctcgactggatgagattggagcctcagagcatggtgtggctgcctgtactccaccgggtggccgcagccgagacagcaaaacaccaggcaaaatgtaacatttgcaaagagtgccctataatcggatttagataccgcagccttaagcactttaactatgatatatgccaaagttgcttcttttcaggaagagtcgccaaaggtcacaagatgcattaccccatggtggagtattgtacaccaacgacgtccggcgaggacgtcagagacttcgccaaggttctgaagaataagttcaggaccaaacgatatttcgctaaacatcccaggatggggtacctacccgtgcagacagtcctggaaggggacaatatggaaacccccgtgaccctgattaacttttggccagtcgactcagcacccgctagcagtccccaactgagtcacgacgacacacacagccggatcgaacattacgcatctaggctcgccgaaatggaaaacagtaacgggtcctaccttaatgactccatcagtcctaatgagtctattgacgacgaacacctgctgatccagcactactgccaatctctgaaccaggactcacctttgagccagccccgaagcccggcacaaatcttgatctccctggaaagcgaagagcgcggagaactcgaacgaatactcgcggacctcgaggaagagaataggaacctccaggccgaatatgacaggctgaaacaacagcatgagcacaaaggccttagcccgctgccctccccaccggagatgatgcctacatctccacagagtcccagagacgcagagctgattgctgaggcgaaactgcttcgccagcataaaggacggcttgaagcgagaatgcagatcctggaagaccataacaaacagctggagtcccagctacatcgcttgagacaactcctggaacagcctcaagctgaagccaaagtcaatggaactacagtctcctcccccagcacatccctgcagcgcagtgatagttctcagccaatgctgctacgcgtggtggggagccagacctcggactctatgggagaagaggaccttctgtctcctccacaggacacgagtaccggactggaggaagtgatggagcagttaaataatagctttcctagcagtcgcggaaggaacacaccaggcaaacccatgcgggaagacacaccata

SEQ ID NO: 142757 - DNA, 7035 bp, Artificial Sequence
  derived and/or modified sequence
atgaccgagatgatcctgctgatcttcttccccgcctacttcctgaacgccgtgagaagacagaagctgctggagcagagcatccagagcgcccaggagaccgagaagagcctgcacctgatccaggagagcctgaccttcatcgacaagcagctggccgcctacatcgccgacaaggtggacgccgcccagatgccccaggaggcccagaagatccagagcgacctgaccagccacgagatcagcctggaggagatgaagaagcacaaccagggcaaggaggccgcccagagagtgctgagccagatcgacgtggcccagaagaagctgcaggacgtgagcatgaagttcagactgttccagaagcccgccaacttcgagcagagactgcaggagagcaagatgatcctggacgaggtgaagatgcacctgcccgccctggagaccaagagcgtggagcaggaggtggtgcagagccagctgaaccactgcgtgaacctgtacaagagcctgagcgaggtgaagagcgaggtggagatggtgatcaagaccggcagacagatcgtgcagaagaagcagaccgagaaccccaaggagctggacgagagagtgaccgccctgaagctgcactacaacgagctgggcgccaaggtgaccgagagaaagcagcagctggagaagtgcctgaagctgagcagaaagatgagaaaggagatgaacgtgctgaccgagtggctggccgccaccgacatggagctgaccaagagaagcgccgtggagggcatgcccagcaacctggacagcgaggtggcctggggcaaggccacccagaaggagatcgagaagcagaaggtgcacctgaagagcatcaccgaggtgggcgaggccctgaagaccgtgctgggcaagaaggagaccctggtggaggacaagctgagcctgctgaacagcaactggatcgccgtgaccagcagagccgaggagtggctgaacctgctgctggagtaccagaagcacatggagaccttcgaccagaacgtggaccacatcaccaagtggatcatccaggccgacaccctgctggacgagagcgagaagaagaagccccagcagaaggaggacgtgctgaagagactgaaggccgagctgaacgacatcagacccaaggtggacagcaccagagaccaggccgccaacctgatggccaacagaggcgaccactgcagaaagctggtggagccccagatcagcgagctgaaccacagattcgccgccatcagccacagaatcaagaccggcaaggccagcatccccctgaaggagctggagcagttcaacagcgacatccagaagctgctggagcccctggaggccgagatccagcagggcgtgaacctgaaggaggaggacttcaacaaggacatgaacgaggacaacgagggcaccgtgaaggagctgctgcagagaggcgacaacctgcagcagagaatcaccgacgagagaaagagagaggagatcaagatcaagcagcagctgctgcagaccaagcacaacgccctgaaggacctgagaagccagagaagaaagaaggccctggagatcagccaccagtggtaccagtacaagagacaggccgacgacctgctgaagtgcctggacgacatcgagaagaagctggccagcctgcccgagcccagagacgagagaaagatcaaggagatcgacagagagctgcagaagaagaaggaggagctgaacgccgtgagaagacaggccgagggcctgagcgaggacggcgccgccatggccgtggagcccacccagatccagctgagcaagagatggagagagatcgagagcaagttcgcccagttcagaagactgaacttcgcccagatccacaccgtgagagaggagaccatgatggtgatgaccgaggacatgcccctggagatcagctacgtgcccagcacctacctgaccgagatcacccacgtgagccaggccctgctggaggtggagcagctgctgaacgcccccgacctgtgcgccaaggacttcgaggacctgttcaagcaggaggagagcctgaagaacatcaaggacagcctgcagcagagcagcggcagaatcgacatcatccacagcaagaagaccgccgccctgcagagcgccacccccgtggagagagtgaagctgcaggaggccctgagccagctggacttccagtgggagaaggtgaacaagatgtacaaggacagacagggcagattcgacagaagcgtggagaagtggagaagattccactacgacatcaagatcttcaaccagtggctgaccgaggccgagcagttcctgagaaagacccagatccccgagaactgggagcacgccaagtacaagtggtacctgaaggagctgcaggacggcatcggccagagacagaccgtggtgagaaccctgaacgccaccggcgaggagatcatccagcagagcagcaagaccgacgccagcatcctgcaggagaagctgggcagcctgaacctgagatggcaggaggtgtgcaagcagctgagcgacagaaagaagagactggaggagcagaagaacatcctgagcgagttccagagagacctgaacgagttcgtgctgtggctggaggaggccgacaacatcgccagcatccccctggagcccggcaaggagcagcagctgaaggagaagctggagcaggtgaagctgctggtggaggagctgcccctgagacagggcatcctgaagcagctgaacgagaccggcggccccgtgctggtgagcgcccccatcagccccgaggagcaggacaagctggagaacaagctgaagcagaccaacctgcagtggatcaaggtgagcagagccctgcccgagaagcagggcgagatcgaggcccagatcaaggacctgggccagctggagaagaagctggaggacctggaggagcagctgaaccacctgctgctgtggctgagccccatcagaaaccagctggagatctacaaccagcccaaccaggagggccccttcgacgtgaaggagaccgagatcgccgtgcaggccaagcagcccgacgtggaggagatcctgagcaagggccagcacctgtacaaggagaagcccgccacccagcccgtgaagagaaagctggaggacctgagcagcgagtggaaggccgtgaacagactgctgcaggagctgagagccaagcagcccgacctggcccccggcctgaccaccatcggcgccagccccacccagaccgtgaccctggtgacccagcccgtggtgaccaaggagaccgccatcagcaagctggagatgcccagcagcctgatgctggaggtgcccgccctggccgacttcaacagagcctggaccgagctgaccgactggctgagcctgctggaccaggtgatcaagagccagagagtgatggtgggcgacctggaggacatcaacgagatgatcatcaagcagaaggccaccatgcaggacctggagcagagaagaccccagctggaggagctgatcaccgccgcccagaacctgaagaacaagaccagcaaccaggaggccagaaccatcatcaccgacagaatcgagagaatccagaaccagtgggacgaggtgcaggagcacctgcagaacagaagacagcagctgaacgagatgctgaaggacagcacccagtggctggaggccaaggaggaggccgagcaggtgctgggccaggccagagccaagctggagagctggaaggagggcccctacaccgtggacgccatccagaagaagatcaccgagaccaagcagctggccaaggacctgagacagtggcagaccaacgtggacgtggccaacgacctggccctgaagctgctgagagactacagcgccgacgacaccagaaaggtgcacatgatcaccgagaacatcaacgccagctggagaagcatccacaagagagtgagcgagagagaggccgccctggaggagacccacagactgctgcagcagttccccctggacctggagaagttcctggcctggctgaccgaggccgagaccaccgccaacgtgctgcaggacgccaccagaaaggagagactgctggaggacagcaagggcgtgaaggagctgatgaagcagtggcaggacctgcagggcgagatcgaggcccacaccgacgtgtaccacaacctggacgagaacagccagaagatcctgagaagcctggagggcagcgacgacgccgtgctgctgcagagaagactggacaacatgaacttcaagtggagcgagctgagaaagaagagcctgaacatcagaagccacctggaggccagcagcgaccagtggaagagactgcacctgagcctgcaggagctgctggtgtggctgcagctgaaggacgacgagctgagcagacaggcccccatcggcggcgacttccccgccgtgcagaagcagaacgacgtgcacagagccttcaagagagagctgaagaccaaggagcccgtgatcatgagcaccctggagaccgtgagaatcttcctgaccgagcagcccctggagggcctggagaagctgtaccaggagcccagagagctgccccccgaggagagagcccagaacgtgaccagactgctgagaaagcaggccgaggaggtgaacaccgagtgggagaagctgaacctgcacagcgccgactggcagagaaagatcgacgagaccctggagagactgagagagctgcaggaggccaccgacgagctggacctgaagctgagacaggccgaggtgatcaagggcagctggcagcccgtgggcgacctgctgatcgacagcctgcaggaccacctggagaaggtgaaggccctgagaggcgagatcgcccccctgaaggagaacgtgagccacgtgaacgacctggccagacagctgaccaccctgggcatccagctgagcccctacaacctgagcaccctggaggacctgaacaccagatggaagctgctgcaggtggccgtggaggacagagtgagacagctgcacgaggcccacagagacttcggccccgccagccagcacttcctgagcaccagcgtgcagggcccctgggagagagccatcagccccaacaaggtgccctactacatcaaccacgagacccagaccacctgctgggaccaccccaagatgaccgagctgtaccagagcctggccgacctgaacaacgtgagattcagcgcctacagaaccgccatgaagctgagaagactgcagaaggccctgtgcctggacctgctgagcctgagcgccgcctgcgacgccctggaccagcacaacctgaagcagaacgaccagcccatggacatcctgcagatcatcaactgcctgaccaccatctacgacagactggagcaggagcacaacaacctggtgaacgtgcccctgtgcgtggacatgtgcctgaactggctgctgaacgtgtacgacaccggcagaaccggcagaatcagagtgctgagcttcaagaccggcatcatcagcctgtgcaaggcccacctggaggacaagtacagatacctgttcaagcaggtggccagcagcaccggcttctgcgaccagagaagactgggcctgctgctgcacgacagcatccagatccccagacagctgggcgaggtggccagcttcggcggcagcaacatcgagcccagcgtgagaagctgcttccagttcgccaacaacaagcccgagatcgaggccgccctgttcctggactggatgagactggagccccagagcatggtgtggctgcccgtgctgcacagagtggccgccgccgagaccgccaagcaccaggccaagtgcaacatctgcaaggagtgccccatcatcggcttcagatacagaagcctgaagcacttcaactacgacatctgccagagctgcttcttcagcggcagagtggccaagggccacaagatgcactaccccatggtggagtactgcacccccaccaccagcggcgaggacgtgagagacttcgccaaggtgctgaagaacaagttcagaaccaagagatacttcgccaagcaccccagaatgggctacctgcccgtgcagaccgtgctggagggcgacaacatggagacccccgtgaccctgatcaacttctggcccgtggacagcgcccccgccagcagcccccagctgagccacgacgacacccacagcagaatcgagcactacgccagcagactggccgagatggagaacagcaacggcagctacctgaacgacagcatcagccccaacgagagcatcgacgacgagcacctgctgatccagcactactgccagagcctgaaccaggacagccccctgagccagcccagaagccccgcccagatcctgatcagcctggagagcgaggagagaggcgagctggagagaatcctggccgacctggaggaggagaacagaaacctgcaggccgagtacgacagactgaagcagcagcacgagcacaagggcctgagccccctgcccagcccccccgagatgatgcccaccagcccccagagccccagagacgccgagctgatcgccgaggccaagctgctgagacagcacaagggcagactggaggccagaatgcagatcctggaggaccacaacaagcagctggagagccagctgcacagactgagacagctgctggagcagccccaggccgaggccaaggtgaacggcaccaccgtgagcagccccagcaccagcctgcagagaagcgacagcagccagcccatgctgctgagagtggtgggcagccagaccagcgacagcatgggcgaggaggacctgctgagccccccccaggacaccagcaccggcctggaggaggtgatggagcagctgaacaacagcttccccagcagcagaggcagaaacacccccggcaagcccatgagagaggacaccccctag

SEQ ID NO: 142758 - DNA, 7032 bp, Artificial Sequence
  derived and/or modified sequence
atgactgagatgattttgctaattttttttccagcctatttccttaatgctgtaaggaggcaaaagttgcttgaacagagcatccagtctgcccaggagactgaaaaatccttacacttaatccaggagtccctcacattcattgacaagcagttggcagcttatattgcagacaaggtggacgcagctcaaatgcctcaggaagcccagaaaatccaatctgatttgacaagtcatgagatcagtttagaagaaatgaagaaacataatcaggggaaggaggctgcccaaagagtcctgtctcagattgatgttgcacagaaaaaattacaagatgtctccatgaagtttcgattattccagaaaccagccaattttgagcagcgtctacaagaaagtaagatgattttagatgaagtgaagatgcacttgcctgcattggaaacaaagagtgtggaacaggaagtagtacagtcacagctaaatcattgtgtgaacttgtataaaagtctgagtgaagtgaagtctgaagtggaaatggtgataaagactggacgtcagattgtacagaaaaagcagacggaaaatcccaaagaacttgatgaaagagtaacagctttgaaattgcattataatgagctgggagcaaaggtaacagaaagaaagcaacagttggagaaatgcttgaaattgtcccgtaagatgcgaaaggaaatgaatgtcttgacagaatggctggcagctacagatatggaattgacaaagagatcagcagttgaaggaatgcctagtaatttggattctgaagttgcctggggaaaggctactcaaaaagagattgagaaacagaaggtgcacctgaagagtatcacagaggtaggagaggccttgaaaacagttttgggcaagaaggagacgttggtggaagataaactcagtcttctgaatagtaactggatagctgtcacctcccgagcagaagagtggttaaatcttttgttggaataccagaaacacatggaaacttttgaccagaatgtggaccacatcacaaagtggatcattcaggctgacacacttttggatgaatcagagaaaaagaaaccccagcaaaaagaagacgtgcttaagcgtttaaaggcagaactgaatgacatacgcccaaaggtggactctacacgtgaccaagcagcaaacttgatggcaaaccgcggtgaccactgcaggaaattagtagagccccaaatctcagagctcaaccatcgatttgcagccatttcacacagaattaagactggaaaggcctccattcctttgaaggaattggagcagtttaactcagatatacaaaaattgcttgaaccactggaggctgaaattcagcagggggtgaatctgaaagaggaagacttcaataaagatatgaatgaagacaatgagggtactgtaaaagaattgttgcaaagaggagacaacttacaacaaagaatcacagatgagagaaagcgagaggaaataaagataaaacagcagctgttacagacaaaacataatgctctcaaggatttgaggtctcaaagaagaaaaaaggctctagaaatttctcatcagtggtatcagtacaagaggcaggctgatgatctcctgaaatgcttggatgacattgaaaaaaaattagccagcctacctgagcccagagatgaaaggaaaataaaggaaattgatcgggaattgcagaagaagaaagaggagctgaatgcagtgcgtaggcaagctgagggcttgtctgaggatggggccgcaatggcagtggagccaactcagatccagctcagcaagcgctggcgggaaattgagagcaaatttgctcagtttcgaagactcaactttgcacaaattcacactgtccgtgaagaaacgatgatggtgatgactgaagacatgcctttggaaatttcttatgtgccttctacttatttgactgaaatcactcatgtctcacaagccctattagaagtggaacaacttctcaatgctcctgacctctgtgctaaggactttgaagatctctttaagcaagaggagtctctgaagaatataaaagatagtctacaacaaagctcaggtcggattgacattattcatagcaagaagacagcagcattgcaaagtgcaacgcctgtggaaagggtgaagctacaggaagctctctcccagcttgatttccaatgggaaaaagttaacaaaatgtacaaggaccgacaagggcgatttgacagatctgttgagaaatggcggcgttttcattatgatataaagatatttaatcagtggctaacagaagctgaacagtttctcagaaagacacaaattcctgagaattgggaacatgctaaatacaaatggtatcttaaggaactccaggatggcattgggcagcggcaaactgttgtcagaacattgaatgcaactggggaagaaataattcagcaatcctcaaaaacagatgccagtattctacaggaaaaattgggaagcctgaatctgcggtggcaggaggtctgcaaacagctgtcagacagaaaaaagaggctagaagaacaaaagaatatcttgtcagaatttcaaagagatttaaatgaatttgttttatggttggaggaagcagataacattgctagtatcccacttgaacctggaaaagagcagcaactaaaagaaaagcttgagcaagtcaagttactggtggaagagttgcccctgcgccagggaattctcaaacaattaaatgaaactggaggacccgtgcttgtaagtgctcccataagcccagaagagcaagataaacttgaaaataagctcaagcagacaaatctccagtggataaaggtttccagagctttacctgagaaacaaggagaaattgaagctcaaataaaagaccttgggcagcttgaaaaaaagcttgaagaccttgaagagcagttaaatcatctgctgctgtggttatctcctattaggaatcagttggaaatttataaccaaccaaaccaagaaggaccatttgacgttaaggaaactgaaatagcagttcaagctaaacaaccggatgtggaagagattttgtctaaagggcagcatttgtacaaggaaaaaccagccactcagccagtgaagaggaagttagaagatctgagctctgagtggaaggcggtaaaccgtttacttcaagagctgagggcaaagcagcctgacctagctcctggactgaccactattggagcctctcctactcagactgttactctggtgacacaacctgtggttactaaggaaactgccatctccaaactagaaatgccatcttccttgatgttggaggtacctgctctggcagatttcaaccgggcttggacagaacttaccgactggctttctctgcttgatcaagttataaaatcacagagggtgatggtgggtgaccttgaggatatcaacgagatgatcatcaagcagaaggcaacaatgcaggatttggaacagaggcgtccccagttggaagaactcattaccgctgcccaaaatttgaaaaacaagaccagcaatcaagaggctagaacaatcattacggatcgaattgaaagaattcagaatcagtgggatgaagtacaagaacaccttcagaaccggaggcaacagttgaatgaaatgttaaaggattcaacacaatggctggaagctaaggaagaagctgagcaggtcttaggacaggccagagccaagcttgagtcatggaaggagggtccctatacagtagatgcaatccaaaagaaaatcacagaaaccaagcagttggccaaagacctccgccagtggcagacaaatgtagatgtggcaaatgacttggccctgaaacttctccgggattattctgcagatgataccagaaaagtccacatgataacagagaatatcaatgcctcttggagaagcattcataaaagggtgagtgagcgagaggctgctttggaagaaactcatagattactgcaacagttccccctggacctggaaaagtttcttgcctggcttacagaagctgaaacaactgccaatgtcctacaggatgctacccgtaaggaaaggctcctagaagactccaagggagtaaaagagctgatgaaacaatggcaagacctccaaggtgaaattgaagctcacacagatgtttatcacaacctggatgaaaacagccaaaaaatcctgagatccctggaaggttccgatgatgcagtcctgttacaaagacgtttggataacatgaacttcaagtggagtgaacttcggaaaaagtctctcaacattaggtcccatttggaagccagttctgaccagtggaagcgtctgcacctttctctgcaggaacttctggtgtggctacagctgaaagatgatgaattaagccggcaggcacctattggaggcgactttccagcagttcagaagcagaacgatgtacatagggccttcaagagggaattgaaaactaaagaacctgtaatcatgagtactcttgagactgtacgaatatttctgacagagcagcctttggaaggactagagaaactctaccaggagcccagagagctgcctcctgaggagagagcccagaatgtcactcggcttctacgaaagcaggctgaggaggtcaatactgagtgggaaaaattgaacctgcactccgctgactggcagagaaaaatagatgagacccttgaaagactccgggaacttcaagaggccacggatgagctggacctcaagctgcgccaagctgaggtgatcaagggatcctggcagcccgtgggcgatctcctcattgactctctccaagatcacctcgagaaagtcaaggcacttcgaggagaaattgcgcctctgaaagagaacgtgagccacgtcaatgaccttgctcgccagcttaccactttgggcattcagctctcaccgtataacctcagcactctggaagacctgaacaccagatggaagcttctgcaggtggccgtcgaggaccgagtcaggcagctgcatgaagcccacagggactttggtccagcatctcagcactttctttccacgtctgtccagggtccctgggagagagccatctcgccaaacaaagtgccctactatatcaaccacgagactcaaacaacttgctgggaccatcccaaaatgacagagctctaccagtctttagctgacctgaataatgtcagattctcagcttataggactgccatgaaactccgaagactgcagaaggccctttgcttggatctcttgagcctgtcagctgcatgtgatgccttggaccagcacaacctcaagcaaaatgaccagcccatggatatcctgcagattattaattgtttgaccactatttatgaccgcctggagcaagagcacaacaatttggtcaacgtccctctctgcgtggatatgtgtctgaactggctgctgaatgtttatgatacgggacgaacagggaggatccgtgtcctgtcttttaaaactggcatcatttccctgtgtaaagcacatttggaagacaagtacagataccttttcaagcaagtggcaagttcaacaggattttgtgaccagcgcaggctgggcctccttctgcatgattctatccaaattccaagacagttgggtgaagttgcatcctttgggggcagtaacattgagccaagtgtccggagctgcttccaatttgctaataataagccagagatcgaagcggccctcttcctagactggatgagactggaaccccagtccatggtgtggctgcccgtcctgcacagagtggctgctgcagaaactgccaagcatcaggccaaatgtaacatctgcaaagagtgtccaatcattggattcaggtacaggagtctaaagcactttaattatgacatctgccaaagctgctttttttctggtcgagttgcaaaaggccataaaatgcactatcccatggtggaatattgcactccgactacatcaggagaagatgttcgagactttgccaaggtactaaaaaacaaatttcgaaccaaaaggtattttgcgaagcatccccgaatgggctacctgccagtgcagactgtcttagagggggacaacatggaaactcccgttactctgatcaacttctggccagtagattctgcgcctgcctcgtcccctcagctttcacacgatgatactcattcacgcattgaacattatgctagcaggctagcagaaatggaaaacagcaatggatcttatctaaatgatagcatctctcctaatgagagcatagatgatgaacatttgttaatccagcattactgccaaagtttgaaccaggactcccccctgagccagcctcgtagtcctgcccagatcttgatttccttagagagtgaggaaagaggggagctagagagaatcctagcagatcttgaggaagaaaacaggaatctgcaagcagaatatgaccgtctaaagcagcagcacgaacataaaggcctgtccccactgccgtcccctcctgaaatgatgcccacctctccccagagtccccgggatgctgagctcattgctgaggccaagctactgcgtcaacacaaaggccgcctggaagccaggatgcaaatcctggaagaccacaataaacagctggagtcacagttacacaggctaaggcagctgctggagcaaccccaggcagaggccaaagtgaatggcacaacggtgtcctctccttctacctctctacagaggtccgacagcagtcagcctatgctgctccgagtggttggcagtcaaacttcggactccatgggtgaggaagatcttctcagtcctccccaggacacaagcacagggttagaggaggtgatggagcaactcaacaactccttccctagttcaagaggaagaaatacccctggaaagccaatgagagaggacaccccc

SEQ ID NO: 142759 - protein, 2341 aa, Artificial Sequence
  derived and/or modified sequence
MSARKLRNLSYKKAVRRQKLLEQSIQSAQETEKSLHLIQESLTFIDKQLAAYIADKVDAAQMPQEAQKIQSDLTSHEISLEEMKKHNQGKEAAQRVLSQIDVAQKKLQDVSMKFRLFQKPANFEQRLQESKMILDEVKMHLPALETKSVEQEVVQSQLNHCVNLYKSLSEVKSEVEMVIKTGRQIVQKKQTENPKELDERVTALKLHYNELGAKVTERKQQLEKCLKLSRKMRKEMNVLTEWLAATDMELTKRSAVEGMPSNLDSEVAWGKATQKEIEKQKVHLKSITEVGEALKTVLGKKETLVEDKLSLLNSNWIAVTSRAEEWLNLLLEYQKHMETFDQNVDHITKWIIQADTLLDESEKKKPQQKEDVLKRLKAELNDIRPKVDSTRDQAANLMANRGDHCRKLVEPQISELNHRFAAISHRIKTGKASIPLKELEQFNSDIQKLLEPLEAEIQQGVNLKEEDFNKDMNEDNEGTVKELLQRGDNLQQRITDERKREEIKIKQQLLQTKHNALKDLRSQRRKKALEISHQWYQYKRQADDLLKCLDDIEKKLASLPEPRDERKIKEIDRELQKKKEELNAVRRQAEGLSEDGAAMAVEPTQIQLSKRWREIESKFAQFRRLNFAQIHTVREETMMVMTEDMPLEISYVPSTYLTEITHVSQALLEVEQLLNAPDLCAKDFEDLFKQEESLKNIKDSLQQSSGRIDIIHSKKTAALQSATPVERVKLQEALSQLDFQWEKVNKMYKDRQGRFDRSVEKWRRFHYDIKIFNQWLTEAEQFLRKTQIPENWEHAKYKWYLKELQDGIGQRQTVVRTLNATGEEIIQQSSKTDASILQEKLGSLNLRWQEVCKQLSDRKKRLEEQKNILSEFQRDLNEFVLWLEEADNIASIPLEPGKEQQLKEKLEQVKLLVEELPLRQGILKQLNETGGPVLVSAPISPEEQDKLENKLKQTNLQWIKVSRALPEKQGEIEAQIKDLGQLEKKLEDLEEQLNHLLLWLSPIRNQLEIYNQPNQEGPFDVKETEIAVQAKQPDVEEILSKGQHLYKEKPATQPVKRKLEDLSSEWKAVNRLLQELRAKQPDLAPGLTTIGASPTQTVTLVTQPVVTKETAISKLEMPSSLMLEVPALADFNRAWTELTDWLSLLDQVIKSQRVMVGDLEDINEMIIKQKATMQDLEQRRPQLEELITAAQNLKNKTSNQEARTIITDRIERIQNQWDEVQEHLQNRRQQLNEMLKDSTQWLEAKEEAEQVLGQARAKLESWKEGPYTVDAIQKKITETKQLAKDLRQWQTNVDVANDLALKLLRDYSADDTRKVHMITENINASWRSIHKRVSEREAALEETHRLLQQFPLDLEKFLAWLTEAETTANVLQDATRKERLLEDSKGVKELMKQWQDLQGEIEAHTDVYHNLDENSQKILRSLEGSDDAVLLQRRLDNMNFKWSELRKKSLNIRSHLEASSDQWKRLHLSLQELLVWLQLKDDELSRQAPIGGDFPAVQKQNDVHRAFKRELKTKEPVIMSTLETVRIFLTEQPLEGLEKLYQEPRELPPEERAQNVTRLLRKQAEEVNTEWEKLNLHSADWQRKIDETLERLRELQEATDELDLKLRQAEVIKGSWQPVGDLLIDSLQDHLEKVKALRGEIAPLKENVSHVNDLARQLTTLGIQLSPYNLSTLEDLNTRWKLLQVAVEDRVRQLHEAHRDFGPASQHFLSTSVQGPWERAISPNKVPYYINHETQTTCWDHPKMTELYQSLADLNNVRFSAYRTAMKLRRLQKALCLDLLSLSAACDALDQHNLKQNDQPMDILQIINCLTTIYDRLEQEHNNLVNVPLCVDMCLNWLLNVYDTGRTGRIRVLSFKTGIISLCKAHLEDKYRYLFKQVASSTGFCDQRRLGLLLHDSIQIPRQLGEVASFGGSNIEPSVRSCFQFANNKPEIEAALFLDWMRLEPQSMVWLPVLHRVAAAETAKHQAKCNICKECPIIGFRYRSLKHFNYDICQSCFFSGRVAKGHKMHYPMVEYCTPTTSGEDVRDFAKVLKNKFRTKRYFAKHPRMGYLPVQTVLEGDNMETPVTLINFWPVDSAPASSPQLSHDDTHSRIEHYASRLAEMENSNGSYLNDSISPNESIDDEHLLIQHYCQSLNQDSPLSQPRSPAQILISLESEERGELERILADLEEENRNLQAEYDRLKQQHEHKGLSPLPSPPEMMPTSPQSPRDAELIAEAKLLRQHKGRLEARMQILEDHNKQLESQLHRLRQLLEQPQAEAKVNGTTVSSPSTSLQRSDSSQPMLLRVVGSQTSDSMGEEDLLSPPQDTSTGLEEVMEQLNNSFPSSRGRNTPGKPMREDTP

SEQ ID NO: 142760 - DNA, 9914 bp, Artificial Sequence
  derived and/or modified sequence
taatgagatcaggaggaacattcgacctgagaaagacagattgcaatgactgagatgattttgctaattttttttccagcctatttccttaatgtacgtgatattgtgattgattttcatgcagagatccctgatcctatagttttgtttgctatttatttttctccttcacattttttttctatcaacagagctgaatgagtgccaggaagctgcgaaatctgtcttacaaaaaggctgtaaggaggcaaaagttgcttgaacagagcatccagtctgcccaggagactgaaaaatccttacacttaatccaggagtccctcacattcattgacaagcagttggcagcttatattgcagacaaggtggacgcagctcaaatgcctcaggaagcccagaaaatccaatctgatttgacaagtcatgagatcagtttagaagaaatgaagaaacataatcaggggaaggaggctgcccaaagagtcctgtctcagattgatgttgcacagaaaaaattacaagatgtctccatgaagtttcgattattccagaaaccagccaattttgagcagcgtctacaagaaagtaagatgattttagatgaagtgaagatgcacttgcctgcattggaaacaaagagtgtggaacaggaagtagtacagtcacagctaaatcattgtgtgaacttgtataaaagtctgagtgaagtgaagtctgaagtggaaatggtgataaagactggacgtcagattgtacagaaaaagcagacggaaaatcccaaagaacttgatgaaagagtaacagctttgaaattgcattataatgagctgggagcaaaggtaacagaaagaaagcaacagttggagaaatgcttgaaattgtcccgtaagatgcgaaaggaaatgaatgtcttgacagaatggctggcagctacagatatggaattgacaaagagatcagcagttgaaggaatgcctagtaatttggattctgaagttgcctggggaaaggctactcaaaaagagattgagaaacagaaggtgcacctgaagagtatcacagaggtaggagaggccttgaaaacagttttgggcaagaaggagacgttggtggaagataaactcagtcttctgaatagtaactggatagctgtcacctcccgagcagaagagtggttaaatcttttgttggaataccagaaacacatggaaacttttgaccagaatgtggaccacatcacaaagtggatcattcaggctgacacacttttggatgaatcagagaaaaagaaaccccagcaaaaagaagacgtgcttaagcgtttaaaggcagaactgaatgacatacgcccaaaggtggactctacacgtgaccaagcagcaaacttgatggcaaaccgcggtgaccactgcaggaaattagtagagccccaaatctcagagctcaaccatcgatttgcagccatttcacacagaattaagactggaaaggcctccattcctttgaaggaattggagcagtttaactcagatatacaaaaattgcttgaaccactggaggctgaaattcagcagggggtgaatctgaaagaggaagacttcaataaagatatgaatgaagacaatgagggtactgtaaaagaattgttgcaaagaggagacaacttacaacaaagaatcacagatgagagaaagcgagaggaaataaagataaaacagcagctgttacagacaaaacataatgctctcaaggatttgaggtctcaaagaagaaaaaaggctctagaaatttctcatcagtggtatcagtacaagaggcaggctgatgatctcctgaaatgcttggatgacattgaaaaaaaattagccagcctacctgagcccagagatgaaaggaaaataaaggaaattgatcgggaattgcagaagaagaaagaggagctgaatgcagtgcgtaggcaagctgagggcttgtctgaggatggggccgcaatggcagtggagccaactcagatccagctcagcaagcgctggcgggaaattgagagcaaatttgctcagtttcgaagactcaactttgcacaaattcacactgtccgtgaagaaacgatgatggtgatgactgaagacatgcctttggaaatttcttatgtgccttctacttatttgactgaaatcactcatgtctcacaagccctattagaagtggaacaacttctcaatgctcctgacctctgtgctaaggactttgaagatctctttaagcaagaggagtctctgaagaatataaaagatagtctacaacaaagctcaggtcggattgacattattcatagcaagaagacagcagcattgcaaagtgcaacgcctgtggaaagggtgaagctacaggaagctctctcccagcttgatttccaatgggaaaaagttaacaaaatgtacaaggaccgacaagggcgatttgacagatctgttgagaaatggcggcgttttcattatgatataaagatatttaatcagtggctaacagaagctgaacagtttctcagaaagacacaaattcctgagaattgggaacatgctaaatacaaatggtatcttaaggaactccaggatggcattgggcagcggcaaactgttgtcagaacattgaatgcaactggggaagaaataattcagcaatcctcaaaaacagatgccagtattctacaggaaaaattgggaagcctgaatctgcggtggcaggaggtctgcaaacagctgtcagacagaaaaaagaggctagaagaacaaaagaatatcttgtcagaatttcaaagagatttaaatgaatttgttttatggttggaggaagcagataacattgctagtatcccacttgaacctggaaaagagcagcaactaaaagaaaagcttgagcaagtcaagttactggtggaagagttgcccctgcgccagggaattctcaaacaattaaatgaaactggaggacccgtgcttgtaagtgctcccataagcccagaagagcaagataaacttgaaaataagctcaagcagacaaatctccagtggataaaggtttccagagctttacctgagaaacaaggagaaattgaagctcaaataaaagaccttgggcagcttgaaaaaaagcttgaagaccttgaagagcagttaaatcatctgctgctgtggttatctcctattaggaatcagttggaaatttataaccaaccaaaccaagaaggaccatttgacgttcaggaaactgaaatagcagttcaagctaaacaaccggatgtggaagagattttgtctaaagggcagcatttgtacaaggaaaaaccagccactcagccagtgaagaggaagttagaagatctgagctctgagtggaaggcggtaaaccgtttacttcaagagctgagggcaaagcagcctgacctagctcctggactgaccactattggagcctctcctactcagactgttactctggtgacacaacctgtggttactaaggaaactgccatctccaaactagaaatgccatcttccttgatgttggaggtacctgctctggcagatttcaaccgggcttggacagaacttaccgactggctttctctgcttgatcaagttataaaatcacagagggtgatggtgggtgaccttgaggatatcaacgagatgatcatcaagcagaaggcaacaatgcaggatttggaacagaggcgtccccagttggaagaactcattaccgctgcccaaaatttgaaaaacaagaccagcaatcaagaggctagaacaatcattacggatcgaattgaaagaattcagaatcagtgggatgaagtacaagaacaccttcagaaccggaggcaacagttgaatgaaatgttaaaggattcaacacaatggctggaagctaaggaagaagctgagcaggtcttaggacaggccagagccaagcttgagtcatggaaggagggtccctatacagtagatgcaatccaaaagaaaatcacagaaaccaagcagttggccaaagacctccgccagtggcagacaaatgtagatgtggcaaatgacttggccctgaaacttctccgggattattctgcagatgataccagaaaagtccacatgataacagagaatatcaatgcctcttggagaagcattcataaaagggtgagtgagcgagaggctgctttggaagaaactcatagattactgcaacagttccccctggacctggaaaagtttcttgcctggcttacagaagctgaaacaactgccaatgtcctacaggatgctacccgtaaggaaaggctcctagaagactccaagggagtaaaagagctgatgaaacaatggcaagacctccaaggtgaaattgaagctcacacagatgtttatcacaacctggatgaaaacagccaaaaaatcctgagatccctggaaggttccgatgatgcagtcctgttacaaagacgtttggataacatgaacttcaagtggagtgaacttcggaaaaagtctctcaacattaggtcccatttggaagccagttctgaccagtggaagcgtctgcacctttctctgcaggaacttctggtgtggctacagctgaaagatgatgaattaagccggcaggcacctattggaggcgactttccagcagttcagaagcagaacgatgtacatagggccttcaagagggaattgaaaactaaagaacctgtaatcatgagtactcttgagactgtacgaatatttctgacagagcagcctttggaaggactagagaaactctaccaggagcccagagagctgcctcctgaggagagagcccagaatgtcactcggcttctacgaaagcaggctgaggaggtcaatactgagtgggaaaaattgaacctgcactccgctgactggcagagaaaaatagatgagacccttgaaagactccaggaacttcaagaggccacggatgagctggacctcaagctgcgccaagctgaggtgatcaagggatcctggcagcccgtgggcgatctcctcattgactctctccaagatcacctcgagaaagtcaaggcacttcgaggagaaattgcgcctctgaaagagaacgtgagccacgtcaatgaccttgctcgccagcttaccactttgggcattcagctctcaccgtataacctcagcactctggaagacctgaacaccagatggaagcttctgcaggtggccgtcgaggaccgagtcaggcagctgcatgaagcccacagggactttggtccagcatctcagcactttctttccacgtctgtccagggtccctgggagagagccatctcgccaaacaaagtgccctactatatcaaccacgagactcaaacaacttgctgggaccatcccaaaatgacagagctctaccagtctttagctgacctgaataatgtcagattctcagcttataggactgccatgaaactccgaagactgcagaaggccctttgcttggatctcttgagcctgtcagctgcatgtgatgccttggaccagcacaacctcaagcaaaatgaccagcccatggatatcctgcagattattaattgtttgaccactatttatgaccgcctggagcaagagcacaacaatttggtcaacgtccctctctgcgtggatatgtgtctgaactggctgctgaatgtttatgatacgggacgaacagggaggatccgtgtcctgtcttttaaaactggcatcatttccctgtgtaaagcacatttggaagacaagtacagataccttttcaagcaagtggcaagttcaacaggattttgtgaccagcgcaggctgggcctccttctgcatgattctatccaaattccaagacagttgggtgaagttgcatcctttgggggcagtaacattgagccaagtgtccggagctgcttccaatttgctaataataagccagagatcgaagcggccctcttcctagactggatgagactggaaccccagtccatggtgtggctgcccgtcctgcacagagtggctgctgcagaaactgccaagcatcaggccaaatgtaacatctgcaaagagtgtccaatcattggattcaggtacaggagtctaaagcactttaattatgacatctgccaaagctgctttttttctggtcgagttgcaaaaggccataaaatgcactatcccatggtggaatattgcactccgactacatcaggagaagatgttcgagactttgccaaggtactaaaaaacaaatttcgaaccaaaaggtattttgcgaagcatccccgaatgggctacctgccagtgcagactgtcttagagggggacaacatggaaactcccgttactctgatcaacttctggccagtagattctgcgcctgcctcgtcccctcagctttcacacgatgatactcattcacgcattgaacattatgctagcaggctagcagaaatggaaaacagcaatggatcttatctaaatgatagcatctctcctaatgagagcatagatgatgaacatttgttaatccagcattactgccaaagtttgaaccaggactcccccctgagccagcctcgtagtcctgcccagatcttgatttccttagagagtgaggaaagaggggagctagagagaatcctagcagatcttgaggaagaaaacaggaatctgcaagcagaatatgaccgtctaaagcagcagcacgaacataaaggcctgtccccactgccgtcccctcctgaaatgatgcccacctctccccagagtccccgggatgctgagctcattgctgaggccaagctactgcgtcaacacaaaggccgcctggaagccaggatgcaaatcctggaagaccacaataaacagctggagtcacagttacacaggctaaggcagctgctggagcaaccccaggcagaggccaaagtgaatggcacaacggtgtcctctccttctacctctctacagaggtccgacagcagtcagcctatgctgctccgagtggttggcagtcaaacttcggactccatgggtgaggaagatcttctcagtcctccccaggacacaagcacagggttagaggaggtgatggagcaactcaacaactccttccctagttcaagaggaagaaatacccctggaaagccaatgagagaggacacaatgtaggaagtcttttccacatggcagatgatttgggcagagcgatggagtccttagtatcagtcatgacagatgaagaaggagcagaataaatgttttacaactcctgattcccgcatggtttttataatattcatacaacaaagaggattagacagtaagagtttacaagaaataaatctatatttttgtgaagggtagtggtattatactgtagatttcagtagtttctaagtctgttattgttttgttaacaatggcaggttttacacgtctatgcaattgtacaaaaaagttataagaaaactacatgtaaaatcttgatagctaaataacttgccatttctttatatggaacgcattttgggttgtttaaaaatttataacagttataaagaaagattgtaaactaaagtgtgctttataaaaaaaagttgtttataaaaacccctaaaaacaaaacaaacacacacacacacacatacacacacacacacaaaactttgaggcagcgcattgttttgcatccttttggcgtgatatccatatgaaattcatggctttttctttttttgcatattaaagataagacttcctctaccaccacaccaaatgactactacacactgctcatttgagaactgtcagctgagtggggcaggcttgagttttcatttcatatatctatatgtctataagtatataaatactatagttatatagataaagagatacgaatttctatagactgactttttccattttttaaatgttcatgtcacatcctaatagaaagaaattacttctagtcagtcatccaggcttacctgcttggtctagaatggatttttcccggagccggaagccaggaggaaactacaccacactaaaacattgtctacagctccagatgtttctcattttaaacaactttccactgacaacgaaagtaaagtaaagtattggatttttttaaagggaacatgtgaatgaatacacaggacttattatatcagagtgagtaatcggttggttggttgattgattgattgattgatacattcagcttcctgctgctagcaatgccacgatttagatttaatgatgcttcagtggaaatcaatcagaaggtattctgaccttgtgaacatcagaaggtattttttaactcccaagcagtagcaggacgatgatagggctggagggctatggattcccagcccatccctgtgaaggagtaggccactctttaagtgaaggattggatgattgttcataatacataaagttctctgtaattacaactaaattattatgccctcttctcacagtcaaaaggaactgggtggtttggtttttgttgcttttttagatttattgtcccatgtgggatgagtttttaaatgccacaagacataatttaaaataaataaactttgggaaaaggtgtaaaacagtagccccatcacatttgtgatactgacaggtatcaacccagaagcccatgaactgtgtttccatcctttgcatttctctgcgagtagttccacacaggtttgtaagtaagtaagaaagaaggcaaattgattcaaatgttacaaaaaaacccttcttggtggattagacaggttaaatatataaacaaacaaacaaaaattgctcaaaaaagaggagaaaagctcaagaggaaaagctaaggactggtaggaaaaagctttactctttcatgccattttatttctttttgatttttaaatcattcattcaatagataccaccgtgtgacctataattttgcaaatctgttacctctgacatcaagtgtaattagcttttggagagtgggctgacatcaagtgtaattagcttttggagagtgggttttgtccattattaataattaattaattaacatcaaacacggcttctcatgctatttctacctcactttggttttggggtgttcctgataattgtgcacacctgagttcacagcttcaccacttgtccattgcgttattttctttttcctttataattctttctttttccttcataattttcaaaagaaaacccaaagctctaaggtaacaaattaccaaattacatgaagatttggtttttgtcttgcatttttttcctttatgtgacgctggaccttttctttacccaaggatttttaaaactcagatttaaaacaaggggttactttacatcctactaagaagtttaagtaagtaagtttcattctaaaatcagaggtaaatagagtgcataaataattttgttttaatctttttgtttttcttttagacacattagctctggagtgagtctgtcataatatttgaacaaaaattgagagctttattgctgcattttaagcataattaatttggacattatttcgtgttgtgttctttataaccaccaagtattaaactgtaaatcataatgtaactgaagcataaacatcacatggcatgttttgtcattgttttcaggtactgagttcttacttgagtatcataatatattgtgttttaacaccaacactgtaacatttacgaattatttttttaaacttcagttttactgcattttcacaacatatcagacttcaccaaatatatgccttactattgtattatagtactgctttactgtgtatctcaataaagcacgcagttatgttac

SEQ ID NO: 142761 - DNA, 7026 bp, Artificial Sequence
  derived and/or modified sequence
atgtccgcgagaaaactgcggaatctgagctacaagaaggccgtgaggagacagaaattactggagcagtccatccagagcgcccaggaaaccgagaagtctttgcatctgatccaggaaagcttaaccttcatagacaaacagctcgctgcttacattgctgacaaggtcgacgcagcgcaaatgccacaggaggcccagaaaatccaatcagatctgacatcccacgagatcagcctggaggagatgaaaaaacataaccagggcaaagaagctgcacagcgtgtcctgtcccagatcgacgtggcgcagaagaagctacaagatgtgtctatgaagttcagactgttccagaaacctgccaacttcgaacaacgcctgcaggaaagtaaaatgatactcgacgaggttaaaatgcatctaccggcacttgaaacaaagtccgttgagcaggaggttgtgcagtcccagctcaaccactgtgttaacctgtacaaaagcctatcggaggtaaaatctgaggtcgaaatggtgatcaagactggtaggcagattgtccaaaagaaacagacagagaacccaaaggagcttgacgaacgggtgactgcattgaagctgcattataatgagctcggcgcaaaggtcacagagcgcaagcagcagctggagaagtgcctgaaattgagccgaaagatgagaaaagaaatgaacgtactgactgagtggctggccgccaccgacatggaactgactaagcgttccgcagtggaggggatgccctcaaacctggacagtgaggtcgcatggggcaaggcaacacaaaaagagatagaaaagcagaaagtgcacctaaagtccattaccgaggtcggtgaagcccttaagactgtgttaggaaaaaaggagaccctggttgaggacaaactctccttgttaaatagcaattggattgcagtgacctcccgagctgaggagtggctcaacctgctccttgaataccagaaacacatggagacttttgaccagaacgttgatcacattaccaaatggattatccaggcagacaccctgctcgacgagtcggaaaaaaagaaacctcagcagaaggaagacgtcctcaagcgactcaaggcagaattaaatgatatcaggccaaaggttgattccacgcgggaccaggctgcaaacctcatggcaaaccgcggagatcattgccgcaaactcgtggagccccagatatctgagctgaaccatcgcttcgctgctatctctcaccggataaaaacgggtaaagcaagcatccctttgaaggagttagagcaattcaactctgatattcaaaaacttttagaacccttggaggctgagatccagcagggcgtcaatctgaaagaagaagatttcaacaaagatatgaacgaggacaatgagggcactgtaaaggagttgctacaacggggcgataacctccagcaacggatcactgacgagcggaaacgcgaggagattaagattaagcaacagctgctgcagacgaagcacaatgccctgaaagacttgcgatcccagcgacgaaagaaagcacttgagatatcacaccaatggtatcaatacaaaaggcaagcggatgacctgctgaagtgtctggacgacatcgagaagaaactggcttctctcccggagcccagggatgagcggaaaattaaagagatcgaccgagagctccaaaagaagaaggaagagctcaacgctgtgcggcgccaggctgaaggcctgagtgaggatggcgcagccatggcagtcgagcccacccagatccagctgtcgaagcggtggcgggaaatcgagtctaagttcgcacagtttaggagactaaatttcgcccagatccacaccgtgcgagaggagaccatgatggttatgactgaggacatgcctttagagatttcctacgtccctagcacctatctcacagaaattacccacgtaagccaggccctcctcgaggttgagcagctcctcaacgcgccggatctctgcgctaaagacttcgaggatctgttcaaacaagaggagagcctcaaaaatatcaaagacagtctgcagcagtcgtctggtcgaattgatatcatccactccaagaagaccgccgcattgcaatctgcaaccccagtagagcgcgtgaaactgcaggaggctctatcgcagctggatttccagtgggaaaaggtaaataaaatgtataaagatcgacagggacggtttgatcgttcggtagagaagtggagacgcttccactacgacataaagatattcaatcaatggctgaccgaagcggaacagtttcttagaaagactcaaatccccgaaaactgggagcacgcgaagtataaatggtatctaaaggagctacaggacgggattggccagaggcagaccgtggtccgcacattaaatgcaaccggagaggagattattcaacagtcttccaagactgatgcctcaatcttacaggagaagctgggtagtctgaatcttcgatggcaggaggtgtgcaagcagctgtctgaccgtaaaaagcgcctcgaagagcagaaaaatattttaagcgagtttcagagggatctaaacgagttcgtgctgtggctggaagaagcagataacattgcttctataccactggagccaggcaaggagcagcagctgaaggaaaagcttgagcaggttaaattgctggtagaggagcttcccctcaggcagggcatccttaaacagttgaatgagaccggcggcccagtgctcgtctctgcccccattagcccagaagagcaagacaagctcgagaataaattgaagcagactaatctacaatggatcaaagtaagcagagctctaccagaaaagcagggggaaatcgaggcccaaataaaggacttgggccaactggagaaaaaattggaagatcttgaggagcagttaaaccatcttctgctgtggctgagccctatccggaaccaactggagatctacaatcagccaaatcaggaagggccgtttgacgtgaaggaaacagaaattgctgtgcaggccaagcaaccagatgttgaagaaatcttgtcaaagggacagcatttgtacaaggagaaaccagcaacacagccagtgaaacgcaaacttgaagacctttcctccgaatggaaagctgtaaatcgccttcttcaggaattgcgagccaaacaacccgatctcgctcccggcctcactactataggtgctagccccactcagacagtgacgctggtgacacagcctgtggtgactaaggaaactgctattagtaagctagagatgcctagtagccttatgcttgaggtcccagcactggctgattttaaccgggcatggactgagctaacagattggctgagtcttcttgatcaagtgattaagtcccagcgcgttatggtgggagatctagaggacataaatgagatgataataaaacagaaggccacgatgcaagatcttgagcagcggaggccacagctggaagaattaataactgcggctcaaaacttgaaaaataagacctctaatcaagaggcccgaacgattattacggatcgtatagaacggatacagaatcagtgggatgaggtgcaagaacacctccagaacaggaggcagcagctgaatgaaatgctgaaggatagtacccaatggctggaagcaaaagaagaagcggaacaggtgttaggacaggccagagctaagcttgaaagctggaaggaggggccatatactgtggatgccattcaaaagaagattacggagaccaagcagctggcaaaagaccttcgacagtggcaaacaaacgtggacgtggcaaatgacctcgccctgaaacttctgagagactacagcgcagatgacactcgcaaggttcatatgatcaccgagaacattaatgcctcttggcggagtattcacaaaagggtttctgagcgggaggctgcccttgaggagactcaccggcttctgcaacaattcccattggacttggaaaaattcttggcctggctgaccgaggcagaaacaactgctaacgtgttgcaggatgcaactcgcaaagaaagacttctggaagactctaagggcgttaaagaactgatgaagcagtggcaggacctgcagggtgagattgaggctcacacggacgtgtaccacaatctggatgaaaactcacagaagatcctgcgtagtctcgagggctcagatgatgccgttcttctgcagagacgcctcgataacatgaacttcaaatggtctgagctgcggaaaaagtctctcaatattagatcccatctggaggcatctagtgaccagtggaaacgcctgcacctgtctctccaagaactgctggtctggctccaactcaaggatgatgaactatctagacaggccccgattggtggtgacttccctgctgtgcagaaacaaaacgatgtgcaccgggccttcaagagagagctaaagactaaggaaccagtaataatgagcaccctagagactgttcgaattttcctcactgaacagccactcgaagggctggaaaaactttaccaggagcccagggagctgcctccggaggagagagcgcagaatgtaactcggttgctgaggaagcaggccgaggaagtgaataccgagtgggagaagctgaacctccatagcgcagactggcagagaaaaattgatgagacattagagcgcctgcgagaactccaggaggccactgacgagctcgatctcaagctgagacaggccgaagtgattaagggctcctggcagcctgtgggcgacctgctgatagatagcctgcaagatcatctcgagaaggtgaaggctctcaggggcgaaattgctccactgaaagaaaacgttagccatgtaaatgatctcgcccgacaactcacaaccctgggaatccagctgagcccctataacctttcaactttagaggatctgaacacacgttggaagctgctccaggtggctgtggaagatcgcgtgcggcagcttcacgaggctcacagagactttggaccagcctcacagcattttctcagcacatccgtgcagggcccttgggagcgcgccattagccctaacaaagtgccatactatattaaccatgaaactcagaccacctgttgggaccaccctaagatgactgagctttatcagagcctggctgacctcaataacgttcggttctctgcttatcgaactgcgatgaagctgaggagattacagaaagcgctgtgcctggatcttctgtcactttcagcagcttgcgacgccctggaccagcacaatctcaagcagaatgaccaacccatggatattctgcagattattaattgcctgaccacaatatatgaccggttagagcaggagcataataaccttgtgaacgttcccctatgtgtcgatatgtgtctgaactggctgttgaacgtgtacgataccggacgaacgggccggattcgggtgcttagcttcaagaccggcatcatatcactatgcaaggcccacttggaggacaagtaccgctatctctttaaacaggttgcttcatctactggcttctgtgatcaaagaaggctcgggctgctcctacacgattccatccaaatcccccgacagcttggggaagtagccagtttcggggggtctaacattgagcccagtgttcgctcttgcttccaattcgccaacaacaagcccgagatcgaagccgctctgttccttgattggatgcgcctagagccacagagcatggtgtggctccctgtgctccatcgcgtcgccgccgcagagacagcaaaacaccaggctaagtgtaacatctgtaaggagtgccccataatcggatttcgttaccgctcactgaagcattttaattacgacatctgccaaagttgcttttttagtggacgtgtggcgaagggtcacaagatgcattatccaatggttgagtactgtacccccaccacctcaggcgaagacgttagagatttcgcgaaggtgcttaagaacaagttcaggaccaagagatactttgctaagcacccacgtatggggtatctgcccgttcagaccgtgctggaaggtgataatatggagactcccgttacccttataaacttctggccagtggacagcgcacccgcttcatcaccacaattgtcacacgacgacacccattcccggatcgagcattacgcttccagactcgcagagatggaaaatagcaatgggagttacttaaacgacagcatcagtccaaacgaatcgatagacgacgagcacctgcttattcagcattactgccagtcgctgaaccaggatagtccattgtcacagcctcgctcacccgcacaaatcctgattagcctggaaagcgaggagaggggcgaactcgagcgaatcctcgctgatctggaagaggagaacaggaatctgcaagctgagtatgatagacttaagcagcaacacgagcacaagggactcagtccactgccctcaccgccagagatgatgcccacatcgcctcaaagccctagggatgccgaacttatagcggaagccaagctcttgcggcagcataaaggtcgactggaagcccgcatgcagattctcgaggatcataataagcagctggagagtcagctgcatcgactcagacagctgctggagcagccacaggcagaggccaaagttaatggtacaaccgtttcttctccatctacttccctccaaaggagcgactccagccagcctatgctgttgcgcgtcgttgggagccaaacctctgacagcatgggtgaggaagacctgctgagccctcctcaggacacttctacaggtctagaagaagtcatggaacagttgaacaacagctttccctcaagtcgtggccgaaataccccagggaagccaatgagagaagacacaccctag

SEQ ID NO: 142762 - DNA, 7026 bp, Artificial Sequence
  derived and/or modified sequence
atgtctgccaggaagctgaggaacctgagctacaagaaggctgtgcggcggcagaagctgctggagcagagcatccagagcgcccaggagacagagaagagcctgcacctgatccaggagagcctgaccttcatcgacaagcagctggccgcctacatcgctgacaaggtggatgctgcccagatgccccaggaggcccagaagatccagagcgacctgaccagccatgagatcagcctggaggagatgaagaagcacaaccagggcaaggaggccgcccagagggtgctgagccagattgatgtggcccagaagaagctgcaggatgtgtccatgaagttccgcctcttccagaagccagccaactttgagcagaggctgcaggagagcaagatgatcctggatgaggtgaagatgcacctgcctgccctggagaccaagtctgtggagcaggaggtggtgcagagccagctgaaccactgtgtgaacctgtacaagagcctgtctgaggtgaagtctgaggtggagatggtgatcaagacaggccggcagatcgtgcagaagaagcagacagagaaccccaaggagctggatgagcgggtgacagccctgaagctgcactacaatgagctgggcgccaaggtgacagagaggaagcagcagctggagaagtgcctgaagctgagcaggaagatgaggaaggagatgaatgtgctgacagagtggctggccgccacagacatggagctgaccaagaggtctgctgtggagggcatgcccagcaacctggacagcgaggtggcctggggcaaggccacccagaaggagattgagaagcagaaggtgcacctgaagagcatcacagaggtgggggaggccctgaagacagtgctgggcaagaaggagaccctggtggaggacaagctgagcctgctgaacagcaactggattgctgtgaccagcagagctgaggagtggctgaacctgctgctggagtaccagaagcacatggagacctttgaccagaatgtggaccacatcaccaagtggatcatccaggccgacaccctgctggatgaaagtgagaagaagaagccccagcagaaggaggatgtgctgaagaggctgaaggccgagctgaatgacatccggcccaaggtggacagcacccgggaccaggccgccaacctgatggccaacagaggagaccactgcaggaagctggtggagccccagatcagcgagctgaaccacagatttgctgccatcagccaccgcatcaagacaggcaaggccagcatccccctgaaggagctggagcagttcaacagcgacatccagaagctgctggagcccctggaggccgagatccagcagggcgtgaacctgaaggaggaggacttcaacaaggacatgaatgaagataatgaaggaacagtgaaggagctgctgcagagaggagacaacctgcagcagaggatcacagatgagaggaagcgggaggagatcaagatcaagcagcagctgctgcagaccaagcacaatgccctgaaggacctgcggagccagaggaggaagaaggccctggagatcagccaccagtggtaccagtacaagaggcaggctgatgacctgctgaagtgcctggatgacatcgagaagaagctggccagcctgcctgagcccagagatgagaggaagatcaaggagattgaccgggagctgcagaagaagaaggaggagctgaatgctgtgcggcggcaggccgagggcctgtctgaagatggagctgccatggctgtggagcccacccagatccagctgagcaagcgctggagagaaattgagagcaagtttgcccagttccggcggctgaactttgcccagatccacacagtgcgggaggagaccatgatggtgatgacagaggacatgcccctggagatctcctatgtgcccagcacctacctgacagagatcacccacgtgtcccaggccctgctggaggtggagcagctgctgaatgccccagacctgtgtgccaaggactttgaagatctcttcaagcaggaggagagcctgaagaacatcaaggacagcctgcagcagagcagcggcagaattgacatcatccacagcaagaagacagctgccctgcagagcgccacccctgtggagcgggtgaagctgcaggaggccctgagccagctggacttccagtgggagaaggtgaacaagatgtacaaggaccggcagggccgctttgacagatctgtggagaagtggaggcgcttccactatgacatcaagatcttcaaccagtggctgacagaagctgagcagttcctgaggaagacccagatccctgagaactgggagcacgccaagtacaagtggtacctgaaggagctgcaggacggcatcggccagaggcagacagtggtgaggaccctgaatgccactggagaggagatcatccagcagagcagcaagacagatgccagcatcctgcaggagaagctgggcagcctgaacctgcgctggcaggaggtgtgcaagcagctgagtgacaggaagaagaggctggaggagcagaagaacatcctgtctgagttccagagggacctgaatgaatttgtgctgtggctggaggaggccgacaacatcgccagcatccccctggagcccgggaaggagcagcagctgaaggagaagctggagcaggtgaagctgctggtggaggagctgcccctgcggcagggcatcctgaagcagctgaatgaaacaggaggccctgtgctggtgtctgcccccatcagccctgaggagcaggacaagctggagaacaagctgaagcagaccaacctgcagtggatcaaggtgtcccgggccctgcctgagaagcagggcgagattgaggcccagatcaaggacctgggccagctggagaagaagctggaggacctggaggagcagctgaaccacctgctgctgtggctgagccccatccggaaccagctggagatctacaaccagcccaaccaggagggcccctttgatgtgaaggagacagaaattgctgtgcaggccaagcagccagatgtggaggagatcctgagcaagggccagcacctgtacaaggagaagccagccacccagcctgtgaagaggaagctggaggacctgagcagcgagtggaaggctgtgaaccggctgctgcaggagctgcgggccaagcagcctgacctggcccctggcctgaccaccatcggggccagccccacccagacagtgaccctggtgacccagcctgtggtgaccaaggagacagccatcagcaagctggagatgcccagcagcctgatgctggaggtgcctgccctggccgacttcaacagagcctggacagagctgacagactggctgagcctgctggaccaggtgatcaagagccagagggtgatggtgggggacctggaggacatcaatgagatgatcatcaagcagaaggccaccatgcaggacctggagcagaggcggccccagctggaggagctgatcacagctgcccagaacctgaagaacaagaccagcaaccaggaggcccggaccatcatcacagaccgcatcgagcgcatccagaaccagtgggatgaggtgcaggagcacctgcagaacagacggcagcagctgaatgagatgctgaaggacagcacccagtggctggaggccaaggaggaggccgagcaggtgctgggccaggcccgggccaagctggagagctggaaggagggcccctacacagtggatgccatccagaagaagatcacagagaccaagcagctggccaaggacctgcggcagtggcagaccaacgtggatgtggccaatgacctggccctgaagctgctgcgggactacagcgcagatgacaccaggaaggtgcacatgatcacagagaacatcaatgcctcctggaggagcatccacaagagggtgtctgagcgggaggccgccctggaggagacccaccggctgctgcagcagttccccctggacctggagaagttcctggcctggctgacagaggccgagaccacagccaacgtgctgcaggatgccaccaggaaggagcggctgctggaggacagcaaaggagtgaaggagctgatgaagcagtggcaggacctgcagggcgagattgaggcccacacagatgtgtaccacaacctggatgagaacagccagaagatcctgcggagcctggagggcagtgatgatgctgtgctgctgcagaggcggctggacaacatgaacttcaagtggagcgagctgaggaagaagagcctgaacatccgcagccacctggaggccagcagtgaccagtggaagaggctgcacctgagcctgcaggagctgctggtgtggctgcagctgaaggatgatgagctgagccggcaggcccccatcggcggggacttccctgctgtgcagaagcagaatgatgtgcaccgggccttcaagcgggagctgaagaccaaggagcccgtcatcatgagcaccctggagaccgtgcgcatcttcctgacagagcagcccctggagggcctggagaagctgtaccaggagccccgggagctgcccccagaggagcgggcccagaatgtgacccggctgctgaggaagcaggccgaggaggtgaacacagagtgggagaagctgaacctgcacagcgctgactggcagaggaagattgatgagaccctggagcggctgcgggagctgcaggaggccacagatgagctggacctgaagctgcggcaggccgaggtgatcaagggctcctggcagcctgtgggggacctgctgattgacagcctgcaggaccacctggagaaggtgaaggccctgcggggggagatcgcccccctgaaggaaaatgtgagccacgtgaatgacctggcccggcagctgaccaccctgggcatccagctgagcccctacaacctgagcaccctggaggacctgaacacccgctggaagctgctgcaggtggccgtggaggacagagtgcggcagctgcacgaggcccaccgggactttggacctgccagccagcacttcctgagcacctctgtgcagggcccctgggagcgggccatcagccccaacaaggtgccctactacatcaaccacgagacccagaccacctgctgggaccaccccaagatgacagagctgtaccagagcctggccgacctgaacaacgtgcgcttcagcgcctacagaacagccatgaagctgcggcggctgcagaaggccctgtgcctggacctgctgagcctgtctgctgcctgtgatgccctggaccagcacaacctgaagcagaatgaccagcccatggacatcctgcagatcatcaactgcctgaccaccatctatgaccggctggagcaggagcacaacaacctggtgaatgtgcccctgtgtgtggacatgtgcctgaactggctgctgaatgtgtatgacaccggccgcacaggccgcatccgggtgctgtccttcaagacaggcatcatcagcctgtgcaaggcccacctggaggacaagtaccgctacctgttcaagcaggtggccagcagcacaggcttctgtgaccagaggcggctgggcctgctgctgcatgacagcatccagatcccccggcagctgggggaggtggccagctttggaggcagcaacatcgagcccagcgtgcgcagctgcttccagtttgccaacaacaagccagaaattgaggccgccctcttcctggactggatgaggctggagccccagagcatggtgtggctgcctgtgctgcaccgggtggccgctgctgagacagccaagcaccaggccaagtgcaacatctgcaaggagtgccccatcatcggcttccgctaccgcagcctgaagcacttcaactatgacatctgccagagctgcttcttcagcggccgggtggccaagggccacaagatgcactaccccatggtggagtactgcacccccaccaccagcggagaagatgtgcgggactttgccaaggtgctgaagaacaagttccgcaccaagcgctactttgccaagcaccccaggatgggctacctgcctgtgcagacagtgctggagggggacaacatggagacccctgtgaccctcatcaacttctggcctgtggacagcgccccagccagcagcccccagctgagccatgatgacacccacagcagaattgagcactacgccagccggctggccgagatggagaacagcaatggcagctacctgaatgacagcatcagccccaatgaaagcattgatgatgagcacctgctgatccagcactactgccagagcctgaaccaggacagccccctgagccagcccaggagccctgcccagatcctgatcagcctggagagcgaggagcggggggagctggagcgcatcctggccgacctggaggaggagaacagaaacctgcaggccgagtatgaccggctgaagcagcagcacgagcacaagggcctgagccccctgcccagccccccagagatgatgcccaccagcccccagagccccagagatgctgagctgattgctgaggccaagctgctgcggcagcacaagggccgcctggaggccaggatgcagatcctggaggaccacaacaagcagctggagagccagctgcaccggctgcggcagctgctggagcagccccaggccgaggccaaggtgaatggcaccaccgtgagcagccccagcaccagcctgcagaggagtgacagcagccagcccatgctgctgcgggtggtgggcagccagaccagtgacagcatgggagaggaggacctgctgagccccccccaggacaccagcacaggcctggaggaggtgatggagcagctgaacaacagcttccccagcagccggggcaggaacacccctgggaagcccatgagggaggacaccccctag

SEQ ID NO: 142763 - DNA, 7026 bp, Artificial Sequence
  derived and/or modified sequence
atgagcgcccggaagctgcggaacctgagctacaagaaggccgtgcgtcgtcagaaactgctggagcagtcaattcagtccgcacaggagacagaaaaatctctacacctaatccaggagtctctgacctttatagataaacagctagcggcttacattgccgacaaagttgatgctgcacagatgccccaagaagctcagaagatccagagcgacctgacatcccatgagatctctctggaagagatgaaaaagcacaaccagggaaaggaagccgcccagcgtgtgctgtcccaaattgatgtggctcagaaaaaactgcaagacgtgtctatgaaatttcgtctcttccagaaacctgcaaacttcgaacagcgacttcaggagtccaaaatgattctagatgaagtgaagatgcacctccctgctttggagacaaaatctgtcgaacaggaagtcgttcaatcccaactgaatcactgcgtaaacttgtataagagcctaagcgaagtgaaatcagaggtagagatggtcatcaaaaccggtcggcagatcgttcaaaagaaacaaactgaaaacccaaaagaattagatgaacgagtaactgccctcaagctgcactataacgaactaggagccaaggttaccgaaagaaaacagcaactggagaagtgcctcaagttgtccagaaaaatgcggaaggaaatgaatgttctgacggagtggctggcagccacggatatggaactaacgaagcggagtgcagtggagggcatgccatctaatctggattcagaggtggcatggggcaaagcgacgcagaaggaaattgaaaagcagaaagtccacctcaagtcaataaccgaggtcggtgaggctcttaaaacagtgcttggcaagaaggaaactctggtcgaagataaactcagcttgcttaactccaattggattgcggtgacaagccgcgctgaagagtggctgaatctgctgctcgagtatcagaagcacatggagacatttgatcagaacgtcgaccatataacgaaatggatcattcaagcggacacactactggacgagagcgagaagaaaaagccccagcaaaaagaggacgtgctcaagcggctgaaggccgagttgaacgacatccgaccaaaagtggactctacgagagatcaggccgcaaacctgatggcaaatcggggggatcactgccgcaaactggtagaaccccagattagtgaactaaatcaccgttttgccgcaatcagtcacagaataaagacaggaaaggcaagtattcctttgaaggaacttgagcaatttaacagcgacatccagaaacttctcgagccacttgaggctgagatccagcagggcgtgaatctgaaagaagaagactttaacaaggatatgaatgaagataatgaggggacagtaaaagaattgctgcaacgaggcgacaatctacaacagcggattaccgacgaacgaaagagggaggaaatcaagatcaagcagcaacttctgcagacaaagcacaacgcccttaaggatttacgctctcagcggaggaagaaagccctggagatttctcaccagtggtaccaatataaacgccaagctgatgacctgctaaagtgcctcgatgatattgaaaagaaactggcaagtctgcccgagcctcgggatgaaaggaagatcaaagagatcgacagagagttgcaaaagaagaaggaggagttgaacgctgtccggcgtcaagcggaagggttgagtgaagacggcgccgctatggctgtagaaccgacacaaatccagctgagcaaaagatggagggagatcgagtccaagtttgcgcaattcagaaggctgaatttcgcacagattcacacagtccgtgaggagaccatgatggtaatgaccgaagacatgcccctggaaatctcttatgtcccttcaacctacctgaccgagattacccatgtcagccaggcactcctggaagtcgaacagttgctgaacgcaccggacctttgcgcaaaggattttgaagacctctttaaacaggaggagagtctgaaaaacatcaaagactccctgcagcaatcttctggcaggatcgatattatccactccaagaagacggccgccctgcaatccgccacacctgtcgaacgagtcaaattacaggaggcgttaagccagctggacttccagtgggagaaagtcaataaaatgtacaaagaccgccaggggaggtttgaccgaagcgtggaaaaatggcgaagattccactatgatatcaagatttttaaccagtggctgaccgaggcggagcagttcctgagaaagacccagattcctgaaaactgggagcacgccaagtataaatggtatttgaaggagctgcaggacgggatcggtcaaagacagaccgtggttcgcacgctcaatgcaaccggagaggagatcatccaacagtctagcaagacagacgcctcgatcctgcaagagaaactgggttccttaaacctgagatggcaggaagtgtgtaaacagctgtcagatcgcaaaaaaagattggaagagcagaagaatatcctgtcggaattccaaagggacctgaatgagtttgtgctctggttggaggaagctgataacattgccagtattccgctggaacctggtaaggagcagcagctgaaagagaaactggagcaagtgaagttgcttgtggaagagctgcctctgcgacagggtattttaaaacagctgaatgagacgggaggaccagtgctggtgagtgcaccaatctcccccgaggagcaggacaagctcgagaacaagctgaagcagaccaacctccagtggattaaggttagcagagccttgccagaaaagcagggagagatcgaagcccagatcaaggacctcgggcagctggaaaaaaagctggaagatctcgaggaacaattgaatcatctgctgctgtggctgagcccaattcgaaatcagctcgaaatttataaccaaccaaaccaggagggaccgtttgacgtcaaggaaaccgaaatcgccgtccaggccaaacagcccgatgtggaggaaattctcagcaagggccagcacctctacaaagaaaagcccgcaacacagccggtcaagagaaagctcgaggacctttcatccgagtggaaagccgttaatcgattgcttcaagagctgagagcgaaacagcctgatcttgcaccaggactgactacgattggagcttcccccacccagacggtcaccctcgtgacccagcctgtcgtcaccaaagagactgctatcagcaaacttgagatgcccagctcactcatgctggaagtgcctgctttggcagacttcaatagggcatggactgaacttaccgactggttgtcactgttggaccaggttattaaatcccagcgagtgatggtgggcgacttggaagacattaacgagatgattattaaacaaaaggcaaccatgcaggatctagagcagagacggccacaactcgaagagctgattactgccgcccagaatctcaaaaacaagacgagtaaccaggaggctcgtacgataattactgatcgaattgaacggatccagaaccagtgggacgaagttcaggaacacttacagaatcgccgacagcagctcaatgagatgctcaaggactctacacagtggttagaggccaaagaggaggcggagcaagtccttggacaggcaagggctaagctggagagctggaaagaggggccttacaccgttgatgctattcagaagaagattaccgaaacgaaacagctcgcgaaggatctccggcagtggcagacaaacgttgacgtcgccaatgacctcgcgcttaagcttctcagagattacagcgccgatgataccaggaaagtgcacatgattactgagaatataaatgctagctggaggagcatccacaaaagggtctctgagcgggaggccgcactggaggagacacataggctgcttcagcagttcccactggatctggaaaaatttctcgcttggctgacagaggcagagaccacagccaatgtgcttcaggatgcaacccggaaggagcggttgctcgaagacagcaaaggagtgaaggaattgatgaaacagtggcaggatctgcagggtgagattgaggcccataccgacgtgtaccacaacctcgacgaaaattcgcagaagattttgcgctcccttgagggtagcgatgacgcagtgctcttgcagcggagactcgataatatgaactttaaatggtcggaacttagaaaaaagtcccttaatatccggtcacacctcgaggcctccagtgaccagtggaaaagattgcatctctccctgcaggaactgctggtgtggttacagcttaaggatgatgaattgtcccgacaggcgccgatcggcggagactttcctgccgttcagaagcagaatgacgtacacagagcttttaaaagggagcttaaaactaaggagcctgtgatcatgtcaactctggagaccgtgaggattttcctcacggaacaaccactggagggtctggaaaaactgtaccaggagccaagagagctgccaccagaggagagagcgcagaacgtaaccaggcttctgcggaagcaagccgaggaagtgaataccgagtgggaaaaattgaacctgcacagcgctgactggcagagaaagattgacgagactctcgagcggctgagagaactgcaggaggcaactgacgagctggatctgaagttgcgacaagccgaagttatcaagggcagctggcaacccgtgggggacctgcttatagacagcctgcaggaccatctggaaaaggtgaaggccctaagaggcgagattgccccgttgaaggagaacgtcagtcatgttaacgaccttgcccgccagctgactacactggggatacagctatctccgtacaacctcagcaccttggaggaccttaatactcggtggaagctccttcaggtggcagtcgaagaccgcgtgagacagctgcatgaggctcatcgcgacttcggcccagccagtcagcattttctctcaacatccgtccagggaccatgggagagggctatctcccccaacaaggtgccctattacatcaaccacgagacccagactacatgttgggaccacccaaaaatgacagagctttatcagagcctggccgacctgaacaatgttcgtttctccgcctatcgcacagctatgaaactcaggagacttcagaaggcactttgcttggatcttctttctcttagtgccgcttgtgatgctctggaccagcacaacctgaaacagaacgaccaacccatggacattttgcaaatcataaactgcctcacaacgatctacgacagactagagcaggagcataacaacttggttaatgtgcctttgtgtgttgatatgtgcctaaattggttgctgaatgtgtatgatacaggccggaccggtcgcatccgggtgctgagttttaagaccggaataatttccctgtgtaaagcacatctagaggataaatacagatatcttttcaagcaggtggctagcagcaccggtttctgtgaccagcgccgactggggctgttgttgcatgatagcatacagatcccacgacagctaggcgaggtggccagtttcggagggtccaacatagagccctcagtgaggtcttgctttcaattcgcaaacaacaaacccgaaatagaagcagccctgtttctcgactggatgcggctggagccgcagagtatggtgtggctgccagtgctgcatcgcgtggcggctgctgaaacagccaaacaccaagcaaaatgtaacatctgtaaggagtgccccataattggttttagatacagaagcctcaaacatttcaattatgatatctgccagagctgctttttctctgggcgtgtggccaagggccataagatgcattaccctatggtggagtattgtacgcccacgacaagcggagaggacgtgcgagatttcgccaaagtccttaagaacaaatttcgtaccaagcggtacttcgcgaagcatcctcgcatgggatatttgccggtgcaaacagtcctggaaggcgataacatggaaacacccgttaccctcatcaacttttggcctgtggactcagcccccgcatcctcaccacagctgtcccacgacgacacacactcgcggattgagcactacgctagcaggctggctgagatggaaaacagcaatggatcttacctgaatgacagtatttcaccgaacgagtctatagatgacgagcacctcctgattcagcattactgccagtccctgaatcaggactctcctctgagtcagccgaggtccccagcacaaatcctcattagtctggaaagtgaagagcgcggagagctggaacggattctcgcggatcttgaggaggaaaatcgcaatctacaggccgagtacgaccgtcttaagcagcagcacgaacacaagggactgtcccccctaccctccccgcccgagatgatgccaacctcaccacaatccccacgcgatgccgaactgatcgcagaagctaagctactgaggcaacataaaggccggctcgaagcacggatgcagatattggaggatcacaacaagcagctcgagagccagctgcacaggcttaggcagctattggaacagccccaggcagaagctaaagtcaacggaacgactgtctcctccccctctactagcctccaaagaagcgatagctcacaacccatgctgctgcgcgtcgtggggtcccagactagcgattcaatgggagaagaggacctcctctcccccccgcaggacacatcaacaggcttagaggaggtgatggagcaactgaataatagcttcccttctagcaggggccgtaacacacctggcaagccgatgcgcgaggacactccatag

SEQ ID NO: 142764 - DNA, 7026 bp, Artificial Sequence
  derived and/or modified sequence
atgagtgcacggaagctgaggaacctgagctataagaaggccgtgcgccgtcagaaactcctggaacaaagcatccaaagtgcccaggagaccgaaaaatcactccatctgattcaagagtctctaacttttatcgacaagcaactggccgcttatatcgctgacaaagtagatgccgctcaaatgccacaggaagcacagaagatacagtccgatctgaccagccacgagatttccctggaggagatgaaaaagcacaaccaaggaaaagaagccgcacagcgcgtgctcagccagatcgacgtcgctcagaagaagttacaagacgtgtcaatgaagtttagattatttcagaagcctgctaactttgagcagcgattgcaggaaagcaaaatgatccttgacgaagtcaagatgcacctccccgcactggagaccaagagcgtcgagcaggaggtcgtccagagtcagctcaatcactgtgtgaacctctacaagtcattaagcgaagtaaaatccgaggttgagatggttattaagaccggacgacaaatcgtgcagaaaaaacaaacagaaaatcccaaagagcttgatgagcgggtgacagctctgaaactccactacaacgagctaggcgctaaggtgactgaaaggaagcaacagctggagaaatgtttgaagctgtcaagaaagatgcgcaaggaaatgaacgtgcttaccgaatggctggcggcaaccgacatggagctaacgaagcgctccgccgtcgagggtatgccgagtaacctcgattcagaagtcgcctggggcaaggccacccagaaggagatcgagaaacagaaagtacatcttaaaagcatcacagaggtcggggaagcactgaaaactgtgctgggtaaaaaagaaactcttgttgaagataaactgtctcttctgaatagcaattggatagccgtcaccagtcgcgcagaagagtggctcaacttactcctggagtaccagaagcacatggagacatttgatcaaaatgtggatcacattacaaaatggatcattcaggccgacaccctgttggacgagtccgagaaaaagaagccccagcaaaaagaagatgtgctcaaacggcttaaggccgagctgaatgatatccggccaaaggttgattccaccagagaccaagccgcaaacctcatggcaaatcgcggagatcattgccgcaagctggtggaacctcagatctccgagttaaatcatcgatttgccgcaattagccatagaatcaagaccggcaaggcttccatccctttaaaggagctcgagcagtttaactccgacattcaaaagttactagaaccgctcgaagcagagatccagcagggggtcaatctcaaggaagaagacttcaataaagacatgaatgaggataatgagggaacagttaaggaactgcttcaaagaggggacaacttgcaacagcgcataaccgatgagcggaaaagggaggagattaaaattaaacagcagctgctgcagacaaaacacaacgccttgaaggatcttcgaagccaacggaggaaaaaagccttggaaattagccaccagtggtaccagtataagcgtcaggccgacgatttgctaaagtgccttgacgacatagaaaaaaaattggcgagtcttcccgagccacgcgatgagcggaaaattaaagagattgatcgggaactgcaaaagaaaaaggaggagctcaatgcagtgaggaggcaggcagaaggcctgagtgaagacggagccgcaatggccgttgaacccacacagatccagttgtctaagagatggcgagagatagagagcaagtttgcgcagtttagacggcttaacttcgcacagatccacaccgtccgcgaggagaccatgatggtcatgactgaagacatgcctctcgagatctcttatgtccccagcacatatctaacggagatcactcatgtatcacaagccttgctggaagtagagcagctccttaacgctcctgatctctgcgctaaggactttgaagatctgttcaaacaggaggaaagccttaagaacataaaggactccttacagcagtcttcaggaaggatcgacattattcactccaaaaaaacagcagccttgcagagcgcgacacccgtcgagagagtaaagcttcaagaagctttgagccagctcgactttcagtgggagaaggtaaacaagatgtataaagatcggcagggaaggtttgaccggtctgtagaaaagtggcggagattccactacgacatcaagatcttcaatcaatggctcaccgaggccgaacagttcctaaggaagacacagatcccagaaaattgggaacacgctaagtacaagtggtatctgaaggagctacaggacggaatagggcagcggcagacggtggtgaggaccctaaatgccacgggcgaagagataattcagcagtcttcaaagactgatgcctccattctgcaagaaaaactggggagtcttaacctgagatggcaagaggtctgcaaacaattaagtgacagaaaaaaaaggttagaggagcagaaaaatatactttccgaatttcaacgggacttaaacgaattcgtcctctggctggaggaagctgataacatcgcaagcatcccactcgagcccggtaaagaacagcagctgaaggaaaaactggagcaggtaaaactgttggttgaagagctgccccttcgacagggcattttaaagcagctcaacgagacaggaggcccagtgctggtcagtgctcccatctccccagaggaacaggacaaattggagaataagttgaaacaaacgaatctccagtggatcaaagtgagtagggccctgccagaaaagcagggggagatcgaggcccagatcaaagacttaggccaactggagaagaagcttgaggatcttgaggaacaactcaatcacctgcttctctggctgtccccaattagaaaccagctggagatctataaccaacccaaccaggagggaccttttgatgtcaaagagaccgagatcgcagttcaagccaagcagccagacgtagaagagattctgtctaagggacagcacctctataaagaaaagcccgctacacagcccgttaaacgaaaattggaagacctctcttctgaatggaaagcagtaaacagactgttgcaggaactaagggccaaacagccagatcttgcccctgggttgaccaccattggagcttcccctacccagacagttacgttggtcactcaaccagtagtaacgaaagaaaccgccatctcaaagctggagatgccatccagcctgatgttggaagtgccagccctagctgattttaatcgggcatggaccgagctgactgactggctctcgttattagaccaggtgattaaatcacagagagtgatggtgggtgaccttgaagacattaacgagatgataattaagcagaaggccacaatgcaggaccttgagcagcgacggcctcaattggaggagcttattactgctgcccagaatctcaagaataagacaagcaaccaggaggctcggacgatcatcaccgatcgcatcgaacgtatccagaatcagtgggacgaagtccaggaacatctgcagaatagacgccagcagttgaatgaaatgctcaaggattccacacagtggttggaggctaaggaagaagccgaacaggtcctgggccaagctcgggctaagctcgagtcttggaaggagggaccctacacagtagatgccattcagaaaaagatcactgaaacgaaacagctcgccaaggatctacgccaatggcagaccaacgtggatgtggctaacgatctcgccctgaagcttctgcgggactattccgctgacgacactcgcaaggttcatatgattactgagaacatcaacgctagttggagaagcattcacaagcgcgtgtccgaacgagaagcagctctggaagaaacccataggctgctgcagcagtttcctctggatcttgagaaatttctggcctggctgaccgaagctgaaacaacggcaaatgtacttcaagacgccaccaggaaagagaggcttctcgaagactccaagggggtcaaagagctaatgaagcagtggcaggacctccagggcgagattgaagcacatactgatgtctaccataaccttgacgagaatagccagaaaatactgcggtccttggagggatccgacgacgccgttctgcttcagcgaaggctggataacatgaacttcaagtggtctgaactccggaagaagagcttaaatatcagaagccacctggaggcatccagtgatcagtggaagaggctccacctgagcttgcaagagctccttgtctggctgcaactgaaagacgacgaactcagtcggcaggctcccatcggaggggattttcctgcagtgcagaagcagaatgacgtacatcgtgccttcaagcgtgaactgaagaccaaggaaccggtgatcatgagcacgcttgaaactgtcaggattttcctgaccgaacagccattggaaggattggaaaagctttatcaggaaccgagggagctaccacctgaagagagggcccaaaatgttacccggctgttgagaaagcaggccgaggaggtcaacacagaatgggagaaattgaacctgcatagcgccgattggcaacgcaaaatcgacgagactctcgagaggctgagggaattgcaagaggctaccgacgaactcgacttaaagctgcgccaagccgaggttatcaaaggctcctggcaaccagtgggcgatctgctgatagactcccttcaggaccacctggagaaagtgaaggccctccgaggggagattgcaccattgaaagagaacgtgagccacgttaacgatctagctcggcagctgaccaccttaggtatccagttgagtccctacaatttaagcacactggaggacctgaatacgcgctggaagctgcttcaggtagctgtggaggatagggtgcgtcagcttcatgaagcccatagagatttcggaccagccagccagcacttcctgtctaccagcgtgcagggcccttgggagagagccatcagccccaacaaggtgccctattacattaatcacgaaactcagacgacctgctgggatcatcccaagatgactgagctctatcagagcctagctgatctgaataatgtgcgcttttcagcctaccgtacggcgatgaaacttaggcggctgcagaaagcgctctgtctggacctcctgtccctatcagctgcttgtgatgcactcgaccagcataatttaaagcagaacgatcagcctatggatattcttcaaatcatcaactgtctgactactatctatgataggctggaacaggaacataacaacctggtcaatgttccattgtgcgtcgacatgtgtctgaattggctcttgaatgtgtatgatacggggaggacaggaagaattcgcgtactctcatttaaaacaggaatcattagtctgtgcaaggcgcacctcgaagacaagtatcggtacctgttcaaacaggtcgccagctcgactggcttctgcgatcagcgtcgcctgggactcctcctgcacgactccattcagattcctaggcagctaggcgaggtggcctcctttggtggatcaaatatcgagccgagcgtcaggagttgctttcagttcgccaataataagcctgagatagaagcagctctttttctcgactggatgagacttgagccccaatccatggtttggctcccagtccttcaccgggtggctgcagcagagacagcaaagcaccaggcaaagtgcaacatttgtaaagaatgtccgatcatcggttttcgttatcggagtctgaaacattttaattacgatatttgtcagagttgctttttcagcggaagggtggctaagggccataaaatgcactaccccatggtggaatattgcacacccacaacgtcgggcgaagacgtgagagactttgcgaaggtactcaagaacaaattcaggacaaaacggtatttcgctaagcatcctcgaatgggttatttacctgtccagaccgtcctggaaggggacaatatggagacgcctgtgaccttgattaacttttggccagtcgattctgccccagcctcctccccccaactgagccacgatgacactcattctcgtatcgagcattacgcttcccgattggcagaaatggagaattccaacggctcttacctgaacgatagcatttctcctaatgaatctattgatgatgagcacctactgatacagcactactgccagtcgcttaatcaagactcccctctttcccagccacgctcaccagctcaaatcctgatttctctggagtctgaggaacggggtgagctggaaagaatactggccgatttagaggaggagaaccggaatcttcaggccgaatacgaccgtctgaagcagcagcacgaacacaaaggtctttcccccttaccctctcctcccgagatgatgcccacatctcctcagagtcctagagatgctgagctgatcgctgaggccaagttattacgacaacacaaagggaggttggaagccaggatgcaaatactcgaggaccacaacaaacagctggaaagccagctgcacagactgcgccaactcttggagcagccccaggcagaggccaaagtaaatggaactaccgtgagctccccttctactagcctgcagcggtctgatagcagccagccaatgctgcttcgtgtggtgggctcacaaacctccgactccatgggggaagaagaccttctcagcccgcctcaggacacctccaccggtttggaggaagttatggaacagctgaacaatagcttccccagcagcagagggcgaaacactcctggaaaacccatgagggaggacacaccatat

SEQ ID NO: 142765 - DNA, 7026 bp, Artificial Sequence
  derived and/or modified sequence
atgagcgccagaaagctgagaaacctgagctacaagaaggccgtgagaagacagaagctgctggagcagagcatccagagcgcccaggagaccgagaagagcctgcacctgatccaggagagcctgaccttcatcgacaagcagctggccgcctacatcgccgacaaggtggacgccgcccagatgccccaggaggcccagaagatccagagcgacctgaccagccacgagatcagcctggaggagatgaagaagcacaaccagggcaaggaggccgcccagagagtgctgagccagatcgacgtggcccagaagaagctgcaggacgtgagcatgaagttcagactgttccagaagcccgccaacttcgagcagagactgcaggagagcaagatgatcctggacgaggtgaagatgcacctgcccgccctggagaccaagagcgtggagcaggaggtggtgcagagccagctgaaccactgcgtgaacctgtacaagagcctgagcgaggtgaagagcgaggtggagatggtgatcaagaccggcagacagatcgtgcagaagaagcagaccgagaaccccaaggagctggacgagagagtgaccgccctgaagctgcactacaacgagctgggcgccaaggtgaccgagagaaagcagcagctggagaagtgcctgaagctgagcagaaagatgagaaaggagatgaacgtgctgaccgagtggctggccgccaccgacatggagctgaccaagagaagcgccgtggagggcatgcccagcaacctggacagcgaggtggcctggggcaaggccacccagaaggagatcgagaagcagaaggtgcacctgaagagcatcaccgaggtgggcgaggccctgaagaccgtgctgggcaagaaggagaccctggtggaggacaagctgagcctgctgaacagcaactggatcgccgtgaccagcagagccgaggagtggctgaacctgctgctggagtaccagaagcacatggagaccttcgaccagaacgtggaccacatcaccaagtggatcatccaggccgacaccctgctggacgagagcgagaagaagaagccccagcagaaggaggacgtgctgaagagactgaaggccgagctgaacgacatcagacccaaggtggacagcaccagagaccaggccgccaacctgatggccaacagaggcgaccactgcagaaagctggtggagccccagatcagcgagctgaaccacagattcgccgccatcagccacagaatcaagaccggcaaggccagcatccccctgaaggagctggagcagttcaacagcgacatccagaagctgctggagcccctggaggccgagatccagcagggcgtgaacctgaaggaggaggacttcaacaaggacatgaacgaggacaacgagggcaccgtgaaggagctgctgcagagaggcgacaacctgcagcagagaatcaccgacgagagaaagagagaggagatcaagatcaagcagcagctgctgcagaccaagcacaacgccctgaaggacctgagaagccagagaagaaagaaggccctggagatcagccaccagtggtaccagtacaagagacaggccgacgacctgctgaagtgcctggacgacatcgagaagaagctggccagcctgcccgagcccagagacgagagaaagatcaaggagatcgacagagagctgcagaagaagaaggaggagctgaacgccgtgagaagacaggccgagggcctgagcgaggacggcgccgccatggccgtggagcccacccagatccagctgagcaagagatggagagagatcgagagcaagttcgcccagttcagaagactgaacttcgcccagatccacaccgtgagagaggagaccatgatggtgatgaccgaggacatgcccctggagatcagctacgtgcccagcacctacctgaccgagatcacccacgtgagccaggccctgctggaggtggagcagctgctgaacgcccccgacctgtgcgccaaggacttcgaggacctgttcaagcaggaggagagcctgaagaacatcaaggacagcctgcagcagagcagcggcagaatcgacatcatccacagcaagaagaccgccgccctgcagagcgccacccccgtggagagagtgaagctgcaggaggccctgagccagctggacttccagtgggagaaggtgaacaagatgtacaaggacagacagggcagattcgacagaagcgtggagaagtggagaagattccactacgacatcaagatcttcaaccagtggctgaccgaggccgagcagttcctgagaaagacccagatccccgagaactgggagcacgccaagtacaagtggtacctgaaggagctgcaggacggcatcggccagagacagaccgtggtgagaaccctgaacgccaccggcgaggagatcatccagcagagcagcaagaccgacgccagcatcctgcaggagaagctgggcagcctgaacctgagatggcaggaggtgtgcaagcagctgagcgacagaaagaagagactggaggagcagaagaacatcctgagcgagttccagagagacctgaacgagttcgtgctgtggctggaggaggccgacaacatcgccagcatccccctggagcccggcaaggagcagcagctgaaggagaagctggagcaggtgaagctgctggtggaggagctgcccctgagacagggcatcctgaagcagctgaacgagaccggcggccccgtgctggtgagcgcccccatcagccccgaggagcaggacaagctggagaacaagctgaagcagaccaacctgcagtggatcaaggtgagcagagccctgcccgagaagcagggcgagatcgaggcccagatcaaggacctgggccagctggagaagaagctggaggacctggaggagcagctgaaccacctgctgctgtggctgagccccatcagaaaccagctggagatctacaaccagcccaaccaggagggccccttcgacgtgaaggagaccgagatcgccgtgcaggccaagcagcccgacgtggaggagatcctgagcaagggccagcacctgtacaaggagaagcccgccacccagcccgtgaagagaaagctggaggacctgagcagcgagtggaaggccgtgaacagactgctgcaggagctgagagccaagcagcccgacctggcccccggcctgaccaccatcggcgccagccccacccagaccgtgaccctggtgacccagcccgtggtgaccaaggagaccgccatcagcaagctggagatgcccagcagcctgatgctggaggtgcccgccctggccgacttcaacagagcctggaccgagctgaccgactggctgagcctgctggaccaggtgatcaagagccagagagtgatggtgggcgacctggaggacatcaacgagatgatcatcaagcagaaggccaccatgcaggacctggagcagagaagaccccagctggaggagctgatcaccgccgcccagaacctgaagaacaagaccagcaaccaggaggccagaaccatcatcaccgacagaatcgagagaatccagaaccagtgggacgaggtgcaggagcacctgcagaacagaagacagcagctgaacgagatgctgaaggacagcacccagtggctggaggccaaggaggaggccgagcaggtgctgggccaggccagagccaagctggagagctggaaggagggcccctacaccgtggacgccatccagaagaagatcaccgagaccaagcagctggccaaggacctgagacagtggcagaccaacgtggacgtggccaacgacctggccctgaagctgctgagagactacagcgccgacgacaccagaaaggtgcacatgatcaccgagaacatcaacgccagctggagaagcatccacaagagagtgagcgagagagaggccgccctggaggagacccacagactgctgcagcagttccccctggacctggagaagttcctggcctggctgaccgaggccgagaccaccgccaacgtgctgcaggacgccaccagaaaggagagactgctggaggacagcaagggcgtgaaggagctgatgaagcagtggcaggacctgcagggcgagatcgaggcccacaccgacgtgtaccacaacctggacgagaacagccagaagatcctgagaagcctggagggcagcgacgacgccgtgctgctgcagagaagactggacaacatgaacttcaagtggagcgagctgagaaagaagagcctgaacatcagaagccacctggaggccagcagcgaccagtggaagagactgcacctgagcctgcaggagctgctggtgtggctgcagctgaaggacgacgagctgagcagacaggcccccatcggcggcgacttccccgccgtgcagaagcagaacgacgtgcacagagccttcaagagagagctgaagaccaaggagcccgtgatcatgagcaccctggagaccgtgagaatcttcctgaccgagcagcccctggagggcctggagaagctgtaccaggagcccagagagctgccccccgaggagagagcccagaacgtgaccagactgctgagaaagcaggccgaggaggtgaacaccgagtgggagaagctgaacctgcacagcgccgactggcagagaaagatcgacgagaccctggagagactgagagagctgcaggaggccaccgacgagctggacctgaagctgagacaggccgaggtgatcaagggcagctggcagcccgtgggcgacctgctgatcgacagcctgcaggaccacctggagaaggtgaaggccctgagaggcgagatcgcccccctgaaggagaacgtgagccacgtgaacgacctggccagacagctgaccaccctgggcatccagctgagcccctacaacctgagcaccctggaggacctgaacaccagatggaagctgctgcaggtggccgtggaggacagagtgagacagctgcacgaggcccacagagacttcggccccgccagccagcacttcctgagcaccagcgtgcagggcccctgggagagagccatcagccccaacaaggtgccctactacatcaaccacgagacccagaccacctgctgggaccaccccaagatgaccgagctgtaccagagcctggccgacctgaacaacgtgagattcagcgcctacagaaccgccatgaagctgagaagactgcagaaggccctgtgcctggacctgctgagcctgagcgccgcctgcgacgccctggaccagcacaacctgaagcagaacgaccagcccatggacatcctgcagatcatcaactgcctgaccaccatctacgacagactggagcaggagcacaacaacctggtgaacgtgcccctgtgcgtggacatgtgcctgaactggctgctgaacgtgtacgacaccggcagaaccggcagaatcagagtgctgagcttcaagaccggcatcatcagcctgtgcaaggcccacctggaggacaagtacagatacctgttcaagcaggtggccagcagcaccggcttctgcgaccagagaagactgggcctgctgctgcacgacagcatccagatccccagacagctgggcgaggtggccagcttcggcggcagcaacatcgagcccagcgtgagaagctgcttccagttcgccaacaacaagcccgagatcgaggccgccctgttcctggactggatgagactggagccccagagcatggtgtggctgcccgtgctgcacagagtggccgccgccgagaccgccaagcaccaggccaagtgcaacatctgcaaggagtgccccatcatcggcttcagatacagaagcctgaagcacttcaactacgacatctgccagagctgcttcttcagcggcagagtggccaagggccacaagatgcactaccccatggtggagtactgcacccccaccaccagcggcgaggacgtgagagacttcgccaaggtgctgaagaacaagttcagaaccaagagatacttcgccaagcaccccagaatgggctacctgcccgtgcagaccgtgctggagggcgacaacatggagacccccgtgaccctgatcaacttctggcccgtggacagcgcccccgccagcagcccccagctgagccacgacgacacccacagcagaatcgagcactacgccagcagactggccgagatggagaacagcaacggcagctacctgaacgacagcatcagccccaacgagagcatcgacgacgagcacctgctgatccagcactactgccagagcctgaaccaggacagccccctgagccagcccagaagccccgcccagatcctgatcagcctggagagcgaggagagaggcgagctggagagaatcctggccgacctggaggaggagaacagaaacctgcaggccgagtacgacagactgaagcagcagcacgagcacaagggcctgagccccctgcccagcccccccgagatgatgcccaccagcccccagagccccagagacgccgagctgatcgccgaggccaagctgctgagacagcacaagggcagactggaggccagaatgcagatcctggaggaccacaacaagcagctggagagccagctgcacagactgagacagctgctggagcagccccaggccgaggccaaggtgaacggcaccaccgtgagcagccccagcaccagcctgcagagaagcgacagcagccagcccatgctgctgagagtggtgggcagccagaccagcgacagcatgggcgaggaggacctgctgagccccccccaggacaccagcaccggcctggaggaggtgatggagcagctgaacaacagcttccccagcagcagaggcagaaacacccccggcaagcccatgagagaggacaccccctag

SEQ ID NO: 142766 - DNA, 7023 bp, Artificial Sequence
  derived and/or modified sequence
atgagtgccaggaagctgcgaaatctgtcttacaaaaaggctgtaaggaggcaaaagttgcttgaacagagcatccagtctgcccaggagactgaaaaatccttacacttaatccaggagtccctcacattcattgacaagcagttggcagcttatattgcagacaaggtggacgcagctcaaatgcctcaggaagcccagaaaatccaatctgatttgacaagtcatgagatcagtttagaagaaatgaagaaacataatcaggggaaggaggctgcccaaagagtcctgtctcagattgatgttgcacagaaaaaattacaagatgtctccatgaagtttcgattattccagaaaccagccaattttgagcagcgtctacaagaaagtaagatgattttagatgaagtgaagatgcacttgcctgcattggaaacaaagagtgtggaacaggaagtagtacagtcacagctaaatcattgtgtgaacttgtataaaagtctgagtgaagtgaagtctgaagtggaaatggtgataaagactggacgtcagattgtacagaaaaagcagacggaaaatcccaaagaacttgatgaaagagtaacagctttgaaattgcattataatgagctgggagcaaaggtaacagaaagaaagcaacagttggagaaatgcttgaaattgtcccgtaagatgcgaaaggaaatgaatgtcttgacagaatggctggcagctacagatatggaattgacaaagagatcagcagttgaaggaatgcctagtaatttggattctgaagttgcctggggaaaggctactcaaaaagagattgagaaacagaaggtgcacctgaagagtatcacagaggtaggagaggccttgaaaacagttttgggcaagaaggagacgttggtggaagataaactcagtcttctgaatagtaactggatagctgtcacctcccgagcagaagagtggttaaatcttttgttggaataccagaaacacatggaaacttttgaccagaatgtggaccacatcacaaagtggatcattcaggctgacacacttttggatgaatcagagaaaaagaaaccccagcaaaaagaagacgtgcttaagcgtttaaaggcagaactgaatgacatacgcccaaaggtggactctacacgtgaccaagcagcaaacttgatggcaaaccgcggtgaccactgcaggaaattagtagagccccaaatctcagagctcaaccatcgatttgcagccatttcacacagaattaagactggaaaggcctccattcctttgaaggaattggagcagtttaactcagatatacaaaaattgcttgaaccactggaggctgaaattcagcagggggtgaatctgaaagaggaagacttcaataaagatatgaatgaagacaatgagggtactgtaaaagaattgttgcaaagaggagacaacttacaacaaagaatcacagatgagagaaagcgagaggaaataaagataaaacagcagctgttacagacaaaacataatgctctcaaggatttgaggtctcaaagaagaaaaaaggctctagaaatttctcatcagtggtatcagtacaagaggcaggctgatgatctcctgaaatgcttggatgacattgaaaaaaaattagccagcctacctgagcccagagatgaaaggaaaataaaggaaattgatcgggaattgcagaagaagaaagaggagctgaatgcagtgcgtaggcaagctgagggcttgtctgaggatggggccgcaatggcagtggagccaactcagatccagctcagcaagcgctggcgggaaattgagagcaaatttgctcagtttcgaagactcaactttgcacaaattcacactgtccgtgaagaaacgatgatggtgatgactgaagacatgcctttggaaatttcttatgtgccttctacttatttgactgaaatcactcatgtctcacaagccctattagaagtggaacaacttctcaatgctcctgacctctgtgctaaggactttgaagatctctttaagcaagaggagtctctgaagaatataaaagatagtctacaacaaagctcaggtcggattgacattattcatagcaagaagacagcagcattgcaaagtgcaacgcctgtggaaagggtgaagctacaggaagctctctcccagcttgatttccaatgggaaaaagttaacaaaatgtacaaggaccgacaagggcgatttgacagatctgttgagaaatggcggcgttttcattatgatataaagatatttaatcagtggctaacagaagctgaacagtttctcagaaagacacaaattcctgagaattgggaacatgctaaatacaaatggtatcttaaggaactccaggatggcattgggcagcggcaaactgttgtcagaacattgaatgcaactggggaagaaataattcagcaatcctcaaaaacagatgccagtattctacaggaaaaattgggaagcctgaatctgcggtggcaggaggtctgcaaacagctgtcagacagaaaaaagaggctagaagaacaaaagaatatcttgtcagaatttcaaagagatttaaatgaatttgttttatggttggaggaagcagataacattgctagtatcccacttgaacctggaaaagagcagcaactaaaagaaaagcttgagcaagtcaagttactggtggaagagttgcccctgcgccagggaattctcaaacaattaaatgaaactggaggacccgtgcttgtaagtgctcccataagcccagaagagcaagataaacttgaaaataagctcaagcagacaaatctccagtggataaaggtttccagagctttacctgagaaacaaggagaaattgaagctcaaataaaagaccttgggcagcttgaaaaaaagcttgaagaccttgaagagcagttaaatcatctgctgctgtggttatctcctattaggaatcagttggaaatttataaccaaccaaaccaagaaggaccatttgacgttaaggaaactgaaatagcagttcaagctaaacaaccggatgtggaagagattttgtctaaagggcagcatttgtacaaggaaaaaccagccactcagccagtgaagaggaagttagaagatctgagctctgagtggaaggcggtaaaccgtttacttcaagagctgagggcaaagcagcctgacctagctcctggactgaccactattggagcctctcctactcagactgttactctggtgacacaacctgtggttactaaggaaactgccatctccaaactagaaatgccatcttccttgatgttggaggtacctgctctggcagatttcaaccgggcttggacagaacttaccgactggctttctctgcttgatcaagttataaaatcacagagggtgatggtgggtgaccttgaggatatcaacgagatgatcatcaagcagaaggcaacaatgcaggatttggaacagaggcgtccccagttggaagaactcattaccgctgcccaaaatttgaaaaacaagaccagcaatcaagaggctagaacaatcattacggatcgaattgaaagaattcagaatcagtgggatgaagtacaagaacaccttcagaaccggaggcaacagttgaatgaaatgttaaaggattcaacacaatggctggaagctaaggaagaagctgagcaggtcttaggacaggccagagccaagcttgagtcatggaaggagggtccctatacagtagatgcaatccaaaagaaaatcacagaaaccaagcagttggccaaagacctccgccagtggcagacaaatgtagatgtggcaaatgacttggccctgaaacttctccgggattattctgcagatgataccagaaaagtccacatgataacagagaatatcaatgcctcttggagaagcattcataaaagggtgagtgagcgagaggctgctttggaagaaactcatagattactgcaacagttccccctggacctggaaaagtttcttgcctggcttacagaagctgaaacaactgccaatgtcctacaggatgctacccgtaaggaaaggctcctagaagactccaagggagtaaaagagctgatgaaacaatggcaagacctccaaggtgaaattgaagctcacacagatgtttatcacaacctggatgaaaacagccaaaaaatcctgagatccctggaaggttccgatgatgcagtcctgttacaaagacgtttggataacatgaacttcaagtggagtgaacttcggaaaaagtctctcaacattaggtcccatttggaagccagttctgaccagtggaagcgtctgcacctttctctgcaggaacttctggtgtggctacagctgaaagatgatgaattaagccggcaggcacctattggaggcgactttccagcagttcagaagcagaacgatgtacatagggccttcaagagggaattgaaaactaaagaacctgtaatcatgagtactcttgagactgtacgaatatttctgacagagcagcctttggaaggactagagaaactctaccaggagcccagagagctgcctcctgaggagagagcccagaatgtcactcggcttctacgaaagcaggctgaggaggtcaatactgagtgggaaaaattgaacctgcactccgctgactggcagagaaaaatagatgagacccttgaaagactccgggaacttcaagaggccacggatgagctggacctcaagctgcgccaagctgaggtgatcaagggatcctggcagcccgtgggcgatctcctcattgactctctccaagatcacctcgagaaagtcaaggcacttcgaggagaaattgcgcctctgaaagagaacgtgagccacgtcaatgaccttgctcgccagcttaccactttgggcattcagctctcaccgtataacctcagcactctggaagacctgaacaccagatggaagcttctgcaggtggccgtcgaggaccgagtcaggcagctgcatgaagcccacagggactttggtccagcatctcagcactttctttccacgtctgtccagggtccctgggagagagccatctcgccaaacaaagtgccctactatatcaaccacgagactcaaacaacttgctgggaccatcccaaaatgacagagctctaccagtctttagctgacctgaataatgtcagattctcagcttataggactgccatgaaactccgaagactgcagaaggccctttgcttggatctcttgagcctgtcagctgcatgtgatgccttggaccagcacaacctcaagcaaaatgaccagcccatggatatcctgcagattattaattgtttgaccactatttatgaccgcctggagcaagagcacaacaatttggtcaacgtccctctctgcgtggatatgtgtctgaactggctgctgaatgtttatgatacgggacgaacagggaggatccgtgtcctgtcttttaaaactggcatcatttccctgtgtaaagcacatttggaagacaagtacagataccttttcaagcaagtggcaagttcaacaggattttgtgaccagcgcaggctgggcctccttctgcatgattctatccaaattccaagacagttgggtgaagttgcatcctttgggggcagtaacattgagccaagtgtccggagctgcttccaatttgctaataataagccagagatcgaagcggccctcttcctagactggatgagactggaaccccagtccatggtgtggctgcccgtcctgcacagagtggctgctgcagaaactgccaagcatcaggccaaatgtaacatctgcaaagagtgtccaatcattggattcaggtacaggagtctaaagcactttaattatgacatctgccaaagctgctttttttctggtcgagttgcaaaaggccataaaatgcactatcccatggtggaatattgcactccgactacatcaggagaagatgttcgagactttgccaaggtactaaaaaacaaatttcgaaccaaaaggtattttgcgaagcatccccgaatgggctacctgccagtgcagactgtcttagagggggacaacatggaaactcccgttactctgatcaacttctggccagtagattctgcgcctgcctcgtcccctcagctttcacacgatgatactcattcacgcattgaacattatgctagcaggctagcagaaatggaaaacagcaatggatcttatctaaatgatagcatctctcctaatgagagcatagatgatgaacatttgttaatccagcattactgccaaagtttgaaccaggactcccccctgagccagcctcgtagtcctgcccagatcttgatttccttagagagtgaggaaagaggggagctagagagaatcctagcagatcttgaggaagaaaacaggaatctgcaagcagaatatgaccgtctaaagcagcagcacgaacataaaggcctgtccccactgccgtcccctcctgaaatgatgcccacctctccccagagtccccgggatgctgagctcattgctgaggccaagctactgcgtcaacacaaaggccgcctggaagccaggatgcaaatcctggaagaccacaataaacagctggagtcacagttacacaggctaaggcagctgctggagcaaccccaggcagaggccaaagtgaatggcacaacggtgtcctctccttctacctctctacagaggtccgacagcagtcagcctatgctgctccgagtggttggcagtcaaacttcggactccatgggtgaggaagatcttctcagtcctccccaggacacaagcacagggttagaggaggtgatggagcaactcaacaactccttccctagttcaagaggaagaaatacccctggaaagccaatgagagaggacaccccc

SEQ ID NO: 142767 - DNA, 5623 bp, Artificial Sequence
  derived and/or modified sequence
gggttttctcaggattgctatgcaacaggatcagtgctgtagtgcccggttcaagctgaaaatgttacacaggaagacataccatgtaaaggacctccaaggtgaaattgaagctcacacagatgtttatcacaacctggatgaaaacagccaaaaaatcctgagatccctggaaggttccgatgatgcagtcctgttacaaagacgtttggataacatgaacttcaagtggagtgaacttcggaaaaagtctctcaacattaggtcccatttggaagccagttctgaccagtggaagcgtctgcacctttctctgcaggaacttctggtgtggctacagctgaaagatgatgaattaagccggcaggcacctattggaggcgactttccagcagttcagaagcagaacgatgtacatagggccttcaagagggaattgaaaactaaagaacctgtaatcatgagtactcttgagactgtacgaatatttctgacagagcagcctttggaaggactagagaaactctaccaggagcccagagagctgcctcctgaggagagagcccagaatgtcactcggcttctacgaaagcaggctgaggaggtcaatactgagtgggaaaaattgaacctgcactccgctgactggcagagaaaaatagatgagacccttgaaagactccaggaacttcaagaggccacggatgagctggacctcaagctgcgccaagctgaggtgatcaagggatcctggcagcccgtgggcgatctcctcattgactctctccaagatcacctcgagaaagtcaaggcacttcgaggagaaattgcgcctctgaaagagaacgtgagccacgtcaatgaccttgctcgccagcttaccactttgggcattcagctctcaccgtataacctcagcactctggaagacctgaacaccagatggaagcttctgcaggtggccgtcgaggaccgagtcaggcagctgcatgaagcccacagggactttggtccagcatctcagcactttctttccacgtctgtccagggtccctgggagagagccatctcgccaaacaaagtgccctactatatcaaccacgagactcaaacaacttgctgggaccatcccaaaatgacagagctctaccagtctttagctgacctgaataatgtcagattctcagcttataggactgccatgaaactccgaagactgcagaaggccctttgcttggatctcttgagcctgtcagctgcatgtgatgccttggaccagcacaacctcaagcaaaatgaccagcccatggatatcctgcagattattaattgtttgaccactatttatgaccgcctggagcaagagcacaacaatttggtcaacgtccctctctgcgtggatatgtgtctgaactggctgctgaatgtttatgatacgggacgaacagggaggatccgtgtcctgtcttttaaaactggcatcatttccctgtgtaaagcacatttggaagacaagtacagataccttttcaagcaagtggcaagttcaacaggattttgtgaccagcgcaggctgggcctccttctgcatgattctatccaaattccaagacagttgggtgaagttgcatcctttgggggcagtaacattgagccaagtgtccggagctgcttccaatttgctaataataagccagagatcgaagcggccctcttcctagactggatgagactggaaccccagtccatggtgtggctgcccgtcctgcacagagtggctgctgcagaaactgccaagcatcaggccaaatgtaacatctgcaaagagtgtccaatcattggattcaggtacaggagtctaaagcactttaattatgacatctgccaaagctgctttttttctggtcgagttgcaaaaggccataaaatgcactatcccatggtggaatattgcactccgactacatcaggagaagatgttcgagactttgccaaggtactaaaaaacaaatttcgaaccaaaaggtattttgcgaagcatccccgaatgggctacctgccagtgcagactgtcttagagggggacaacatggaaactcccgttactctgatcaacttctggccagtagattctgcgcctgcctcgtcccctcagctttcacacgatgatactcattcacgcattgaacattatgctagcaggctagcagaaatggaaaacagcaatggatcttatctaaatgatagcatctctcctaatgagagcatagatgatgaacatttgttaatccagcattactgccaaagtttgaaccaggactcccccctgagccagcctcgtagtcctgcccagatcttgatttccttagagagtgaggaaagaggggagctagagagaatcctagcagatcttgaggaagaaaacaggaatctgcaagcagaatatgaccgtctaaagcagcagcacgaacataaaggcctgtccccactgccgtcccctcctgaaatgatgcccacctctccccagagtccccgggatgctgagctcattgctgaggccaagctactgcgtcaacacaaaggccgcctggaagccaggatgcaaatcctggaagaccacaataaacagctggagtcacagttacacaggctaaggcagctgctggagcaaccccaggcagaggccaaagtgaatggcacaacggtgtcctctccttctacctctctacagaggtccgacagcagtcagcctatgctgctccgagtggttggcagtcaaacttcggactccatgggtgaggaagatcttctcagtcctccccaggacacaagcacagggttagaggaggtgatggagcaactcaacaactccttccctagttcaagaggaagaaatacccctggaaagccaatgagagaggacacaatgtaggaagtcttttccacatggcagatgatttgggcagagcgatggagtccttagtatcagtcatgacagatgaagaaggagcagaataaatgttttacaactcctgattcccgcatggtttttataatattcatacaacaaagaggattagacagtaagagtttacaagaaataaatctatatttttgtgaagggtagtggtattatactgtagatttcagtagtttctaagtctgttattgttttgttaacaatggcaggttttacacgtctatgcaattgtacaaaaaagttataagaaaactacatgtaaaatcttgatagctaaataacttgccatttctttatatggaacgcattttgggttgtttaaaaatttataacagttataaagaaagattgtaaactaaagtgtgctttataaaaaaaagttgtttataaaaacccctaaaaacaaaacaaacacacacacacacacatacacacacacacacaaaactttgaggcagcgcattgttttgcatccttttggcgtgatatccatatgaaattcatggctttttctttttttgcatattaaagataagacttcctctaccaccacaccaaatgactactacacactgctcatttgagaactgtcagctgagtggggcaggcttgagttttcatttcatatatctatatgtctataagtatataaatactatagttatatagataaagagatacgaatttctatagactgactttttccattttttaaatgttcatgtcacatcctaatagaaagaaattacttctagtcagtcatccaggcttacctgcttggtctagaatggatttttcccggagccggaagccaggaggaaactacaccacactaaaacattgtctacagctccagatgtttctcattttaaacaactttccactgacaacgaaagtaaagtaaagtattggatttttttaaagggaacatgtgaatgaatacacaggacttattatatcagagtgagtaatcggttggttggttgattgattgattgattgatacattcagcttcctgctgctagcaatgccacgatttagatttaatgatgcttcagtggaaatcaatcagaaggtattctgaccttgtgaacatcagaaggtattttttaactcccaagcagtagcaggacgatgatagggctggagggctatggattcccagcccatccctgtgaaggagtaggccactctttaagtgaaggattggatgattgttcataatacataaagttctctgtaattacaactaaattattatgccctcttctcacagtcaaaaggaactgggtggtttggtttttgttgcttttttagatttattgtcccatgtgggatgagtttttaaatgccacaagacataatttaaaataaataaactttgggaaaaggtgtaaaacagtagccccatcacatttgtgatactgacaggtatcaacccagaagcccatgaactgtgtttccatcctttgcatttctctgcgagtagttccacacaggtttgtaagtaagtaagaaagaaggcaaattgattcaaatgttacaaaaaaacccttcttggtggattagacaggttaaatatataaacaaacaaacaaaaattgctcaaaaaagaggagaaaagctcaagaggaaaagctaaggactggtaggaaaaagctttactctttcatgccattttatttctttttgatttttaaatcattcattcaatagataccaccgtgtgacctataattttgcaaatctgttacctctgacatcaagtgtaattagcttttggagagtgggctgacatcaagtgtaattagcttttggagagtgggttttgtccattattaataattaattaattaacatcaaacacggcttctcatgctatttctacctcactttggttttggggtgttcctgataattgtgcacacctgagttcacagcttcaccacttgtccattgcgttattttctttttcctttataattctttctttttccttcataattttcaaaagaaaacccaaagctctaaggtaacaaattaccaaattacatgaagatttggtttttgtcttgcatttttttcctttatgtgacgctggaccttttctttacccaaggatttttaaaactcagatttaaaacaaggggttactttacatcctactaagaagtttaagtaagtaagtttcattctaaaatcagaggtaaatagagtgcataaataattttgttttaatctttttgtttttcttttagacacattagctctggagtgagtctgtcataatatttgaacaaaaattgagagctttattgctgcattttaagcataattaatttggacattatttcgtgttgtgttctttataaccaccaagtattaaactgtaaatcataatgtaactgaagcataaacatcacatggcatgttttgtcattgttttcaggtactgagttcttacttgagtatcataatatattgtgttttaacaccaacactgtaacatttacgaattatttttttaaacttcagttttactgcattttcacaacatatcagacttcaccaaatatatgccttactattgtattatagtactgctttactgtgtatctcaataaagcacgcagttatgttac

SEQ ID NO: 142768 - DNA, 4623 bp, Artificial Sequence
  derived and/or modified sequence
actttcggggagcccggcggctctgggaagctcactcctccactcgtacccacactcgaccgcggagcccttgcagccatgagggaacagctcaaaggccacgagactcaaacaacttgctgggaccatcccaaaatgacagagctctaccagtctttagctgacctgaataatgtcagattctcagcttataggactgccatgaaactccgaagactgcagaaggccctttgcttggatctcttgagcctgtcagctgcatgtgatgccttggaccagcacaacctcaagcaaaatgaccagcccatggatatcctgcagattattaattgtttgaccactatttatgaccgcctggagcaagagcacaacaatttggtcaacgtccctctctgcgtggatatgtgtctgaactggctgctgaatgtttatgatacgggacgaacagggaggatccgtgtcctgtcttttaaaactggcatcatttccctgtgtaaagcacatttggaagacaagtacagataccttttcaagcaagtggcaagttcaacaggattttgtgaccagcgcaggctgggcctccttctgcatgattctatccaaattccaagacagttgggtgaagttgcatcctttgggggcagtaacattgagccaagtgtccggagctgcttccaatttgctaataataagccagagatcgaagcggccctcttcctagactggatgagactggaaccccagtccatggtgtggctgcccgtcctgcacagagtggctgctgcagaaactgccaagcatcaggccaaatgtaacatctgcaaagagtgtccaatcattggattcaggtacaggagtctaaagcactttaattatgacatctgccaaagctgctttttttctggtcgagttgcaaaaggccataaaatgcactatcccatggtggaatattgcactccgactacatcaggagaagatgttcgagactttgccaaggtactaaaaaacaaatttcgaaccaaaaggtattttgcgaagcatccccgaatgggctacctgccagtgcagactgtcttagagggggacaacatggaaactcccgttactctgatcaacttctggccagtagattctgcgcctgcctcgtcccctcagctttcacacgatgatactcattcacgcattgaacattatgctagcaggctagcagaaatggaaaacagcaatggatcttatctaaatgatagcatctctcctaatgagagcatagatgatgaacatttgttaatccagcattactgccaaagtttgaaccaggactcccccctgagccagcctcgtagtcctgcccagatcttgatttccttagagagtgaggaaagaggggagctagagagaatcctagcagatcttgaggaagaaaacaggaatctgcaagcagaatatgaccgtctaaagcagcagcacgaacataaaggcctgtccccactgccgtcccctcctgaaatgatgcccacctctccccagagtccccgggatgctgagctcattgctgaggccaagctactgcgtcaacacaaaggccgcctggaagccaggatgcaaatcctggaagaccacaataaacagctggagtcacagttacacaggctaaggcagctgctggagcaaccccaggcagaggccaaagtgaatggcacaacggtgtcctctccttctacctctctacagaggtccgacagcagtcagcctatgctgctccgagtggttggcagtcaaacttcggactccatgggtgaggaagatcttctcagtcctccccaggacacaagcacagggttagaggaggtgatggagcaactcaacaactccttccctagttcaagaggaagaaatacccctggaaagccaatgagagaggacacaatgtaggaagtcttttccacatggcagatgatttgggcagagcgatggagtccttagtatcagtcatgacagatgaagaaggagcagaataaatgttttacaactcctgattcccgcatggtttttataatattcatacaacaaagaggattagacagtaagagtttacaagaaataaatctatatttttgtgaagggtagtggtattatactgtagatttcagtagtttctaagtctgttattgttttgttaacaatggcaggttttacacgtctatgcaattgtacaaaaaagttataagaaaactacatgtaaaatcttgatagctaaataacttgccatttctttatatggaacgcattttgggttgtttaaaaatttataacagttataaagaaagattgtaaactaaagtgtgctttataaaaaaaagttgtttataaaaacccctaaaaacaaaacaaacacacacacacacacatacacacacacacacaaaactttgaggcagcgcattgttttgcatccttttggcgtgatatccatatgaaattcatggctttttctttttttgcatattaaagataagacttcctctaccaccacaccaaatgactactacacactgctcatttgagaactgtcagctgagtggggcaggcttgagttttcatttcatatatctatatgtctataagtatataaatactatagttatatagataaagagatacgaatttctatagactgactttttccattttttaaatgttcatgtcacatcctaatagaaagaaattacttctagtcagtcatccaggcttacctgcttggtctagaatggatttttcccggagccggaagccaggaggaaactacaccacactaaaacattgtctacagctccagatgtttctcattttaaacaactttccactgacaacgaaagtaaagtaaagtattggatttttttaaagggaacatgtgaatgaatacacaggacttattatatcagagtgagtaatcggttggttggttgattgattgattgattgatacattcagcttcctgctgctagcaatgccacgatttagatttaatgatgcttcagtggaaatcaatcagaaggtattctgaccttgtgaacatcagaaggtattttttaactcccaagcagtagcaggacgatgatagggctggagggctatggattcccagcccatccctgtgaaggagtaggccactctttaagtgaaggattggatgattgttcataatacataaagttctctgtaattacaactaaattattatgccctcttctcacagtcaaaaggaactgggtggtttggtttttgttgcttttttagatttattgtcccatgtgggatgagtttttaaatgccacaagacataatttaaaataaataaactttgggaaaaggtgtaaaacagtagccccatcacatttgtgatactgacaggtatcaacccagaagcccatgaactgtgtttccatcctttgcatttctctgcgagtagttccacacaggtttgtaagtaagtaagaaagaaggcaaattgattcaaatgttacaaaaaaacccttcttggtggattagacaggttaaatatataaacaaacaaacaaaaattgctcaaaaaagaggagaaaagctcaagaggaaaagctaaggactggtaggaaaaagctttactctttcatgccattttatttctttttgatttttaaatcattcattcaatagataccaccgtgtgacctataattttgcaaatctgttacctctgacatcaagtgtaattagcttttggagagtgggctgacatcaagtgtaattagcttttggagagtgggttttgtccattattaataattaattaattaacatcaaacacggcttctcatgctatttctacctcactttggttttggggtgttcctgataattgtgcacacctgagttcacagcttcaccacttgtccattgcgttattttctttttcctttataattctttctttttccttcataattttcaaaagaaaacccaaagctctaaggtaacaaattaccaaattacatgaagatttggtttttgtcttgcatttttttcctttatgtgacgctggaccttttctttacccaaggatttttaaaactcagatttaaaacaaggggttactttacatcctactaagaagtttaagtaagtaagtttcattctaaaatcagaggtaaatagagtgcataaataattttgttttaatctttttgtttttcttttagacacattagctctggagtgagtctgtcataatatttgaacaaaaattgagagctttattgctgcattttaagcataattaatttggacattatttcgtgttgtgttctttataaccaccaagtattaaactgtaaatcataatgtaactgaagcataaacatcacatggcatgttttgtcattgttttcaggtactgagttcttacttgagtatcataatatattgtgttttaacaccaacactgtaacatttacgaattatttttttaaacttcagttttactgcattttcacaacatatcagacttcaccaaatatatgccttactattgtattatagtactgctttactgtgtatctcaataaagcacgcagttatgttac

SEQ ID NO: 142769 - DNA, 1854 bp, Artificial Sequence
  derived and/or modified sequence
atgcgtgaacagcttaagggccacgagacacagaccacatgctgggatcaccctaagatgacagagttgtatcagtccctggcagacctgaacaacgtcaggttctccgcttaccgaacagccatgaagcttcggagactgcagaaagcattatgcctcgacttgttgagcctttccgctgcctgtgatgctctagatcagcataatctgaaacagaacgaccagccgatggacatcctccaaatcataaactgcttaaccaccatctacgacaggctggaacaagagcacaataatttagtcaatgttccactgtgcgtggacatgtgcctgaattggctcttgaatgtgtatgatactggaaggaccggaaggattcgcgtactgtcatttaaaacgggaatcatctcactgtgtaaagcacacctcgaagacaagtaccggtatttattcaaacaagtggcttctagcacaggcttctgcgaccagcgaaggttaggattactgctccatgattcaattcaaatcccgcggcagctcggcgaagttgcgagcttcggcggtagtaacatcgaaccatccgtgagatcttgtttccagtttgctaataataaacccgagatcgaggccgccctcttccttgattggatgcgcttagagcctcaatcgatggtgtggctgcccgtgctccatagagtggctgctgccgaaacagctaagcaccaggcgaagtgcaatatctgcaaagagtgtccaataattggatttcggtatcgctccctaaaacattttaactacgatatttgtcaatcttgtttcttctctggaagggtcgctaagggtcacaaaatgcactacccgatggtggagtactgtacgcccaccaccagcggagaggacgtacgggatttcgcaaaagtgctgaagaataaattccgcacaaaaagatacttcgccaaacaccctagaatgggctacctgcctgtgcagaccgtgttggagggcgacaatatggagacaccagtcactctcatcaatttttggcccgttgacagcgcgccagcttcttccccacaactatctcatgatgacacccatagtagaatcgaacactacgcttcaagactcgcggagatggagaacagcaacggcagctacctcaatgatagcatttcgcctaacgagagtattgacgatgagcaccttcttatccagcattattgtcagtcattaaatcaggattcccccctgtcccagccacgatctccggcccagatcctcatcagcttggaaagcgaagagcgcggagagctcgagagaatcttggccgaccttgaagaagaaaaccgcaacctgcaggcggagtacgaccgattaaaacaacagcacgaacacaaaggcctgtcacccctgccctcccctcctgaaatgatgcccacctccccgcagagcccgagggacgctgagttgatcgctgaggctaaactgcttcgtcaacataaaggtcgcctcgaggcccgtatgcagattctggaggaccacaataagcagctggagtctcagctacatcgcctgaggcagcttctggagcagccacaggccgaagccaaggtgaatggcacaaccgtgtctagcccttccacaagtctacagcgctctgattcctctcaacccatgctgctaagggtggtgggcagtcagacatccgattcaatgggcgaggaagatcttttgagccccccacaggatacctctacgggcctggaagaggtgatggagcagctgaataactcatttccgagttcccgaggacgcaacacccctgggaagcctatgcgagaggatacgatgtag

SEQ ID NO: 142770 - DNA, 1854 bp, Artificial Sequence
  derived and/or modified sequence
atgagggagcagctgaagggccacgagacccagaccacctgctgggaccaccccaagatgacagagctgtaccagagcctggccgacctgaacaacgtgcgcttcagcgcctacagaacagccatgaagctgcggcggctgcagaaggccctgtgcctggacctgctgagcctgtctgctgcctgtgatgccctggaccagcacaacctgaagcagaatgaccagcccatggacatcctgcagatcatcaactgcctgaccaccatctatgaccggctggagcaggagcacaacaacctggtgaatgtgcccctgtgtgtggacatgtgcctgaactggctgctgaatgtgtatgacaccggccgcacaggccgcatccgggtgctgtccttcaagacaggcatcatcagcctgtgcaaggcccacctggaggacaagtaccgctacctgttcaagcaggtggccagcagcacaggcttctgtgaccagaggcggctgggcctgctgctgcatgacagcatccagatcccccggcagctgggggaggtggccagctttggaggcagcaacatcgagcccagcgtgcgcagctgcttccagtttgccaacaacaagccagaaattgaggccgccctcttcctggactggatgaggctggagccccagagcatggtgtggctgcctgtgctgcaccgggtggccgctgctgagacagccaagcaccaggccaagtgcaacatctgcaaggagtgccccatcatcggcttccgctaccgcagcctgaagcacttcaactatgacatctgccagagctgcttcttcagcggccgggtggccaagggccacaagatgcactaccccatggtggagtactgcacccccaccaccagcggagaagatgtgcgggactttgccaaggtgctgaagaacaagttccgcaccaagcgctactttgccaagcaccccaggatgggctacctgcctgtgcagacagtgctggagggggacaacatggagacccctgtgaccctcatcaacttctggcctgtggacagcgccccagccagcagcccccagctgagccatgatgacacccacagcagaattgagcactacgccagccggctggccgagatggagaacagcaatggcagctacctgaatgacagcatcagccccaatgaaagcattgatgatgagcacctgctgatccagcactactgccagagcctgaaccaggacagccccctgagccagcccaggagccctgcccagatcctgatcagcctggagagcgaggagcggggggagctggagcgcatcctggccgacctggaggaggagaacagaaacctgcaggccgagtatgaccggctgaagcagcagcacgagcacaagggcctgagccccctgcccagccccccagagatgatgcccaccagcccccagagccccagagatgctgagctgattgctgaggccaagctgctgcggcagcacaagggccgcctggaggccaggatgcagatcctggaggaccacaacaagcagctggagagccagctgcaccggctgcggcagctgctggagcagccccaggccgaggccaaggtgaatggcaccaccgtgagcagccccagcaccagcctgcagaggagtgacagcagccagcccatgctgctgcgggtggtgggcagccagaccagtgacagcatgggagaggaggacctgctgagccccccccaggacaccagcacaggcctggaggaggtgatggagcagctgaacaacagcttccccagcagccggggcaggaacacccctgggaagcccatgagggaggacaccatgtag

SEQ ID NO: 142771 - DNA, 1854 bp, Artificial Sequence
  derived and/or modified sequence
atgcgggagcagctgaagggccacgagacccagaccacctgctgggaccatcctaaaatgaccgagctgtaccaaagcctagccgatctgaacaacgtacgttttagtgcttaccggactgccatgaagcttcgcagattgcaaaaagccctgtgcctggaccttctatcgttgagcgctgcctgtgacgcattagaccaacacaacctgaagcaaaacgatcagcccatggatatcctacaaatcattaactgtctcaccaccatttacgaccgccttgaacaggagcataataacctcgtgaacgtaccgctgtgcgtcgacatgtgcttgaattggctcctcaacgtatacgatacaggccgtacaggccgtattagagtgcttagcttcaagaccgggataattagcttatgcaaggcccatctggaggacaagtacagatatctgttcaagcaagtcgcttcttccaccgggttctgtgaccagagacgacttggactcctgcttcacgactctatccagattccaagacagctgggtgaggtcgctagcttcggcggctccaatattgaacccagtgtgaggtcttgttttcagttcgctaataacaaaccagaaatcgaagcagccttatttttggactggatgcgcctggagcctcagtccatggtctggctaccggtgctccatcgagtggcagccgccgagaccgccaaacaccaggcaaagtgcaatatttgcaaggagtgtccaatcatagggtttcgatacaggtcacttaagcactttaactacgacatatgtcagagctgttttttctctggacgagttgccaaaggtcataagatgcattaccctatggtggaatactgcacacccactacaagcggtgaagacgtgagagattttgctaaagttctgaagaacaagttccgtacaaaaaggtacttcgcaaagcacccaaggatggggtacctccccgtgcagactgtcctggaaggcgacaacatggagacacctgttaccctaattaacttttggccagtcgactcagcaccagcttcatcccctcaactctctcacgatgatacacacagtcgtatcgaacattacgcatccagactcgcagagatggagaacagtaatgggagttatcttaacgactccatttcccccaatgagtccattgatgatgagcacctgctgattcagcattactgccagagtcttaatcaggattcacctctgtcgcagccgaggtcaccagctcaaatcttgattagtctggagtccgaagagaggggcgagctggagaggatactggccgacctggaggaggagaatcgcaacctccaggcagaatacgataggcttaagcaacagcatgagcacaagggactaagcccattgccttctcctcccgagatgatgccaaccagtccgcagagcccacgagacgcggagttgatcgccgaggccaagctactgcgtcagcataagggaaggctagaagccaggatgcaaatcttggaagatcacaacaaacaactggagtcccaattgcatagactgcggcaattgctggagcagccacaggcagaagccaaagtcaacgggaccaccgttagttcaccgagcaccagcctgcagagaagcgacagctctcagcctatgcttcttagggtcgtaggcagtcaaacctctgattctatgggggaagaagatctactctcccccccccaggataccagcaccggcttagaagaagtcatggagcagttgaacaattcattccctagcagccgcggacgcaatacccccgggaaaccaatgagggaagataccatgtag

SEQ ID NO: 142772 - DNA, 1854 bp, Artificial Sequence
  derived and/or modified sequence
atgcgagagcagttaaaagggcacgagacacagacaacttgttgggatcaccccaaaatgactgagctttaccaatctctcgcagacctaaataatgtacggttcagcgcctaccgaacggccatgaaactcagaagactgcagaaagccctttgcttagatctactgtctttgagcgccgcttgtgacgctctggaccaacacaatctgaaacaaaacgaccagccaatggatatccttcagattataaactgtctgactactatctacgatcgcttagagcaggagcacaacaacctagtgaacgtgcccctctgtgtcgatatgtgcttgaattggctgctgaatgtatacgacacgggcagaactggccgtattagagtgctgtcattcaaaaccggaatcatcagcttgtgcaaggctcaccttgaagataagtataggtatctgttcaaacaggtagcgtctagtactggcttctgtgaccagcgcagactggggctgttgctgcacgacagcattcagatccccagacagctgggggaagtagcgtccttcggcggatccaatatcgaaccaagtgttaggtcctgtttccaattcgcaaacaataagccagagatcgaggctgcgctcttcctggattggatgcggctcgaaccacagtcaatggtgtggctgcctgtcttgcatcgcgtggccgctgccgaaactgcgaagcatcaagcgaagtgcaacatctgcaaggagtgcccaatcatcgggttccggtacaggtctctaaaacacttcaactacgatatctgtcagagttgttttttttctggacgggtggccaaggggcataagatgcattaccctatggttgagtactgtacgccaacaaccagtggggaggacgtgcgggatttcgccaaggtcctaaagaataaatttagaacgaagcggtatttcgctaagcaccccagaatggggtacctgcccgtgcagacagtgctggagggggacaacatggagacaccagtcactctgatcaatttctggccagtagacagcgcccctgcttccagcccccagctctctcacgacgacacacatagccgtattgaacactatgcaagtcgtctggccgagatggagaacagcaacggcagctacctgaacgactcaatctcgccaaatgagtcaatagacgacgagcacctactgatccagcattattgccaatcactaaatcaggatagtcctttgtcccagccgcgatctcccgcacagatactaatcagcctggagagtgaggaacggggtgagctggaaagaattctggcggacctcgaggaggaaaatagaaatctgcaagcggagtacgatcgcctgaaacagcagcacgaacataaggggctgtccccactcccctccccgccagaaatgatgccgactagtcctcagtctcctagggatgccgagttaattgccgaggctaagctgctaagacagcacaaggggaggctcgaagctcggatgcagatcctggaggatcacaacaagcagctggagtctcagctccaccggctgagacagctcctcgaacaaccccaggccgaggccaaggtgaatgggaccactgtgagctccccaagcacaagtcttcagagaagtgactctagtcagccaatgctgctgagggtggtagggtcccagacttccgactcaatgggtgaagaggacctattgagtccccctcaggatacttctaccgggctcgaggaagtgatggaacagctgaataatagtttcccctcaagcagaggcaggaacacacccggtaaacctatgagagaagacacaatgtag

SEQ ID NO: 142773 - DNA, 1851 bp, Artificial Sequence
  derived and/or modified sequence
atgcgcgagcagctgaagggccacgagacccagaccacctgctgggaccaccccaagatgaccgagctgtaccagagcctggccgacctgaacaacgtgcgcttcagcgcctaccgcaccgccatgaagctgcgccgcctgcagaaggccctgtgcctggacctgctgagcctgagcgccgcctgcgacgccctggaccagcacaacctgaagcagaacgaccagcccatggacatcctgcagatcatcaactgcctgaccaccatctacgaccgcctggagcaggagcacaacaacctggtgaacgtgcccctgtgcgtggacatgtgcctgaactggctgctgaacgtgtacgacaccggccgcaccggccgcatccgcgtgctgagcttcaagaccggcatcatcagcctgtgcaaggcccacctggaggacaagtaccgctacctgttcaagcaggtggccagcagcaccggcttctgcgaccagcgccgcctgggcctgctgctgcacgacagcatccagatcccccgccagctgggcgaggtggccagcttcggcggcagcaacatcgagcccagcgtgcgcagctgcttccagttcgccaacaacaagcccgagatcgaggccgccctgttcctggactggatgcgcctggagccccagagcatggtgtggctgcccgtgctgcaccgcgtggccgccgccgagaccgccaagcaccaggccaagtgcaacatctgcaaggagtgccccatcatcggcttccgctaccgcagcctgaagcacttcaactacgacatctgccagagctgcttcttcagcggccgcgtggccaagggccacaagatgcactaccccatggtggagtactgcacccccaccaccagcggcgaggacgtgcgcgacttcgccaaggtgctgaagaacaagttccgcaccaagcgctacttcgccaagcacccccgcatgggctacctgcccgtgcagaccgtgctggagggcgacaacatggagacccccgtgaccctgatcaacttctggcccgtggacagcgcccccgccagcagcccccagctgagccacgacgacacccacagccgcatcgagcactacgccagccgcctggccgagatggagaacagcaacggcagctacctgaacgacagcatcagccccaacgagagcatcgacgacgagcacctgctgatccagcactactgccagagcctgaaccaggacagccccctgagccagccccgcagccccgcccagatcctgatcagcctggagagcgaggagcgcggcgagctggagcgcatcctggccgacctggaggaggagaaccgcaacctgcaggccgagtacgaccgcctgaagcagcagcacgagcacaagggcctgagccccctgcccagcccccccgagatgatgcccaccagcccccagagcccccgcgacgccgagctgatcgccgaggccaagctgctgcgccagcacaagggccgcctggaggcccgcatgcagatcctggaggaccacaacaagcagctggagagccagctgcaccgcctgcgccagctgctggagcagccccaggccgaggccaaggtgaacggcaccaccgtgagcagccccagcaccagcctgcagcgcagcgacagcagccagcccatgctgctgcgcgtggtgggcagccagaccagcgacagcatgggcgaggaggacctgctgagccccccccaggacaccagcaccggcctggaggaggtgatggagcagctgaacaacagcttccccagcagccgcggccgcaacacccccggcaagcccatgcgcgaggacaccatg

SEQ ID NO: 142774 - DNA, 1854 bp, Artificial Sequence
  derived and/or modified sequence
atgagagagcagctgaagggccacgagacccagaccacctgctgggaccaccccaagatgaccgagctgtaccagagcctggccgacctgaacaacgtgagattcagcgcctacagaaccgccatgaagctgagaagactgcagaaggccctgtgcctggacctgctgagcctgagcgccgcctgcgacgccctggaccagcacaacctgaagcagaacgaccagcccatggacatcctgcagatcatcaactgcctgaccaccatctacgacagactggagcaggagcacaacaacctggtgaacgtgcccctgtgcgtggacatgtgcctgaactggctgctgaacgtgtacgacaccggcagaaccggcagaatcagagtgctgagcttcaagaccggcatcatcagcctgtgcaaggcccacctggaggacaagtacagatacctgttcaagcaggtggccagcagcaccggcttctgcgaccagagaagactgggcctgctgctgcacgacagcatccagatccccagacagctgggcgaggtggccagcttcggcggcagcaacatcgagcccagcgtgagaagctgcttccagttcgccaacaacaagcccgagatcgaggccgccctgttcctggactggatgagactggagccccagagcatggtgtggctgcccgtgctgcacagagtggccgccgccgagaccgccaagcaccaggccaagtgcaacatctgcaaggagtgccccatcatcggcttcagatacagaagcctgaagcacttcaactacgacatctgccagagctgcttcttcagcggcagagtggccaagggccacaagatgcactaccccatggtggagtactgcacccccaccaccagcggcgaggacgtgagagacttcgccaaggtgctgaagaacaagttcagaaccaagagatacttcgccaagcaccccagaatgggctacctgcccgtgcagaccgtgctggagggcgacaacatggagacccccgtgaccctgatcaacttctggcccgtggacagcgcccccgccagcagcccccagctgagccacgacgacacccacagcagaatcgagcactacgccagcagactggccgagatggagaacagcaacggcagctacctgaacgacagcatcagccccaacgagagcatcgacgacgagcacctgctgatccagcactactgccagagcctgaaccaggacagccccctgagccagcccagaagccccgcccagatcctgatcagcctggagagcgaggagagaggcgagctggagagaatcctggccgacctggaggaggagaacagaaacctgcaggccgagtacgacagactgaagcagcagcacgagcacaagggcctgagccccctgcccagcccccccgagatgatgcccaccagcccccagagccccagagacgccgagctgatcgccgaggccaagctgctgagacagcacaagggcagactggaggccagaatgcagatcctggaggaccacaacaagcagctggagagccagctgcacagactgagacagctgctggagcagccccaggccgaggccaaggtgaacggcaccaccgtgagcagccccagcaccagcctgcagagaagcgacagcagccagcccatgctgctgagagtggtgggcagccagaccagcgacagcatgggcgaggaggacctgctgagccccccccaggacaccagcaccggcctggaggaggtgatggagcagctgaacaacagcttccccagcagcagaggcagaaacacccccggcaagcccatgagagaggacaccatgtag

SEQ ID NO: 142775 - DNA, 2617 bp, Artificial Sequence
  derived and/or modified sequence
cacactcgaccgcggagcccttgcagccatgagggaacagctcaaaggccacgagactcaaacaacttgctgggaccatcccaaaatgacagagctctaccagtctttagctgacctgaataatgtcagattctcagcttataggactgccatgaaactccgaagactgcagaaggccctttgcttggatctcttgagcctgtcagctgcatgtgatgccttggaccagcacaacctcaagcaaaatgaccagcccatggatatcctgcagattattaattgtttgaccactatttatgaccgcctggagcaagagcacaacaatttggtcaacgtccctctctgcgtggatatgtgtctgaactggctgctgaatgtttatgatacgggacgaacagggaggatccgtgtcctgtcttttaaaactggcatcatttccctgtgtaaagcacatttggaagacaagtacagataccttttcaagcaagtggcaagttcaacaggattttgtgaccagcgcaggctgggcctccttctgcatgattctatccaaattccaagacagttgggtgaagttgcatcctttgggggcagtaacattgagccaagtgtccggagctgcttccaatttgctaataataagccagagatcgaagcggccctcttcctagactggatgagactggaaccccagtccatggtgtggctgcccgtcctgcacagagtggctgctgcagaaactgccaagcatcaggccaaatgtaacatctgcaaagagtgtccaatcattggattcaggtacaggagtctaaagcactttaattatgacatctgccaaagctgctttttttctggtcgagttgcaaaaggccataaaatgcactatcccatggtggaatattgcactccgactacatcaggagaagatgttcgagactttgccaaggtactaaaaaacaaatttcgaaccaaaaggtattttgcgaagcatccccgaatgggctacctgccagtgcagactgtcttagagggggacaacatggaaactcccgttactctgatcaacttctggccagtagattctgcgcctgcctcgtcccctcagctttcacacgatgatactcattcacgcattgaacattatgctagcaggctagcagaaatggaaaacagcaatggatcttatctaaatgatagcatctctcctaatgagagcatagatgatgaacatttgttaatccagcattactgccaaagtttgaaccaggactcccccctgagccagcctcgtagtcctgcccagatcttgatttccttagagagtgaggaaagaggggagctagagagaatcctagcagatcttgaggaagaaaacaggaatctgcaagcagaatatgaccgtctaaagcagcagcacgaacataaaggcctgtccccactgccgtcccctcctgaaatgatgcccacctctccccagagtccccgggatgctgagctcattgctgaggccaagctactgcgtcaacacaaaggccgcctggaagccaggatgcaaatcctggaagaccacaataaacagctggagtcacagttacacaggctaaggcagctgctggagcaaccccaggcagaggccaaagtgaatggcacaacggtgtcctctccttctacctctctacagaggtccgacagcagtcagcctatgctgctccgagtggttggcagtcaaacttcggactccatgggtgaggaagatcttctcagtcctccccaggacacaagcacagggttagaggaggtgatggagcaactcaacaactccttccctagttcaagaggaagaaatacccctggaaagccaatgagagaggacacaatgtaggaagtcttttccacatggcagatgatttgggcagagcgatggagtccttagtatcagtcatgacagatgaagaaggagcagaataaatgttttacaactcctgattcccgcatggtttttataatattcatacaacaaagaggattagacagtaagagtttacaagaaataaatctatatttttgtgaagggtagtggtattatactgtagatttcagtagtttctaagtctgttattgttttgttaacaatggcaggttttacacgtctatgcaattgtacaaaaaagttataagaaaactacatgtaaaatcttgatagctaaataacttgccatttctttatatggaacgcattttgggttgtttaaaaatttataacagttataaagaaagattgtaaactaaagtgtgctttataaaaaaaagttgtttataaaaacccctaaaaacaaaacaaacacacacacacacacatacacacacacacacaaaactttgaggcagcgcattgttttgcatccttttggcgtgatatccatatgaaattcatggctttttctttttttgcatattaaagataagacttcctctaccaccacaccaaatgactactacacactgctcatttgagaactgtcagctgagtggggcaggcttgagttttcatttcatatatctatatgtctataagtatataaatactatagttatatagataaagagatacgaattt

SEQ ID NO: 142776 - DNA, 4591 bp, Artificial Sequence
  derived and/or modified sequence
actttcggggagcccggcggctctgggaagctcactcctccactcgtacccacactcgaccgcggagcccttgcagccatgagggaacagctcaaaggccacgagactcaaacaacttgctgggaccatcccaaaatgacagagctctaccagtctttagctgacctgaataatgtcagattctcagcttataggactgccatgaaactccgaagactgcagaaggccctttgcttggatctcttgagcctgtcagctgcatgtgatgccttggaccagcacaacctcaagcaaaatgaccagcccatggatatcctgcagattattaattgtttgaccactatttatgaccgcctggagcaagagcacaacaatttggtcaacgtccctctctgcgtggatatgtgtctgaactggctgctgaatgtttatgatacgggacgaacagggaggatccgtgtcctgtcttttaaaactggcatcatttccctgtgtaaagcacatttggaagacaagtacagataccttttcaagcaagtggcaagttcaacaggattttgtgaccagcgcaggctgggcctccttctgcatgattctatccaaattccaagacagttgggtgaagttgcatcctttgggggcagtaacattgagccaagtgtccggagctgcttccaatttgctaataataagccagagatcgaagcggccctcttcctagactggatgagactggaaccccagtccatggtgtggctgcccgtcctgcacagagtggctgctgcagaaactgccaagcatcaggccaaatgtaacatctgcaaagagtgtccaatcattggattcaggtacaggagtctaaagcactttaattatgacatctgccaaagctgctttttttctggtcgagttgcaaaaggccataaaatgcactatcccatggtggaatattgcactccgactacatcaggagaagatgttcgagactttgccaaggtactaaaaaacaaatttcgaaccaaaaggtattttgcgaagcatccccgaatgggctacctgccagtgcagactgtcttagagggggacaacatggaaactcccgttactctgatcaacttctggccagtagattctgcgcctgcctcgtcccctcagctttcacacgatgatactcattcacgcattgaacattatgctagcaggctagcagaaatggaaaacagcaatggatcttatctaaatgatagcatctctcctaatgagagcatagatgatgaacatttgttaatccagcattactgccaaagtttgaaccaggactcccccctgagccagcctcgtagtcctgcccagatcttgatttccttagagagtgaggaaagaggggagctagagagaatcctagcagatcttgaggaagaaaacaggaatctgcaagcagaatatgaccgtctaaagcagcagcacgaacataaaggcctgtccccactgccgtcccctcctgaaatgatgcccacctctccccagagtccccgggatgctgagctcattgctgaggccaagctactgcgtcaacacaaaggccgcctggaagccaggatgcaaatcctggaagaccacaataaacagctggagtcacagttacacaggctaaggcagctgctggagcaaccccaggcagaggccaaagtgaatggcacaacggtgtcctctccttctacctctctacagaggtccgacagcagtcagcctatgctgctccgagtggttggcagtcaaacttcggactccatgggtgaggaagatcttctcagtcctccccaggacacaagcacagggttagaggaggtgatggagcaactcaacaactccttccctagttcaagaggacacaatgtaggaagtcttttccacatggcagatgatttgggcagagcgatggagtccttagtatcagtcatgacagatgaagaaggagcagaataaatgttttacaactcctgattcccgcatggtttttataatattcatacaacaaagaggattagacagtaagagtttacaagaaataaatctatatttttgtgaagggtagtggtattatactgtagatttcagtagtttctaagtctgttattgttttgttaacaatggcaggttttacacgtctatgcaattgtacaaaaaagttataagaaaactacatgtaaaatcttgatagctaaataacttgccatttctttatatggaacgcattttgggttgtttaaaaatttataacagttataaagaaagattgtaaactaaagtgtgctttataaaaaaaagttgtttataaaaacccctaaaaacaaaacaaacacacacacacacacatacacacacacacacaaaactttgaggcagcgcattgttttgcatccttttggcgtgatatccatatgaaattcatggctttttctttttttgcatattaaagataagacttcctctaccaccacaccaaatgactactacacactgctcatttgagaactgtcagctgagtggggcaggcttgagttttcatttcatatatctatatgtctataagtatataaatactatagttatatagataaagagatacgaatttctatagactgactttttccattttttaaatgttcatgtcacatcctaatagaaagaaattacttctagtcagtcatccaggcttacctgcttggtctagaatggatttttcccggagccggaagccaggaggaaactacaccacactaaaacattgtctacagctccagatgtttctcattttaaacaactttccactgacaacgaaagtaaagtaaagtattggatttttttaaagggaacatgtgaatgaatacacaggacttattatatcagagtgagtaatcggttggttggttgattgattgattgattgatacattcagcttcctgctgctagcaatgccacgatttagatttaatgatgcttcagtggaaatcaatcagaaggtattctgaccttgtgaacatcagaaggtattttttaactcccaagcagtagcaggacgatgatagggctggagggctatggattcccagcccatccctgtgaaggagtaggccactctttaagtgaaggattggatgattgttcataatacataaagttctctgtaattacaactaaattattatgccctcttctcacagtcaaaaggaactgggtggtttggtttttgttgcttttttagatttattgtcccatgtgggatgagtttttaaatgccacaagacataatttaaaataaataaactttgggaaaaggtgtaaaacagtagccccatcacatttgtgatactgacaggtatcaacccagaagcccatgaactgtgtttccatcctttgcatttctctgcgagtagttccacacaggtttgtaagtaagtaagaaagaaggcaaattgattcaaatgttacaaaaaaacccttcttggtggattagacaggttaaatatataaacaaacaaacaaaaattgctcaaaaaagaggagaaaagctcaagaggaaaagctaaggactggtaggaaaaagctttactctttcatgccattttatttctttttgatttttaaatcattcattcaatagataccaccgtgtgacctataattttgcaaatctgttacctctgacatcaagtgtaattagcttttggagagtgggctgacatcaagtgtaattagcttttggagagtgggttttgtccattattaataattaattaattaacatcaaacacggcttctcatgctatttctacctcactttggttttggggtgttcctgataattgtgcacacctgagttcacagcttcaccacttgtccattgcgttattttctttttcctttataattctttctttttccttcataattttcaaaagaaaacccaaagctctaaggtaacaaattaccaaattacatgaagatttggtttttgtcttgcatttttttcctttatgtgacgctggaccttttctttacccaaggatttttaaaactcagatttaaaacaaggggttactttacatcctactaagaagtttaagtaagtaagtttcattctaaaatcagaggtaaatagagtgcataaataattttgttttaatctttttgtttttcttttagacacattagctctggagtgagtctgtcataatatttgaacaaaaattgagagctttattgctgcattttaagcataattaatttggacattatttcgtgttgtgttctttataaccaccaagtattaaactgtaaatcataatgtaactgaagcataaacatcacatggcatgttttgtcattgttttcaggtactgagttcttacttgagtatcataatatattgtgttttaacaccaacactgtaacatttacgaattatttttttaaacttcagttttactgcattttcacaacatatcagacttcaccaaatatatgccttactattgtattatagtactgctttactgtgtatctcaataaagcacgcagttatgttac

SEQ ID NO: 142777 - DNA, 1908 bp, Artificial Sequence
  derived and/or modified sequence
atgcgcgaacagcttaaaggccatgagactcagacaacatgctgggaccaccctaaaatgaccgaattgtatcaaagcctcgccgatctcaataacgtgaggttttccgcctaccgcactgccatgaaactgcggcgcctgcagaaagctctttgtcttgacctgctgtcattgagcgccgcatgtgacgcactggaccaacataatctgaagcagaacgatcaaccaatggacatattacagatcattaattgtctcactactatctacgacaggctggagcaggagcacaacaatctagtgaacgtcccgctgtgcgtcgacatgtgcctcaactggttgctgaacgtgtatgacactggtcggacgggcagaattcgggtgttgagcttcaagaccggcatcatttcactctgcaaggctcacctggaggacaagtatcgttatctgttcaagcaggttgcatccagtaccgggttctgtgatcagcggagattgggtctgcttctccatgatagcatacaaattccccggcagcttggggaggtagcctcattcgggggctcaaatatcgaaccttcagtgagatcttgttttcaatttgcaaataataaaccagaaatcgaggcagctttattcctggactggatgcggcttgagccacagagtatggtgtggctgcccgtgctgcaccgggtggcagccgcggagacggccaaacatcaagccaagtgcaacatctgtaaggaatgccccataataggtttccgctaccgttccctgaaacacttcaactacgacatttgccagtcatgtttctttagcggcagggtggctaagggacataagatgcactatcctatggtggaatattgcactccgaccacatccggtgaggacgttcgagactttgccaaagtgttgaagaataaatttaggaccaaaagatactttgccaaacatcctcggatggggtacctgcccgtccagactgtgctcgagggcgacaacatggagacccccgtgaccctcatcaatttttggccagtggactcggctccagcgagtagtccccagctgagccatgacgatacgcacagccgcatagaacattacgcttctcggctggctgagatggagaactccaatggtagctaccttaacgactccatctccccaaacgagtccatcgatgatgagcacctgctgatacaacactattgtcaatctttgaatcaggactctccactgtcccagccccgaagccccgcccagatactaatatccttggaatcggaagagcggggggagttggagcgaattcttgccgatttagaggaagagaatcggaacctgcaggctgagtacgatagattgaagcagcagcacgagcataaggggctgtctccccttccatcccctccagaaatgatgcccacatctccgcagagccctagggacgctgaattgatcgctgaggcgaagctgctcaggcaacacaaaggacggctcgaagcgagaatgcaaatactcgaggaccataacaaacaattagagtctcaattacacaggcttcgccaactgctggaacaaccgcaggcagaggcaaaagttaacggcactactgtcagcagtccatcgacttcactccagcggagtgacagctcacagcccatgctgctaagggtggtaggtagccagacttctgacagcatgggagaagaggacctactgtctccacctcaggacacgtcaacagggcttgaagaagtgatggagcaactgaacaattcatttcctagcagtcgcggacataacgtgggttcactgttccatatggctgatgatcttggccgcgctatggagtcacttgtgtcggtgatgacagatgaagagggcgccgagtag

SEQ ID NO: 142778 - DNA, 1908 bp, Artificial Sequence
  derived and/or modified sequence
atgagggagcagctgaagggccacgagacccagaccacctgctgggaccaccccaagatgacagagctgtaccagagcctggccgacctgaacaacgtgcgcttcagcgcctacagaacagccatgaagctgcggcggctgcagaaggccctgtgcctggacctgctgagcctgtctgctgcctgtgatgccctggaccagcacaacctgaagcagaatgaccagcccatggacatcctgcagatcatcaactgcctgaccaccatctatgaccggctggagcaggagcacaacaacctggtgaatgtgcccctgtgtgtggacatgtgcctgaactggctgctgaatgtgtatgacaccggccgcacaggccgcatccgggtgctgtccttcaagacaggcatcatcagcctgtgcaaggcccacctggaggacaagtaccgctacctgttcaagcaggtggccagcagcacaggcttctgtgaccagaggcggctgggcctgctgctgcatgacagcatccagatcccccggcagctgggggaggtggccagctttggaggcagcaacatcgagcccagcgtgcgcagctgcttccagtttgccaacaacaagccagaaattgaggccgccctcttcctggactggatgaggctggagccccagagcatggtgtggctgcctgtgctgcaccgggtggccgctgctgagacagccaagcaccaggccaagtgcaacatctgcaaggagtgccccatcatcggcttccgctaccgcagcctgaagcacttcaactatgacatctgccagagctgcttcttcagcggccgggtggccaagggccacaagatgcactaccccatggtggagtactgcacccccaccaccagcggagaagatgtgcgggactttgccaaggtgctgaagaacaagttccgcaccaagcgctactttgccaagcaccccaggatgggctacctgcctgtgcagacagtgctggagggggacaacatggagacccctgtgaccctcatcaacttctggcctgtggacagcgccccagccagcagcccccagctgagccatgatgacacccacagcagaattgagcactacgccagccggctggccgagatggagaacagcaatggcagctacctgaatgacagcatcagccccaatgaaagcattgatgatgagcacctgctgatccagcactactgccagagcctgaaccaggacagccccctgagccagcccaggagccctgcccagatcctgatcagcctggagagcgaggagcggggggagctggagcgcatcctggccgacctggaggaggagaacagaaacctgcaggccgagtatgaccggctgaagcagcagcacgagcacaagggcctgagccccctgcccagccccccagagatgatgcccaccagcccccagagccccagagatgctgagctgattgctgaggccaagctgctgcggcagcacaagggccgcctggaggccaggatgcagatcctggaggaccacaacaagcagctggagagccagctgcaccggctgcggcagctgctggagcagccccaggccgaggccaaggtgaatggcaccaccgtgagcagccccagcaccagcctgcagaggagtgacagcagccagcccatgctgctgcgggtggtgggcagccagaccagtgacagcatgggagaggaggacctgctgagccccccccaggacaccagcacaggcctggaggaggtgatggagcagctgaacaacagcttccccagcagccggggccacaacgtgggcagcctcttccacatggctgatgacctgggccgggccatggagagcctggtgtctgtgatgacagatgaggagggcgctgagtag

SEQ ID NO: 142779 - DNA, 1908 bp, Artificial Sequence
  derived and/or modified sequence
atgcgggagcagctgaagggccacgagacccagaccacctgctgggatcatccgaagatgactgagttgtatcaatcgctggctgacctcaacaacgttagattttccgcataccggacagccatgaaacttcgccgccttcagaaggccttgtgcctggatctactgtccctcagtgcagcttgtgatgctctcgatcagcacaatctgaagcagaacgaccagcccatggacattttacagataataaactgtcttacaacgatatatgataggttggagcaggagcataataacctggtaaatgtcccgttgtgcgtcgatatgtgtctgaattggctgctcaatgtatatgacaccgggcgaactggccggatcagagtactttcattcaaaaccggcatcatttcgctgtgtaaagcgcatctggaggataagtacagatatctgttcaagcaggtagcttcatctaccggcttctgtgatcaacgacgtctgggactcctgctgcacgactcgattcagattcctcggcaactgggtgaagtggcgagctttgggggctctaacatcgagcctagcgtccggagttgctttcagtttgcgaacaacaagcccgagatcgaagcagcactgttcctcgattggatgaggctggagccccagtcaatggtgtggcttcccgtgctgcacagggttgccgctgccgagaccgcaaaacatcaagcgaaatgcaatatttgcaaagagtgtcctatcattggtttccgttacagaagcctgaagcatttcaattatgatatctgtcagtcctgtttcttctccggtcgggtggccaagggtcacaagatgcattaccctatggtggagtactgtaccccgactactagcggcgaggacgtaagagacttcgccaaggtgctgaagaataaattccgcactaagagatactttgctaaacaccccagaatggggtatctccccgtgcagaccgtcctagaaggcgataatatggagacgcctgtgaccctgattaatttctggcccgttgatagcgcaccggcttcaagtcctcagctgtcacacgatgacactcactccaggatcgagcactatgcctcgcgactggctgagatggaaaactccaacggaagttatctgaatgacagtatatctccgaatgaatccatcgatgatgagcacctgctcatacagcactattgccagagtttaaatcaggattcgcctctgtctcagcctagaagtcccgcacaaatactgatttctttagaatccgaggagagaggggagctggagagaattctggccgacctggaggaggagaacaggaacctgcaggccgaatacgatcggcttaaacaacagcacgagcataagggcctgtcgcccctgccttctcctccagaaatgatgcccacatcaccgcagagtccacgtgacgccgagctcattgctgaagctaaattgttgaggcagcataagggcaggctcgaggctcgaatgcagatcctggaagaccataataaacagctggagagccaactgcatcgcttgcggcagctgctcgagcagccacaggccgaagccaaggtaaatggcaccactgtgtcttcaccttccacatctctccagagaagcgacagctcgcagccaatgctcctcagggtggttggctctcagacttctgatagcatgggggaggaagatctactgtcaccaccgcaagatacctcaacgggactggaagaggtgatggaacagctgaataattccttcccctcctctagaggccataacgtaggatcactgtttcatatggcggatgatctgggtcgtgctatggagtccctggtgtcagtcatgaccgacgaggagggagctgagtag

SEQ ID NO: 142780 - DNA, 1908 bp, Artificial Sequence
  derived and/or modified sequence
atgcgcgagcagctgaaagggcacgaaacacagacgacatgctgggatcaccccaaaatgacagagctctaccagagcctcgccgacctcaataatgtgcggttcagcgcttatcgaaccgctatgaagctccgcaggctgcaaaaagctctgtgcttagaccttctgtctcttagtgctgcatgcgatgcgctcgaccaacacaatctgaaacagaatgaccaacctatggatatacttcagataatcaattgcttgactactatctacgataggctggaacaagaacacaacaatctggttaacgtgcctctctgtgtggacatgtgtctgaactggcttcttaacgtttatgacacaggacgcacaggccgaatacgcgtgctgtcattcaagactggcataatatcactgtgcaaagctcatctggaggacaagtaccgctacctgttcaaacaggtggcctctagcaccggattctgtgaccaacgccgactgggacttctcctccacgattccatccaaataccacggcaactgggggaggtagcctccttcgggggttccaacatcgaacccagtgtccggtcatgctttcagtttgcgaataacaaacccgaaatagaagctgcattgttcctggattggatgcgtttggagccccaatcaatggtctggctgccagtactgcaccgtgtagcagccgctgagactgcgaagcaccaggccaaatgtaacatctgtaaagagtgccctataattggattcagataccgctctctgaagcacttcaactatgatatttgccaatcctgcttctttagcgggagggtggcaaaaggacataagatgcattaccccatggtggaatattgcacccctaccacaagcggagaagacgtgagagacttcgccaaggtcctaaaaaacaaattcagaacaaagaggtatttcgcgaagcaccctagaatgggctacctccctgtgcagacagtgctagaaggagacaacatggagacacctgtcacgttaatcaatttctggcctgtcgactcggccccagccagctcacctcagctcagccatgatgatacacatagtagaattgaacattacgccagccgcttagctgaaatggagaacagcaacgggagttatctcaatgactcaattagcccaaatgaaagtatagatgatgaacacttgctgattcagcactattgtcaaagcctaaatcaggactcacccctttcccagcctcgcagcccggcacaaattttaatcagcttggagtcagaggagcgtggcgagttagaacgaatcctagcggatctggaggaagagaatcgtaatcttcaggccgagtatgacagactgaaacagcagcatgaacacaagggccttagtccactcccttccccccctgaaatgatgccaacaagccctcagtccccccgagacgccgaactgattgctgaagcaaaattgctgcgccagcataaaggtcggctggaggctaggatgcagattcttgaggaccacaacaagcaattagagtctcagcttcatcgtctgcggcagctgctggagcagccccaggccgaagccaaagtcaatggtactactgtatcctctccgtctacatctctgcagcggagtgactcctcacagcctatgcttctcagggttgtgggatctcagactagtgactctatgggggaagaggacttactctcgcccccacaggatacaagcaccggcttggaagaggtcatggagcaactgaacaattctttcccgagcagcagaggtcataatgttgggtctctgtttcatatggccgatgacttaggacgcgcaatggaatctctcgtgagcgtgatgacagacgaagagggcgcagaatag

SEQ ID NO: 142781 - DNA, 1905 bp, Artificial Sequence
  derived and/or modified sequence
atgcgcgagcagctgaagggccacgagacccagaccacctgctgggaccaccccaagatgaccgagctgtaccagagcctggccgacctgaacaacgtgcgcttcagcgcctaccgcaccgccatgaagctgcgccgcctgcagaaggccctgtgcctggacctgctgagcctgagcgccgcctgcgacgccctggaccagcacaacctgaagcagaacgaccagcccatggacatcctgcagatcatcaactgcctgaccaccatctacgaccgcctggagcaggagcacaacaacctggtgaacgtgcccctgtgcgtggacatgtgcctgaactggctgctgaacgtgtacgacaccggccgcaccggccgcatccgcgtgctgagcttcaagaccggcatcatcagcctgtgcaaggcccacctggaggacaagtaccgctacctgttcaagcaggtggccagcagcaccggcttctgcgaccagcgccgcctgggcctgctgctgcacgacagcatccagatcccccgccagctgggcgaggtggccagcttcggcggcagcaacatcgagcccagcgtgcgcagctgcttccagttcgccaacaacaagcccgagatcgaggccgccctgttcctggactggatgcgcctggagccccagagcatggtgtggctgcccgtgctgcaccgcgtggccgccgccgagaccgccaagcaccaggccaagtgcaacatctgcaaggagtgccccatcatcggcttccgctaccgcagcctgaagcacttcaactacgacatctgccagagctgcttcttcagcggccgcgtggccaagggccacaagatgcactaccccatggtggagtactgcacccccaccaccagcggcgaggacgtgcgcgacttcgccaaggtgctgaagaacaagttccgcaccaagcgctacttcgccaagcacccccgcatgggctacctgcccgtgcagaccgtgctggagggcgacaacatggagacccccgtgaccctgatcaacttctggcccgtggacagcgcccccgccagcagcccccagctgagccacgacgacacccacagccgcatcgagcactacgccagccgcctggccgagatggagaacagcaacggcagctacctgaacgacagcatcagccccaacgagagcatcgacgacgagcacctgctgatccagcactactgccagagcctgaaccaggacagccccctgagccagccccgcagccccgcccagatcctgatcagcctggagagcgaggagcgcggcgagctggagcgcatcctggccgacctggaggaggagaaccgcaacctgcaggccgagtacgaccgcctgaagcagcagcacgagcacaagggcctgagccccctgcccagcccccccgagatgatgcccaccagcccccagagcccccgcgacgccgagctgatcgccgaggccaagctgctgcgccagcacaagggccgcctggaggcccgcatgcagatcctggaggaccacaacaagcagctggagagccagctgcaccgcctgcgccagctgctggagcagccccaggccgaggccaaggtgaacggcaccaccgtgagcagccccagcaccagcctgcagcgcagcgacagcagccagcccatgctgctgcgcgtggtgggcagccagaccagcgacagcatgggcgaggaggacctgctgagccccccccaggacaccagcaccggcctggaggaggtgatggagcagctgaacaacagcttccccagcagccgcggccacaacgtgggcagcctgttccacatggccgacgacctgggccgcgccatggagagcctggtgagcgtgatgaccgacgaggagggcgccgag

SEQ ID NO: 142782 - DNA, 1908 bp, Artificial Sequence
  derived and/or modified sequence
atgagagagcagctgaagggccacgagacccagaccacctgctgggaccaccccaagatgaccgagctgtaccagagcctggccgacctgaacaacgtgagattcagcgcctacagaaccgccatgaagctgagaagactgcagaaggccctgtgcctggacctgctgagcctgagcgccgcctgcgacgccctggaccagcacaacctgaagcagaacgaccagcccatggacatcctgcagatcatcaactgcctgaccaccatctacgacagactggagcaggagcacaacaacctggtgaacgtgcccctgtgcgtggacatgtgcctgaactggctgctgaacgtgtacgacaccggcagaaccggcagaatcagagtgctgagcttcaagaccggcatcatcagcctgtgcaaggcccacctggaggacaagtacagatacctgttcaagcaggtggccagcagcaccggcttctgcgaccagagaagactgggcctgctgctgcacgacagcatccagatccccagacagctgggcgaggtggccagcttcggcggcagcaacatcgagcccagcgtgagaagctgcttccagttcgccaacaacaagcccgagatcgaggccgccctgttcctggactggatgagactggagccccagagcatggtgtggctgcccgtgctgcacagagtggccgccgccgagaccgccaagcaccaggccaagtgcaacatctgcaaggagtgccccatcatcggcttcagatacagaagcctgaagcacttcaactacgacatctgccagagctgcttcttcagcggcagagtggccaagggccacaagatgcactaccccatggtggagtactgcacccccaccaccagcggcgaggacgtgagagacttcgccaaggtgctgaagaacaagttcagaaccaagagatacttcgccaagcaccccagaatgggctacctgcccgtgcagaccgtgctggagggcgacaacatggagacccccgtgaccctgatcaacttctggcccgtggacagcgcccccgccagcagcccccagctgagccacgacgacacccacagcagaatcgagcactacgccagcagactggccgagatggagaacagcaacggcagctacctgaacgacagcatcagccccaacgagagcatcgacgacgagcacctgctgatccagcactactgccagagcctgaaccaggacagccccctgagccagcccagaagccccgcccagatcctgatcagcctggagagcgaggagagaggcgagctggagagaatcctggccgacctggaggaggagaacagaaacctgcaggccgagtacgacagactgaagcagcagcacgagcacaagggcctgagccccctgcccagcccccccgagatgatgcccaccagcccccagagccccagagacgccgagctgatcgccgaggccaagctgctgagacagcacaagggcagactggaggccagaatgcagatcctggaggaccacaacaagcagctggagagccagctgcacagactgagacagctgctggagcagccccaggccgaggccaaggtgaacggcaccaccgtgagcagccccagcaccagcctgcagagaagcgacagcagccagcccatgctgctgagagtggtgggcagccagaccagcgacagcatgggcgaggaggacctgctgagccccccccaggacaccagcaccggcctggaggaggtgatggagcagctgaacaacagcttccccagcagcagaggccacaacgtgggcagcctgttccacatggccgacgacctgggcagagccatggagagcctggtgagcgtgatgaccgacgaggagggcgccgagtag

SEQ ID NO: 142783 - DNA, 4645 bp, Artificial Sequence
  derived and/or modified sequence
agtgctttcagctgtgagcttgggcggcggcggcggcggcgctccactttcggggagcccggcggctctgggaagctcactcctccactcgtacccacactcgaccgcggagcccttgcagccatgagggaacagctcaaaggccacgagactcaaacaacttgctgggaccatcccaaaatgacagagctctaccagtctttagctgacctgaataatgtcagattctcagcttataggactgccatgaaactccgaagactgcagaaggccctttgcttggatctcttgagcctgtcagctgcatgtgatgccttggaccagcacaacctcaagcaaaatgaccagcccatggatatcctgcagattattaattgtttgaccactatttatgaccgcctggagcaagagcacaacaatttggtcaacgtccctctctgcgtggatatgtgtctgaactggctgctgaatgtttatgatacgggacgaacagggaggatccgtgtcctgtcttttaaaactggcatcatttccctgtgtaaagcacatttggaagacaagtacagataccttttcaagcaagtggcaagttcaacaggattttgtgaccagcgcaggctgggcctccttctgcatgattctatccaaattccaagacagttgggtgaagttgcatcctttgggggcagtaacattgagccaagtgtccggagctgcttccaatttgctaataataagccagagatcgaagcggccctcttcctagactggatgagactggaaccccagtccatggtgtggctgcccgtcctgcacagagtggctgctgcagaaactgccaagcatcaggccaaatgtaacatctgcaaagagtgtccaatcattggattcaggtacaggagtctaaagcactttaattatgacatctgccaaagctgctttttttctggtcgagttgcaaaaggccataaaatgcactatcccatggtggaatattgcactccgactacatcaggagaagatgttcgagactttgccaaggtactaaaaaacaaatttcgaaccaaaaggtattttgcgaagcatccccgaatgggctacctgccagtgcagactgtcttagagggggacaacatggaaactcccgttactctgatcaacttctggccagtagattctgcgcctgcctcgtcccctcagctttcacacgatgatactcattcacgcattgaacattatgctagcaggctagcagaaatggaaaacagcaatggatcttatctaaatgatagcatctctcctaatgagagcatagatgatgaacatttgttaatccagcattactgccaaagtttgaaccaggactcccccctgagccagcctcgtagtcctgcccagatcttgatttccttagagagtgaggaaagaggggagctagagagaatcctagcagatcttgaggaagaaaacaggaatctgcaagcagaatatgaccgtctaaagcagcagcacgaacataaaggcctgtccccactgccgtcccctcctgaaatgatgcccacctctccccagagtccccgggatgctgagctcattgctgaggccaagctactgcgtcaacacaaaggccgcctggaagccaggatgcaaatcctggaagaccacaataaacagctggagtcacagttacacaggctaaggcagctgctggagcaaccccaggcagaggccaaagtgaatggcacaacggtgtcctctccttctacctctctacagaggtccgacagcagtcagcctatgctgctccgagtggttggcagtcaaacttcggactccatgggtgaggaagatcttctcagtcctccccaggacacaagcacagggttagaggaggtgatggagcaactcaacaactccttccctagttcaagaggacacaatgtaggaagtcttttccacatggcagatgatttgggcagagcgatggagtccttagtatcagtcatgacagatgaagaaggagcagaataaatgttttacaactcctgattcccgcatggtttttataatattcatacaacaaagaggattagacagtaagagtttacaagaaataaatctatatttttgtgaagggtagtggtattatactgtagatttcagtagtttctaagtctgttattgttttgttaacaatggcaggttttacacgtctatgcaattgtacaaaaaagttataagaaaactacatgtaaaatcttgatagctaaataacttgccatttctttatatggaacgcattttgggttgtttaaaaatttataacagttataaagaaagattgtaaactaaagtgtgctttataaaaaaaagttgtttataaaaacccctaaaaacaaaacaaacacacacacacacacatacacacacacacacaaaactttgaggcagcgcattgttttgcatccttttggcgtgatatccatatgaaattcatggctttttctttttttgcatattaaagataagacttcctctaccaccacaccaaatgactactacacactgctcatttgagaactgtcagctgagtggggcaggcttgagttttcatttcatatatctatatgtctataagtatataaatactatagttatatagataaagagatacgaatttctatagactgactttttccattttttaaatgttcatgtcacatcctaatagaaagaaattacttctagtcagtcatccaggcttacctgcttggtctagaatggatttttcccggagccggaagccaggaggaaactacaccacactaaaacattgtctacagctccagatgtttctcattttaaacaactttccactgacaacgaaagtaaagtaaagtattggatttttttaaagggaacatgtgaatgaatacacaggacttattatatcagagtgagtaatcggttggttggttgattgattgattgattgatacattcagcttcctgctgctagcaatgccacgatttagatttaatgatgcttcagtggaaatcaatcagaaggtattctgaccttgtgaacatcagaaggtattttttaactcccaagcagtagcaggacgatgatagggctggagggctatggattcccagcccatccctgtgaaggagtaggccactctttaagtgaaggattggatgattgttcataatacataaagttctctgtaattacaactaaattattatgccctcttctcacagtcaaaaggaactgggtggtttggtttttgttgcttttttagatttattgtcccatgtgggatgagtttttaaatgccacaagacataatttaaaataaataaactttgggaaaaggtgtaaaacagtagccccatcacatttgtgatactgacaggtatcaacccagaagcccatgaactgtgtttccatcctttgcatttctctgcgagtagttccacacaggtttgtaagtaagtaagaaagaaggcaaattgattcaaatgttacaaaaaaacccttcttggtggattagacaggttaaatatataaacaaacaaacaaaaattgctcaaaaaagaggagaaaagctcaagaggaaaagctaaggactggtaggaaaaagctttactctttcatgccattttatttctttttgatttttaaatcattcattcaatagataccaccgtgtgacctataattttgcaaatctgttacctctgacatcaagtgtaattagcttttggagagtgggctgacatcaagtgtaattagcttttggagagtgggttttgtccattattaataattaattaattaacatcaaacacggcttctcatgctatttctacctcactttggttttggggtgttcctgataattgtgcacacctgagttcacagcttcaccacttgtccattgcgttattttctttttcctttataattctttctttttccttcataattttcaaaagaaaacccaaagctctaaggtaacaaattaccaaattacatgaagatttggtttttgtcttgcatttttttcctttatgtgacgctggaccttttctttacccaaggatttttaaaactcagatttaaaacaaggggttactttacatcctactaagaagtttaagtaagtaagtttcattctaaaatcagaggtaaatagagtgcataaataattttgttttaatctttttgtttttcttttagacacattagctctggagtgagtctgtcataatatttgaacaaaaattgagagctttattgctgcattttaagcataattaatttggacattatttcgtgttgtgttctttataaccaccaagtattaaactgtaaatcataatgtaactgaagcataaacatcacatggcatgttttgtcattgttttcaggtactgagttcttacttgagtatcataatatattgtgttttaacaccaacactgtaacatttacgaattatttttttaaacttcagttttactgcattttcacaacatatcagacttcaccaaatatatgccttactattgtattatagtactgctttactgtgtatctcaataaagcacgcagttatgttacaaaaaagta

SEQ ID NO: 142784 - DNA, 4584 bp, Artificial Sequence
  derived and/or modified sequence
actttcggggagcccggcggctctgggaagctcactcctccactcgtacccacactcgaccgcggagcccttgcagccatgagggaacagctcaaaggccacgagactcaaacaacttgctgggaccatcccaaaatgacagagctctaccagtctttagctgacctgaataatgtcagattctcagcttataggactgccatgaaactccgaagactgcagaaggccctttgcttggatctcttgagcctgtcagctgcatgtgatgccttggaccagcacaacctcaagcaaaatgaccagcccatggatatcctgcagattattaattgtttgaccactatttatgaccgcctggagcaagagcacaacaatttggtcaacgtccctctctgcgtggatatgtgtctgaactggctgctgaatgtttatgatacgggacgaacagggaggatccgtgtcctgtcttttaaaactggcatcatttccctgtgtaaagcacatttggaagacaagtacagataccttttcaagcaagtggcaagttcaacaggattttgtgaccagcgcaggctgggcctccttctgcatgattctatccaaattccaagacagttgggtgaagttgcatcctttgggggcagtaacattgagccaagtgtccggagctgcttccaatttgctaataataagccagagatcgaagcggccctcttcctagactggatgagactggaaccccagtccatggtgtggctgcccgtcctgcacagagtggctgctgcagaaactgccaagcatcaggccaaatgtaacatctgcaaagagtgtccaatcattggattcaggtacaggagtctaaagcactttaattatgacatctgccaaagctgctttttttctggtcgagttgcaaaaggccataaaatgcactatcccatggtggaatattgcactccgactacatcaggagaagatgttcgagactttgccaaggtactaaaaaacaaatttcgaaccaaaaggtattttgcgaagcatccccgaatgggctacctgccagtgcagactgtcttagagggggacaacatggaaacgcctgcctcgtcccctcagctttcacacgatgatactcattcacgcattgaacattatgctagcaggctagcagaaatggaaaacagcaatggatcttatctaaatgatagcatctctcctaatgagagcatagatgatgaacatttgttaatccagcattactgccaaagtttgaaccaggactcccccctgagccagcctcgtagtcctgcccagatcttgatttccttagagagtgaggaaagaggggagctagagagaatcctagcagatcttgaggaagaaaacaggaatctgcaagcagaatatgaccgtctaaagcagcagcacgaacataaaggcctgtccccactgccgtcccctcctgaaatgatgcccacctctccccagagtccccgggatgctgagctcattgctgaggccaagctactgcgtcaacacaaaggccgcctggaagccaggatgcaaatcctggaagaccacaataaacagctggagtcacagttacacaggctaaggcagctgctggagcaaccccaggcagaggccaaagtgaatggcacaacggtgtcctctccttctacctctctacagaggtccgacagcagtcagcctatgctgctccgagtggttggcagtcaaacttcggactccatgggtgaggaagatcttctcagtcctccccaggacacaagcacagggttagaggaggtgatggagcaactcaacaactccttccctagttcaagaggaagaaatacccctggaaagccaatgagagaggacacaatgtaggaagtcttttccacatggcagatgatttgggcagagcgatggagtccttagtatcagtcatgacagatgaagaaggagcagaataaatgttttacaactcctgattcccgcatggtttttataatattcatacaacaaagaggattagacagtaagagtttacaagaaataaatctatatttttgtgaagggtagtggtattatactgtagatttcagtagtttctaagtctgttattgttttgttaacaatggcaggttttacacgtctatgcaattgtacaaaaaagttataagaaaactacatgtaaaatcttgatagctaaataacttgccatttctttatatggaacgcattttgggttgtttaaaaatttataacagttataaagaaagattgtaaactaaagtgtgctttataaaaaaaagttgtttataaaaacccctaaaaacaaaacaaacacacacacacacacatacacacacacacacaaaactttgaggcagcgcattgttttgcatccttttggcgtgatatccatatgaaattcatggctttttctttttttgcatattaaagataagacttcctctaccaccacaccaaatgactactacacactgctcatttgagaactgtcagctgagtggggcaggcttgagttttcatttcatatatctatatgtctataagtatataaatactatagttatatagataaagagatacgaatttctatagactgactttttccattttttaaatgttcatgtcacatcctaatagaaagaaattacttctagtcagtcatccaggcttacctgcttggtctagaatggatttttcccggagccggaagccaggaggaaactacaccacactaaaacattgtctacagctccagatgtttctcattttaaacaactttccactgacaacgaaagtaaagtaaagtattggatttttttaaagggaacatgtgaatgaatacacaggacttattatatcagagtgagtaatcggttggttggttgattgattgattgattgatacattcagcttcctgctgctagcaatgccacgatttagatttaatgatgcttcagtggaaatcaatcagaaggtattctgaccttgtgaacatcagaaggtattttttaactcccaagcagtagcaggacgatgatagggctggagggctatggattcccagcccatccctgtgaaggagtaggccactctttaagtgaaggattggatgattgttcataatacataaagttctctgtaattacaactaaattattatgccctcttctcacagtcaaaaggaactgggtggtttggtttttgttgcttttttagatttattgtcccatgtgggatgagtttttaaatgccacaagacataatttaaaataaataaactttgggaaaaggtgtaaaacagtagccccatcacatttgtgatactgacaggtatcaacccagaagcccatgaactgtgtttccatcctttgcatttctctgcgagtagttccacacaggtttgtaagtaagtaagaaagaaggcaaattgattcaaatgttacaaaaaaacccttcttggtggattagacaggttaaatatataaacaaacaaacaaaaattgctcaaaaaagaggagaaaagctcaagaggaaaagctaaggactggtaggaaaaagctttactctttcatgccattttatttctttttgatttttaaatcattcattcaatagataccaccgtgtgacctataattttgcaaatctgttacctctgacatcaagtgtaattagcttttggagagtgggctgacatcaagtgtaattagcttttggagagtgggttttgtccattattaataattaattaattaacatcaaacacggcttctcatgctatttctacctcactttggttttggggtgttcctgataattgtgcacacctgagttcacagcttcaccacttgtccattgcgttattttctttttcctttataattctttctttttccttcataattttcaaaagaaaacccaaagctctaaggtaacaaattaccaaattacatgaagatttggtttttgtcttgcatttttttcctttatgtgacgctggaccttttctttacccaaggatttttaaaactcagatttaaaacaaggggttactttacatcctactaagaagtttaagtaagtaagtttcattctaaaatcagaggtaaatagagtgcataaataattttgttttaatctttttgtttttcttttagacacattagctctggagtgagtctgtcataatatttgaacaaaaattgagagctttattgctgcattttaagcataattaatttggacattatttcgtgttgtgttctttataaccaccaagtattaaactgtaaatcataatgtaactgaagcataaacatcacatggcatgttttgtcattgttttcaggtactgagttcttacttgagtatcataatatattgtgttttaacaccaacactgtaacatttacgaattatttttttaaacttcagttttactgcattttcacaacatatcagacttcaccaaatatatgccttactattgtattatagtactgctttactgtgtatctcaataaagcacgcagttatgttac

SEQ ID NO: 142785 - DNA, 4552 bp, Artificial Sequence
  derived and/or modified sequence
actttcggggagcccggcggctctgggaagctcactcctccactcgtacccacactcgaccgcggagcccttgcagccatgagggaacagctcaaaggccacgagactcaaacaacttgctgggaccatcccaaaatgacagagctctaccagtctttagctgacctgaataatgtcagattctcagcttataggactgccatgaaactccgaagactgcagaaggccctttgcttggatctcttgagcctgtcagctgcatgtgatgccttggaccagcacaacctcaagcaaaatgaccagcccatggatatcctgcagattattaattgtttgaccactatttatgaccgcctggagcaagagcacaacaatttggtcaacgtccctctctgcgtggatatgtgtctgaactggctgctgaatgtttatgatacgggacgaacagggaggatccgtgtcctgtcttttaaaactggcatcatttccctgtgtaaagcacatttggaagacaagtacagataccttttcaagcaagtggcaagttcaacaggattttgtgaccagcgcaggctgggcctccttctgcatgattctatccaaattccaagacagttgggtgaagttgcatcctttgggggcagtaacattgagccaagtgtccggagctgcttccaatttgctaataataagccagagatcgaagcggccctcttcctagactggatgagactggaaccccagtccatggtgtggctgcccgtcctgcacagagtggctgctgcagaaactgccaagcatcaggccaaatgtaacatctgcaaagagtgtccaatcattggattcaggtacaggagtctaaagcactttaattatgacatctgccaaagctgctttttttctggtcgagttgcaaaaggccataaaatgcactatcccatggtggaatattgcactccgactacatcaggagaagatgttcgagactttgccaaggtactaaaaaacaaatttcgaaccaaaaggtattttgcgaagcatccccgaatgggctacctgccagtgcagactgtcttagagggggacaacatggaaacgcctgcctcgtcccctcagctttcacacgatgatactcattcacgcattgaacattatgctagcaggctagcagaaatggaaaacagcaatggatcttatctaaatgatagcatctctcctaatgagagcatagatgatgaacatttgttaatccagcattactgccaaagtttgaaccaggactcccccctgagccagcctcgtagtcctgcccagatcttgatttccttagagagtgaggaaagaggggagctagagagaatcctagcagatcttgaggaagaaaacaggaatctgcaagcagaatatgaccgtctaaagcagcagcacgaacataaaggcctgtccccactgccgtcccctcctgaaatgatgcccacctctccccagagtccccgggatgctgagctcattgctgaggccaagctactgcgtcaacacaaaggccgcctggaagccaggatgcaaatcctggaagaccacaataaacagctggagtcacagttacacaggctaaggcagctgctggagcaaccccaggcagaggccaaagtgaatggcacaacggtgtcctctccttctacctctctacagaggtccgacagcagtcagcctatgctgctccgagtggttggcagtcaaacttcggactccatgggtgaggaagatcttctcagtcctccccaggacacaagcacagggttagaggaggtgatggagcaactcaacaactccttccctagttcaagaggacacaatgtaggaagtcttttccacatggcagatgatttgggcagagcgatggagtccttagtatcagtcatgacagatgaagaaggagcagaataaatgttttacaactcctgattcccgcatggtttttataatattcatacaacaaagaggattagacagtaagagtttacaagaaataaatctatatttttgtgaagggtagtggtattatactgtagatttcagtagtttctaagtctgttattgttttgttaacaatggcaggttttacacgtctatgcaattgtacaaaaaagttataagaaaactacatgtaaaatcttgatagctaaataacttgccatttctttatatggaacgcattttgggttgtttaaaaatttataacagttataaagaaagattgtaaactaaagtgtgctttataaaaaaaagttgtttataaaaacccctaaaaacaaaacaaacacacacacacacacatacacacacacacacaaaactttgaggcagcgcattgttttgcatccttttggcgtgatatccatatgaaattcatggctttttctttttttgcatattaaagataagacttcctctaccaccacaccaaatgactactacacactgctcatttgagaactgtcagctgagtggggcaggcttgagttttcatttcatatatctatatgtctataagtatataaatactatagttatatagataaagagatacgaatttctatagactgactttttccattttttaaatgttcatgtcacatcctaatagaaagaaattacttctagtcagtcatccaggcttacctgcttggtctagaatggatttttcccggagccggaagccaggaggaaactacaccacactaaaacattgtctacagctccagatgtttctcattttaaacaactttccactgacaacgaaagtaaagtaaagtattggatttttttaaagggaacatgtgaatgaatacacaggacttattatatcagagtgagtaatcggttggttggttgattgattgattgattgatacattcagcttcctgctgctagcaatgccacgatttagatttaatgatgcttcagtggaaatcaatcagaaggtattctgaccttgtgaacatcagaaggtattttttaactcccaagcagtagcaggacgatgatagggctggagggctatggattcccagcccatccctgtgaaggagtaggccactctttaagtgaaggattggatgattgttcataatacataaagttctctgtaattacaactaaattattatgccctcttctcacagtcaaaaggaactgggtggtttggtttttgttgcttttttagatttattgtcccatgtgggatgagtttttaaatgccacaagacataatttaaaataaataaactttgggaaaaggtgtaaaacagtagccccatcacatttgtgatactgacaggtatcaacccagaagcccatgaactgtgtttccatcctttgcatttctctgcgagtagttccacacaggtttgtaagtaagtaagaaagaaggcaaattgattcaaatgttacaaaaaaacccttcttggtggattagacaggttaaatatataaacaaacaaacaaaaattgctcaaaaaagaggagaaaagctcaagaggaaaagctaaggactggtaggaaaaagctttactctttcatgccattttatttctttttgatttttaaatcattcattcaatagataccaccgtgtgacctataattttgcaaatctgttacctctgacatcaagtgtaattagcttttggagagtgggctgacatcaagtgtaattagcttttggagagtgggttttgtccattattaataattaattaattaacatcaaacacggcttctcatgctatttctacctcactttggttttggggtgttcctgataattgtgcacacctgagttcacagcttcaccacttgtccattgcgttattttctttttcctttataattctttctttttccttcataattttcaaaagaaaacccaaagctctaaggtaacaaattaccaaattacatgaagatttggtttttgtcttgcatttttttcctttatgtgacgctggaccttttctttacccaaggatttttaaaactcagatttaaaacaaggggttactttacatcctactaagaagtttaagtaagtaagtttcattctaaaatcagaggtaaatagagtgcataaataattttgttttaatctttttgtttttcttttagacacattagctctggagtgagtctgtcataatatttgaacaaaaattgagagctttattgctgcattttaagcataattaatttggacattatttcgtgttgtgttctttataaccaccaagtattaaactgtaaatcataatgtaactgaagcataaacatcacatggcatgttttgtcattgttttcaggtactgagttcttacttgagtatcataatatattgtgttttaacaccaacactgtaacatttacgaattatttttttaaacttcagttttactgcattttcacaacatatcagacttcaccaaatatatgccttactattgtattatagtactgctttactgtgtatctcaataaagcacgcagttatgttac

SEQ ID NO: 142786 - DNA, 1869 bp, Artificial Sequence
  derived and/or modified sequence
atgcgggagcagctgaagggtcacgagactcaaacaacgtgttgggatcacccaaagatgactgagttgtaccagagtcttgcggatctcaacaacgtgcgattttcagcctataggactgctatgaaactgagacgcttacagaaagccctgtgcctggacctcttatctttgagcgctgcttgtgacgctctcgaccaacacaatctaaaacaaaacgaccagcccatggatattctgcagatcatcaactgtctgacaaccatatatgaccggttggagcaggagcataacaacctggtcaatgttccgctgtgcgtcgacatgtgtttgaattggctcttgaatgtgtacgacaccggtcggacaggacgcattcgggttctctcttttaagacaggcattatctctttgtgcaaggcgcacttggaggacaaataccggtacctctttaaacaggtggcttcttctactggcttctgcgatcagcggaggttgggcctgctgctgcatgacagtattcagatccctcgacagctaggggaagtagcatcattcgggggcagtaacatcgagccttctgtgaggagctgcttccagttcgccaataacaagcccgagattgaggccgctctgttcctggactggatgcggcttgagccccagtcaatggtttggctcccagttctccatcgcgttgccgccgcagagacggctaagcaccaagcaaagtgcaatatctgtaaagaatgcccaatcatcggatttagatacagatcgctcaagcacttcaattacgatatctgtcaatcctgcttcttttcaggtagggttgccaaaggccataagatgcactaccctatggtagaatattgcacccccaccacgtctggagaagacgtgagggacttcgccaaagttctgaaaaacaaatttcgaaccaagcgttattttgccaagcacccccgtatgggctaccttcccgtccagaccgtgctggaaggtgataatatggagaccccagcatcatcaccccagctttcccacgacgacactcatagccgaatagagcactacgcctctaggttggccgagatggaaaactccaacggatcttatcttaacgactccatttcgccaaacgagagcatcgatgacgaacatttgctgattcagcactactgccaatccttgaatcaggactccccactctcgcagcccagatcgcctgcccaaattctgatctcattggaatctgaggaacgtggcgagttggaacgaattttggcagacttagaggaagagaacaggaatctgcaggccgagtatgatcggctaaagcagcagcatgagcataagggcctaagtcccttacctagcccccccgagatgatgccgacttccccccagtctccacgggatgccgaattgatcgccgaggctaaactacttagacagcataaggggcggctggaggcccggatgcagatccttgaggaccacaacaagcagctggaaagccagttgcatagactcagacaactcctcgagcaaccacaagctgaggctaaggtgaatggtactacagtgtctagcccatctaccagcctacagaggagcgacagtagccagccgatgctcctgcgcgttgtgggctcccaaacttccgattccatgggtgaggaagatctgctctcaccacctcaggatacctccacggggctggaggaagtgatggaacagctgaataattccttccctagcagtcgtgggcacaacgtgggaagtcttttccacatggctgatgatctgggacgagctatggaatctttggtgtctgtgatgaccgacgaggagggggccgagtag

SEQ ID NO: 142787 - DNA, 1869 bp, Artificial Sequence
  derived and/or modified sequence
atgagggagcagctgaagggccacgagacccagaccacctgctgggaccaccccaagatgacagagctgtaccagagcctggccgacctgaacaacgtgcgcttcagcgcctacagaacagccatgaagctgcggcggctgcagaaggccctgtgcctggacctgctgagcctgtctgctgcctgtgatgccctggaccagcacaacctgaagcagaatgaccagcccatggacatcctgcagatcatcaactgcctgaccaccatctatgaccggctggagcaggagcacaacaacctggtgaatgtgcccctgtgtgtggacatgtgcctgaactggctgctgaatgtgtatgacaccggccgcacaggccgcatccgggtgctgtccttcaagacaggcatcatcagcctgtgcaaggcccacctggaggacaagtaccgctacctgttcaagcaggtggccagcagcacaggcttctgtgaccagaggcggctgggcctgctgctgcatgacagcatccagatcccccggcagctgggggaggtggccagctttggaggcagcaacatcgagcccagcgtgcgcagctgcttccagtttgccaacaacaagccagaaattgaggccgccctcttcctggactggatgaggctggagccccagagcatggtgtggctgcctgtgctgcaccgggtggccgctgctgagacagccaagcaccaggccaagtgcaacatctgcaaggagtgccccatcatcggcttccgctaccgcagcctgaagcacttcaactatgacatctgccagagctgcttcttcagcggccgggtggccaagggccacaagatgcactaccccatggtggagtactgcacccccaccaccagcggagaagatgtgcgggactttgccaaggtgctgaagaacaagttccgcaccaagcgctactttgccaagcaccccaggatgggctacctgcctgtgcagacagtgctggagggggacaacatggagaccccagccagcagcccccagctgagccatgatgacacccacagccgcatcgagcactacgccagccggctggccgagatggagaacagcaatggcagctacctgaatgacagcatcagccccaatgaaagcattgatgatgagcacctgctgatccagcactactgccagagcctgaaccaggacagccccctgagccagcccaggagccctgcccagatcctgatcagcctggagagcgaggagcggggggagctggagcgcatcctggccgacctggaggaggagaacagaaacctgcaggccgagtatgaccggctgaagcagcagcacgagcacaagggcctgagccccctgcccagccccccagagatgatgcccaccagcccccagagccccagagatgctgagctgattgctgaggccaagctgctgcggcagcacaagggccgcctggaggccaggatgcagatcctggaggaccacaacaagcagctggagagccagctgcaccggctgcggcagctgctggagcagccccaggccgaggccaaggtgaatggcaccaccgtgagcagccccagcaccagcctgcagaggagtgacagcagccagcccatgctgctgcgggtggtgggcagccagaccagtgacagcatgggagaggaggacctgctgagccccccccaggacaccagcacaggcctggaggaggtgatggagcagctgaacaacagcttccccagcagccggggccacaacgtgggcagcctcttccacatggctgatgacctgggccgggccatggagagcctggtgtctgtgatgacagatgaggagggcgctgagtag

SEQ ID NO: 142788 - DNA, 1869 bp, Artificial Sequence
  derived and/or modified sequence
atgcgggagcagctgaagggccacgagacccagaccacctgctgggaccacccaaagatgacagagctataccaatctttggcagatttaaacaacgtgagattcagtgcctacaggacagcaatgaagctgagacggctccaaaaagccctttgcttggacttgctttccttgtccgccgcctgtgacgccttggatcagcataatcttaagcagaatgatcagccaatggacatactacagattattaactgtctgactaccatttatgacaggctcgagcaggaacacaacaacttggttaatgttcctctgtgcgtggacatgtgcttgaactggctgctcaatgtctacgacacagggcggaccggccgcattcgggtcctaagcttcaagaccggcatcatcagcttgtgtaaggcccacctggaagacaaatatcgctatctgtttaagcaggtcgcctcctctacgggcttctgcgaccagcgccgcttaggtctcctactccacgattcaatacaaatcccgcgacagctgggcgaggtcgcctcctttggcggctcaaatatagaaccaagcgttcgcagttgttttcagttcgccaataataaacccgaaatagaagctgctctgttcctcgattggatgcgtctggaacctcagtctatggtttggctaccagtgctccacagagtcgcagcagccgagacggccaaacatcaggccaagtgcaatatctgcaaggaatgcccaatcattggtttcagatacaggtcactgaaacattttaactacgatatttgtcaaagttgtttctttagtgggcgcgtcgccaaagggcacaagatgcactaccctatggtggagtactgcactccaacaacttccggggaagacgtgagggattttgccaaagtcctgaagaacaaatttcggactaagaggtatttcgccaagcatccacgcatgggctatttaccggtgcaaacagtcttggagggtgataacatggagacacccgctagtagtccccagctatcgcatgacgatacccattctaggatagagcactacgcttctcgactcgcagaaatggagaacagtaatgggtcctatctaaacgattctatctccccgaacgaatccatagacgacgagcacctccttatccagcattattgccaatctttgaatcaggactctcccctgtctcagccgaggtccccagcccagatacttattagcttggagtctgaagaacggggcgaactggaaaggatccttgcggatctcgaggaagaaaacagaaacttacaagccgaatatgaccgactcaagcagcagcatgagcacaagggtttgtcaccactgccctctcccccagagatgatgcccacaagtccacagtctcctcgcgatgccgagctgatcgccgaagccaagctcctcaggcagcacaagggccgcctcgaggcaagaatgcagatactggaagaccataataaacagttggagtcacagttacatcgtctaaggcaattactggagcagccacaggccgaggccaaggttaatggaaccactgtgagcagtccttctactagcctacagcgatcagactcgagccagcccatgttgctgagagtcgtcggaagccaaactagcgacagcatgggagaggaagaccttctatctcctcctcaggacacgtcgactggccttgaggaagtgatggaacagctcaacaactcattcccctcaagccggggacacaacgtgggcagcctgttccacatggccgacgatttagggcgagccatggagtccctggtatctgtgatgactgacgaggaaggggcggaatag

SEQ ID NO: 142789 - DNA, 1869 bp, Artificial Sequence
  derived and/or modified sequence
atgcgagagcagttgaagggtcatgagacccagactacttgttgggatcacccaaagatgacggagttatatcagtccctggcggatttgaacaacgtgcggttcagtgcctatcgcactgcaatgaagctgagaagacttcaaaaagcactctgtctggacctgctgtctctgagtgccgcatgcgatgccctcgaccaacacaatctcaagcaaaacgaccagccgatggatatcctgcagatcatcaactgcctgactaccatctacgacagactggagcaagaacacaacaatctggtgaatgtgcccctgtgtgtggatatgtgtctgaattggctgctcaatgtttacgataccggccgaaccgggagaattagggtgctgagcttcaaaacaggcatcatttccctgtgcaaagctcacctggaagataagtataggtaccttttcaaacaagtggcctcttccacaggattctgtgaccagcgtaggctgggattgttactccacgatagtattcaaattccacgtcagctgggggaagtcgcctcttttggtggctccaatatagagccatcagtgcgatcatgttttcaatttgccaacaataagcctgagatagaggctgctcttttcttggactggatgagattagaaccacaatctatggtctggctgcccgttcttcatcgcgttgcagccgctgaaaccgctaagcatcaggccaagtgtaatatctgcaaagagtgcccgattattgggttcaggtaccggagtttaaaacactttaattacgatatctgtcaaagctgtttcttctccggccgagtggcgaaaggtcataagatgcattaccccatggtggaatactgtacacccaccacttcgggcgaggacgtgagagattttgcaaaggttctgaagaataagtttcggaccaaaagatatttcgccaagcaccctcggatggggtatcttccagtacagaccgtgttggaaggtgacaacatggaaactcctgcctcttctcctcagctgtctcacgacgatacccactcccggattgagcactacgcttctcgcctcgcggaaatggaaaactcaaatgggagctatctgaacgactcaatcagtcccaacgagagcatagatgacgagcatctgctgatccagcattactgtcagtctttaaaccaggatagcccactctcccagccccgatctcccgctcaaattctgatttccttggaatcagaagaacggggagagctagaacgcatactggccgacttagaggaagagaatcgaaacctgcaggctgaatacgatcgattgaagcagcagcacgagcacaagggcctgagcccactacccagcccgcctgaaatgatgcctacttcaccccagtcccctagagatgctgagctcatcgcagaagctaagttattgagacagcataagggcaggctcgaagctaggatgcagatactggaagaccataataaacagctcgaaagccagctgcatcgtctcaggcaacttctggaacagccccaggccgaggctaaggtgaatgggaccacagtgagcagccccagcacctctctgcagagatccgactccagtcagcccatgctgttacgggtagtgggcagccagacctccgactccatgggagaggaggacctgctgagcccacctcaggatactagcacaggactcgaagaggtgatggagcaactgaacaatagctttcccagttctcgaggccataacgtgggatccctgtttcatatggctgacgacctggggagggccatggagtctctcgtctcagtgatgaccgatgaagaaggggctgaatag

SEQ ID NO: 142790 - DNA, 1866 bp, Artificial Sequence
  derived and/or modified sequence
atgcgcgagcagctgaagggccacgagacccagaccacctgctgggaccaccccaagatgaccgagctgtaccagagcctggccgacctgaacaacgtgcgcttcagcgcctaccgcaccgccatgaagctgcgccgcctgcagaaggccctgtgcctggacctgctgagcctgagcgccgcctgcgacgccctggaccagcacaacctgaagcagaacgaccagcccatggacatcctgcagatcatcaactgcctgaccaccatctacgaccgcctggagcaggagcacaacaacctggtgaacgtgcccctgtgcgtggacatgtgcctgaactggctgctgaacgtgtacgacaccggccgcaccggccgcatccgcgtgctgagcttcaagaccggcatcatcagcctgtgcaaggcccacctggaggacaagtaccgctacctgttcaagcaggtggccagcagcaccggcttctgcgaccagcgccgcctgggcctgctgctgcacgacagcatccagatcccccgccagctgggcgaggtggccagcttcggcggcagcaacatcgagcccagcgtgcgcagctgcttccagttcgccaacaacaagcccgagatcgaggccgccctgttcctggactggatgcgcctggagccccagagcatggtgtggctgcccgtgctgcaccgcgtggccgccgccgagaccgccaagcaccaggccaagtgcaacatctgcaaggagtgccccatcatcggcttccgctaccgcagcctgaagcacttcaactacgacatctgccagagctgcttcttcagcggccgcgtggccaagggccacaagatgcactaccccatggtggagtactgcacccccaccaccagcggcgaggacgtgcgcgacttcgccaaggtgctgaagaacaagttccgcaccaagcgctacttcgccaagcacccccgcatgggctacctgcccgtgcagaccgtgctggagggcgacaacatggagacccccgccagcagcccccagctgagccacgacgacacccacagccgcatcgagcactacgccagccgcctggccgagatggagaacagcaacggcagctacctgaacgacagcatcagccccaacgagagcatcgacgacgagcacctgctgatccagcactactgccagagcctgaaccaggacagccccctgagccagccccgcagccccgcccagatcctgatcagcctggagagcgaggagcgcggcgagctggagcgcatcctggccgacctggaggaggagaaccgcaacctgcaggccgagtacgaccgcctgaagcagcagcacgagcacaagggcctgagccccctgcccagcccccccgagatgatgcccaccagcccccagagcccccgcgacgccgagctgatcgccgaggccaagctgctgcgccagcacaagggccgcctggaggcccgcatgcagatcctggaggaccacaacaagcagctggagagccagctgcaccgcctgcgccagctgctggagcagccccaggccgaggccaaggtgaacggcaccaccgtgagcagccccagcaccagcctgcagcgcagcgacagcagccagcccatgctgctgcgcgtggtgggcagccagaccagcgacagcatgggcgaggaggacctgctgagccccccccaggacaccagcaccggcctggaggaggtgatggagcagctgaacaacagcttccccagcagccgcggccacaacgtgggcagcctgttccacatggccgacgacctgggccgcgccatggagagcctggtgagcgtgatgaccgacgaggagggcgccgag

SEQ ID NO: 142791 - DNA, 1869 bp, Artificial Sequence
  derived and/or modified sequence
atgagagagcagctgaagggccacgagacccagaccacctgctgggaccaccccaagatgaccgagctgtaccagagcctggccgacctgaacaacgtgagattcagcgcctacagaaccgccatgaagctgagaagactgcagaaggccctgtgcctggacctgctgagcctgagcgccgcctgcgacgccctggaccagcacaacctgaagcagaacgaccagcccatggacatcctgcagatcatcaactgcctgaccaccatctacgacagactggagcaggagcacaacaacctggtgaacgtgcccctgtgcgtggacatgtgcctgaactggctgctgaacgtgtacgacaccggcagaaccggcagaatcagagtgctgagcttcaagaccggcatcatcagcctgtgcaaggcccacctggaggacaagtacagatacctgttcaagcaggtggccagcagcaccggcttctgcgaccagagaagactgggcctgctgctgcacgacagcatccagatccccagacagctgggcgaggtggccagcttcggcggcagcaacatcgagcccagcgtgagaagctgcttccagttcgccaacaacaagcccgagatcgaggccgccctgttcctggactggatgagactggagccccagagcatggtgtggctgcccgtgctgcacagagtggccgccgccgagaccgccaagcaccaggccaagtgcaacatctgcaaggagtgccccatcatcggcttcagatacagaagcctgaagcacttcaactacgacatctgccagagctgcttcttcagcggcagagtggccaagggccacaagatgcactaccccatggtggagtactgcacccccaccaccagcggcgaggacgtgagagacttcgccaaggtgctgaagaacaagttcagaaccaagagatacttcgccaagcaccccagaatgggctacctgcccgtgcagaccgtgctggagggcgacaacatggagacccccgccagcagcccccagctgagccacgacgacacccacagcagaatcgagcactacgccagcagactggccgagatggagaacagcaacggcagctacctgaacgacagcatcagccccaacgagagcatcgacgacgagcacctgctgatccagcactactgccagagcctgaaccaggacagccccctgagccagcccagaagccccgcccagatcctgatcagcctggagagcgaggagagaggcgagctggagagaatcctggccgacctggaggaggagaacagaaacctgcaggccgagtacgacagactgaagcagcagcacgagcacaagggcctgagccccctgcccagcccccccgagatgatgcccaccagcccccagagccccagagacgccgagctgatcgccgaggccaagctgctgagacagcacaagggcagactggaggccagaatgcagatcctggaggaccacaacaagcagctggagagccagctgcacagactgagacagctgctggagcagccccaggccgaggccaaggtgaacggcaccaccgtgagcagccccagcaccagcctgcagagaagcgacagcagccagcccatgctgctgagagtggtgggcagccagaccagcgacagcatgggcgaggaggacctgctgagccccccccaggacaccagcaccggcctggaggaggtgatggagcagctgaacaacagcttccccagcagcagaggccacaacgtgggcagcctgttccacatggccgacgacctgggcagagccatggagagcctggtgagcgtgatgaccgacgaggagggcgccgagtag

SEQ ID NO: 142792 - DNA, 2224 bp, Artificial Sequence
  derived and/or modified sequence
actttcggggagcccggcggctctgggaagctcactcctccactcgtacccacactcgaccgcggagcccttgcagccatgagggaacagctcaaaggccacgagactcaaacaacttgctgggaccatcccaaaatgacagagctctaccagtctttagctgacctgaataatgtcagattctcagcttataggactgccatgaaactccgaagactgcagaaggccctttgcttggatctcttgagcctgtcagctgcatgtgatgccttggaccagcacaacctcaagcaaaatgaccagcccatggatatcctgcagattattaattgtttgaccactatttatgaccgcctggagcaagagcacaacaatttggtcaacgtccctctctgcgtggatatgtgtctgaactggctgctgaatgtttatgatacgggacgaacagggaggatccgtgtcctgtcttttaaaactggcatcatttccctgtgtaaagcacatttggaagacaagtacagataccttttcaagcaagtggcaagttcaacaggattttgtgaccagcgcaggctgggcctccttctgcatgattctatccaaattccaagacagttgggtgaagttgcatcctttgggggcagtaacattgagccaagtgtccggagctgcttccaatttgctaataataagccagagatcgaagcggccctcttcctagactggatgagactggaaccccagtccatggtgtggctgcccgtcctgcacagagtggctgctgcagaaactgccaagcatcaggccaaatgtaacatctgcaaagagtgtccaatcattggattcaggtacaggagtctaaagcactttaattatgacatctgccaaagctgctttttttctggtcgagttgcaaaaggccataaaatgcactatcccatggtggaatattgcactccgactacatcaggagaagatgttcgagactttgccaaggtactaaaaaacaaatttcgaaccaaaaggtattttgcgaagcatccccgaatgggctacctgccagtgcagactgtcttagagggggacaacatggaaacgcctgcctcgtcccctcagctttcacacgatgatactcattcacgcattgaacattatgctagcaggctagcagaaatggaaaacagcaatggatcttatctaaatgatagcatctctcctaatgagagcatagatgatgaacatttgttaatccagcattactgccaaagtttgaaccaggactcccccctgagccagcctcgtagtcctgcccagatcttgatttccttagagagtgaggaaagaggggagctagagagaatcctagcagatcttgaggaagaaaacaggaatctgcaagcagaatatgaccgtctaaagcagcagcacgaacataaaggcctgtccccactgccgtcccctcctgaaatgatgcccacctctccccagagtccccgggatgctgagctcattgctgaggccaagctactgcgtcaacacaaaggccgcctggaagccaggatgcaaatcctggaagaccacaataaacagctggagtcacagttacacaggctaaggcagctgctggagcaaccccaggcagaggccaaagtgaatggcacaacggtgtcctctccttctacctctctacagaggtccgacagcagtcagcctatgctgctccgagtggttggcagtcaaacttcggactccatgggtgaggaagatcttctcagtcctccccaggacacaagcacagggttagaggaggtgatggagcaactcaacaactccttccctagttcaagaggacacaatgtaggaagtcttttccacatggcagatgatttgggcagagcgatggagtccttagtatcagtcatgacagatgaagaaggagcagaataaatgttttacaactcctgattcccgcatggtttttataatattcatacaacaaagaggattagacagtaagagtttacaagaaataaatctatatttttgtgaagggtagtggtattatactgtagatttcagtagtttctaagtctgttattgttttgttaacaatggcaggttttacacgtctatgcaattgtacaaaaaagttataagaaaactacatgtaaaatcttgatagctaaataacttgccatttctttatatggaacgcattttgggt

SEQ ID NO: 142793 - DNA, 1571 bp, Artificial Sequence
  derived and/or modified sequence
actttcggggagcccggcggctctgggaagctcactcctccactcgtacccacactcgaccgcggagcccttgcagccatgagggaacagctcaaaggccacgagactcaaacaacttgctgggaccatcccaaaatgacagagctctaccagtctttagctgacctgaataatgtcagattctcagcttataggactgccatgaaactccgaagactgcagaaggccctttgcttggatctcttgagcctgtcagctgcatgtgatgccttggaccagcacaacctcaagcaaaatgaccagcccatggatatcctgcagattattaattgtttgaccactatttatgaccgcctggagcaagagcacaacaatttggtcaacgtccctctctgcgtggatatgtgtctgaactggctgctgaatgtttatgatacgggacgaacagggaggatccgtgtcctgtcttttaaaactggcatcatttccctgtgtaaagcacatttggaagacaagtacagataccttttcaagcaagtggcaagttcaacaggattttgtgaccagcgcaggctgggcctccttctgcatgattctatccaaattccaagacagttgggtgaagttgcatcctttgggggcagtaacattgagccaagtgtccggagctgcttccaatttgctaataataagccagagatcgaagcggccctcttcctagactggatgagactggaaccccagtccatggtgtggctgcccgtcctgcacagagtggctgctgcagaaactgccaagcatcaggccaaatgtaacatctgcaaagagtgtccaatcattggattcaggtacaggagtctaaagcactttaattatgacatctgccaaagctgctttttttctggtcgagttgcaaaaggccataaaatgcactatcccatggtggaatattgcactccgactacatcaggagaagatgttcgagactttgccaaggtactaaaaaacaaatttcgaaccaaaaggtattttgcgaagcatccccgaatgggctacctgccagtgcagactgtcttagagggggacaacatggaaacgtgagtagtagcaaaagcagaacacactcttgtttgatgtatatttgaactcctctcagctgaacaccctccttcactcccaaatgcaaacagtctcttctatttctttctttttatttacattagctgaaaagagaaaaataagctgatgtccagttgccactttcccacgtcacttgacaatttctttttccaaaagttaaactttatctcacagggggaaaaaaaaaaaaaaaccacaacacaatacagccactaattgccttacaagccttataagaaatatgggactgtttacaaatgagtgattccagtatttcattttgattttcctctctcacaaatcagtaaatgtgtgtctttttgtatctcattgtgtggtcatatctagtcacttgtttctactcaaaagaaaatatagtcacaggaaactacttcacagtaagtagtaatgattctcaagatcaaagggga

SEQ ID NO: 142794 - DNA, 3432 bp, Artificial Sequence
  derived and/or modified sequence
atgctgtggtgggaagaggtcgaagattgttacgagagggaagatgtgcagaagaaaactttcactaagtgggtcaatgcccaattctccaaattcgggaagcagcacatcgaaaatctcttctccgacttgcaggacggacggcggctcctggaccttctcgaaggcctgaccggccagaagctgccaaaggaaaagggttcaacgcgggtacatgcgctgaataatgtgaacaaggcattgcgcgtgctgcagaataacaacgtggacctggtgaacattggatccaccgatatcgtggatggaaaccacaagctgactctcggactgatctggaacattatcctgcattggcaggtgaagaacgtcatgaaaaacatcatggccggactgcagcagaccaactcagaaaagatcttgctctcctgggttcggcaatccacccgcaattaccctcaggtgaacgtcatcaacttcactacttcgtggtcggacgggcttgcccttaatgccctcatccactcccaccgtcctgacctgttcgattggaattcagtggtgtgtcaacagtccgccactcaacggctggaacatgcttttaacattgcccgctaccagttgggaatcgagaaactgcttgaccccgaggacgtggatactacttaccccgacaaaaagtcgatcctcatgtacataacctctctgtttcaggttttgccccagcaggtgtcgatcgaagcaatccaagaagtcgaaatgctccctagacctccaaaagtgacgaaggaagagcactttcaactgcatcaccagatgcactactcacaacagatcacggtgtcgttggcccagggatacgaacggaccagtagcccgaagccaaggttcaagagctatgcgtacactcaggcggcttacgtgaccacgtccgacccgaccagatcgcccttcccgtcacaacatctcgaagcaccggaggacaagtccttcggtagcagcctgatggaatccgaagtgaacctcgaccggtatcagaccgccctggaagaagtcctgtcatggctcctgtcggccgaagataccctgcaggcacaaggagaaatctcgaatgacgtggaagttgtgaaagaccagtttcacactcatgaaggttacatgatggacctgaccgcacatcagggacgcgtgggaaatatcctccagctcggatccaaactgatcgggaccggaaagctgagcgaagatgaggaaacggaggtccaggaacagatgaacctgctgaactcgcggtgggagtgtctcagggtggcctccatggagaagcaatctaatctccacagagagatttcatatgtcccgtcgacctacctgactgaaatcacccacgtgtcacaagcgctgctcgaagtggaacagttgctcaacgcccctgacctgtgcgccaaggatttcgaggacctgttcaagcaggaggagtcactcaagaacatcaaggacagcctgcagcagtcctcaggacggatcgacatcatccactcgaaaaagaccgccgccctccagagcgctaccccggtcgagcgggtgaagctccaagaggcgctctcgcagctcgatttccagtgggaaaaggtgaataagatgtacaaggaccggcagggccgattcgataggtcggtcgagaagtggcggcgcttccattacgacattaagatcttcaaccaatggctgacggaagccgagcagttcttgagaaaaacccaaatccctgaaaactgggaacacgccaagtacaagtggtacctcaaagagctgcaggatggcatcggccaaagacaaaccgtggtgcggaccctcaacgctaccggcgaggaaatcatccagcagagctccaagactgatgcctccatcctgcaggagaaactgggctcgctgaatcttcgttggcaggaagtgtgcaaacagcttagcgatcgtaagaaacggcttgaagagactctggagagactgcaggagctgcaggaggctaccgatgagctcgatctgaagctgaggcaggctgaggtgatcaagggatcatggcaaccggtgggcgacctgctgatcgattcgttgcaggatcatctcgagaaggtgaaggccctgcgcggcgagatcgccccgctcaaggaaaacgtgagccacgtgaacgatctcgccagacaactcactactctcggtatccaactgtcaccatacaacctgtccaccctcgaggacctgaatactcgatggaagctgctccaagtcgcagtcgaagatcgcgtccgccaactgcacgaggcccaccgggacttcggccccgcttcacaacacttcctgtccacttcggtgcaaggaccttgggagcgcgcaatctcacccaacaaggtcccgtactacatcaatcacgagactcaaaccacctgttgggaccacccaaagatgaccgagctgtaccagtcgctcgccgacctcaacaacgtcagattttccgcctatcgcaccgccatgaaactgcgccggctccagaaagccctgtgtctcgacctcctgtcgctttccgcggcgtgtgacgcgctggaccaacacaacttgaagcagaatgatcaacctatggatatcctccaaatcattaactgtctgaccactatctacgacagactggaacaggagcacaataaccttgtgaatgtgccgctgtgcgtggatatgtgcttgaattggctcctgaacgtgtacgacactgggcgcacgggtagaatccgcgtcctcagctttaagaccgggatcatctccctttgcaaggcgcacctcgaggacaagtaccggtacctgtttaagcaagtcgcctccagcaccggcttctgcgaccagaggagactgggacttctgctgcacgatagcattcagatcccgcgacagctgggagaagtcgccagcttcggaggttccaacatcgaaccgagcgtgcggtcctgcttccaattcgcaaacaacaagccggaaatcgaggccgcgctgttcctcgactggatgcggttggaaccgcagtcgatggtctggctcccagtgctgcatcgcgtcgcggccgccgagactgcaaagcaccaggccaagtgcaacatctgcaaagagtgccctatcatcggattccggtatcggtcgctgaagcacttcaattacgatatctgccaatcatgttttttctcgggacgcgtggcgaaaggacataagatgcattacccgatggtggagtactgtacccccaccacgtccggtgaggacgtgcgggacttcgccaaggtgctgaaaaacaaattccgcaccaagagatacttcgcgaaacacccacgaatgggctacctcccagtgcagaccgtgctcgaaggagacaatatggagactgacacgatg

SEQ ID NO: 142795 - DNA, 3432 bp, Artificial Sequence
  derived and/or modified sequence
atgttgtggtgggaagaagtggaggactgctacgagagggaggacgtgcagaaaaagaccttcaccaagtgggtcaacgcccagtttagcaagtttggaaaacagcatattgagaaccttttcagcgatctccaggatggcagacgcctcctggacctccttgagggcctgacgggtcagaagctgccgaaagaaaagggatccacccgcgtccatgcgctgaataatgtgaacaaagctctgcgcgtgctccaaaacaacaacgtcgatctcgtcaatatcggatcgactgatatagtggacggcaatcacaagctcaccctgggtctgatctggaacatcatcctgcattggcaagtgaagaatgtgatgaagaatatcatggcggggttgcagcaaaccaactcagaaaagatcctgctgagctgggtgcggcagtcgactaggaactacccacaggtgaatgtcatcaacttcactacctcatggtcggatggattggccctgaatgcactcattcactcgcaccgcccagacctcttcgattggaattcagtcgtgtgccagcagtcggccactcagcgcctggagcacgctttcaacatcgcgagataccagctgggaatcgagaaactccttgaccctgaagatgtggataccacctatccagacaagaagtcaatcctcatgtacatcacgtcgctgttccaagtcctgccacagcaggtgtcgatcgaagcgatccaagaggtcgaaatgcttccacgaccgcctaaggtgaccaaggaggagcactttcaactccatcaccaaatgcactactcgcagcagatcactgtgtccctggctcaggggtacgaacgcacctcatcgccgaaaccgaggtttaagtcctacgcctacacccaggctgcgtatgttaccacttcagacccgacgcgcagccccttcccgtcacaacatttggaagcacctgaggataagtccttcggttcctccctcatggagtccgaggtgaacctcgaccgctaccagacggcgctggaagaggtgctctcatggctgctgagcgccgaggacaccttgcaggcacaaggggagatctcgaatgatgtggaagtcgtgaaggaccagttccacacccacgagggatacatgatggacttgacggcgcaccagggacgagtgggaaacattctccaactgggaagcaagctgatcgggaccgggaagctgtcggaggatgaagagactgaagtgcaagaacaaatgaacctcctgaattcacggtgggagtgtctgagagttgcgtcgatggaaaagcagtccaatttgcaccgggaaattagttacgtgccttcgacctacctgaccgagatcacccacgtgtcacaggccctgctggaagtggaacagctccttaatgctccggacctctgtgccaaggacttcgaggacttgtttaaacaggaagaatcgctcaagaacattaaggatagcctgcagcaatcatcaggtcggatcgacatcattcattcgaagaaaaccgcagctctccagtcggctaccccggtagaaagagtcaagctccaagaagccctctcgcaactggacttccagtgggaaaaggtcaacaaaatgtacaaggaccgccaaggaagattcgaccggtcggtcgagaaatggcgcaggttccactacgacatcaagatcttcaatcagtggctgaccgaagctgagcaattcctccgcaagacccagatcccggaaaattgggaacacgcgaagtacaaatggtacctgaaggaactccaagatggaatcgggcagaggcagaccgtcgtccgcaccttgaacgcaactggagaggagatcattcagcaatcgagcaagactgacgcctcaatcctccaggagaagctgggctcgctgaacctccgctggcaagaggtctgcaagcagctgtccgatcggaaaaaacggcttgaagaaactttggagcggcttcaagagctgcaagaagccactgatgaattggatcttaagctgcgccaggccgaggttatcaagggcagctggcagccggtgggggacctgctcatagactccctgcaagatcacctggaaaaggttaaggcgttgagaggtgagattgcgcctctgaaagagaatgtcagccatgtgaacgacttggcccgccaactgaccactctcggaattcagttgtcgccatacaacctgtccaccctcgaagatctgaatactagatggaaattgcttcaagtggccgtcgaggacagagtccgtcagctgcacgaagcccatcgggatttcggaccggcgtcgcagcacttcctctcaacctcggttcagggaccatgggaaagagccatctccccaaacaaggtgccgtactatatcaaccatgaaacgcagaccacttgttgggaccatcctaaaatgactgaactgtatcaatccctggccgatctgaataatgtcaggtttagcgcataccgcaccgcgatgaagctgcgcagactgcagaaggccttgtgccttgacctcctctcactctccgccgcgtgcgacgccctggatcaacacaacctgaagcagaatgatcagccgatggacattctgcagatcattaactgtctcactactatctacgataggttggaacaggaacataacaatctggtcaatgtcccgttgtgtgtggacatgtgcctgaactggctcctgaatgtgtacgataccgggcgcacgggacgcatcagggtgctctccttcaagactggaatcatctcgctgtgcaaggctcatctcgaagataagtaccgctacttgttcaaacaggtagcttcctccactggattctgcgaccaacggagactgggcctgctgctccacgatagcattcagatcccccggcagctgggagaagtcgcttcgtttggaggctcaaacatcgaacccagcgttcgctcttgcttccagttcgccaacaataagccggagattgaggccgcgttgtttctcgattggatgcggctggaacctcagtccatggtctggcttcctgtcctgcatcgggtggctgctgcggaaactgcgaagcatcaggcgaagtgcaatatctgcaaggaatgcccgatcatcggattccggtacaggtcgctcaagcatttcaactacgacatctgccagtcgtgcttcttctcgggaagggtggctaagggtcacaaaatgcattaccctatggtggaatactgcaccccgacgacttcgggcgaggacgtgagggatttcgcgaaggtgttgaaaaacaaatttcgcaccaaacgctactttgcgaagcacccgcgtatgggataccttcctgtgcagactgtccttgaaggggacaacatggaaacggacaccatg

SEQ ID NO: 142796 - DNA, 3432 bp, Artificial Sequence
  derived and/or modified sequence
atgctgtggtgggaagaggtcgaggactgttatgagcgagaagacgtgcaaaagaaaacattcaccaaatgggtcaacgcccaattttccaaatttggtaagcagcacatcgaaaatctgttcagtgacctgcaggatggacggagacttctggacttactcgaaggattaaccggccagaagctcccgaaagagaagggatccactcgcgttcatgccttgaataacgttaacaaggcactgcgggtgctccagaacaataatgtggatctggtcaacatcgggtctaccgacattgtagatgggaaccacaagctgaccctaggcctcatttggaatattatccttcactggcaggtgaaaaacgtgatgaaaaatattatggccgggctccaacagacgaatagcgagaagatcctgctctcctgggttagacagagcacccgcaactatcctcaggttaacgtcatcaacttcactacgtcttggtctgacggactcgcgctgaacgctctgatccactcccacaggcccgacctcttcgactggaacagcgtcgtttgccagcagtcagcaacccagcggctcgaacatgctttcaatattgcccgttaccagctgggaatcgagaaactgctcgatccagaagacgttgatacaacctaccctgataagaagtccatcctcatgtatatcacctctctgttccaggttctgccacaacaagtgagcatcgaggctattcaggaagtggagatgttgccgcgcccccctaaggtcaccaaggaggaacatttccaactgcaccaccagatgcactactcccagcagataacggtgagtctcgcacagggctatgaacggaccagttctcctaaacctagattcaagtcttacgcttatactcaggctgcctacgtgacgacctccgaccccacccggtcacccttcccctcccaacacttagaagcgcctgaggacaagtctttcggcagtagtctgatggaatcggaagtcaacctcgatcgataccagacagccctagaagaagtcctttcctggctactttctgctgaggacacgctccaggcacagggcgaaatttccaacgatgtcgaggtggtaaaggaccagttccacacccacgagggatacatgatggacctgactgcacatcagggccgtgtgggtaacattctgcagctggggtccaagctcatcggcaccggcaagctgagtgaggacgaagagactgaggtgcaggagcagatgaaccttctgaactctcggtgggaatgtctcagagtggcatcaatggagaagcagtctaatctgcatcgagaaataagttacgttccgtctacgtacctaactgagataacccacgtctcacaggcgcttctggaggtagagcagctacttaatgccccagatctgtgtgctaaagactttgaggatctcttcaagcaggaagaaagtcttaaaaatataaaggacagcctccaacagagcagcggtaggatcgacattattcattccaaaaagacagccgcactacagagcgctacgccagttgagagagtaaagttgcaggaagccctctcccagctagactttcagtgggagaaggtgaataagatgtataaggaccgacagggacgatttgacaggagcgttgagaaatggagaagatttcattacgatattaagatctttaaccagtggttaactgaggcggagcagttcttgaggaaaacacagatcccagagaactgggagcacgccaaatacaagtggtacctcaaggagttacaggatggcattggccagcggcagacagtagtgcggactctgaatgccactggtgaggagataatccagcagtcaagcaagaccgatgcgtctattctgcaggagaaactcggtagtttgaatttgagatggcaggaggtgtgcaaacagctgagcgaccgcaagaagcgacttgaggagacgctggaaagattgcaggaattgcaggaagctacggacgaactggacctgaagcttaggcaggccgaggtgatcaagggctcctggcagcccgtgggcgacttgctcattgactccctccaggaccatctagaaaaagtaaaggcccttcgcggggaaatagcccctctcaaggagaatgtgtcccatgtgaacgacctagcccggcagttgactactctgggtatccagttaagcccatacaatctctccaccctcgaggatctaaacaccagatggaaactgctgcaggtggctgtggaagatcgggtaagacaattgcacgaggcccaccgagactttgggcctgcttcgcagcatttcctctcgacttccgtgcaggggccctgggaacgggccatttcaccaaataaggttccctactacatcaaccacgagacccagacaacatgctgggaccatccaaaaatgaccgagctgtatcagtcattggctgatctgaacaatgtaaggttttccgcgtacaggactgcaatgaagttgcgtagactgcagaaggctctgtgtttggatcttctatctttatcagccgcctgtgacgcattggatcaacataacctaaagcagaatgatcagccgatggatattttgcagattatcaactgcctcaccactatctatgatcgattagagcaggaacacaacaatctcgtcaacgtgccattgtgcgttgacatgtgcctaaattggctgctgaacgtatatgatacagggcgcaccgggaggatccgggtgctttctttcaaaactgggataatatcactttgtaaagcccacctcgaggataagtatcgctacttgtttaagcaagttgctagcagcacaggattctgcgatcagcgcaggctcggactgctgctccatgacagcatacagattccgcggcagttgggtgaggtggcttcttttggaggctcgaacatcgagccaagtgtgcggtcctgttttcagttcgccaacaacaaacctgaaatcgaagctgcgttgttcctggactggatgaggctggagccacagtctatggtgtggctcccggtgcttcatcgcgtcgcagcagcggaaacagcaaagcatcaggccaagtgtaatatatgcaaggaatgccctataatcgggttccgctatagatctctcaaacatttcaactatgacatctgccagtcgtgttttttcagcgggcgggtggctaaaggtcacaagatgcactatccgatggtggagtactgcaccccaacaacctccggtgaagacgttcgtgactttgcaaaggtcctcaagaataagtttagaaccaagagatatttcgctaagcacccccggatgggctacctgccagtacagacagtgcttgaaggtgataacatggagaccgacacaatg

SEQ ID NO: 142797 - DNA, 3432 bp, Artificial Sequence
  derived and/or modified sequence
atgctttggtgggaagaggtggaagattgctacgagagggaagatgtccagaagaaaacctttactaagtgggttaacgctcaattttcgaagttcggtaagcagcatatcgaaaatctgttctccgacctgcaggacggaaggcggctgctcgatctgcttgaaggactgactggccaaaagctgcctaaggaaaagggatcgactcgggtccacgcactcaataacgtgaacaaggctctgcgtgtgcttcagaacaacaacgtggatctcgtgaacatcggatcaactgatattgtggatggcaatcataagctcactttgggtcttatttggaatatcattctccattggcaagtgaagaatgtcatgaagaacataatggcagggctgcagcaaaccaactcggagaaaatcctcctgtcttgggttcgacaatcgacccgcaactatccgcaggtgaatgtgatcaatttcaccacctcgtggtccgacggacttgcccttaatgcactgattcatagccatcgaccagatctgtttgactggaactcagtggtgtgtcagcaaagcgctacgcaacggctcgagcatgcatttaacatcgcacgataccaacttggaatcgaaaagctgctcgatccggaagatgttgacacgacctaccccgataagaaatcaatccttatgtacattacctcgttgttccaggtgttgccacagcaggtgtctattgaagccatccaagaggttgaaatgctccctagaccaccaaaagtgaccaaggaagaacattttcagcttcaccaccaaatgcactattcgcaacaaattaccgtgtcgttggcccaggggtatgaacgtacctcctcgccaaaacctcggttcaagtcgtacgcatacacccaagcagcctacgtcacgacttcagatcccactcgatctccatttccatcccaacacctcgaagcccctgaggataaatcgttcggttcctcgctgatggaatcggaagtgaaccttgatcgataccagaccgcccttgaagaggtgcttagctggctcctctcagctgaggataccctccaagcgcaaggtgaaatttcgaatgatgtggaagtggtgaaggatcaattccacacccacgagggctacatgatggaccttacggcgcatcaagggagggtcggaaacattctccaattgggttccaagctcataggtactggaaagctgtcagaagatgaggaaaccgaggtgcaagaacagatgaacctgcttaactcgcggtgggaatgccttcgcgtggcaagcatggaaaagcagtccaatcttcacagggaaatttcctacgtgccatccacctacttgactgaaattacccatgtgtcgcaagcccttctggaggtggaacagctgcttaatgctcccgatctctgtgcaaaggatttcgaagatcttttcaagcaagaggaatccttgaagaacatcaaggacagcctgcaacagtctagcggacgcatagatatcatccacagcaagaaaaccgccgctcttcagagtgcaactccagttgaaagagtgaagctgcaggaagcactgtcgcaacttgatttccagtgggaaaaagtgaataagatgtacaaagatagacaaggaagatttgatcggtcggtcgagaagtggcgcagattccattacgacatcaagatctttaaccagtggctgaccgaggcggaacagttccttagaaagactcagattcctgaaaactgggaacatgcgaaatacaaatggtaccttaaggagctgcaagatggtataggtcagcggcagacggtggtgagaaccctgaacgcgacgggagaggagataattcaacaaagctcaaagactgatgcgtcaattctgcaggaaaagttgggctcactgaacctgcgttggcaagaggtgtgcaaacagctgtcagacaggaagaaacgacttgaagaaacccttgaaaggctccaagagctgcaagaggcaactgatgaattggatctgaagctcaggcaggccgaggtcattaagggtagctggcaacctgtgggagatctgctgattgattccctccaggaccatctggaaaaggtaaaagcacttcgtggcgagattgcgccactcaaggagaatgtgagccatgtcaacgacctggcacgtcagctgactactctgggtatacagctgtcgccttacaatctcagcacgcttgaagatctcaataccaggtggaagctgttgcaagtcgccgtggaggatcgtgtgcgccagctgcacgaagctcatcgcgactttggaccagcctctcaacatttcctctcgacttcggtgcaaggcccttgggaaagggccatttccccaaacaaagtgccatactacatcaatcatgaaactcagactacctgttgggaccatccgaaaatgaccgagctctaccagtcgctcgcagatctgaacaacgtgagattcagcgcataccgcaccgcaatgaagctcaggagacttcagaaggcactgtgtcttgatctcctgtccctgtccgcggcttgtgatgcacttgaccaacacaacctgaaacaaaatgatcaaccaatggatatccttcagataatcaactgccttaccaccatatacgacagacttgaacaagagcacaataatctggtgaatgtgcctttgtgtgtcgatatgtgtcttaactggcttcttaacgtctatgacactggccgcactggacgaatcagagtgctgtccttcaagaccgggattatcagcctgtgtaaggctcacctggaagataagtacaggtaccttttcaaacaagtggcctcgtcaactggtttttgtgaccaaagacgtttgggcctcttgctgcatgattcgattcagattccccgccaacttggagaggtggcatccttcggaggatcaaacatcgaaccctccgtgagatcttgcttccagtttgctaacaataagcctgaaatcgaggccgcactcttcctcgactggatgagactcgagcctcagtcgatggtgtggctgcccgtgcttcatagggtggcggcggcagaaactgcaaagcaccaagcgaaatgtaacatttgtaaggaatgtccgataattggctttcgttacagatcgctgaagcactttaactacgatatctgtcagtcgtgttttttctcaggtcgagtcgcaaagggacacaaaatgcattatcccatggtggagtactgcacgcctaccacttcgggtgaagatgtgagggacttcgcgaaagtcctgaagaacaagtttcggactaagagatacttcgccaagcatcctcgtatggggtacctgccagtccagaccgtgcttgagggggataacatggagacggataccatg

SEQ ID NO: 142798 - DNA, 3432 bp, Artificial Sequence
  derived and/or modified sequence
atgctctggtgggaggaggttgaagattgctacgaacgagaagacgtgcagaagaagacgttcacaaaatgggtcaacgcacaattctcaaaattcggaaaacagcacatagagaacctgttcagtgatttgcaggatggccgccgactgctggatctgctggaggggctcactgggcagaaactgcccaaggagaagggatccacccgcgtccacgctcttaataatgtaaataaagctcttcgcgtccttcagaacaataatgtggatctggttaacatcggttctacagatatcgtcgacggaaatcataagttgaccctgggcctgatttggaacatcatattgcattggcaagtcaagaacgtcatgaaaaatataatggccggcctgcagcagactaactccgaaaagattctgttgtcctgggtgaggcagagcacacgaaactacccccaggtgaacgtgatcaacttcaccacgtcctggtccgatggactcgccctcaacgcgctgattcactcccacagacctgacctctttgactggaacagtgtagtatgccagcaaagtgcaactcagcgcctcgaacatgccttcaacatcgctagataccagttgggcatagaaaagcttctcgatcccgaggacgttgatactacataccctgacaagaagtccatcttgatgtatattacatcactgtttcaggtgcttccgcaacaggtgagcattgaggcgatccaagaggtggagatgctccctagacctccgaaagtcaccaaagaagagcattttcaattgcatcaccagatgcactactcccaacaaataaccgtttccctggcacaggggtatgaacggacatcatcccctaagcctaggtttaaatcctatgcttacacccaggccgcttatgtgaccacctccgaccctacgaggtctcccttcccttctcaacacctggaggctccggaggacaagtcctttggatctagccttatggagtccgaggttaacttggaccggtatcagacagccctggaggaggtcctgagttggctgctgagcgccgaggatacactgcaggctcagggagaaatttccaacgacgtggaagtcgtgaaggatcaattccatactcacgaaggatacatgatggatctcacagcccaccaaggccgcgtgggtaatatcctgcagcttgggtcaaagctgattggaacaggaaagctttctgaggacgaggaaaccgaagtgcaggagcagatgaacctgctgaattccagatgggagtgtctccgagtcgcttctatggagaagcaatctaatctgcaccgagagatctcttacgtgcctagtacttatcttaccgagatcacgcacgtgagtcaggcattgctcgaagttgagcagctcctgaatgctccagacctgtgcgcgaaggactttgaggatctgttcaagcaggaggagtcactcaaaaacatcaaagacagtttgcagcagagtagcggcaggatcgatattattcattctaaaaagactgccgcactccaatccgcaacacccgtggaaagagtaaaattgcaggaggcactgtcccagctggactttcagtgggagaaggtaaacaagatgtacaaagaccggcaaggccgctttgacagatctgtggagaaatggagaaggtttcattatgacattaagatctttaaccagtggctcaccgaagctgaacagtttctgcggaaaacacaaattccggagaactgggagcacgccaaatataagtggtatctcaaagaactgcaggatggaatcggccagcgccagaccgttgtgcggaccctgaacgccaccggcgaggaaatcatccaacagtcctcaaagaccgacgcaagcatcctgcaggaaaaactgggctccctgaatctccggtggcaggaagtctgtaaacaactgagcgaccgaaaaaagcggctggaagaaacgcttgagcgacttcaggaactccaggaggcaactgacgagctggacctgaagctgcgacaagccgaggtgatcaaggggtcttggcagccagtgggagacttgcttatcgattctctccaggatcacctcgagaaggtgaaggctcttaggggtgagatcgctcctctgaaagagaatgtctctcacgtgaacgaccttgctcgccaactgaccacactcggaatccagctctcaccctacaacttgagcactcttgaggacctgaatacgcgctggaaactcctgcaggtagccgtggaagaccgggtccgccagttgcacgaggctcacagggacttcgggcctgccagccagcactttctttctaccagcgtgcagggcccgtgggagcgggcgatcagcccaaataaggtgccatactacattaatcatgagacccagacaacttgttgggaccaccctaaaatgaccgagctgtatcagagccttgccgatctcaacaacgtgaggttctccgcctacaggaccgctatgaaactccgaaggttgcagaaagctttgtgtttggacttgctttctctgtcagctgcttgtgacgccctggaccaacataacctgaaacagaatgatcagcctatggacatactgcagattattaactgcctcaccaccatctatgaccgcctggagcaagagcacaataatctggtgaacgtccctctctgcgtagatatgtgtctgaactggctgctgaacgtttacgatacaggtcgcaccgggcgcatcagagtcctctccttcaagacaggcatcatcagtctctgcaaggcgcatctggaagataagtatcgctatctctttaagcaggttgcatcctccaccggcttctgcgatcagcggcgattgggcttgctgttgcatgatagtatccagataccccggcagcttggagaagtcgccagtttcggcggctcaaatatcgagcctagcgttcgctcttgcttccaatttgctaacaataagcccgaaattgaagcagcgctttttctggactggatgagactggaaccccaatctatggtgtggctcccagtcctgcaccgagtggcggcagcagaaaccgcgaagcatcaggccaagtgtaacatctgcaaggaatgtcctattatcgggtttaggtatcgaagtcttaaacatttcaactatgatatatgtcagagttgcttcttcagtggacgagtggccaaggggcataagatgcactacccaatggtagaatattgcactccaactacatccggtgaggatgtccgggattttgccaaggttttgaagaacaagtttaggaccaagcgatatttcgccaagcatcctcggatgggatacctccctgtgcaaacggtgctcgagggggacaacatggaaacagacactatg

SEQ ID NO: 142799 - DNA, 3432 bp, Artificial Sequence
  derived and/or modified sequence
atgctttggtgggaggaagtggaagattgttacgaacgagaagatgtgcagaaaaaaacatttacaaaatgggttaatgctcagttttcaaaatttggaaaacaacatatcgagaatctcttttctgatctccaggatggacgcagactgctagatctgcttgaagggctcacaggacaaaagctcccaaaagagaaaggatctacacgcgtgcatgcactcaacaatgtaaataaggctctgcgagtgctccagaataataacgtagacctcgttaatatcgggtcaacagatatcgtggatgggaaccacaaattaacactcgggcttatatggaatataatcttgcactggcaggtcaaaaatgtgatgaaaaatatcatggctggactccagcagacaaattccgaaaagatactactgtcgtgggtcaggcagtctacaaggaactacccccaggtcaacgtaataaatttcactacatcctggagtgatggactcgcactaaacgcactgatccattcccaccgccccgatctttttgactggaattctgtggtgtgccagcagtctgctacacaaagactcgagcatgcattcaatatcgccagatatcagttggggatcgaaaaactgctcgacccagaagatgtagacactacatatcccgataagaaatccatattaatgtatatcactagtctgttccaggtattgccgcagcaggtgtccatagaagcaattcaggaagtggaaatgctcccacggcctcctaaagtcacaaaagaggagcactttcagttgcaccaccagatgcattattctcagcagatcacagtttctcttgcccaggggtatgaaagaacatcttctcccaaaccaagatttaaatcttacgcctacacacaggcagcatatgtcacaacttctgatcctacacgatccccattcccctctcagcacctagaggctcccgaagataaatctttcgggtcttctctgatggaatccgaagtgaacctggatcggtaccagactgctcttgaagaagtgctctcctggctgctcagtgctgaagacactctacaggcccagggagaaatttcaaatgatgtagaagtggtgaaagatcagttccatactcacgaaggatacatgatggatttaacagctcatcaggggcgagtaggaaatatcctgcagctcggatccaaactgatcggaactggaaaactttccgaagatgaagaaactgaggtacaggaacagatgaatctactgaattcgcggtgggaatgcctaagggtggcttcaatggagaagcagtccaacctccacagagagataagttatgtcccttccacatacctaactgaaatcactcacgtgtcacaggcgttgctagaagtcgaacagctacttaacgctcctgatctgtgtgctaaagattttgaagatctctttaaacaggaagaatctctaaaaaacataaaggattctttacagcagtcttctgggcggattgatataattcactctaaaaaaacagcagctcttcagtccgcaacacccgtagaacgcgtaaaactccaggaagcgctgagtcagctggactttcagtgggaaaaagtcaataaaatgtataaggataggcagggacggtttgacaggtctgtcgaaaaatggcgccgatttcattacgatatcaaaatcttcaaccagtggctcactgaagccgaacagtttctgcgaaaaactcagattcctgaaaattgggaacatgccaaatataagtggtacctcaaggaactccaggatggaatcggacagagacagacggtggtgagaacacttaatgccactggagaggaaattatccaacagagttctaaaacagacgcttccattctccaggaaaagctgggaagtctcaaccttagatggcaggaagtctgcaagcagctatcagatcgcaaaaaacgactagaagaaacactggaaagactccaggaactccaggaagccactgatgaactagatcttaaactaaggcaagctgaagtgatcaaggggagttggcagcctgtcggggatctcttaatcgattctttgcaagatcacctagaaaaagtcaaagccctgcgtggggaaatcgctcctctgaaagaaaacgtctctcatgtgaacgacttggcaagacagctcactactctaggaatccagctgtccccatacaaccttagtacactcgaggatctgaatactcggtggaagttgctccaggtggccgtagaagatagggtgaggcagttacatgaagcccatagagatttcgggcccgctagtcagcactttctttccacatcagtccaggggccctgggaaagggccatttcccctaataaagtgccatattatataaatcacgaaacacagactacttgttgggaccaccccaaaatgacagaactgtaccagtcactagctgacctgaacaatgtccgcttcagtgcatatagaacagctatgaaactgcggagacttcagaaggctctctgtctggatctcctgagtctctctgctgcctgcgatgcgcttgatcagcacaatctgaagcagaacgatcagcccatggacatccttcagataataaattgccttacaacaatctatgatcgactggaacaggaacataataacctagtgaacgtgccactctgcgtggatatgtgcctaaactggctcctgaatgtctatgatactggacgaacaggaagaattcgagtgctatcattcaaaactgggattatctctctatgtaaagctcaccttgaagataaataccgatatctatttaaacaggttgcgtcatcaacaggattctgtgatcagcggcggctcggactgctccttcatgattccattcagataccacgccagctcggggaagtggcctcattcggaggatcgaatattgaaccttccgtaaggtcatgctttcagtttgctaacaataagcctgaaatcgaggctgcgctgtttctggattggatgcggctcgaacctcagtcaatggtatggttacctgttcttcaccgcgtggcagccgctgaaacagccaaacatcaggcaaaatgcaatatttgcaaagaatgcccaatcatcgggttcaggtaccgctctctaaaacatttcaactacgatatctgccagtcttgctttttcagtgggcgggtggctaaaggacacaagatgcactaccccatggttgaatattgcacaccaacaacatccggagaggatgttagggattttgcaaaggtactcaaaaataaatttcgcactaaacggtactttgctaaacatcccaggatgggatatctgcctgtccagactgtgctggaaggagataacatggaaacagacacaatg

SEQ ID NO: 142800 - DNA, 3432 bp, Artificial Sequence
  derived and/or modified sequence
atgctgtggtgggaggaggtggaggactgttacgagcgcgaggatgtgcagaagaagaccttcaccaaatgggttaacgcccagtttagtaaatttggtaagcagcatatagagaaccttttttccgatttgcaggatgggcgccggctactggatctgctggaggggcttacaggacagaagttgcccaaagagaagggatctacaagagtacacgcccttaataacgttaacaaagcgctgcgggtgctccaaaataacaacgttgacctggtgaacataggaagtaccgatattgtggacggcaatcacaagcttacacttggtttgatctggaatattatactgcattggcaggtgaaaaatgtcatgaagaacattatggcggggttgcaacagactaattccgagaaaattctactgtcttgggtgcgccagtcaactagaaattatccgcaggtcaacgtgatcaacttcacaacctcgtggagtgacggactagcactcaacgcacttatccacagccacaggccggatctattcgactggaattcagttgtgtgtcagcagagcgcaacccagcggctggagcatgccttcaacattgcacgatatcaactcggcattgagaagctgctggaccccgaggatgtcgacacgacctatccagacaagaaaagtatcctcatgtatattaccagcttgtttcaggtcctgccccagcaggtttcaatcgaggctatccaagaagtggagatgctaccccggccacccaaagtgactaaagaggagcacttccagctgcaccaccaaatgcactattcccagcagatcacggtgagtctcgcacagggatatgagagaaccagttctccgaagccacgattcaagtcatatgcctacacgcaggcagcctacgtaacaaccagcgacccaacccgaagtcccttcccttctcagcatttggaagcaccagaagataaaagttttggaagcagtctgatggaatctgaggtgaacctcgatagataccagactgcactggaagaagtgctgtcatggctcctctctgccgaagataccctgcaggcccagggcgagatctctaacgatgtcgaagttgtgaaggaccagtttcatacgcacgaagggtacatgatggatcttaccgcacatcaggggcgagtgggcaacatcttgcagctgggcagtaaactaatcggcacaggtaagttgagcgaggacgaggagaccgaggttcaggaacagatgaatctgcttaattcacggtgggagtgtctgcgtgttgcctctatggaaaagcagtctaacctccaccgcgagatttcgtatgtgccatctacatatctaactgagatcactcatgtttcccaggctctgttggaggttgaacagctcctcaacgcgcctgacctgtgcgcgaaggacttcgaggatctctttaagcaggaggaatctctcaaaaacataaaggattccctacagcagagttctgggagaattgatatcattcattctaagaagacagcggcgctacagtcagcgactccggtggagagggtcaagcttcaggaagcgctatctcagctggacttccagtgggagaaagtgaataagatgtacaaagacaggcaagggcgatttgaccgatccgtcgaaaagtggcgccggtttcactacgatataaaaatctttaaccagtggcttaccgaggccgagcaatttctgaggaagacccagatcccagaaaattgggagcacgccaagtataagtggtacctaaaagaattgcaagatgggataggtcagcgtcagacggtggtgcggacactgaacgctaccggcgaagaaatcattcagcagagctcaaagaccgatgcaagtatcctccaggagaagcttgggtcccttaacctacgatggcaagaagtatgcaaacaattgtcagacagaaaaaagcgccttgaggagactctggaaaggttgcaggaactccaagaggccacggacgagctggatttgaagctcaggcaggccgaggtgataaagggatcatggcagccggtgggggatctcctcattgattccctccaggaccacctcgaaaaggtaaaggcactgaggggggagattgccccactcaaagagaacgtctcccacgtaaacgacctggctcgccaactcacgacactaggcatccagctttccccgtacaatctcagcactctggaggatttgaacactagatggaagctgctgcaggtagctgtagaggacagggtgagacaattacacgaagcacaccgtgatttcggacccgccagccaacatttcctttccacctcagtccaggggccgtgggagagggctatttcacccaacaaggtaccctactatataaatcacgagactcagaccacgtgctgggaccatcccaagatgaccgagctttatcaaagcctcgctgatctcaacaacgtcaggttcagtgcataccgcaccgccatgaagctgcggagactacagaaggccctgtgcttagatctcctgtctctctcagcagcctgcgacgccctagaccagcataatctcaagcaaaacgaccagccaatggatattttgcagatcatcaattgcttgacaacaatctacgatagactagaacaggagcataataacctcgttaacgtgccattatgtgtcgacatgtgtctgaactggctgctgaacgtgtacgacaccgggaggactggaaggattagagtgcttagttttaaaactggcataatctctttgtgtaaggctcatttggaagacaagtacaggtatctgttcaagcaggttgcatcttctaccggcttctgcgaccagaggaggctgggtctgttgctgcacgacagtattcagattccccgccagctgggagaagttgccagttttggcggctctaatatagaaccatcagtgcgaagctgtttccagtttgccaacaacaagcccgagatcgaagccgccctcttccttgattggatgcgactggaacctcagagcatggtttggttacccgtcctccaccgtgtggcggcagccgagaccgctaagcaccaggctaaatgcaacatttgtaaagagtgtcctataatagggttccgatatagaagcctaaaacacttcaattacgacatctgtcagtcctgctttttctccgggcgggtggccaaaggacacaagatgcactatccaatggtcgaatattgtacaccaaccacatctggggaagacgtgcgggactttgccaaggtgcttaagaataaatttcggactaagcggtattttgcaaagcaccccagaatgggttacctgccagtgcagaccgtccttgagggcgacaatatggaaactgacaccatg

SEQ ID NO: 142801 - DNA, 3432 bp, Artificial Sequence
  derived and/or modified sequence
atgctctggtgggaagaagtcgaggactgttatgagcgggaggatgtccaaaagaagacatttactaagtgggtgaatgcccaatttagtaagtttggcaaacaacacattgagaacctgttttcagacctgcaggacggtcggcgcctgcttgatctgctggagggactgaccgggcagaagctgccaaaagagaaggggagcactagggtccatgcattgaacaacgtgaacaaggctttgcgggtgttgcagaataacaacgtggatctggtgaacatcggatccacagacatcgttgatggcaatcacaagcttactctggggctgatctggaatattattctgcactggcaggttaagaacgtgatgaagaatattatggctggactgcagcaaaccaatagcgaaaagatcttgttgtcctgggtccggcagtccacgcggaactatccccaggtcaatgttattaacttcaccacctcttggagcgacggtctcgcactgaacgctctcatccacagccaccgccctgacctgttcgattggaactcagttgtttgtcagcagtcagctactcaaagacttgaacatgcattcaatatcgcaagataccagctgggaattgagaagctcttggacccagaggatgtagacaccacctatcccgataagaagtctatcctcatgtacataacatccctgtttcaggtcctgcctcagcaagtgtccattgaagctattcaggaggttgagatgctccctcgcccgcctaaggtgacgaaggaagagcattttcagctccatcatcaaatgcattacagtcagcagattactgtatccctggcccaggggtacgaacgaaccagcagccctaagcctcggttcaagtcttatgcttatacccaggcagcttatgtcacgacaagcgacccgaccaggtcaccctttccctctcagcacctggaggcaccggaggacaagtcctttggtagctcactcatggaatccgaggtgaacctggaccggtatcagacagcgttggaagaagtgctctcctggcttctctccgcagaagacactcttcaagctcagggagagattagcaatgacgtcgaggtggtgaaggatcagtttcacacccatgagggttacatgatggatcttaccgctcatcaaggccgagtgggcaacatccttcagctgggtagcaagctcatcggcacagggaaactttcagaggatgaggaaacagaggtgcaggaacaaatgaatttgctcaatagtagatgggagtgtctgagagtggccagcatggagaaacaatccaatctgcacagagagatctcctacgtgccctctacctacctcaccgagataacccacgtctctcaggccctgttggaagttgagcagcttctcaacgcccccgatctgtgtgccaaagattttgaggacctgttcaagcaggaggagagcctcaagaatattaaagattcccttcagcagagtagcgggaggatcgatataatccactccaagaaaacagctgcattgcaatcagccacgcctgtagaaagggttaagctgcaggaggccctctctcaactcgattttcagtgggagaaggtaaataagatgtacaaagaccgccagggtcggttcgacagaagtgtggagaaatggaggcgctttcactatgacattaaaatcttcaaccagtggttgaccgaagccgaacagtttctcagaaagacacagatccccgagaattgggagcacgctaaatacaagtggtacctcaaggagctgcaggacgggatcggtcaacgccagacagtcgttcgcacactgaacgcaaccggggaagagatcatacagcagtcctctaaaacagatgcctcaatcttgcaagagaaacttgggagtttgaacctgcgctggcaggaagtgtgtaagcagctcagcgataggaagaagcgacttgaagagacgctcgagaggctgcaggagcttcaggaggccacagatgagctggacctgaaacttagacaggcagaagtgatcaagggctcttggcaaccggtgggggatttgctgatcgactccctccaggaccacctggagaaagtaaaagccctccgaggcgagattgcacctctcaaggaaaacgtgagtcatgtgaatgacttggctcggcaactcaccacactggggatccagctgagcccttacaacctctctaccctcgaggatctcaacactaggtggaagttgctgcaggttgctgttgaggaccgggtacggcagttgcacgaagcacatagagattttggccccgccagccagcattttctgagcactagtgtgcagggtccgtgggagcgggctatctctccaaacaaggtaccatactacataaaccacgaaacacagacaacttgctgggatcacccaaaaatgacagagctctatcaatccctcgctgacctcaacaacgtccggttctctgcataccggactgccatgaagctccgccggttgcaaaaagccctctgtcttgacctcctcagcctcagtgcggcctgcgacgctctcgatcagcacaacctgaaacagaatgatcaacccatggacattctgcagattatcaactgtttgacaacgatctatgatagactggagcaagagcataacaatctggtgaacgttcctctgtgcgtggatatgtgcctcaactggctgcttaacgtatacgacaccgggagaacgggacgaattagggtcctttccttcaaaacaggaatcatttctctgtgtaaggcccaccttgaggataagtaccgatatctgtttaaacaagtggcatcttccactggtttctgtgaccaacggagactgggactgctgttgcacgacagcatacagattcccagacagctcggggaggtggcttcttttggcggcagcaacatagaaccctctgtacgctcatgcttccagttcgccaacaataaacccgaaatcgaggccgcgctgtttctcgattggatgaggctggagccacagtctatggtgtggctgccggtgctgcatcgagttgcagccgccgagacagccaagcatcaggccaagtgcaacatctgtaaggagtgccctatcattggattccgctaccgctccctgaagcatttcaactacgatatctgtcagtcctgctttttctccggcagagttgccaaagggcataagatgcattatccaatggtggagtattgtacacccacaactagcggagaggatgtgagggatttcgcaaaggtgctgaagaataaatttcggaccaagaggtattttgccaaacacccccgaatgggttaccttccagtgcagacagtattggaaggggacaacatggaaacggacactatg

SEQ ID NO: 142802 - DNA, 3432 bp, Artificial Sequence
  derived and/or modified sequence
atgctctggtgggaagaggttgaggactgttacgagcgggaggatgtccagaagaaaaccttcacaaagtgggtgaacgctcaatttagtaaattcggaaagcagcatattgagaacctgttcagcgacttgcaagatggacgacgcctgctcgacctactggagggattgaccggtcaaaagttaccaaaagaaaaaggtagtacgagagtacacgcccttaataatgtgaataaggcactgcgggtgctgcagaacaataatgtcgaccttgtcaacatcggaagcactgatatcgtggatggaaatcataagttgacccttggtcttatttggaacataatacttcactggcaggtgaaaaacgtcatgaaaaatatcatggccggccttcagcagacgaactcagagaaaattttgttaagttgggtgaggcagtccactaggaattatccccaagtaaatgttatcaactttaccacttcttggtcggacgggcttgccctaaatgccctcattcactctcatcgacccgacctcttcgactggaattccgtcgtatgtcagcagtccgcgacacagcgcttagaacacgctttcaacatcgcaaggtaccagcttgggatcgagaagcttctggatccggaggatgtcgataccacctacccagataagaaatccatcctgatgtacattacatctctcttccaagttctgcctcagcaggtatccatcgaagcaatccaggaggtcgagatgctgccaaggcccccaaaggtgaccaaagaggagcatttccaattgcatcatcagatgcattactctcagcagataaccgtgtctttagcccaggggtatgagcgtacttcatcgccgaagcctcgctttaagtcttacgcttatacccaggctgcatacgttactacctctgatccaacgcggtcgcccttccctagtcagcaccttgaggccccagaggataaatccttcggatcatctctcatggaaagcgaggtcaacctggaccgctatcagactgccctcgaagaggtcctatcttggctgctgtctgcagaggacacgctacaggcacagggagaaataagtaatgacgtcgaagtagtcaaggaccaatttcatactcacgaagggtacatgatggacctgactgcccatcaaggccgggtgggtaatatcctccaactaggaagcaagctcattggcacaggcaagttgtccgaggacgaggagacggaggtgcaggaacaaatgaaccttctgaactctcgttgggagtgcctcagagtggcttcaatggaaaaacaaagtaatctgcaccgagagatctcttatgtacccagcacttacttgacggaaattactcacgtttctcaggccctactggaggtagaacagttactcaatgcacctgatctctgtgcgaaggacttcgaggatctgttcaaacaagaggagagtttgaaaaacattaaagactccctgcagcagtcttctgggagaatagacatcattcattctaagaagactgctgcgctgcagtccgctacaccagtagagcgagttaaattgcaggaagcgctcagtcagttggactttcagtgggagaaagtgaataaaatgtataaagaccgtcagggtagattcgacagaagcgtggaaaagtggcgccggtttcactacgacatcaagatcttcaaccagtggctaacagaggccgaacagttcctgcgcaagacccagattcccgagaattgggaacatgctaagtacaagtggtacctgaaggagttgcaggatggcattggccagcgacaaacggttgttaggactctgaatgccaccggtgaagaaatcattcagcagagtagcaagacggacgcaagcatcctgcaggagaagctgggaagcctaaacttgcggtggcaggaagtgtgtaagcagctctcagaccggaaaaaacgtctggaggagacactcgaacgtctgcaagagctgcaggaggctacggacgagctggatctcaagttaagacaagcagaagtgattaaagggtcctggcagccggtcggagatctgttgatagactcactgcaggatcaccttgaaaaggtaaaagcgctgcgtggggagatagccccgctgaaagaaaatgtcagtcatgtcaatgatttagctcgacaactcaccacacttgggatccagctttccccatacaatctcagcaccctcgaagatttgaacacaagatggaagctgctccaggtggctgtggaggatagggtacggcagctccacgaagcgcaccgtgattttggaccggcatcacagcatttcctaagcacatcagttcaaggcccatgggaacgggcaatatcccccaataaagtgccctactacattaatcacgaaacacagacaacctgttgggaccaccccaagatgactgagttatatcagtccctggcagacctcaacaacgtccgcttctcagcttaccgtaccgccatgaagttgagacgtcttcaaaaggctttgtgtttggatctgctatcactctcagccgcctgcgacgcactggatcagcataaccttaaacaaaacgaccagcccatggacatcttacagattatcaattgtcttacgaccatttacgaccggttagaacaagagcacaataatctggtgaacgtgccactgtgtgtggacatgtgcctgaactggctgctgaatgtttacgatacaggacggacggggcgtataagggttctgtcttttaaaacaggtatcatctccctttgtaaggctcacctcgaggacaagtacagatacctgttcaaacaggttgcgtcctccacagggttttgcgaccaaaggcggttaggcctcctcttacacgatagcattcagatcccacgccagttaggcgaagtcgcatcattcggcggaagtaacatcgagcctagcgtgagatcatgttttcagtttgcaaataacaaacctgagattgaggccgcgttgttcttggattggatgcgcctggagccccagagtatggtgtggcttcctgtcctgcaccgggtggcagcagcagagacagccaagcaccaagccaaatgtaatatctgcaaagagtgcccaattattggatttcgttacagatcactcaaacattttaactacgacatctgccagagctgttttttctcaggaagggtcgcgaaggggcataaaatgcattaccccatggtcgaatattgcacccccacgacctcaggagaggacgtgagggacttcgccaaagtgctgaagaataagtttagaaccaagaggtactttgctaagcacccccggatgggatacctgcccgttcagaccgtgctggagggggataatatggaaacggacacaatg

SEQ ID NO: 142803 - DNA, 3432 bp, Artificial Sequence
  derived and/or modified sequence
atgctctggtgggaagaagtggaggattgttacgaacgagaggacgtccagaaaaagacgtttactaagtgggtcaacgcacagttctcaaagttcggaaaacagcatattgaaaatcttttctcagatctccaagacggtcggcgcttgcttgaccttttggaaggcctgacgggccaaaaactgcccaaggagaagggctcaacccgggtgcatgctctcaataatgtgaacaaagcccttcgcgtgcttcagaataacaatgtggacctggtcaacattggatccactgacatcgtcgacggaaaccataagttgacgcttggtctgatttggaacattatactgcattggcaagtgaagaacgtgatgaaaaacatcatggcagggctgcaacagactaactccgagaaaattctccttagctgggtgagacaatccacgcgcaactacccccaagtgaacgtgattaactttactactagctggtcggatggcttggcactgaatgcgttgattcactcccatcgccctgacctgttcgattggaatagcgtggtgtgccaacagtcggcaactcagagactggaacacgcgtttaacatcgctagataccagctgggcatcgaaaagttgcttgatcccgaagatgtcgacaccacttatccggacaagaagtcaatcttgatgtacattactagcttgtttcaggttcttcctcaacaagtctcaatcgaagcaatccaggaagtcgaaatgctgccccgtcctccgaaagtgaccaaggaagaacacttccagctgcaccaccaaatgcattacagccaacaaattactgtgtccctggctcaggggtacgaaaggacctcgtcaccgaagccacggttcaaatcatacgcttacactcaggcggcgtatgtcaccacttcggatcctacccggtcgccatttccatcacaacatcttgaggcgccggaagataagtcgtttggaagctcgcttatggaatccgaggtcaatctcgatcgctaccagacggcactggaagaagtgttgtcgtggctgctgtcagcagaagataccctccaagcacaaggggaaattagcaacgatgtggaggtcgtcaaagaccaattccatacccatgaaggttatatgatggacctgactgcgcatcaaggacgggttggaaacattcttcagctgggctccaagctgataggcactggtaagctgtcggaggacgaggagactgaagtgcaagagcagatgaatcttctgaatagcagatgggaatgcctgcgcgtcgcatctatggagaagcaatccaatttgcatagagagatcagctacgtgccatccacttatcttactgaaattacccacgtctcacaagcgttgctggaagtcgaacaactgctgaatgctcctgacttgtgtgcaaaggactttgaggatttgtttaaacaggaggagtcactgaagaacattaaagacagcctccagcaatcgtccggaagaattgacatcatccactcgaagaaaaccgcagccctgcaatcggcaaccccagtggaaagagtgaaacttcaggaggccctgtcacagcttgatttccaatgggaaaaggtcaacaaaatgtacaaggatcgtcagggtcgctttgataggtctgtggagaaatggcgaagatttcactacgacataaagatattcaatcagtggcttactgaagcagaacagtttcttcgcaagactcagattccagaaaactgggaacatgcaaaatacaagtggtacttgaaggaacttcaggatgggataggtcaaagacagaccgtggtccgaactcttaatgcaaccggagaagagattatacaacagtcatccaagaccgatgcatcaattttgcaagagaagctcggtagccttaacttgcgatggcaagaagtctgtaagcaactttcagataggaagaagcggcttgaagagactctggagagactgcaggagcttcaggaggcaactgatgaacttgatctgaagctgcggcaagcagaagtgataaagggatcgtggcaacctgtcggggaccttctcattgactccttgcaagatcatcttgagaaggtgaaagcccttaggggtgaaatcgcaccgttgaaagagaatgtttcccatgttaacgatctggcgcgtcaactgaccaccctcggaattcaactgtccccctacaacctgtccacccttgaagatctcaacactagatggaaactgttgcaggtggccgtggaagatcgcgtgcgccaattgcatgaagcacaccgagattttggaccagcgtcccagcactttctgtccacctccgtgcaaggaccttgggaacgggccatttcacccaacaaggtgccttactacatcaatcacgaaactcaaaccacctgctgggaccaccccaaaatgactgagctgtaccaaagccttgcagatctgaacaacgtgagattttcggcttacagaaccgctatgaagctgcgccgactgcaaaaagccctctgtctggatctgctcagcctttcggcggcctgcgacgcccttgatcagcacaaccttaagcagaacgaccaacctatggatatactgcagatcattaactgtcttactaccatttacgaccggcttgagcaggaacataacaatctggtgaacgtcccactttgtgtggatatgtgtcttaattggcttcttaatgtgtacgataccgggcgtacgggaaggatccgggtgctttcctttaagactggaatcatcagcctgtgcaaggcacatctggaggacaagtacagatacctctttaagcaggtggcctcatcgaccggtttctgtgatcagcggagactgggactgcttcttcatgattccatccaaattcctaggcagcttggcgaggtggcgtcgttcggagggtcgaatattgagccatcggtgagatcgtgctttcaatttgcaaacaacaagcctgaaatcgaggccgcactttttctcgattggatgaggcttgaaccccagtcaatggtctggctccctgtgctccatcgagttgcggcggcagaaaccgcaaagcatcaagccaaatgtaacatctgcaaggaatgtcccattataggatttagataccgatccctgaagcatttcaactacgatatatgtcagtcgtgttttttctcgggacgggtggctaagggtcacaagatgcactaccctatggtggagtactgcacccctactacctcgggtgaagatgtccgcgattttgccaaggtgctgaagaataagttccgcaccaagcgctactttgcaaaacatccacgaatgggttacttgccagtccaaaccgttctcgaaggagacaatatggaaactgatacgatg

SEQ ID NO: 142804 - DNA, 3432 bp, Artificial Sequence
  derived and/or modified sequence
atgttgtggtgggaggaggtcgaagattgttacgagcgcgaggacgtgcagaagaaaacttttaccaagtgggtgaatgcacagttttccaaattcggtaagcaacacattgagaatctgtttagcgacctgcaggacggacgtagactccttgacttgcttgaaggattgacgggacaaaaacttccaaaagaaaaagggtcaactcgagtgcatgctcttaacaacgtcaataaggctcttcgcgtcctccagaataacaatgtcgatctggtgaatattggatcgactgatattgtggatggtaaccataagctgacccttggactgatctggaacatcattttgcattggcaagtgaagaacgtgatgaaaaacattatggccggccttcagcagaccaactcagaaaagattctgctttcctgggtgcgacaatccacccgcaactaccctcaagtgaacgtcattaactttaccacttcgtggagcgatggtctggcacttaatgcacttatacattcccaccggcctgatctgtttgattggaactcggtggtgtgccaacagtccgcaactcaacggcttgagcatgcattcaacattgcaagataccaacttggaattgagaaacttcttgatccagaagatgtcgacaccacttacccagacaagaagtccattctcatgtacatcacctcgctcttccaagtgctgcctcaacaagtctcgatcgaagcaatacaggaagtcgagatgcttcctagacctcctaaggtcactaaggaagaacatttccaacttcatcatcaaatgcattactcccagcagattactgtgagccttgcacagggatacgaaagaacttcctcccctaagccacgctttaagagctatgcatacactcaggcagcctacgtgaccacctcagaccctaccaggtcgccctttccatctcaacatcttgaagcacctgaagataagtcattcggcagttccctcatggaatcggaagtgaacctggatagatatcaaacggcactcgaagaggtgctcagctggcttctttcagccgaagatactctgcaagcacagggagaaatttcgaacgatgtggaggtggtcaaagaccaattccacacccacgagggttacatgatggatctcacggcacatcagggacgcgtgggaaacattcttcagctgggaagcaagttgataggaaccgggaagctctccgaagatgaggagactgaagtgcaggaacaaatgaatctcctcaactcgagatgggagtgtcttagggtcgcatcaatggaaaagcagtcaaatctgcatagagaaatatcatacgtgcctagcacttacttgactgaaatcacccacgtgtcgcaggctctgcttgaggtggaacaactcctcaacgctcctgatctttgtgcaaaggattttgaagatctgttcaagcaggaggagagcttgaagaacattaaagactcgctgcagcaaagctccggccggatcgatatcattcactcgaaaaagacggcagcactgcagagcgcaactccagtcgagcgggtgaaacttcaagaggccctttcgcaacttgatttccaatgggaaaaggtgaacaaaatgtacaaggatagacaaggtagatttgacaggtcagttgagaagtggagacgcttccattacgacataaagatcttcaatcagtggctgactgaagcggaacagtttctgaggaaaacgcaaattcctgaaaattgggagcatgcgaagtacaaatggtacctcaaggaactgcaggatggcataggacaaagacaaaccgtggtcaggaccctcaacgcaactggagaggagatcattcagcaatcatccaagactgatgcatcgattcttcaagaaaaactggggagccttaatcttcgatggcaggaggtgtgcaagcaactctcagatcgtaaaaagagactcgaggaaaccttggaaaggctgcaagagttgcaagaagcaactgatgagcttgacctgaaacttcgccaggccgaagtgataaagggatcatggcagccagtgggtgacctgctgattgattcacttcaggatcatttggagaaggtgaaggcactgcggggggagattgctccccttaaggagaatgtctcgcacgtgaacgatcttgcaagacaacttaccacgctggggattcagctttcaccttacaacctgtccactctggaggatcttaatactcggtggaagctcctgcaggtggcagtggaagatagggtgcgccaactgcatgaagcacatagagattttggaccagcgtcgcagcactttcttagcacttctgtccaaggaccctgggagagggccatctcgcccaacaaagtgccttactacataaaccatgaaactcaaactacctgttgggatcatccgaagatgaccgagctgtaccaaagcctggcagatctcaataatgtccggtttagcgcgtacagaaccgcaatgaagctcagaaggctgcagaaggcattgtgtcttgacctcctgtcccttagcgcagcgtgtgatgcactggatcagcataatctgaaacagaacgatcagccaatggacattctgcagataatcaattgccttactactatctacgatcgcctcgaacaggaacataacaatcttgtgaacgttccactttgtgtggacatgtgtctgaattggcttctgaatgtgtacgacaccggtcgaactggacgtattcgcgtgctctcctttaagactggtatcattagcttgtgcaaggcccatctggaggacaagtatcggtatctgttcaaacaagtagcctcgtctacgggattctgtgatcaacgcaggcttggccttctcctgcacgatagcatccaaatccccaggcagctcggggaagtggcatcatttgggggttcaaacattgaaccttcggtgagatcctgttttcaatttgcaaataacaagcctgagattgaggctgcactgtttctggattggatgcggttggagcctcaatcgatggtgtggcttcccgtcctccatcgagtcgccgcagctgaaaccgcgaagcaccaggcaaagtgcaatatctgtaaggaatgtccgattattggtttcagataccgctcgcttaaacactttaactatgatatttgccaatcctgtttcttttcggggagagtggcaaaaggacataagatgcattacccaatggtggagtactgcactcctacgacttccggggaagatgtcagagactttgccaaggtcctcaagaacaaatttcgtacgaagcgctacttcgctaaacatccaagaatgggatacctgccagtgcagaccgtgcttgagggtgacaacatggaaaccgataccatg

SEQ ID NO: 142805 - DNA, 3432 bp, Artificial Sequence
  derived and/or modified sequence
atgctgtggtgggaagaggtggaggattgctatgaacgggaagatgtgcaaaagaagacttttacaaagtgggttaatgcccagtttagtaagtttgggaagcagcacatcgagaatctgttttccgacctccaggatggtaggcggttgctggacctgctcgaaggcctgactggccagaaactacctaaggagaaaggctctaccagagtacacgcccttaataatgtgaacaaagcgctgagagtccttcagaataataacgtggacctggttaacataggatcgacagacatcgtggatgggaatcataaacttactctcgggctgatctggaatatcatactacactggcaagtaaaaaacgtgatgaagaacatcatggccggactgcagcaaacaaattccgaaaagatcttactttcgtgggtgagacagagcactcgcaattatccccaggtgaatgtgataaactttaccacctcatggtcagatggcttagctcttaacgcactcatccactcccaccgccccgaccttttcgactggaactccgtggtgtgccagcagtccgccactcagaggctcgagcatgccttcaatatcgccagataccagctgggtattgagaaattgttagacccagaagacgtggacactacttatcccgacaaaaaaagtattctgatgtacattacatccctgtttcaggtgctcccccaacaagtctccattgaggctattcaggaagtggagatgctccctcgaccccctaaggtgactaaggaagaacattttcagctgcaccaccagatgcattacagccagcaaatcacagtatcattggcgcagggctacgagcgcacttccagccctaaaccgagatttaagagttatgcttatacgcaggcagcctacgtgacgacttccgaccccactaggtctccctttccctcccagcaccttgaggctcctgaggacaagagttttggaagtagcctaatggaatcagaagttaatttggaccggtaccagacagcactggaggaagtgctgtcatggctgctgagcgccgaggataccctgcaggctcagggcgagataagtaacgacgtcgaggtcgtcaaagatcaattccatacacacgagggttacatgatggacctcaccgcccaccaaggacgggtgggcaatatattacagctaggctctaagctgatcgggaccggaaagttgtccgaagatgaagagaccgaggtgcaggagcagatgaatctgctgaactcacggtgggaatgtctgagggtggctagcatggaaaaacagtccaatctacaccgtgagatatcctacgtgccatccacttacctcacggaaatcacacacgttagccaggccttgcttgaggtggagcagctgttaaacgcaccggatctgtgtgctaaagacttcgaggacctgtttaaacaggaggaatcactgaaaaatattaaggatagtctccagcagtcaagcggccggatagatatcatccacagcaaaaaaactgcggccctacagtctgccaccccagtggaacgggtgaagttacaggaggcgttgtcacaactggacttccaatgggaaaaggtgaataagatgtataaagatcgtcagggccgcttcgaccggagcgtggagaagtggcgccgcttccactatgatataaaaatcttcaatcaatggttgacagaagcggaacagtttctacggaaaacgcaaattcctgaaaattgggagcatgcaaaatacaagtggtacctcaaagaactccaggacggaataggccagcggcagacagtggtgcgaacactaaacgctacaggggaagagatcatccaacaatcatctaagaccgacgccagtatactgcaggagaaactgggaagcttgaatctgcgctggcaagaagtgtgcaaacagttgtccgatcgaaaaaagaggcttgaggagacgctggagaggctgcaagagctgcaggaagcgacagacgaattagaccttaagttgcgacaggccgaagttatcaaaggatcgtggcagcccgttggggacctgctgatcgacagccttcaagaccatttagagaaggttaaggcgctgaggggtgaaattgctcccctgaaagaaaacgtgagccatgtcaatgaccttgcccggcagctgactaccctagggattcaattaagcccatataacctatcaacactggaggacctgaatacgcggtggaaacttctgcaggtggcagtcgaggaccgggtgaggcagctgcatgaagcacatagagatttcggacccgcctcgcagcacttcctctctacctcagttcaggggccttgggaacgcgcgatcagtccaaataaagttccatattatatcaatcacgaaacgcagaccacatgctgggaccaccccaagatgaccgaactgtaccagtctcttgccgatctaaacaatgtgagatttagcgcctatagaaccgccatgaaactgaggagactgcagaaagctctttgtctggatctcctgtctttgtccgccgcctgcgatgccctggaccagcacaacctgaaacagaacgaccagcccatggacattctgcagattattaactgcttgactactatctacgaccgtttagaacaagagcataataaccttgtcaatgtgcccctgtgtgttgatatgtgtctcaattggctgctaaacgtgtacgacaccggacgtaccggcagaatcagggtgctaagctttaaaaccgggataatctcactatgtaaggctcatcttgaggataagtataggtacttatttaaacaggtggcttcttccacaggtttttgcgaccagcgacggctcggactgcttctgcacgattctatccagattcctaggcagttgggtgaggttgcctccttcggggggagcaacattgaacccagcgtgcgaagctgttttcagtttgcaaataataagccggagatagaggccgcattattcctcgattggatgagacttgaaccccagagcatggtctggcttccagttttgcatcgagtggccgcggctgagaccgcaaagcaccaggccaagtgtaacatttgcaaagagtgtcctatcattgggttccggtaccggtccctgaagcactttaattacgacatttgtcagtcatgcttcttctccggcagagtcgcgaaggggcacaaaatgcattatcctatggtagaatattgcactccgaccacttccggcgaggatgtgagagactttgctaaagtcctaaagaacaaattcagaacgaagcgatacttcgccaaacatcctcgaatgggttacctgccagtacagactgtgctggaaggagacaacatggagaccgatacaatg

SEQ ID NO: 142806 - DNA, 3432 bp, Artificial Sequence
  derived and/or modified sequence
atgctatggtgggaagaggtggaagattgctacgagcgcgaagatgtgcagaagaagaccttcacaaagtgggtcaacgcccagttctccaagttcggcaagcagcacatcgaaaaccttttttcggacctccaggatggcagacgtctcctcgacctgctcgagggcctgaccggccagaagctgcccaaggaaaagggctcgacccgtgtgcacgcgcttaacaacgtcaacaaggctttgcgggttcttcaaaacaacaatgtcgaccttgtcaacatcggaagcactgatatcgtcgatggaaaccacaagctcaccctagggctgatctggaacattatcttgcactggcaggttaagaacgtcatgaaaaatattatggcgggcctgcagcagacgaactcagaaaagatcctgttgtcttgggtcaggcagagtacgcgtaactatcctcaggtgaacgttattaacttcacaaccagttggtccgatggcctcgcactgaacgcgcttatccactcccaccgacctgacctgttcgattggaattccgtggtatgtcagcaaagcgcgacccagcgcttggagcatgctttcaacatcgcccgatatcagctgggcatcgagaagcttcttgaccctgaggatgtggacaccacttaccctgacaagaagagcatactcatgtacatcaccagcctttttcaggttctccctcaacaagttagcattgaggcgatccaggaagtcgagatgctgccccgccccccaaaggtcacaaaggaggagcacttccagctccaccaccaaatgcactacagccagcagattacagtttccttggcacagggctacgagcggacctcctctcccaagcctcggttcaagagttacgcctacacacaagcggcttatgtcacaacctccgatccgacccgttcccccttcccttcccaacacctcgaagccccggaggacaagtcttttggttcttccttgatggagagcgaagtcaacctggatcggtaccagacggccctggaggaagtgttatcttggctgctcagcgctgaagacaccctccaggcgcagggcgagatctcaaacgacgtcgaggtcgttaaggaccagttccacacacatgagggctacatgatggatctgactgcgcaccagggcagagtcgggaacatcctccaactcggtagcaagctgataggtaccggaaaactttcagaagacgaggagaccgaggtccaggagcagatgaacctcctgaactcgaggtgggagtgtttgcgcgtggcgagtatggagaagcaatctaacctgcatagggagatcagctatgtgccctcgacgtatctgacggagatcacgcacgtcagtcaggccctgctcgaggtggagcagttgttgaatgcacccgatctctgcgccaaggattttgaggatctgttcaagcaggaagagtctctcaagaatattaaggactctttacagcagtcgtccggtcgtatcgacattatccattcgaagaagaccgctgccttgcagtccgccacaccggttgagcgcgttaagctacaggaagcgcttagccaattggattttcagtgggagaaggtcaataagatgtacaaggatcgtcagggacgcttcgaccgtagcgtcgagaagtggcggcgattccactatgacatcaagatcttcaaccagtggctcaccgaggccgagcaattcctgagaaagactcagattcccgaaaattgggaacatgccaaatacaaatggtatttgaaggaattgcaagatggcataggccaacgccagacagttgttcggaccctgaacgccacgggcgaagagatcatccagcagtcgagcaagaccgatgcctccattctgcaagagaagctgggcagcttgaacctccggtggcaggaggtctgcaagcagttgtcggaccgcaaaaagcggctcgaggagaccttggagcgtctccaggaactccaggaagccacagacgagctcgaccttaagctccgtcaggccgaggtgatcaagggctcttggcagcctgtgggcgatctgttgatagattctttgcaagatcacctggagaaggtcaaggccctccggggcgagatagctcctcttaaggaaaacgtaagtcatgtgaacgaccttgcccgacagcttaccactctcggtatccaacttagcccctacaacctcagcacgttggaggacctgaacacccgctggaagttgctacaggtcgccgtcgaagaccgggtgcgccagctccacgaggctcatcgagatttcggccctgcgtcccaacacttcctgagtacttccgtgcaggggccctgggagcgcgctatcagtcccaacaaggttccctactacattaaccatgagacccagaccacttgttgggaccacccgaagatgaccgagttgtatcaatccctcgcggaccttaacaacgtccggttctccgcctaccgtactgctatgaagttgcggcggttgcagaaggctttgtgccttgacctcttgtctctgtcggccgcctgcgacgccctagaccaacataacttgaagcagaacgatcagccgatggacatcctacagatcatcaattgcctgacgaccatttatgaccgtctggaacaagaacacaacaacctcgtcaacgtgcctctatgcgtagacatgtgccttaattggcttttgaacgtctacgacacaggtcgtacaggccgtatccgtgttctgtccttcaagaccggtatcatctccttgtgcaaggcccaccttgaggacaagtatcgctacctcttcaagcaggtcgcctccagcaccggcttctgtgaccagcgacgtttgggccttctgctccatgattccattcaaattccccgtcagttgggcgaggttgcctctttcggaggctcgaacatcgagccgagcgttcgcagttgctttcagttcgccaacaacaaacccgagattgaagctgctctgttcttggattggatgcgtctagagccccagtccatggtttggctcccggtcctccatcgtgtcgccgccgctgagacggccaagcatcaagctaagtgtaacatctgtaaggagtgccctattattggatttcgttacagatccctgaaacactttaactacgacatttgtcaatcgtgcttcttctctggccgtgtcgcgaagggccataagatgcactatcccatggtcgagtactgtacaccgaccactagcggtgaagacgttcgcgactttgccaaggtcctgaaaaacaagtttcgcactaagaggtacttcgccaaacatccgaggatgggttacttgcccgtccagacagtactcgagggtgataacatggagaccgatacaatg

SEQ ID NO: 142807 - DNA, 3432 bp, Artificial Sequence
  derived and/or modified sequence
atgctgtggtgggaggaggtagaagattgctacgagagagaggatgttcaaaagaagactttcaccaaatgggttaacgctcaattcagcaagttcggtaagcagcatattgaaaacctgttctctgatctgcaggatggtagaagactgctggatcttctggaagggctgacgggccagaagcttcccaaggagaagggcagcacacgcgtgcatgccctcaacaatgtgaataaagcccttagggtgctgcagaataataacgtagaccttgttaacataggctccacagacatcgtggatggtaaccacaaactgacacttggtctcatttggaacatcattcttcactggcaggtcaaaaacgtgatgaagaatatcatggccggacttcagcagactaacagtgagaaaatcctgctctcatgggtgcggcagagcacaagaaattacccgcaggttaatgtcatcaactttactacctcctggtccgacggtctcgcactcaacgctctcattcatagccatcgcccagacctcttcgattggaattccgtcgtgtgccagcagagcgctacccagcgccttgaacatgccttcaatattgccagatatcagttgggtatagaaaaactcctggatcccgaggacgtagacactacctatcccgacaagaaatccatactcatgtacatcaccagcctgtttcaggtcctcccacagcaggtgagtattgaggccatacaggaagtcgaaatgctccctaggccacccaaggttacaaaagaggagcactttcaactccaccaccagatgcactactctcaacagataacggtctcactggcgcaaggctacgagagaacctcctctcctaagccccggtttaagtcatatgcgtatacccaagctgcctacgttactaccagtgatccaacgcgatcccccttcccttctcaacacctggaggcccccgaagacaaaagctttggctccagtcttatggaatcagaggtgaacctggaccgctatcagacagctctggaagaagtcctgagttggctgctgtccgccgaagacacccttcaagctcaaggagagataagtaacgatgtggaggtcgttaaagatcagttccacacacacgagggttatatgatggacctcaccgcccaccagggcagggttggaaatatcctgcagctggggtccaagctgattggcaccggaaaactgtccgaagatgaagaaactgaggttcaggaacaaatgaacttgttgaattcccgctgggaatgccttagagtagctagtatggagaagcagtcaaatctgcatcgggagatctcttatgtaccatctacgtatctgacagaaatcacgcatgtctcccaggcactgctggaagtcgaacaactgcttaatgctcccgatctctgtgccaaggactttgaggacctgttcaagcaggaggagagtctcaaaaacattaaagacagtttgcaacagtccagcggccggatcgacataatccactcaaaaaagaccgctgctctgcaaagcgcaaccccagtagaacgagttaaactgcaagaggcactgagccagttggacttccagtgggaaaaggttaataaaatgtataaggacagacaaggtcgattcgacaggtctgtagagaaatggaggcggtttcattacgatatcaagatattcaaccagtggctcactgaggctgagcaattcctgagaaagacgcagattccggaaaattgggaacatgccaagtataagtggtacctgaaggagctgcaagacgggatcggccagcgccagacagtcgtccgcacactcaacgctaccggcgaggagatcatccagcagagctccaagacagatgcctcaatactgcaggagaagctggggtccttgaacctccgctggcaggaggtgtgtaaacaactgtccgataggaagaaacgcctggaagagacactggaaagactgcaggaattgcaggaagcaaccgacgaactcgatcttaaactgcgccaggccgaggtgatcaagggttcctggcagcctgtgggcgatctgttgatcgactccctccaggatcatctggaaaaggtaaaggccctgaggggagagattgcccctctcaaggagaacgtcagtcacgtcaacgatctggccagacagttgacgaccctggggatccaattgtctccatacaatctgtctaccctggaggatctgaacaccaggtggaaattgctgcaggtagccgtcgaagatcgcgtaaggcagttgcacgaagcccaccgcgattttggtcctgcctcccaacacttcctctccaccagcgttcaggggccctgggagcgcgcaatcagccccaataaggtgccctattacattaatcacgaaactcagactacatgttgggatcatcccaagatgactgagctctatcagagccttgcagacctcaataatgtccggttctccgcgtaccggactgcaatgaaactccgcagactgcaaaaggccctgtgcctggatctgctgtctctgtccgcagcctgcgacgctcttgaccaacacaatctgaaacagaacgaccaaccaatggacatactgcagattataaactgtctgaccactatctatgaccgccttgagcaggagcacaacaacttggtcaatgtgccactgtgcgtcgatatgtgtttgaactggctgctgaacgtgtacgacactggtcggacgggtagaattcgcgttctgtcttttaagacaggtatcatctctttgtgcaaggctcaccttgaagataaatacaggtacctgtttaagcaggttgcgtcatccactgggttctgcgaccagaggagactcggtctgctcctgcacgacagtatccagattcctcgccagctgggggaggtggcctcattcggggggtctaacatcgagccatctgttaggagctgtttccagttcgccaacaacaaacccgagatcgaggccgcgctcttcctggattggatgaggctggaacctcaatcaatggtatggctgcccgttctgcatagagtggcagccgccgagacagccaagcatcaggccaagtgcaacatatgtaaagaatgtcctatcattggcttccggtaccgctccttgaaacattttaattacgatatctgccagagctgttttttctctggtcgggtcgcaaaaggccacaaaatgcattaccccatggttgagtactgtacgccgaccacctccggcgaagacgttagggatttcgcaaaggtgttgaagaacaaattcaggacaaagcgctactttgcgaaacatcctcggatggggtatctccctgtccagaccgtcttggagggcgacaatatggaaacagacactatg

SEQ ID NO: 142808 - DNA, 3432 bp, Artificial Sequence
  derived and/or modified sequence
atgctgtggtgggaagaagtggaggattgctacgagagggaggatgtccagaagaaaacttttactaaatgggtgaacgcccagttttccaagtttggaaaacaacacatcgaaaacctcttcagtgacttgcaggatggccggaggctgctggatctgctggagggcctcaccgggcagaagttaccaaaggaaaagggaagcacccgggttcacgccctcaataacgtgaacaaagccttgcgagttctccagaataacaatgttgatttagttaacattggcagtactgacatagtggacgggaatcacaagctcacactcggcctgatctggaatatcattttgcactggcaggttaaaaacgtgatgaaaaatataatggcagggctgcagcagacaaactctgaaaagattctgctgtcttgggtaagacagagtaccaggaactatccccaggttaatgtcattaattttactactagttggtctgatggcctggccttaaacgctctcatacactcccaccgacctgatttgtttgattggaacagtgtggtttgccagcagagcgccacccaacggcttgagcacgcatttaatatagcacgttatcagctcggaatcgaaaagcttctggacccagaggatgtagacaccacataccccgacaaaaagagcattttgatgtacatcacctcattattccaggttctgccacagcaagtctcgattgaagccatccaagaagttgagatgttgccgaggcctcccaaggtgacaaaagaagaacatttccaattacaccaccagatgcattactctcagcagattaccgtgtctttagcgcaggggtatgagagaacctcaagtcccaagccacgatttaagtcatacgcatatactcaagctgcctatgttaccacgagtgatcccactaggtctccctttccctctcagcacctggaagcccctgaggacaagtcgttcggctcttcgctcatggaaagcgaagtgaacttagatcgatatcagacggctctagaggaggtgctgtcctggcttctttcggccgaggatacactccaggcgcagggagaaatcagcaacgatgtagaggtggttaaagatcagttccatacacacgagggctatatgatggacctgactgcccatcagggccgcgttggcaacattctacagctggggtccaagctcatcggaaccggcaagctgtccgaagatgaggaaacagaggtgcaggaacagatgaatctgctcaattcacggtgggagtgcctgcgagtggcctcgatggaaaagcagagcaacctccaccgagaaatctcttacgtgccgtcaacttacctcacagaaatcacacacgtcagccaggctctactcgaggtggaacagctgttgaatgcccccgacctctgtgccaaagattttgaggacctgttcaagcaggaggagagtttaaaaaacatcaaggactctcttcaacagtcctccggaagaattgatatcatccacagtaagaaaacagcggctctccagtccgctactccagtagagagagtgaaacttcaggaggcactctctcagctagattttcagtgggagaaggtgaataagatgtacaaggaccgccagggcagattcgaccgcagcgtcgaaaagtggcggcgattccactatgacataaagatcttcaatcagtggttgactgaagcagagcaatttctgagaaagacgcagatcccagaaaactgggagcacgctaagtacaagtggtatcttaaggaattacaggacggcatcggccagcgacagactgtcgtgcgaacattgaacgctaccggtgaagagattatacagcagtcaagcaagaccgacgcgtccattctgcaggagaagctgggcagccttaacttgaggtggcaggaggtctgcaagcaactgagcgataggaaaaagcgcctggaagagaccctggaaagactacaggagcttcaggaggccacagacgaattagacctcaagctgcggcaggcagaagttattaagggatcctggcagcctgttggagacctactgatcgattctttgcaggaccatctagagaaggtcaaagcgctgcggggtgagatagcacctctgaaggagaatgtgtctcatgttaatgatctggccagacagctcacaaccctgggaatacaactgtccccttacaacctcagtactttggaggatttgaatacccgatggaaactgttacaggtagccgtggaggaccgggtaagacagctgcacgaggcacatagggactttgggcctgcctcccagcacttcctgtcgaccagcgtccagggaccctgggagcgggctatcagcccaaacaaggttccttactatatcaaccacgagacccaaaccacatgttgggatcatccaaagatgacagagctgtaccaaagcttggcggatctaaacaacgtccgattcagcgcctatcgcaccgccatgaaattacgtcgcctgcagaaggccctgtgcctcgacctgctatccctttccgccgcttgcgatgccctcgaccagcacaatttaaagcaaaacgaccagccaatggacattctccagatcattaattgcttaaccacaatctacgaccgcctggagcaagagcataataacttggtgaacgtccctctttgtgtggacatgtgtctgaattggttacttaatgtgtacgacaccggtaggaccgggaggatcagggtgctgtcttttaaaaccggaatcatttcactgtgcaaggcccacctggaggacaagtatcgatacttgtttaagcaggtagcatccagtactgggttttgtgaccaaaggagattgggcctgctgctacacgatagcatccagattccgaggcagctaggagaagttgcttcatttggcgggagtaatatcgagccctccgtgcggagctgcttccaattcgctaacaacaagccggagattgaggctgcgctcttcttagactggatgaggctggaacctcagtcgatggtgtggctccccgtgctgcaccgcgttgccgcagccgagactgccaagcaccaggccaagtgtaatatctgcaaggaatgcccgatcattggctttcgctatcggagcctaaaacatttcaattatgatatttgtcagtcatgttttttctcaggtcgtgtggcgaaggggcacaagatgcattaccccatggtcgagtattgcactcccactacctccggggaagatgtgcgggatttcgcgaaagttctcaaaaacaagtttaggaccaagcgatactttgctaagcatcccaggatgggctatctgccggtgcagactgtgctggaaggggacaacatggagactgataccatg

SEQ ID NO: 142809 - DNA, 3432 bp, Artificial Sequence
  derived and/or modified sequence
atgctgtggtgggaagaggtcgaagactgttacgagcgcgaggacgtacagaagaagactttcactaagtgggtgaacgcccagtttagcaaattcgggaagcagcatattgagaacctgttcagtgatctgcaggacggacggcgcctgctagatctgctggaggggttgacagggcagaaactgccaaaggaaaaagggtccacacgagtgcatgccctcaacaacgtcaataaagcgcttcgggtgcttcagaataataatgtagacctcgttaatataggctcgaccgatatagtggacgggaatcacaaactgacactgggcttgatctggaacattatcctccactggcaggtgaagaacgtgatgaagaatatcatggcagggcttcagcagacgaactcagagaagattctcctttcctgggtcagacagagcacacgaaattatccacaggtgaatgttatcaatttcactacgagctggagcgatggactggctttaaatgcactgatacacagtcaccgaccagacctgtttgattggaactccgtggtgtgtcaacagtctgccacccagagactagagcacgccttcaatatagcccgatatcaacttggaattgagaaactcctcgatcctgaagacgttgacacaacttacccggacaagaagagtatactgatgtatatcaccagtctgttccaggttctgccacagcaagtcagcattgaggctatccaggaagtcgaaatgctgccacgccctccgaaagttaccaaagaggaacactttcaactccatcaccaaatgcactatagccagcagatcaccgtctctctcgcgcaagggtatgaaagaacctcctcccctaagcctaggtttaagtcctatgcttatacacaggctgcatacgtcactacttctgacccaacccgctcaccctttccctcccagcacttggaggcacccgaggacaagagctttggatcctccctgatggagtcagaagtcaatctggatcgttatcagacagccctagaagaggttttgtcatggttgctctcggctgaggatacactacaagcccagggtgagatcagcaacgatgtggaagtcgtcaaagaccagttccacacccacgaggggtatatgatggacctgactgctcaccagggtagagtggggaatattctgcagttagggtctaagctaataggcactggcaagctgtccgaagacgaggagaccgaggtgcaagaacagatgaatttattgaactcccggtgggagtgcctgcgggtggcatcgatggagaaacaatctaacctgcatcgtgaaatttcctatgtaccctcaacttatctcactgagattacccacgttagtcaagctctactcgaggtagagcagctgctgaacgctcccgacctgtgcgccaaggactttgaggaccttttcaagcaggaagaaagcctgaaaaacattaaggacagcctacagcagagcagcggcaggatagacattattcactccaaaaaaaccgcggcactgcagtccgcaacgcctgttgagcgagttaaattgcaagaggcactctcacagctcgatttccaatgggagaaggtcaataagatgtataaagataggcagggacggtttgataggagcgtggaaaaatggcggaggtttcattatgacatcaagattttcaaccagtggctaacagaagctgagcagtttctcaggaagactcaaattccggaaaactgggagcatgccaagtacaagtggtacctcaaggagctccaagacggtattggccagcggcaaacagtggtacggaccctgaacgcaactggcgaagaaatcattcagcaatcctctaaaaccgacgctagcatcctgcaggagaagctggggagcctgaatttgagatggcaggaggtttgcaaacagcttagtgaccggaagaagcggctcgaggagaccctagagcgactccaagaacttcaagaggcaaccgatgagcttgacttgaagctccgtcaagcagaggtcataaaaggttcttggcagcctgtaggtgacttgctaatagatagcctgcaggatcacttggaaaaggtcaaagcactacgtggggagatcgctccattgaaagagaacgtctctcatgtgaacgatctcgcaaggcagctcactacattgggaatacaattaagcccttacaacctcagcacactggaggacctgaatactagatggaagcttctccaggtcgcagtcgaagatcgtgttcgccagctgcacgaggcacacagggactttgggcctgcttcccaacacttcctgtcaacctccgtgcaggggccctgggaacgcgcgatctcccctaataaggtaccttactatattaaccacgaaacccagactacatgctgggaccaccccaaaatgaccgaactgtaccagtccctggctgacctgaataacgtgcgattcagtgcttaccgcaccgctatgaaattgcgcaggctccagaaggcactgtgtctggaccttctctccctgtccgccgcttgcgacgcactcgatcagcacaatctgaagcaaaatgaccagcccatggacatattacagatcattaattgtctcaccactatctatgacagattggagcaggaacataacaaccttgtgaatgttcctctttgcgttgatatgtgtctgaattggttgctgaatgtgtacgataccgggaggacagggcgcatacgggtgttatcatttaagaccggtatcatcagcttatgcaaggcccacctggaagataagtatcgttacctttttaagcaggtcgcctcctctaccggattctgcgatcagaggcggctgggtctgctgttgcacgatagtattcagattccacgccaattaggagaagtcgccagcttcggcgggtcgaacatcgagccatcggtgcggtcatgtttccagttcgcaaacaacaagccagaaatcgaggccgctctgttcttggattggatgcgattagagccacagagtatggtttggctcccagttttacatcgcgtggctgctgcagagactgcaaaacatcaagccaagtgtaacatttgcaaggagtgtcccataataggcttccgataccgcagtctcaaacacttcaactacgacatctgtcaatcctgttttttctcaggtcgcgtggctaaggggcacaagatgcactaccctatggtcgagtattgcacacctaccacttcaggggaggacgtcagggattttgctaaagtgcttaagaacaaatttaggacaaaacgttattttgccaagcatccgaggatggggtacctcccagttcaaactgtgctagagggtgacaacatggagacggacactatg

SEQ ID NO: 142810 - DNA, 3432 bp, Artificial Sequence
  derived and/or modified sequence
atgctttggtgggaagaagtggaggattgctatgagcgtgaggatgtccaaaagaaaacattcaccaaatgggtcaatgctcaattctctaaatttggaaagcagcacatcgagaaccttttctctgatctccaggatggcaggagattactggacctcctggaggggctgacgggccagaaactgccgaaggagaagggaagcacgcgagtgcatgcacttaacaacgtcaacaaggcacttcgtgtattgcagaacaacaacgtggatcttgtgaatattggctctactgatatcgtggatggaaatcataagttgaccctgggcctgatttggaacattatactacattggcaggtgaagaatgtgatgaagaacatcatggcggggctccaacagaccaactcagagaaaattctgctgagctgggtgaggcagtccactcggaactatccccaggtgaacgtgatcaactttaccacaagctggtcagatggactggcactcaatgccctcattcattcccacagaccggacctcttcgattggaactccgtcgtgtgccagcagtctgcaactcaacgcctggagcatgcctttaacatcgcgcggtatcagctgggaatcgaaaagctgctagacccagaggacgtggatacaacatatcctgataagaagtccatcttaatgtacatcacaagccttttccaagtactcccacaacaggtatcaatcgaagccattcaggaagtggagatgctccctcgcccacccaaggtgacaaaggaagaacactttcagctacatcatcagatgcattattcccagcaaataactgtgtcactggctcaaggatatgagcgaacatcaagtcccaaaccacgttttaagtcctacgcatatactcaggctgcgtacgtgacaacgtctgatccaactagatcgccgttccccagtcaacacttggaggcacccgaagacaagagcttcggatcctccttaatggagtcagaggtgaatctggaccgataccaaacagcactggaagaggtgctatcctggctactgtccgccgaagatacattgcaggcacagggggaaatttccaacgacgttgaagtcgtgaaagatcagtttcacacacacgagggctacatgatggaccttacagcgcatcaaggacgagtcgggaacatcctgcaactgggctctaagctgatcggaactggaaagttatcagaggatgaggaaaccgaagtacaggagcagatgaatctgctgaactctaggtgggagtgtctgcgagttgcatcaatggagaagcagtctaatctgcacagagagattagttacgtcccctccacttacttgaccgaaatcactcatgtttcccaggctctgttggaagtggagcagcttctaaatgcaccagatctgtgtgctaaggacttcgaggatcttttcaaacaagaagagtccctgaagaatataaaggactctcttcagcagtcttcagggagaatcgatatcatccactctaagaagacagctgccttacagtctgctactcctgtggagagggtgaagcttcaagaggccctttcccagcttgatttccaatgggagaaagtgaacaagatgtacaaagataggcagggccggttcgaccgcagcgtggaaaaatggagacggttccattacgatattaagattttcaatcaatggctcactgaggccgagcagtttctccgcaagacacaaataccagaaaattgggagcatgctaagtataaatggtatctaaaagagctgcaggatggcatagggcagcgacaaactgtggtgcggacactgaacgctaccggcgaagagattattcagcagtccagtaagactgacgcgagcattctgcaggaaaaattaggttcattgaatctacggtggcaggaggtttgtaagcaactgagcgataggaaaaaacgcctcgaagaaactctggaacggttacaggagctccaggaagccacagacgagttggatctcaagcttcgtcaggctgaggtcattaagggcagctggcagcccgttggcgatctgctgatcgattccctgcaggaccacctagaaaaagtgaaggcactgagaggagaaatcgctcccctgaaggagaacgttagtcatgtgaacgacctcgctcggcagctgaccactttagggatccagctatccccatataatctgtctacactggaagatctgaacactcgatggaagctgctgcaggtcgcggttgaggaccgggtaaggcagttgcatgaggcacacagggacttcggccctgctagtcagcacttcttaagcacaagcgtccaaggcccatgggagagagccattagtccaaataaggtcccctattatatcaaccacgaaacccaaacgacttgttgggaccacccaaaaatgaccgagctgtaccagtcacttgctgaccttaacaatgtgcggttcagcgcatatcgaacagccatgaaattgcggagattgcaaaaggcgctctgcctggaccttttaagcctaagtgcagcttgtgacgcactggatcagcacaatctgaagcagaatgaccagcccatggacatattgcagatcattaactgcctcactacaatttacgatcgcttggagcaagaacacaacaacctggtgaacgtgcccctctgcgtggacatgtgtctgaattggctactgaacgtgtatgatactggtagaacgggaaggattcgtgtcctctcattcaagactggtattatctccctgtgcaaagcccacctggaggataagtacaggtacctttttaaacaggttgcgtcttcaacgggattttgcgatcaaaggaggttggggctacttttgcatgatagtatccaaattccgcggcagctaggagaagtcgcctcattcggcggaagtaacattgagccttctgtccgcagctgcttccagtttgcaaacaacaaacctgagattgaggctgccctgttcttagattggatgcgcttagagccacaaagcatggtctggttgcccgttctgcatagagtggctgccgctgagactgcgaaacatcaggctaaatgcaacatttgcaaagagtgtcccattattggttttcgctatagatccctgaagcacttcaactacgatatctgtcaatcgtgttttttctctggacgggtggctaaagggcataagatgcactaccccatggttgagtattgcacaccgacaacatccggagaagatgtcagggattttgccaaagttctcaagaacaaatttcggacgaaacgctactttgccaaacatcccagaatgggttacctgccggtgcagaccgtactggagggcgataacatggaaaccgacacaatg

SEQ ID NO: 142811 - DNA, 3432 bp, Artificial Sequence
  derived and/or modified sequence
atgttgtggtgggaggaggtcgaagactgctacgagagggaggatgtacaaaaaaaaacatttactaagtgggttaacgcacagttctctaagttcggaaagcagcatatcgagaatctgttttcagatctgcaggatggcagaaggcttttggatctcctggaggggcttacggggcaaaagcttccaaaggagaaggggtcaacgcgggtccacgccttgaacaacgtgaacaaagcgctgcgggttctacaaaataataatgtcgatctcgtcaacatcggtagcactgacatcgtagatggcaaccacaagttgacactgggtctgatttggaacattatcctgcactggcaggtcaagaacgtaatgaagaatatcatggccggcttgcagcagacaaatagtgaaaagatcctgttgagctgggttcggcagagtacgcgtaattatccacaagtcaacgttattaactttactacaagctggtccgacgggttagccctcaatgccctcatccattcacaccgacctgacctctttgattggaactctgttgtctgtcagcaatctgcaactcagaggctggaacacgcattcaacatcgcccggtaccagctcggcatcgagaaactgctggacccagaggatgtcgataccacttatcccgacaagaagtctatattaatgtacatcacgtccctgtttcaggttctgcctcagcaagtgagcattgaagccatacaggaggtggaaatgttgccaaggcctcccaaagttacgaaggaagagcatttccagttgcaccaccagatgcattactcccaacagatcaccgtctctctggcgcagggatatgaaagaacttcatctccgaaacctagatttaaaagctatgcctacacacaggcagcctatgtcacaactagcgaccccaccagaagtcctttcccttcccaacacttggaggctcccgaagataaatccttcggctcttccttgatggagtccgaagtgaacctcgaccgctaccagacggcactggaggaagtcctgtcctggctgctcagcgcggaggacactctgcaagcccagggcgagatcagcaacgatgtggaggttgtcaaggatcagttccacacccatgaggggtacatgatggatctgacagctcaccagggaagggtgggaaatatcctgcagcttggatcaaagcttattggcactggcaagctatccgaggatgaagagaccgaggtacaggaacaaatgaacctgctcaatagcaggtgggaatgtctgagagtggcttcaatggaaaaacagagtaacttacatagagagatctcttacgtgccgtcgacatatctgactgagattacccacgtctctcaggccctgctggaagttgagcagctattgaacgcccccgacttgtgtgccaaggattttgaggatctgttcaaacaggaagagtctctcaagaacatcaaggactccctccaacaatcttccggccgaatcgatatcatccactctaaaaagaccgccgccctgcaaagcgccacccctgtggagagagtcaagctgcaggaagccttgagtcagctcgatttccaatgggaaaaggtgaacaagatgtacaaagaccgacaagggcggttcgacagatccgtggagaaatggaggcgcttccactacgacatcaaaatcttcaatcagtggcttactgaagccgaacagtttctacgcaagacacaaattcctgaaaattgggaacatgccaagtacaaatggtacctgaaggaactccaagatggcattgggcagaggcaaacggtggtgagaaccctcaacgcaactggcgaggagatcattcagcaatcctctaagacggacgcttccatcctgcaggaaaagttggggtccttaaaccttcgttggcaggaggtttgtaagcagctcagcgaccgaaaaaagcggctcgaggagaccctggagaggctgcaggaactccaagaggcaaccgatgagctggacctcaagctgcggcaggctgaggtcattaaagggtcgtggcagcccgtaggggacttacttatcgactctctgcaggaccacctggaaaaggtgaaggctttgcggggagagattgcccccctgaaggagaacgttagccatgtgaacgacctggcaagacaactgacaactctcgggatacagttatcgccttacaatttatccactctcgaggacctgaacacccggtggaagctgctgcaggtggcggtggaagaccgtgtaaggcagctgcatgaggctcaccgggattttgggcccgcttcccagcacttcctgagtacaagcgtgcaggggccctgggagcgagctatttcacctaataaggtgccctactatatcaaccacgagacccagaccacctgctgggatcaccccaagatgactgaattgtaccagtcccttgctgatcttaacaacgtgcgcttctctgcctaccggacagccatgaagttacggagactgcagaaagcactgtgcctggatctgctttctctgagcgcagcgtgcgatgcactggatcagcataatctcaaacagaacgaccagccgatggatattcttcagatcattaattgccttaccaccatctacgacaggctggaacaggagcataataatttggtgaatgtgccactgtgcgtcgacatgtgcctgaactggctccttaatgtctacgacacaggccgcacagggcggattcgggtcctgtcatttaagaccggcattatttctctctgcaaggcccacttggaggacaagtatcgttatctgttcaagcaggtggcaagctctaccggattttgcgaccagcgccggctggggctcctgttacacgactctatacaaattccacgacagctgggagaggttgccagcttcgggggaagcaacatcgaaccatccgtgcgttcttgttttcagttcgccaacaacaagcccgaaatcgaggccgccttgttccttgactggatgcgcctcgagccacagtccatggtgtggctgccggtgctgcatcgagtagctgccgcggaaaccgccaagcaccaggcgaaatgcaatatatgcaaggaatgcccaattattggattcaggtatcgctcccttaaacattttaactacgatatatgccagtcttgcttcttttcagggcgagtcgcaaaagggcataagatgcactatccaatggtggaatactgtacacccaccacaagtggggaggatgtccgggacttcgccaaagtgttaaagaataaatttcgaaccaagaggtactttgctaagcacccaaggatgggttacttgccagtacagaccgtccttgagggcgacaacatggagaccgacactatg

SEQ ID NO: 142812 - DNA, 3432 bp, Artificial Sequence
  derived and/or modified sequence
atgctgtggtgggaggaggtggaagattgctatgaacgagaagatgtccagaaaaagaccttcaccaaatgggttaatgcccagttctctaaatttggcaaacagcatatcgaaaacctgtttagtgacttgcaggatggccggcggctcctggatctgctcgaaggattaaccgggcagaaactgcccaaggaaaagggcagtacccgagtccatgccctgaacaacgtgaacaaggcactgcgggtgctgcagaacaataacgtagacctggttaatataggtagcaccgatattgtggacggaaatcacaagctaaccttggggctcatttggaatattatactgcattggcaggtcaagaacgtgatgaaaaatattatggccggactgcaacagaccaactccgaaaagatactgctgagttgggttaggcagtccactagaaattaccctcaggtgaatgttattaacttcactacaagttggtctgatgggcttgccctgaacgccctcatacacagccatagacctgatctgttcgattggaacagcgtggtgtgccagcagtccgcaactcagagactagagcacgcttttaacatagcaaggtatcagctgggtatcgagaaattgctggatcccgaggacgtggacactacataccccgataagaaaagcattctgatgtatattacctctctgttccaagtgctccctcagcaagtcagcattgaggctatacaggaggtggagatgcttccccgtcctcctaaggttaccaaagaagaacattttcagctgcaccaccagatgcattatagccagcagattactgttagtctggcccagggatacgagcggacctcctcaccaaaacctcgctttaaatcttacgcatatacccaggctgcctatgtgaccactagcgatcccactagatcccctttccctagccagcacctggaagctcctgaagacaagagttttggttccagtttaatggagtcagaggtgaacctagataggtatcagaccgcactggaggaagtgctgtcctggctcttaagtgccgaagacactctgcaggcccagggagagatttctaatgacgtggaggtcgtgaaggaccaatttcatacccatgagggctatatgatggacttaaccgcccatcagggacgggtgggcaatatcctgcagctggggtctaagctgattggaaccggcaaactctccgaagatgaagagactgaggtgcaagagcaaatgaacctactcaacagtaggtgggagtgcctgagggttgcctccatggaaaaacagagcaacctgcacagagagatctcctacgttccctctacctacctgactgagattacccacgttagtcaggccctgttagaagtggagcagctcttaaacgcccctgacctctgtgcaaaagatttcgaagatctgttcaagcaggaagagagtctgaagaacataaaggattctctgcagcagtccagcgggaggatagacataattcacagcaagaagacagcagccctccagtctgcaactcctgtggagcgggtgaaactgcaggaagccctgagccagctggacttccaatgggagaaggttaataaaatgtacaaagaccgtcagggaagattcgacagaagcgtggagaagtggcgaagatttcattatgacataaagatttttaaccagtggctaaccgaggcagagcagtttctgcgaaaaacacagatcccagagaactgggagcacgcaaagtacaaatggtatctaaaagaacttcaagatggaataggccagcggcagaccgttgtgcgtactttaaatgccaccggcgaagaaatcattcaacagtctagcaaaaccgacgcctccatactacaggagaaattgggatctctgaatctacgatggcaggaggtgtgcaaacagctatccgacagaaagaaaaggctggaagagacacttgagagactgcaggagctgcaggaggccacagacgagttagatctcaaactgagacaggctgaagttataaaaggctcttggcagcccgtgggagacctgctgatagattctctgcaggatcatctggagaaagtgaaggccctgcggggcgaaattgcaccactgaaagagaacgtcagccacgtgaatgacctggctcgccagctgactaccctcggcatccaactctcaccatacaacctgtctacattagaagatctgaatactaggtggaagctgctgcaggtggcagtggaagatcgcgtaagacagctgcacgaggctcacagagattttgggccagcctctcagcactttctcagtacatctgtgcaaggcccgtgggagcgggctataagccctaacaaggtgccttattacattaatcatgagacccagacaacatgttgggaccatcctaagatgaccgaactatatcaaagtctggccgatctgaataacgttcgctttagcgcttatcgcaccgcaatgaagctgcgtcggctccagaaggctctatgtctggatctgctgagtctaagtgcagcctgcgacgctctcgaccagcacaacctgaagcagaacgaccaaccaatggacatattgcaaatcatcaattgtctgacaacaatttatgatagactggaacaggagcacaataatctggtgaacgttcctctgtgtgtagacatgtgtttgaattggctcctgaatgtctacgacactggtcggaccggcaggatcagggttctatcctttaaaactggcattatttctttatgtaaagcacacctcgaggataaatacaggtacttattcaaacaagtggcaagtagcacagggttctgtgaccaacgtcggttaggcctgctactacatgattcaattcaaattcctaggcagttgggggaagttgcttcttttggaggctcaaacattgagccaagtgtccgcagctgctttcagtttgctaacaataagcctgaaatcgaggccgctttatttctggactggatgcggctggagccccaatccatggtgtggctgcctgtcctgcatagagtggccgccgctgagaccgcaaaacaccaagccaagtgcaatatctgcaaagaatgccctataatcggctttaggtacagaagcttaaaacactttaactatgacatttgccaatcatgttttttctccgggagggtggccaaaggccacaagatgcactacccaatggtggaatactgtaccccaaccaccagtggtgaggatgtgagagacttcgcaaaggtgctgaagaacaaattcagaactaaacggtatttcgcaaagcaccctcgaatgggctatctgcctgtacaaactgttctggaaggagacaatatggagaccgacaccatg

SEQ ID NO: 142813 - DNA, 3432 bp, Artificial Sequence
  derived and/or modified sequence
atgttgtggtgggaagaagtagaagactgttatgagcgggaagatgttcaaaagaaaacatttaccaaatgggtcaacgctcagtttagcaagttcggcaaacaacacatcgaaaacctgttttctgatttacaagatggtagacgccttcttgacttattagaaggcctgacaggacagaaacttcctaaggagaaagggtcaacaagagtccacgcgttaaataacgttaacaaggctctacgcgtactacagaataataacgttgatcttgtgaatattggcagtacggacattgttgatggtaatcataaactgaccttaggcctgatatggaatatcattttgcactggcaagtgaaaaacgtaatgaaaaacataatggcaggtttacaacaaacaaactcagaaaagatcctgctgtcatgggtccggcagagcacacgcaactatcctcaagtaaacgtaattaatttcacgacaagctggtctgatggactcgctctgaatgctctgattcactctcacagaccggatctgtttgactggaacagcgtagtgtgccaacagagtgctacgcaaagactcgagcacgcatttaatattgcgagatatcaattgggcattgaaaaacttcttgatcctgaagatgtggataccacatatccggacaaaaaaagcattcttatgtatatcacatcactttttcaagtgttaccgcagcaggtttctattgaggcgatacaggaagttgagatgttgcctagacctccgaaagtgacaaaagaagaacattttcaactgcatcaccaaatgcactactctcagcaaataacggtatcgttagctcagggttacgaaagaacttcttcgccgaaaccgagattcaagtcctatgcctatacacaggctgcgtatgttactacctcagaccctacacgtagtccgttccctagccagcacctggaagccccggaagacaaatcgtttggcagtagtctgatggaaagcgaggtcaatttggatcgctatcaaaccgcgctggaagaggtattgtcttggttattgagcgccgaagataccttgcaggctcaaggagagatatcaaatgatgtggaggtcgttaaagatcagtttcacacgcacgaaggctatatgatggacctgactgctcatcaaggacgagttgggaatattttacaacttggaagcaagttgatcggaactggaaagctgtctgaggatgaagagacggaagttcaggaacagatgaatttattgaactctagatgggaatgcctgcgcgttgcaagcatggagaagcagtctaatctccatcgcgaaattagctacgtaccatcaacttacttgactgagattacccacgtgtctcaagctttattagaagtggagcaattacttaatgctcctgacttatgtgcgaaagactttgaagatctgtttaaacaagaagagtctttgaaaaacatcaaggatagcttgcagcaatcatcgggacgtatagatataatacactctaaaaagactgctgccttacagagtgcaacccctgttgagagagtgaagctgcaggaagctctctcccaattagattttcaatgggaaaaagtgaataagatgtacaaggatcgccaaggccgattcgataggtcagtcgaaaaatggcggcggtttcactatgatattaagatctttaaccaatggctgacagaagccgaacaatttcttcggaaaactcaaattccggaaaattgggaacatgcgaagtataagtggtaccttaaggaacttcaagacggaatcggacaaaggcagacagtagtcaggacactcaacgctactggcgaagaaataatacagcagtcatcaaaaacagatgcatcaatccttcaggagaagcttggttcacttaacctgaggtggcaggaagtgtgcaagcaacttagtgatcgtaaaaagcgcttggaggaaacactcgaacgcttgcaggaattgcaggaggcaacggatgagttggatctgaaactgagacaagcagaagttatcaagggatcttggcagcctgttggtgatcttctgattgattcgctccaagaccatcttgaaaaggtcaaagcactgcgtggtgaaatagcccccctcaaagaaaacgttagtcatgtcaacgatcttgcgcgccaattgacaactttgggcattcagttgtcaccgtacaatcttagcacattggaagatctgaacactcgatggaaattactgcaagtggcggtcgaggatcgtgtcagacaactgcatgaagcacatcgtgactttgggccggcgtcacaacattttctttcaacttccgtccaaggtccgtgggaaagagccatttctccgaacaaagtaccgtactacatcaaccatgaaacccagacaacgtgctgggaccatcctaaaatgacagaactgtatcaatcacttgccgatctgaataatgttcgattttcagcctatcgtacagcaatgaaattgcgcaggctacagaaagcactgtgcctggatctattatctttgagtgcagcctgcgatgcgctagatcaacataatctgaagcagaatgatcaaccgatggatattctgcaaattattaattgcctcacgacgatctatgatcgtttagagcaagaacacaataacctcgtgaatgtcccactctgcgtcgatatgtgcctgaactggctgctgaacgtctatgatacgggcagaacgggacggattcgcgttttatcttttaaaacaggaattatttcgctttgcaaggcacatttagaggataaatatagatatctctttaagcaagtggcatcttcgactggattttgtgatcaaagacgtctgggtttgctcttgcatgactccatacagattccgcgccaactcggggaagtcgcaagctttggtggatcaaacatagaaccaagcgtccgttcctgctttcaatttgcaaataacaaacctgaaattgaagcggctttgtttctggactggatgcgtctagagcctcagagcatggtttggcttccagtattacaccgggtcgctgctgccgagaccgcaaaacaccaggctaagtgtaacatatgtaaggaatgcccgattattggtttccgttatcggagccttaaacactttaactatgatatctgtcaaagctgctttttttccggtcgcgtagcaaagggtcataaaatgcattatcccatggtcgagtactgtaccccaaccacgtctggggaggacgtccgcgattttgcaaaagtcctgaaaaataaattccgcacaaaacgctattttgcgaagcatccgagaatgggctatcttccagttcaaacagtgttagagggtgacaatatggaaacagacacgatg

SEQ ID NO: 142814 - DNA, 3432 bp, Artificial Sequence
  derived and/or modified sequence
atgctgtggtgggaagaggtcgaggattgctacgagcgcgaggatgtccagaaaaagaccttcactaagtgggtgaatgcgcagtttagcaaatttggaaaacagcacatcgagaaccttttctcagaccttcaggacggacgtcgcctgctcgacctcctcgagggtcttacgggtcagaagctgcctaaggagaaaggatccactcgagttcacgccctgaacaatgtgaacaaggcgctgagggtcctccaaaacaacaatgtggacctggttaacataggaagcaccgacatagtcgacggcaatcacaagctgactcttggattgatctggaacattatccttcactggcaagtcaaaaacgtgatgaagaacatcatggcgggactgcaacagactaatagcgaaaagatcttgctgtcgtgggtgcgccaatcgacgagaaattacccgcaagtgaacgttatcaacttcacgacgtcctggtccgatggcctcgccctgaatgcgctgatccattcccatcggcctgatttgtttgattggaatagcgtggtgtgtcagcagtcggccacccagagactggagcatgccttcaatattgcgagatatcaactggggatcgaaaagctcctggacccggaggacgtcgataccacttacccagataagaagtcgatccttatgtacatcacgtcgctgttccaggttctgccgcagcaagtgtcgatcgaagcgatccaagaggtcgagatgctcccacggcctccaaaggtgactaaagaagaacatttccagctgcaccaccaaatgcactactcccaacagatcaccgtgtccctggctcaaggctatgaaagaacctcctcgccaaagcctcggttcaaatcatacgcctatactcaggccgcctacgtgaccacttccgaccccacccgctccccgtttccgtctcagcacctggaagctccggaggataagtcattcggctcaagcctcatggagtcggaggtgaacctggatcgctaccagaccgctctggaggaggtgctgtcgtggctgttgagcgccgaagataccctgcaagcccagggcgagatctctaatgacgtggaggtcgtgaaggaccagtttcacacccatgagggatacatgatggacttgaccgcgcatcagggacgcgtggggaacatcttgcagttgggcagcaaactcattggaacgggaaaacttagcgaggatgaagaaaccgaagtccaagaacaaatgaatctcctgaattccaggtgggaatgtctgcgcgtggctagcatggagaagcagtcgaacctgcaccgcgagatctcgtacgtgccctcgacctatcttactgagattacccatgtctcacaggctctgctggaagtggaacaactcctcaatgcgccggacttgtgcgctaaggacttcgaagatctctttaaacaggaagagtcgctcaaaaacatcaaggacagtctccagcaatcgagcgggcggatcgatatcatccactcaaaaaagacggcggctctccagtccgcaactccggtggaacgcgtcaaattgcaagaggcactgtcgcaactggacttccaatgggaaaaagtgaataagatgtacaaggacagacaggggcgcttcgatcgctccgttgaaaaatggcggcgcttccactacgacatcaagattttcaaccagtggctcaccgaggcagagcagttcctgcgtaagacccaaatccccgagaattgggagcacgcaaagtataagtggtacttgaaagaactccaagacggcatcggccagcgccagaccgtggtgaggactctgaacgcgaccggcgaagaaatcattcaacagagctctaagactgacgcgtccatccttcaggagaagctggggtcactgaacctgcggtggcaggaagtgtgcaagcaactgtcagaccggaagaaaagactggaggaaacgctggagcggcttcaagaattgcaagaagccaccgacgagcttgatctgaagctgcggcaggcagaggtgatcaagggatcatggcagccggtgggagatctgctcattgactcgctccaggatcacctcgagaaagtgaaagcgcttcgaggggagatcgcgcctttgaaggagaacgtgtcacacgtgaacgatctggcccgacagcttactactttgggaatccagctgtcaccctacaacctgtcaactctcgaagatctgaatactagatggaaacttttgcaagtggcggtcgaggaccgcgtccggcagctgcacgaagcgcacagagacttcgggccggcgtcgcagcattttctctccaccagtgtccaaggtccgtgggaacgcgccatctcgccgaataaagttccttattacatcaaccacgagactcagactacgtgctgggatcacccgaaaatgactgaactttaccaatcgcttgccgacttgaataatgtccgcttttcagcgtaccggactgcaatgaagctgcgcagactgcagaaggccctctgcctggacctgctgtcgctgtcggccgcttgtgatgcgctcgaccaacataatcttaaacagaatgatcagccaatggacatcctgcaaatcatcaactgcctgactactatttacgatagactggagcaagagcacaacaacttggtgaacgtgccactctgtgtcgacatgtgcctcaactggctgctgaacgtgtacgataccggtcgcaccggtaggatccgcgtgctcagcttcaagactgggatcatctcgctgtgcaaagcgcacctcgaggacaagtacagatatctcttcaagcaggtggcatcctcgaccggattctgtgatcaacgtagactgggactgctcctgcacgattctattcaaattccacggcagctcggagaagtggccagcttcggaggctccaacatcgagccgtcagtgcggtcgtgtttccagttcgccaacaacaagccggaaatcgaagccgcactctttctcgattggatgcggctggaaccacagtcgatggtgtggctccctgtgctgcacagagtggcggccgctgagactgctaagcatcaagccaaatgcaacatttgcaaagagtgcccgatcatcgggtttcggtaccggtcgctcaaacatttcaactacgacatctgccagtcgtgcttcttttcgggtcgcgtggccaaaggacataagatgcattacccgatggtcgaatactgcactccaactacctccggtgaagatgtgcgcgatttcgcgaaggtgctcaagaataagttccggaccaagcggtacttcgccaaacacccaagaatgggatatctgccggtgcagacggtgctggagggagacaatatggagactgataccatg

SEQ ID NO: 142815 - DNA, 3432 bp, Artificial Sequence
  derived and/or modified sequence
atgctctggtgggaagaagtggaagattgttacgagcgcgaagatgtgcagaagaaaacgttcaccaagtgggtgaatgctcagttctctaagttcggtaagcaacacatagagaacctgttctcagacctgcaagatgggcgccggctgctggacctcctggagggattgacgggacagaaactgccgaaggaaaaggggagcaccagagtccacgcgctgaataacgtcaataaagcgttgcgggtgctccaaaacaacaacgtggacctggtgaatattggatcgactgacatcgtggacggaaaccataagctcaccctgggattgatttggaacattatcctgcactggcaggtgaagaatgtgatgaagaacattatggctggactccagcagaccaattcagagaaaatcctcctctcatgggtccgccagagcaccagaaattacccccaggtcaatgtcatcaactttaccacgtcgtggtcggacggactcgcattgaatgcgctcatccactcacatcggcccgatttgtttgactggaactcagtcgtctgtcagcagtcggcgacccagaggcttgaacacgcgttcaacatcgctagataccagctgggaatcgagaagctgctggatccggaggacgtcgacacgacctacccggacaagaaaagtatcctgatgtacattaccagcctcttccaggtgctgcctcagcaagtgtcaatcgaagcgatccaggaggtcgaaatgttgccgcgccctccaaaggtgactaaggaggagcatttccagctgcaccaccaaatgcactattcgcagcaaatcactgtgtcgctggcccagggctacgaacgcacctcctccccgaagccgaggtttaagtcctacgcctacacccaggccgcatacgtgaccacttcggacccgaccagatcgccgttcccaagccaacacttggaggcgccggaagataagtcgttcggtagctccctgatggagagcgaagtcaacctcgaccgctaccaaacggcacttgaggaggttctgtcgtggctgctttcggctgaggacaccctccaagcgcagggagagatcagcaacgacgtggaagtggtgaaagaccaattccacacccacgagggctacatgatggatctgactgcccaccaaggccgcgtgggcaacatcctgcagcttggatcaaagctgatcggcaccgggaagttgagcgaagatgaggagactgaagtccaggagcagatgaacttgctcaattccagatgggagtgcctccgcgtggcttcaatggagaagcagagcaacctgcatcgggaaatctcatacgtgccgtccacctacctcactgagattactcatgtgagccaggcgttgctcgaagtggaacagctgctgaacgccccggacctgtgtgcaaaagattttgaggacctgttcaagcaagaggaaagcctcaagaacatcaaagattcgctccaacagagttcgggtcgcatcgacatcatccattcgaaaaagacggcagcgctgcagtccgctactccggtggagagagtaaagctccaagaagcgctgtcgcagctggactttcagtgggaaaaggtgaacaagatgtacaaagatagacagggaagattcgatagaagcgtggaaaagtggaggaggttccattacgacatcaagattttcaaccaatggctgactgaggccgaacagtttctcagaaagactcagattcccgaaaattgggagcatgccaaatacaagtggtatctcaaggaattgcaagatggaatcggacaacggcagacggtcgtccggaccttgaacgccactggagaggaaatcatccagcaaagctcaaaaactgatgcctcgatcctccaggaaaaactcggcagcctcaacctccgctggcaggaagtgtgcaagcagctgtccgatcgcaaaaagagactggaagagacgctggaacggctgcaagagctgcaagaggctactgacgagctggatctgaagttgcggcaggcagaggtgatcaagggatcctggcaaccggtcggtgatctgctcatcgactccctccaagatcatctcgagaaggtcaaagccctgcggggggaaatcgcgccgctcaaggagaacgtgtcgcacgtcaacgacctggctcgccaacttaccactttgggtattcagctctcgccgtacaatctgtcgactctcgaggacctgaacaccaggtggaagttgctgcaggtcgccgtggaggaccgggttcgccagctgcatgaagctcatcgcgacttcggaccagcatcacaacatttcctttcaaccagcgtccaggggccgtgggagcgggcgatctcgccaaacaaggtgccctactacatcaatcacgagactcaaaccacgtgctgggaccacccgaagatgactgagctgtatcagtccctggccgacctgaacaacgtccggttctccgcatatcggactgccatgaagctgcggcggctgcaaaaggcgctgtgccttgatctgctgtcattgagcgccgcgtgtgatgcactcgaccagcataacctgaaacaaaacgatcagcctatggacatcctgcagatcatcaactgccttaccaccatctacgaccggctggagcaggaacacaacaatcttgtgaacgtccctctgtgcgttgatatgtgtctgaattggctgctcaatgtgtacgacaccgggagaactggccgcatccgggtgctctcgtttaagaccggaatcatctcactgtgcaaggcgcacctggaggacaagtatcggtacctgtttaagcaagtcgccagctcaaccggattctgcgaccagagacggttgggcctgctgctccacgatagcatccaaatcccacgtcaattgggagaagtggcgtcgttcggcggatccaacatagagccgtctgtaagaagctgcttccagttcgccaacaacaaaccggagatcgaagcggcgctgttcttggactggatgcgcctggagccgcagagcatggtctggctgccggtgctgcaccgcgtggcggccgcggaaacggccaaacaccaggccaagtgcaatatctgcaaagaatgcccaatcattggcttcaggtaccgaagtttgaagcatttcaattacgacatctgtcagtcgtgctttttctcaggacgcgtggcaaaaggacacaagatgcactacccgatggtggagtactgcaccccaaccacctcgggagaggacgtgcgagatttcgccaaggtcttgaaaaacaagtttcggactaagcggtacttcgcgaaacaccctcggatgggatacctccctgtgcaaaccgtcctggaaggagacaacatggaaaccgataccatg

SEQ ID NO: 142816 - DNA, 3432 bp, Artificial Sequence
  derived and/or modified sequence
atgctgtggtgggaagaggtggaggattgctacgagagagaggacgtccaaaagaagaccttcacaaagtgggtgaacgcgcagttctccaagtttggcaaacagcacatcgagaacttgtttagcgacctgcaagacggccgtaggctgctcgatctgttggagggcctgacaggccagaaacttcccaaggaaaagggctccacacgggtgcacgcgttgaacaatgttaacaaagctctcagagttcttcagaacaataatgttgatctcgttaatatcggttctacagacattgtagacggtaaccacaaactgaccttgggacttatttggaacattattctccactggcaggtgaagaacgtgatgaagaatatcatggctggcctgcagcagacaaattccgaaaaaatcttactgtcatgggtcaggcagtccaccagaaactaccctcaggtgaatgtaattaacttcactacctcgtggagcgacgggcttgcgctgaatgccctgattcactctcacaggcccgacctctttgactggaattcggtggtttgtcagcagagcgcaactcaacgactggaacacgcttttaacattgctagataccagctaggcatagagaagttgctcgaccctgaggacgtggacaccacatatcccgacaagaaaagtatattgatgtatattactagcctgtttcaggtactgccccagcaggtctccatcgaggcgatccaagaggttgaaatgctgcctagaccccccaaggtcacaaaggaggaacatttccagctccatcaccagatgcactacagccagcaaatcaccgtgagcttggctcaggggtacgagcggacctctagcccgaagcccagatttaaatcctacgcttatacccaggcagcttacgtgacaacttctgaccccacgcgcagtcctttcccatcccaacatcttgaggcaccggaagataagtcctttggcagttctctgatggagtctgaagttaatctcgatagatatcaaacagcactggaggaagtgctgtcgtggcttttatccgccgaagatacactgcaagcccagggagagattagtaatgatgtggaagttgtgaaggaccagtttcacacacatgagggatacatgatggacctcaccgctcatcaggggcgagtcgggaatattttacagctggggtccaagctgatcggtaccgggaagttatctgaggacgaagagaccgaagtccaagagcagatgaatttactgaactcaaggtgggagtgtctaagggtagcctccatggaaaagcaatcaaacctacacagagagatctcttacgtgccgagtacttatctgaccgaaataactcacgtttcacaggccctgctggaggtcgagcagctgctgaatgctcccgacctgtgcgccaaggacttcgaggacctgttcaagcaggaagagtccctgaagaatattaaggatagcctccagcagtccagcggccgcattgatatcattcacagcaaaaaaaccgctgcccttcaatcagctactcccgtggagcgagttaagctccaggaggcactaagtcagctggacttccaatgggagaaggtgaacaagatgtataaagacagacagggcagattcgataggtctgtcgagaagtggaggaggtttcactatgacatcaaaatcttcaaccagtggttgaccgaggctgagcagtttctgcggaaaacccagattccagagaactgggaacatgctaagtataaatggtaccttaaggagcttcaagatggcattggtcaacggcaaaccgtggtgcgtaccttgaacgctaccggtgaagaaatcatccaacaatcctccaaaaccgacgcaagtattcttcaggaaaagttaggcagcctgaacctgcgttggcaggaggtctgcaagcaactatcagaccgaaaaaaaaggctggaagagactctcgagagactacaggaactgcaggaggccactgacgagctggacctgaagctaagacaggcagaagtaataaagggttcttggcagcctgttggcgaccttctcatcgactctcttcaggatcatctcgagaaggtgaaggctcttcgaggcgagatcgcccccttgaaggagaacgtcagccacgtgaacgacctggctaggcagctgaccactctaggaatacagctttctccctataatcttagcacactggaggacctgaacacaagatggaagctgctgcaggtagcggtcgaggaccgtgtgcgacagctgcacgaagcccatagagatttcgggccagcatctcagcacttccttagcacctcagttcaggggccatgggaaagagctattagccccaataaggtcccttattatatcaatcacgaaacacagacaacttgttgggaccatcctaagatgacggagctgtatcagtctctggccgatttgaacaacgttagattcagtgcttataggactgcaatgaaactgagaagactgcagaaagcactatgtctggacttgctgtcgctgtccgcagcctgtgacgcgctcgaccagcataatctcaaacaaaacgatcaaccaatggatattttacagattatcaattgcttaactaccatctacgatcggcttgagcaggaacacaacaacttggtgaatgttcctctatgcgttgacatgtgtctcaactggctgctgaatgtatacgacaccggccggacaggtcggatacgagtccttagttttaaaacaggtattattagcctgtgcaaggcccatcttgaggataaataccgctatctatttaaacaggtcgcctccagtaccggcttctgcgatcagcggcggctcggtctgttgctgcacgacagcattcagataccccggcaactgggggaagtagcgtctttcggcggtagtaacatcgaacccagcgtgcggtcatgcttccaattcgccaacaacaaacccgagatcgaagctgcgctgttcctggattggatgcgcctcgagcctcagagtatggtgtggctccctgtgctacatagggtcgctgctgccgagaccgcaaagcaccaggcaaagtgcaatatctgtaaagagtgtccaattattgggttcagatacagaagcctcaagcacttcaactacgacatatgccaatcatgcttcttcagcggtagagtcgcaaaagggcataagatgcattacccgatggttgagtattgcaccccaacaacttccggcgaggatgttcgagattttgccaaagtgcttaagaataaatttaggactaagagatactttgccaagcacccccggatgggctatttgccggtgcaaacggtccttgaaggtgacaacatggagacggacacgatg

SEQ ID NO: 142817 - DNA, 3432 bp, Artificial Sequence
  derived and/or modified sequence
atgctgtggtgggaagaagtcgaagattgctacgaaagggaggatgtgcagaaaaagaccttcactaagtgggtcaatgcacagttcagcaagttcggaaaacagcacatcgaaaatctcttttcggaccttcaggacggccgccggctgctggatcttctggaaggcctgactggacaaaagctcccaaaagagaagggttccactcgtgtccatgccttgaacaacgtgaacaaggcactgcgggtgcttcagaacaacaacgtggacctggtgaacatcgggtcaaccgacatcgttgacggtaaccataaactgaccctgggactgatctggaatatcatactgcactggcaagtcaagaatgtgatgaagaatatcatggcgggcttgcagcagacgaattcggagaaaatcctcctttcatgggtgagacagtcaacccggaactacccgcaagtcaacgtgatcaacttcacgacttcgtggtccgacggactggcattgaacgccctgatccactcacataggccggacctctttgattggaactcggtcgtctgtcagcagtccgccactcagcgcctggagcatgcgttcaacattgcgcgctatcagctgggaatcgagaaactccttgacccggaagatgtggacactacttaccctgataagaagtcaatccttatgtatatcacttctctcttccaagtcctccctcaacaggtgtccatcgaagccatccaggaggtggaaatgctgccacgaccgccaaaggttaccaaggaagagcacttccaactgcaccatcaaatgcattactcgcaacaaatcacggtgagcctggcgcagggctacgagcggacttcgtcgcctaaaccaagattcaagtcatacgcatacacccaagctgcgtacgtgaccacttcggacccgactagaagcccattcccttcgcaacacctcgaggcgccggaggacaagtcctttggttcgtcactcatggaatccgaagtgaacctggaccggtaccagaccgcgctggaagaggtgctgtcctggcttctcagcgcggaggacactctgcaagcacagggtgagatctcgaatgacgtcgaggtggtgaaggaccaattccacacccatgagggctacatgatggacctcaccgcgcatcagggacgcgtggggaacattctgcagctgggctccaagctgatcggcaccggaaagctctcagaggacgaggagactgaagtgcaagagcagatgaatctccttaactcgagatgggaatgcctgcgcgtcgcgtccatggaaaagcaaagcaacctgcatcgcgaaatcagctacgtcccgtcgacctacctgactgaaatcacccatgtctcccaagccctgctggaggtggaacaactgctcaacgcaccggacctgtgcgcaaaggatttcgaggatctcttcaaacaggaagagtccctgaagaacatcaaggactcactgcaacagagcagcggaaggatcgatatcatccacagcaagaaaacggccgccctccaatcggccactcctgtggaaagagtcaaactccaggaagccctttcgcaactggacttccaatgggagaaggtcaataagatgtacaaagaccggcagggaagattcgataggtcagtggaaaagtggcggcgcttccactacgatatcaagatctttaatcagtggctgaccgaagccgaacagttcctgagaaagacccagattccggaaaactgggagcatgcgaaatacaagtggtacctcaaagagctgcaggatgggatcggccaaaggcaaactgtcgtaaggaccctgaacgccacgggcgaagaaatcattcagcaatcttcaaaaaccgatgcatctatattgcaagagaagttgggatcccttaacctgcggtggcaggaggtctgcaagcagctgtcagacagaaagaaacggctggaggaaacgctcgaacgccttcaggagctgcaagaagccaccgatgagctggatctgaaactgaggcaagcagaggttatcaaggggtcgtggcaaccagtgggggacctcctgatcgacagcctccaggaccacctggaaaaggtcaaagcactgcgcggagagatcgcccctctcaaggagaacgtctcacatgtcaacgaccttgcccgccagctgactacgctgggaattcagctgagcccgtacaatctttcgactttggaggacctcaacaccaggtggaagttgctccaggtggcggtcgaggaccgcgtgcgccaactgcacgaagctcacagagactttggaccagcttcgcagcacttcctgtcgacgtcagttcaagggccctgggaacgggctatctcgcccaacaaggtcccgtactacattaatcacgagactcaaaccacctgttgggaccaccccaaaatgaccgaactgtaccaatccctcgcggacctgaacaacgtgcgcttctccgcttaccggactgctatgaagctgagaaggctgcagaaggccctctgcctggatctcttgagcctgtcagcagcatgcgatgcgctggaccaacataacctcaagcagaacgaccagcctatggacatcctccaaatcatcaactgtctcaccaccatctacgaccgtctggaacaggaacataacaacctggtcaatgtccccctctgcgtggacatgtgcctgaactggctgctgaatgtgtacgacaccggacgcacgggaagaatcagagtgctctcatttaagactggaatcatttcgctgtgcaaggcacacctggaggataagtatcgctatttgtttaagcaggtggcatcctccaccggcttctgcgaccagcgtagactgggcctgctgctgcatgacagcatccaaattccgcgacagctgggcgaggtcgcctcgttcggaggatccaatattgagccttcggtccggagctgctttcagttcgccaataacaagccggaaatcgaggctgctctgttcctcgactggatgcggcttgaaccgcagtcgatggtgtggcttccggtcctgcatcgtgtggccgctgccgaaactgcgaaacaccaagcgaaatgcaacatctgcaaagagtgccctatcatcggcttcagataccggtcactgaaacacttcaactatgatatctgtcaatcgtgcttctttagcggacgcgtcgcgaaagggcataagatgcattaccctatggtggaatattgcaccccgacgactagcggagaggacgttcgagacttcgccaaggtgttgaagaataagtttaggaccaagcggtacttcgcaaagcatccgagaatgggctacttgccggtccagaccgtgctggagggcgacaacatggaaaccgacactatg

SEQ ID NO: 142818 - DNA, 3432 bp, Artificial Sequence
  derived and/or modified sequence
atgctgtggtgggaagaagtggaagattgctacgaacgggaggacgtgcagaagaaaactttcactaagtgggtgaacgcacagttcagcaaattcggcaaacaacatattgaaaacctgttttcggatctccaagatggccgtcgcctcctggatcttcttgaaggactcaccggacaaaagttgcccaaagagaagggatcgacccgggtgcacgcgctgaacaatgtcaataaggcgctgcgcgtcctgcagaacaacaatgtggatctcgtgaatatcggatccactgacatcgtggacggaaaccacaagctgaccctcggcttgatctggaatatcatcctccactggcaggtcaagaacgtgatgaagaatatcatggcgggtctgcagcagactaattcggaaaagattctcctgagctgggtgaggcagtctacccgaaactaccctcaggtgaatgtcattaactttaccacgtcatggtctgacggactggccctcaacgcgctgatccactcacaccgcccggatctgtttgattggaacagtgtcgtgtgtcaacagtccgcgacccagaggctcgaacacgcatttaacatcgcgcgctaccagctcggcatcgaaaagctgttggaccctgaggatgtcgacacgacttatccagacaaaaaatccatcctcatgtacatcaccagcctcttccaggtgctgccgcagcaggtgtcaatcgaggccatccaagaagtcgagatgctgcctagaccccctaaggtcactaaggaagaacacttccagctccaccatcagatgcactactcgcaacagattaccgtgagcttggcccagggatacgagcggaccagcagcccgaagcccagattcaagtcctacgcgtacacccaagcggcctacgtgacgacctcggacccgaccagatcaccattcccgtcccaacatcttgaagcgcctgaggacaaatcattcgggtcatcgcttatggaatccgaagtgaacctggatcgctaccagactgcacttgaggaggtgctgtcgtggctcctgtcggcggaggacactctgcaggcacagggtgaaatctctaacgatgtggaggtggtcaaggaccaatttcatactcatgaaggatacatgatggaccttactgcccaccaaggacgagtgggaaacatcctgcagctgggatcaaaactgatcggaactggcaagctgagcgaagatgaagaaactgaagtccaagagcagatgaatctgttgaatagccgctgggagtgtctgcgggtggcttcgatggaaaagcaatcgaacctccaccgcgagatctcctacgtgccgagcacctacctgactgagatcacccatgtgtcccaggccctgcttgaggtggaacagctcctcaacgccccggacctgtgcgcaaaggacttcgaggacctgttcaaacaagaggaatccctcaagaacattaaggattcattgcaacagtcctcaggaagaatagacattatccactcaaagaaaaccgccgccctgcaatccgcaaccccagtggagcgggtgaaactgcaggaggccctctcgcagctcgacttccagtgggagaaggttaataagatgtacaaggatcggcagggtagattcgaccgcagcgtcgagaagtggcggagattccactatgatatcaagatttttaaccagtggctcacggaggcagaacaattcctgcggaaaactcagattccagagaactgggaacacgctaagtacaagtggtacctcaaggagttgcaggacggaatcggccagaggcagactgtggtgaggaccctgaatgccactggggaggaaatcatccaacaatcaagcaagaccgatgcgtccatactccaggaaaaattggggtccctgaatctgcggtggcaggaagtgtgcaagcaactgtcagaccggaagaaaagactggaagagactctcgaacggctccaagagctccaggaagcgaccgatgagctggatctgaagctgaggcaggccgaagtgatcaaggggtcgtggcaaccggtcggtgacctgttgatcgactccttgcaagaccatctggagaaggtgaaggcacttcgcggagagattgctcctctcaaggaaaacgtctcccacgtgaatgacctggcacgccaacttactacgctgggaatccagctttcgccttacaatctgtcgacgcttgaggatcttaatacccgctggaaactgctgcaggtggctgttgaggatcgggtcagacaactgcacgaggctcatcgcgacttcggtcccgcatcgcaacattttctgtcgacttccgtgcaggggccgtgggaacgcgcaatctcgccgaacaaggtgccatactacatcaaccatgaaacgcaaaccacctgttgggatcatccgaagatgaccgaactgtaccagtcactggctgacctcaacaacgtccgcttctcggcttatcggaccgccatgaagctgcgacggttgcagaaagccctgtgcttggacctgctctccctctcagccgcttgcgacgctcttgaccagcataatctcaagcaaaacgaccagccaatggacatcttgcagatcatcaactgcctgactaccatctatgaccgcctggaacaagagcataacaacctggtcaatgtgccgctgtgcgtggatatgtgcctcaattggttgctgaacgtgtacgacaccgggcggactggtcggatcagagtcctgagcttcaagactggcattatcagcctttgtaaagcccacctggaggataagtacagatacctcttcaagcaggtggcctcgagcaccggattctgcgaccagcgccgccttggcctgctgctccacgactcgatccaaatccctagacaactcggagaggtagcgtccttcggaggctccaacatcgagccaagcgtccgcagctgcttccagttcgcgaataacaaaccggaaatcgaagcagctctcttcctggattggatgcgcctcgagccacagtcgatggtgtggctcccagtcttgcatcgggttgccgccgctgaaaccgccaagcatcaggccaaatgcaacatctgtaaggaatgcccgatcattggattcaggtaccgctccctgaagcactttaactacgacatctgccaaagctgtttcttcagtgggagggttgccaaaggacacaaaatgcactacccaatggtggaatactgcactccgactacgtccggagaagatgttcgcgatttcgccaaagtgctgaagaataagtttcgtaccaagcggtactttgccaaacacccgagaatgggctacctgcccgtgcagactgtcctggaaggcgacaacatggaaaccgacaccatg

SEQ ID NO: 142819 - DNA, 3432 bp, Artificial Sequence
  derived and/or modified sequence
atgctatggtgggaagaagttgaagattgttatgaacgtgaagatgtacaaaaaaaaacgtttacgaaatgggttaatgcgcaattttcgaaatttggtaaacaacatatagaaaatttattttcggatttacaagatggtcgacgtttactagatttattagaaggtctaacgggtcaaaaattaccgaaagaaaaaggttcgacgcgtgtacatgcgctaaataatgtaaataaagcgttacgtgtactacaaaataataatgttgatctagtaaatataggttcgacggatatagtagatggtaatcataaactaacgttaggtctaatatggaatataatactacattggcaagtaaaaaatgtaatgaaaaatataatggcgggtctacaacaaacgaattcggaaaaaatactactatcgtgggtacgacaatcgacgcgaaattatccgcaagttaatgtaataaattttacgacgtcgtggtcggatggtttagcgctaaatgcgctaatacattcgcatcgtccggatctatttgattggaattcggttgtttgtcaacaatcggcgacgcaacgtttagaacatgcgtttaatatagcgcgatatcaattaggtatagaaaaattattagatccggaagatgtagatacgacgtatccggataaaaaatcgatactaatgtatataacgtcgttatttcaagttttaccgcaacaagtttcgatagaagcgatacaagaagtagaaatgctaccgcgaccgccgaaagttacgaaagaagaacattttcaattacatcatcaaatgcattattcgcaacaaataacggtatcgttagcgcaaggttatgaacgtacgtcgtcgccgaaaccgcgttttaaatcgtatgcgtatacgcaagcggcgtatgtaacgacgtcggatccgacgcgatcgccgtttccgtcgcaacatttagaagcgccggaagataaatcgtttggttcgtcgctaatggaatcggaagtaaatctagatcgttatcaaacggcgctagaagaagtactatcgtggttattatcggcggaagatacgttacaagcgcaaggtgaaatatcgaatgatgtagaagtagtaaaagatcaatttcatacgcatgaaggttatatgatggatctaacggcgcatcaaggtcgtgtaggtaatatattacaattaggttcgaaattaataggtacgggtaaattatcggaagatgaagaaacggaagttcaagaacaaatgaatctactaaattcgcgttgggaatgtttacgtgtagcgtcgatggaaaaacaatcgaatttacatcgagaaatatcgtatgttccgtcgacgtatctaacggaaataacgcatgtttcgcaagcgttattagaagtagaacaattattaaatgcgccggatctatgtgcgaaagattttgaagatctatttaaacaagaagaatcgttaaaaaatataaaagattcgttacaacaatcgtcgggtcgtatagatataatacattcgaaaaaaacggcggcgctacaatcggcgacgccggttgaacgagtaaaattacaagaagcgctatcgcaactagattttcaatgggaaaaagttaataaaatgtataaagatcgacaaggtcgatttgatcgttcggttgaaaaatggcgacgatttcattatgatataaaaatatttaatcaatggctaacggaagcggaacaatttttacgaaaaacgcaaataccggaaaattgggaacatgcgaaatataaatggtatttaaaagaactacaagatggtataggtcaacgtcaaacggtagtacgtacgctaaatgcgacgggtgaagaaataatacaacaatcgtcgaaaacggatgcgtcgatattacaagaaaaactaggttcgctaaatctacgttggcaagaagtatgtaaacaattatcggatcgtaaaaaacgattagaagaaacgttagaacgtctacaagaactacaagaagcgacggatgaattagatttaaaattacgtcaagcggaagtaataaaaggttcgtggcaaccggtaggtgatttactaatagattcgttacaagatcatctagaaaaagtaaaagcgctacgaggtgaaatagcgccgttaaaagaaaatgtatcgcatgttaatgatttagcgcgtcaactaacgacgctaggtatacaattatcgccgtataatctatcgacgttagaagatttaaatacgcgttggaaattattacaagttgcggttgaagatcgagttcgtcaattacatgaagcgcatcgtgattttggtccggcgtcgcaacattttctatcgacgtcggtacaaggtccgtgggaacgtgcgatatcgccgaataaagtaccgtattatataaatcatgaaacgcaaacgacgtgttgggatcatccgaaaatgacggaactatatcaatcgttagcggatttaaataatgtacgtttttcggcgtatcgtacggcgatgaaactacgacgactacaaaaagcgctatgtctagatttattatcgctatcggcggcgtgtgatgcgttagatcaacataatttaaaacaaaatgatcaaccgatggatatattacaaataataaattgtctaacgacgatatatgatcgactagaacaagaacataataatttagttaatgtaccgttatgtgtagatatgtgtctaaattggttattaaatgtatatgatacgggtcgtacgggtcgtatacgagtactatcgtttaaaacgggtataatatcgctatgtaaagcgcatttagaagataaatatcgttatctatttaaacaagttgcgtcgtcgacgggtttttgtgatcaacgtcgtttaggtctattattacatgattcgatacaaataccgcgtcaattaggtgaagtagcgtcgtttggtggttcgaatatagaaccgtcggtacgatcgtgttttcaatttgcgaataataaaccggaaatagaagcggcgttatttttagattggatgcgtctagaaccgcaatcgatggtatggctaccggttttacatcgtgttgcggcggcggaaacggcgaaacatcaagcgaaatgtaatatatgtaaagaatgtccgataataggttttcgatatcgttcgttaaaacattttaattatgatatatgtcaatcgtgttttttttcgggtcgtgtagcgaaaggtcataaaatgcattatccgatggtagaatattgtacgccgacgacgtcgggtgaagatgtacgtgattttgcgaaagtactaaaaaataaatttcgtacgaaacgttattttgcgaaacatccgcgaatgggttatttaccggtacaaacggttttagaaggtgataatatggaaacggatacgatg

SEQ ID NO: 142820 - DNA, 3432 bp, Artificial Sequence
  derived and/or modified sequence
atgctgtggtgggaggaggtggaggactgctacgaaagagaggacgtgcagaagaaaactttcactaagtgggttaacgcccaattttccaagtttgggaagcagcacatcgaaaatctgttttccgatttgcaggacggacgacggcttctggacctgctcgagggactgacgggtcagaagctcccaaaggagaaaggatcgacccgggtgcatgccctgaataacgtcaacaaagccctccgggtccttcaaaacaacaacgtggacctcgtcaacattgggtccactgacatcgtggatggcaaccataagctgaccctgggtctgatttggaacattatactgcactggcaggtgaagaacgtgatgaagaacattatggccggcctgcaacagaccaactcggagaaaattctcctcagctgggtgcggcaatccactcggaattatccgcaagtgaacgtgatcaactttactacttcgtggtccgacggactcgcactgaatgcgctcattcactcacaccggcctgacttgttcgactggaactcagttgtctgccaacaatcagcgacccaacgcctggaacatgctttcaatatagctcgctaccagttgggaatcgaaaaactcttggacccagaggatgtggataccacctacccggataagaaatcgatcctcatgtacattacttctctcttccaagtcctgccacagcaggtgagcatcgaagctatccaggaggtggaaatgttgccacgcccccctaaggtgactaaagaggaacatttccaactgcatcaccaaatgcactactcgcagcaaatcactgtgtcactggcgcaggggtatgaacgcacttcgtcgccgaagccacggtttaagtcctacgcctacacccaggcagcgtacgtgacgacttccgacccgacccgcagcccgttcccatcccagcatctggaggccccagaagataaatcctttggctcctcgctgatggagtcagaggtcaacctcgaccgctaccaaaccgcactggaagaggtgctgtcgtggcttctctcggcggaggataccctgcaggcacaaggggagatcagcaatgatgtggaagtggtgaaagatcaattccacactcatgaaggatatatgatggatctgacggcacaccaaggacgcgttggaaacatcctgcaactgggctcgaagctcatcggtactggtaagctgtccgaggacgaggaaactgaggtgcaggaacagatgaacttgctgaattcacgctgggagtgcctcagggtggcctcaatggaaaagcaatccaatcttcatcgcgaaatcagctatgtgccgtccacttacctcactgagatcacccacgtgtcacaggcactgctcgaggtggagcagttgctgaacgctccggatttgtgtgccaaggacttcgaagatctcttcaagcaagaggaatcattgaagaacatcaaggactcgctgcagcagtcgtctgggcggatcgatatcatccactcgaagaaaactgccgccctgcagtcagccacccctgtggagcgcgtcaagctccaggaagcactgagccagctggactttcaatgggagaaggtgaacaaaatgtacaaggacagacagggaagattcgacagatcggtggaaaagtggaggcgcttccattatgacatcaaaatcttcaatcagtggcttacggaagccgaacagttccttcgcaagactcagatcccggagaactgggagcatgccaagtacaagtggtatctgaaagagctgcaggacggaatcggacagcgccagaccgtggttcgaaccctgaacgcgaccggcgaagagatcatccaacagtcgtctaagaccgacgccagcatcctgcaggagaagctgggctcattgaacctgcgctggcaggaagtgtgcaagcagctgtcagatcgcaaaaagcgcctcgaagagactctcgaacggctccaggagcttcaggaagccactgatgaactcgacctgaagctgcggcaagcagaagtgatcaagggatcatggcagcctgtcggagatcttctgatcgattctctgcaggatcacctggaaaaggtgaaagccctgcgcggggagatcgcgccgctcaaggaaaatgtgagccacgtcaacgacctggcgagacaacttactaccttgggtattcaattgtcgccctacaatctcagtactctcgaggacttgaatactagatggaagctcttgcaggtggcggtggaggatagagtgaggcagctgcacgaagcccacagggacttcggacctgcttcccagcacttcctctctacttcagtgcaggggccatgggagcgggccatttcacctaacaaggtgccctactatatcaaccacgagactcaaactacttgctgggatcacccgaagatgaccgaactgtaccagtcactcgccgatctcaacaacgtgcggttcagcgcctaccggaccgccatgaaactgcgcaggctccagaaggcgctgtgtctcgaccttctcagcctttccgccgcttgcgatgctctggaccaacacaaccttaaacagaacgaccagccaatggacatcctccagatcatcaactgtctcactaccatctacgaccgcctggagcaggaacacaataatcttgtgaatgtgcccctctgcgtcgacatgtgcctcaactggcttctgaatgtgtacgacactggacggaccggtaggatccgcgtcctgtccttcaagactgggatcatttcattgtgtaaagcccatctggaggacaagtaccggtacctcttcaagcaggtggccagctcgactggattctgcgatcagcgcaggctgggcctgctgctgcacgattccatccagatcccgcggcagctgggagaagtggcctccttcggaggctcaaacatcgaaccttcagtgcgctcctgcttccaattcgcgaacaataagccagaaatcgaagcagcactctttcttgactggatgaggctggaaccgcagagcatggtgtggcttccagtgctgcaccgggtggccgccgcagaaaccgccaaacatcaggcgaagtgtaatatctgcaaggagtgtccgatcatcggattccgctacagatccctgaaacactttaactacgacatctgccaaagctgcttcttctcgggacgggttgcaaagggacataagatgcattaccctatggtcgagtactgcactccaactacttcaggcgaggacgtgcgcgactttgcgaaggtcctgaagaacaaatttcgcactaaaaggtatttcgctaaacaccctcgaatgggatacctgccggtgcaaaccgtgctggaaggtgacaatatggagactgacaccatg

SEQ ID NO: 142821 - DNA, 3432 bp, Artificial Sequence
  derived and/or modified sequence
atgctgtggtgggaggaggtggaagactgctacgaacgggaagacgtccagaaaaagacctttacaaaatgggtgaatgctcagttcagcaagttcggaaagcaacacattgagaacttgtttagtgacctccaagacggacgtagacttttagacttgttggagggacttactgggcagaaactccctaaggaaaagggatcgacccgcgtccacgcactgaataacgtgaataaagccctgagagtgttgcagaataataatgtggacctggtgaacatcgggagcacagatatcgtggatggaaatcacaagctaacactggggttgatctggaatatcattctccactggcaggtaaagaacgtaatgaagaatatcatggctggcctccagcagaccaattctgagaagattctcctgtcatgggtcagacagtcaacgaggaattatccccaggtaaacgtgataaactttacaacgtcttggtcagatggacttgctctaaatgccttgattcactcgcaccgaccagacctgttcgattggaatagcgtggtctgccagcagtccgccacccaacgactggaacacgcctttaacatagcccggtaccagctgggtatcgagaagcttcttgacccagaagatgttgataccacttaccccgataaaaaaagcattctgatgtatatcacatcactgttccaagtgctgcctcagcaggtttcgatagaggccattcaagaggtggagatgctgcctcgccctccgaaagtcacaaaggaggaacatttccaactgcatcatcagatgcactattctcagcaaattaccgtgtcattagcacaggggtatgaacgcacatcaagtcccaagccccgcttcaaatcatatgcatacactcaggcggcatatgtgactacgagcgatcccacccgttccccctttccgtcgcagcacttagaggcacctgaggataagagcttcggcagctccctcatggaaagcgaagtgaatctagaccgctaccagaccgccctagaggaggtattgtcctggttgctctccgcggaggataccctgcaagctcagggagagatatccaacgatgtggaagtcgtgaaagatcaatttcatacccatgaggggtatatgatggatcttacagcgcaccagggtcgcgtgggcaacatactccaactggggtcgaaactgatcgggactggtaagcttagcgaagatgaggaaaccgaggtccaagagcaaatgaatctgctgaacagcagatgggagtgtttgcgcgtcgcctccatggaaaagcagtcaaacttgcaccgagaaatcagctatgttccttcgacttatctgacggagatcacgcacgtgtcccaggcactgctcgaagttgagcagctcctgaacgcgccggatctatgcgctaaagacttcgaagatctgtttaaacaggaagaaagtcttaagaacatcaaagattcgctgcagcagtccagtggacgaatcgatataatccactccaaaaagacggctgctctccagagcgctactcccgtggagcgggtgaagctgcaagaggcactatctcagctcgacttccaatgggaaaaggtcaataaaatgtacaaagatcggcaggggcgatttgatcggagtgtagaaaagtggaggcgatttcactacgacattaaaatctttaaccagtggctgaccgaggcagagcagttcctccgaaagacacaaatcccagaaaactgggagcacgcaaagtacaagtggtacctgaaagagttacaagatggtatcggccagagacagaccgtcgtgagaacgctgaatgctactggcgaggaaatcatccagcagtcaagcaagaccgatgcgagcatactccaggagaagctggggtctctgaatctgagatggcaggaggtatgcaaacagttatctgatcgtaaaaaacggctggaggaaaccctggagcggctccaggagctccaggaagccacagacgagctggacctgaagcttcgacaagcagaggtaataaaagggagctggcaacccgttggcgatcttttaatagatagtctccaggaccatctggagaaggtgaaggccctccgtggggaaatagccccgctcaaggagaatgtttctcacgtaaacgacctggctcgtcaactgaccacgctggggatccagctttcaccatacaatctctcaaccctggaggacctaaataccaggtggaaacttctgcaagttgccgtggaggatcgtgttagacaactgcacgaagctcaccgagactttggcccagcttcgcagcactttctatctactagcgtccaggggccttgggagagagcgatctccccaaataaagtcccgtactatatcaaccatgagacacagacgacctgttgggatcatcccaaaatgaccgagctctaccaatctctggcagacttaaataacgtcaggttctccgcctacaggaccgcaatgaaactgcggcggctgcaaaaagctttgtgtctggacctgctgtctttgtcagctgcttgtgatgccctggaccagcataacctgaagcagaatgaccaacctatggatattctccaaatcatcaattgcctgaccaccatttacgatagactcgagcaggagcataacaacctagtcaacgtgcctctctgcgtcgatatgtgcttaaattggctacttaacgtctacgacacgggcaggaccggtcgtatacgtgtgttgtcgttcaaaacaggcattattagtttgtgcaaggctcacctcgaggacaaatatcgctatctgtttaaacaagtggcctccagcacaggcttctgcgatcagcgtcgtctcgggctgctgctgcatgattcaattcagataccgaggcaactgggagaagtggcaagtttcggcggtagtaatattgagcccagcgtccggtcatgcttccagtttgcgaacaataagcccgaaattgaagcagccctgttcctggactggatgagactggaaccccaatcaatggtctggctgcctgtcctccaccgagtcgcggctgctgaaacagcaaagcaccaagccaaatgcaatatatgcaaggaatgcccgatcattggcttccggtaccgtagcctgaaacactttaattacgatatctgccagagctgctttttcagtggccgagttgcaaaaggtcataagatgcactaccccatggtcgagtattgtacgccaacaactagcggagaggatgtccgcgactttgccaaggtcttgaaaaacaagtttcgaactaaaaggtacttcgctaaacaccctcgaatgggctatctcccagtgcagactgtgcttgaaggggacaacatggaaactgacaccatg

SEQ ID NO: 142822 - DNA, 3432 bp, Artificial Sequence
  derived and/or modified sequence
atgctctggtgggaagaggtggaggattgttatgaacgggaggacgttcagaagaagacattcacaaaatgggtgaatgcacagttctctaagttcgggaagcaacacattgagaacttgttctctgatttgcaggacggcagaagactcctagacctacttgaaggcctcaccggtcagaaattgccaaaggagaagggttcaactagagtacacgcactcaacaacgtgaataaggcgttacgagtgcttcagaataacaatgtggatttggttaacataggatccaccgacattgtagacggcaaccacaagctcaccctaggactgatttggaacatcatccttcactggcaagtgaaaaatgttatgaaaaatataatggccggactacagcagaccaattcggaaaagattctgctgtcctgggtgaggcagtcaaccagaaattacccccaggttaatgtcatcaactttacaactagctggagtgacggcctggccctgaacgcactgatccattcccataggccagatttgttcgactggaactctgtggtgtgccagcagtctgccactcagcgattggagcacgcctttaacatcgcccgctatcagctggggatcgaaaagttgctcgatcccgaagatgtggataccacctatcctgacaagaagagcattctgatgtatattacttctctctttcaggttctccctcagcaggttagcattgaggcaatccaggaggttgaaatgctgccccgacccccaaaggtgacaaaggaggagcacttccagctgcatcatcagatgcattactcacagcagataacagtaagtcttgcccaggggtacgagcggacttcttcaccgaagcctagattcaagtcatacgcttatacacaggctgcctacgtaaccaccagtgatcccactcggagcccattcccctcccaacatttggaggctcctgaggacaagagtttcggaagctcattgatggaaagcgaagtcaatttagaccgctatcagacagccctggaagaggtcctgtcttggctactgtcagccgaagacacgctgcaggcacagggagagatctctaacgacgtggaggtcgttaaggatcaattccacacccacgaagggtacatgatggacctcaccgcccatcagggacgtgtaggaaacatcctccagctcggatcaaaactgatcggaactgggaagctgagcgaagatgaagaaacagaagtgcaggagcagatgaacttgctgaattccaggtgggaatgtctccgcgtggcctctatggagaagcagtcgaacttgcaccgcgagatctcttacgtgccctccacttacctgaccgagattacccacgtgtctcaggcactgctcgaggtggagcaattgttaaacgcaccagacttgtgcgctaaagattttgaggatctcttcaaacaggaggaatccctcaaaaatatcaaagattctctgcagcagtcttcgggaagaatcgacatcatccacagcaagaaaacagccgcccttcagtctgccacacctgtggaacgggttaaactccaagaggccctgtcccagcttgactttcaatgggaaaaagtgaataaaatgtataaagaccgccaaggaagatttgacagatccgtcgagaaatggcgtaggttccactatgatatcaaaattttcaaccaatggttaaccgaggcagagcagttcctgcgcaaaactcagattccagagaattgggaacacgccaaatacaagtggtatcttaaagagcttcaggacggaatcggccaacgtcagactgtagttagaactctgaatgccaccggtgaggagataatccagcagagttccaagaccgatgcttccatcctacaagagaaactaggctctttaaacttacgctggcaggaggtgtgtaagcagctttccgaccggaagaaacggctcgaggaaaccctcgagcggctacaggagcttcaagaggcaacagacgaactcgacctcaagctgagacaggctgaggtgattaaaggctcctggcaacctgtgggtgacctgctgattgactcactgcaggaccacctggaaaaggtcaaggcactgcggggagagattgcccccttaaaggagaatgtaagccacgtaaatgacctggcgaggcaactgaccacccttggcatccagctctccccctacaatctgtcaacccttgaggacctcaacactcgttggaagctccttcaggtggccgtggaggaccgcgtccgtcagctccacgaggcgcaccgggactttggaccagcaagccaacacttcctatctacaagcgtgcagggtccctgggaaagagctatcagtcccaacaaggtcccatactatataaaccacgagacccagacaacgtgctgggatcatccaaaaatgacggagctgtaccaaagtcttgcagatcttaacaacgttagattctccgcttaccgtactgccatgaaactgcgccgcctgcagaaagccttatgtttagatctgttatcactttccgcagcatgcgacgcattggaccagcataacctgaaacagaatgaccaacccatggacatcctacaaattatcaattgcctcacgacaatctacgacagacttgaacaggagcacaacaacctggtgaacgtacctctgtgtgtagacatgtgcctcaactggctgcttaatgtgtacgacacaggccgtacaggcagaatccgggtactgagttttaaaacaggcattattagtttgtgtaaggcccaccttgaggataagtataggtacctgtttaagcaggtggcctccagcaccggattttgtgatcaacgtcgcctagggctgctcctgcacgatagcatccagattccacgccagttgggtgaggtcgcctcatttggtggcagcaatatcgaaccctcagtgcggagttgcttccagttcgctaacaacaaacccgagattgaggcagcgctttttttggactggatgcggctagaaccgcagagcatggtgtggctgcctgtactgcatcgcgtggcagctgcagaaacagccaagcaccaggccaaatgcaacatctgtaaggaatgcccaataataggatttcgatatcgatcacttaaacactttaactacgacatctgccagagctgttttttttccgggcgcgtggccaaagggcataagatgcactatccgatggtggaatattgcactccaacgacctccggcgaggatgtcagagacttcgctaaggtgctcaagaacaagtttcgtaccaaacggtacttcgcgaaacaccccagaatgggatatttacccgtgcagacggtgctcgaaggggataatatggaaacggatacaatg

SEQ ID NO: 142823 - DNA, 3432 bp, Artificial Sequence
  derived and/or modified sequence
atgctctggtgggaagaggtcgaggactgttacgaaagagaagatgtgcagaagaagaccttcaccaaatgggtcaatgcgcagttctcaaagttcggtaagcagcatatcgaaaacctgttctcagatctccaggatgggcgccggctgctggacctcctcgaaggactgacggggcagaagctcccgaaggaaaaaggaagcactcgagttcacgcgctcaacaacgtgaacaaggcactcagagtgttgcaaaacaacaatgtggacttggtcaacatcggctctaccgacattgtggatggtaatcataagctgactcttggcctgatctggaacattatccttcactggcaagtcaaaaacgtcatgaagaatatcatggccggcctgcagcaaacgaattcggagaagatactcctctcctgggtgaggcaatcaacgaggaactaccctcaagtgaatgtgatcaacttcaccacttcctggtcagacgggctggcactcaacgcacttatccactcccaccgtcctgacctgtttgattggaactcggtggtttgccaacagagcgccacgcaacgcctggaacatgcattcaacatcgctagataccaacttggtatcgagaaacttctcgacccagaggatgtggacaccacttacccggacaagaagtcaatcctcatgtacatcaccagcctgtttcaggtgctgcctcaacaagtgtccatcgaagctatccaggaggtggagatgctgccgcgcccgccaaaggtgactaaagaagagcactttcaactgcaccatcaaatgcactactcacagcagatcaccgtgagtctggctcagggatacgaaagaactagctcgcccaaacctcgcttcaagtcatacgcatatactcaagcagcttatgtcactactagcgacccaactcgctcacctttcccctcgcagcacttggaagccccggaagacaagtccttcggatcctcgctgatggaatcagaagtgaacttggatagataccagactgccttggaagaggtgctgtcatggttgctttcggcggaggacactctgcaggcgcaaggcgagatctccaacgatgtggaggtggtgaaggatcagttccatacgcacgaaggctacatgatggacctcactgcccatcaaggaagggtgggcaatatcttgcagctcggttcgaagttgatcggtaccgggaagttgtcggaagacgaagaaaccgaagttcaagaacagatgaatttgctcaatagccgctgggagtgcctgagagtggcgagcatggagaaacagtcaaacctgcaccgggaaatctcctacgtgccctccacttacctcaccgagatcacccatgtgtcccaagccctgcttgaggtggagcaactgctgaacgcacctgacctgtgcgcgaaagacttcgaggatctctttaaacaagaagaatcgttgaagaacattaaggattcgctgcagcagtcatcaggacgaattgacatcatccactcgaaaaagaccgccgcgttgcaaagcgcaacccctgtggagcgggtgaaactgcaggaggcactcagccaactggatttccagtgggaaaaagtaaataagatgtacaaagaccggcaaggccgcttcgatcgctccgtggagaaatggagacgctttcattacgacatcaagatcttcaatcaatggctgaccgaagcggaacagttcctcagaaagacccagatccccgagaattgggaacacgctaagtacaaatggtacctcaaggagctgcaggatggcatcgggcagagacagactgttgtacgcactcttaatgcaactggcgaggagatcatccaacagtcatcaaagactgatgcttcgatcctgcaggaaaaattgggatccctgaacttgcgctggcaagaagtgtgtaagcaattgagcgacagaaaaaagagactcgaggaaaccctggaaagacttcaggagctccaggaagccactgatgaactcgatttgaagctgcgccaggccgaggtgatcaagggaagctggcagccggtgggagatcttctgatcgactccctccaagaccatctggaaaaggtcaaggcacttcggggggaaatcgcgccacttaaagaaaatgtcagccatgtgaacgatctggcgagacaactgactactctcggtatccagctgtcgccatacaacctgtcgactctcgaggatctgaatactaggtggaagctcctccaggtggcagtcgaagacagagtccggcagctccacgaggcacaccgcgactttggacctgcgtcacagcacttcctgtcgaccagtgtgcaaggaccgtgggagcgggccatctcgccgaataaagtgccgtactacatcaatcacgagactcaaactacgtgctgggaccacccgaaaatgacggaactgtaccagtcactggccgacctcaacaatgtgcggtttagtgcatataggaccgcgatgaaactgcgacgcctgcaaaaggccctgtgtttggacctcctgtccctgagcgcggcgtgtgacgcgctggaccaacataatctgaagcagaatgaccaaccaatggatatcctgcagatcattaactgccttaccactatctacgacagactcgaacaagagcacaataatctggtcaacgtgccgctgtgcgtggatatgtgtctgaactggctgctgaatgtgtacgacaccgggcgcacgggcaggatccgggtcctgtccttcaaaactggcatcatctcgctgtgcaaggcccacctggaagacaagtaccgctacctgtttaagcaagtggcgtcgagcactggattctgcgaccagcggcggctgggactgctgctgcacgatagcattcagatccctaggcagctcggcgaagtggcctcgttcggaggatcaaatatcgagccatcggtgaggtcgtgctttcagtttgccaacaacaaacccgagatcgaggcggctctctttctggattggatgaggctggaacctcagtctatggtctggttgccagtgctgcaccgggtggcggcagccgaaactgcgaagcatcaggctaagtgcaatatctgcaaagagtgcccgatcatcggtttcaggtaccggagcttgaagcattttaactacgacatttgccaatcttgcttcttctcgggtcgcgtcgcaaagggtcataagatgcactacccgatggtggagtactgcactccgaccaccagcggcgaagatgtcagagatttcgccaaagtcctcaagaacaagttccgcaccaagcgctacttcgccaagcatccgcgcatgggatatctgcctgtgcagaccgtgctggaaggtgacaacatggagactgacacgatg

SEQ ID NO: 142824 - DNA, 3432 bp, Artificial Sequence
  derived and/or modified sequence
atgctctggtgggaagaggtggaggattgttacgaacgcgaagacgttcagaaaaaaacattcaccaagtgggttaatgctcaattcagcaagttcggtaaacaacatattgagaacctcttttcagatttgcaggacggtcggcgtctcctcgatcttttagagggacttaccggacaaaaattgccaaaggagaaaggctctacacgtgtccatgcacttaacaatgtgaataaggcactgagagtcctgcaaaacaacaacgtggatttggtgaatatcggtagcacagatatagttgatgggaatcataagctaacccttgggcttatttggaacataatcttgcattggcaagttaagaacgttatgaagaatatcatggccggcttgcagcaaactaactctgaaaaaattcttttatcttgggtgcggcagtctacacgtaattacccccaagtaaacgtcattaattttaccacatcatggtcagatgggctcgcattgaacgcattgattcattcacataggccagatctattcgactggaacagtgttgtatgtcagcagtctgcaactcagagacttgaacatgcctttaatatcgcacggtaccaacttggcattgagaagctattggatcctgaggatgttgatactacttatcctgataagaagagcatcttgatgtatattacttcattattccaggtgctgccacaacaggtttcaatcgaagcgatccaagaagttgagatgcttccaaggccaccaaaagtgacaaaagaggagcactttcagctacatcaccagatgcattatagccagcagataacagtgagcctggcccaaggttatgaacgcaccagctctccaaagccccgctttaagtcttatgcttatacccaggcagcatatgtaactacttccgatcctacaagaagtcctttcccatctcagcatttagaggcaccagaggataagagttttgggtcctcattgatggaatcggaagttaatctggacaggtaccaaactgctctcgaagaagtgctttcatggttgctgagcgctgaagatacccttcaagcccagggagagatctccaatgacgtcgaagttgttaaggatcaatttcacacccatgaaggttatatgatggatttgacagcgcaccaaggccgagtgggcaacattttgcaactcggttctaagttaattgggacaggtaagctgtccgaggacgaagagacagaggtacaggaacagatgaaccttctcaattctcgctgggaatgtttgcgcgtcgcaagtatggaaaaacaatcaaatcttcatcgggaaatatcgtatgtgccctccacgtacctgacagagattactcatgtctctcaagcattgttagaggtcgaacagttacttaatgctcccgatttatgcgctaaggactttgaagatttgtttaaacaagaagagtctcttaagaatataaaagattcacttcaacagtcctcgggacgcattgatattatccactcaaaaaaaaccgccgctttgcaatcagccacgcctgtggaaagagtaaaacttcaggaggctctaagccagttggatttccagtgggagaaggttaataaaatgtacaaagataggcaaggtcgtttcgatcgttccgtggaaaagtggcggcgttttcactacgatatcaaaatttttaaccaatggctcacagaggctgagcaattccttagaaagacccagattcccgagaattgggaacacgctaagtacaagtggtacttgaaggagttgcaagatggaattgggcagaggcagactgtcgttagaaccttaaatgctactggagaggagattattcaacaatcctctaaaactgatgctagcatccttcaggagaagcttgggtctcttaacctccgttggcaagaggtatgtaagcagctgtcagatcgtaaaaagaggctggaagagactcttgaacgactgcaggaattgcaagaagcgacagatgaactcgatcttaagctgagacaagcagaggtgattaagggttcatggcagccggtaggtgatctattgattgatagtctccaagaccatttagagaaggttaaagctctccgtggagagatcgcacctttgaaggagaatgtctcccatgttaacgatttggcacggcagctaaccaccctaggtattcagctctcaccctacaatctttctaccttggaagacttgaacacacgctggaaattactgcaagttgctgtggaagacagggttaggcaattgcacgaggctcaccgtgacttcggcccagcgtcgcagcatttcctgtccacgtctgtgcagggcccatgggagagagcaatctctcccaacaaagttccgtattatattaaccacgagacacaaaccacttgttgggatcatccgaagatgaccgagctttaccaatcccttgctgatctaaacaacgttagattttctgcttacagaacagctatgaagcttagaagacttcagaaggcattgtgtttggatttattaagtctttcggctgcctgcgatgcgttggatcaacataatctgaagcagaacgaccaaccaatggacatcctccagatcattaactgtcttacaacaatttatgatcgcttggagcaagaacacaataacttagttaatgttcccctatgcgtggatatgtgcctcaactggttactcaatgtgtatgatactggaaggaccggtcgaataagagttctttcctttaaaaccggcataatttctttgtgtaaggctcatcttgaggataagtaccgttatttattcaagcaggtcgcttcttcaaccggattctgtgatcagagaaggctcggactgctattacacgattctattcaaatacctcgacagcttggtgaagtagctagcttcggtgggagtaacattgaaccatcagttcgtagttgcttccaattcgctaataataagcccgagatcgaagccgcgctctttctcgattggatgcgactcgagcctcagtctatggtttggttgccagttctgcatcgggtagctgcagctgaaacagcgaaacaccaagccaaatgtaatatatgtaaggagtgtcccattataggatttcgttatcggagtttaaaacattttaactacgatatttgtcagagctgcttttttagtggtagagtagcaaagggacacaaaatgcattatccaatggttgaatactgtactcctacaacaagtggagaggatgttagggattttgcaaaggtgctaaagaacaagttcaggaccaaaaggtacttcgcaaaacatcctcgtatgggatatctccctgtccaaaccgtgttagaaggggacaatatggagaccgatactatg

SEQ ID NO: 142825 - DNA, 3432 bp, Artificial Sequence
  derived and/or modified sequence
atgttgtggtgggaggaagtggaggactgctatgagcgggaagatgtccagaaaaagacttttaccaagtgggtgaatgcccaattttcgaagtttggtaaacaacatatagaaaacttgttcagcgaccttcaggatggtagacgtctgcttgacctccttgaaggactgactggccaaaaactgcctaaggagaaaggttcgacccgcgtgcatgcactgaacaacgtgaataaggcacttcgcgtcttgcagaacaacaatgtggatctggtgaatattggatcgaccgatattgtggacggaaaccacaagctgaccctgggtctgatatggaacattatcctgcattggcaggtgaaaaacgtgatgaagaacattatggcaggccttcagcaaactaattcggaaaagattcttctgtcatgggtgcgacaatcgactcggaactacccccaagtgaacgtgattaacttcactacctcgtggtctgatggtctggcactgaatgccctcatacactcccataggccagatctgttcgattggaactccgtcgtgtgccaacagtcggcaacgcagcggcttgaacacgcatttaacatagcaagataccaattggggatagaaaagttgctggatccagaagatgtggacacgacttaccctgataagaaatcgatcctgatgtacattacctcacttttccaagtgcttccacagcaggtgtcgatcgaagcaattcaagaagtcgaaatgctgcctaggccacctaaagtgaccaaggaggaacattttcaactgcatcatcagatgcattattctcagcagattactgtgtcgctcgcgcagggatacgaacggacctcgtcacccaagcctagatttaagtcatacgcatacacccaagcggcctacgtcactacttcagaccctacccggtcacccttcccatcacaacatctggaggcgcctgaggataagtcctttggtagttcgcttatggaatcggaagtgaacctggatcggtaccagaccgccctggaagaagtcctctcttggctgctctcagctgaggataccctgcaagcgcaaggcgagatctccaacgacgtcgaggtcgtgaaagaccagtttcacacccatgagggctacatgatggacctgactgcacatcagggaagagtcggtaacattcttcaacttgggtcgaaattgattggaactggtaagctgtctgaggatgaggaaactgaagtgcaagaacagatgaacttgcttaactcccgatgggaatgcctcagagtggcttcaatggagaagcaatcgaatctgcaccgagaaatttcatacgtgccctccacctacctgaccgaaatcacgcatgtctcgcaagcacttctggaggtcgaacagttgttgaatgcacctgacctttgtgcaaaagatttcgaagatcttttcaaacaggaagagagcttgaaaaacatcaaagattcgctccaacaatcctccggaaggatagatatcatccactccaaaaagacggcggcgctgcaatcggcaactccagttgagcgggtgaagctccaggaagcactttcgcagctcgactttcaatgggaaaaggtcaacaagatgtacaaggaccgacagggcagattcgatagatcggtggaaaagtggaggcggttccattacgacattaagatattcaatcagtggcttaccgaagcagagcagtttcttcgcaaaacgcagataccagagaattgggagcatgctaagtataagtggtacttgaaggaacttcaagatgggatcgggcagagacagacggtggtcagaaccctgaatgcaacgggcgaggaaatcattcagcaatcctctaaaactgacgcctcgatcctccaagaaaagctcggaagccttaatctccgctggcaggaggtgtgtaaacaattgtcagatcgcaagaagcggttggaagaaactctcgaaaggcttcaagaattgcaggaggcaactgacgaactggacctgaaactccggcaggcagaagtgataaaggggagctggcaacccgtgggagatcttctgatagacagcctgcaagaccatctcgagaaagtcaaggcgcttagaggagaaatcgcgcctctgaaggaaaatgtttcgcacgtgaacgaccttgcacgtcaacttactaccttgggaatacagctttcgccgtacaacctttccactcttgaagatctgaatactcggtggaaactgctccaagtggccgtagaagatcgtgttagacaattgcacgaagcccatcgagactttgggcctgcatcacaacactttctctcgacgtccgtgcaaggaccatgggaacgcgccatctcgcccaacaaagtcccatactacattaaccacgaaactcagaccacgtgctgggaccatccgaagatgaccgagctctatcaatcgctcgccgaccttaacaatgtcaggttctccgcctacaggaccgctatgaaactcagacggctccaaaaggcgctttgccttgatcttctgtccctttcggcagcttgtgacgcgctcgatcagcataaccttaaacagaacgatcagccgatggatattcttcagatcatcaattgtctgaccactatctacgatcgtctcgagcaggaacacaacaacctggtgaacgttcctctttgtgtggatatgtgtctgaattggcttcttaacgtctacgatactggaagaaccggcagaatccgggtgctttcgtttaagactggcataatcagtctgtgtaaggcccatctggaagataagtacagataccttttcaagcaagtcgcaagtagcacgggtttttgcgaccagcgcaggctgggactgctgcttcatgattcgattcaaattcctcgtcagcttggggaagtggcatcgttcggagggtcgaacattgagccgtcagtgaggtcctgttttcaatttgcgaataacaagcctgaaatagaagcagccctttttctcgattggatgcgcctggagcctcagagcatggtctggctgccagtcttgcaccgcgtggccgcagcagaaaccgctaaacaccaagcaaagtgtaacatttgtaaagaatgtccaatcatcggcttccgctaccgatccctcaagcacttcaattacgacatttgtcagagctgcttcttttctggacgtgtcgccaagggacataagatgcactacccaatggttgaatactgtacgcccaccaccagcggagaggatgtgcgtgactttgccaaagtgcttaagaataagtttcgaaccaaacgatactttgcaaaacaccctcgaatgggatacctgccagtgcagaccgttctcgaaggagataacatggaaaccgataccatg

SEQ ID NO: 142826 - DNA, 3432 bp, Artificial Sequence
  derived and/or modified sequence
atgctatggtgggaggaggtggaggactgttatgagagggaggatgtacaaaaaaagaccttcactaagtgggtcaatgcccagttctcaaagttcggtaagcagcacattgaaaacctcttctctgacctacaggatggacggaggcttctagaccttcttgaaggcctgacagggcaaaagctgcctaaggaaaagggatccactcgcgtccatgccttaaacaacgtaaacaaggccctgcgcgtgctgcagaataacaatgtcgacctagtgaatatcggctccactgatattgtggacggaaatcataagttaactctcggattgatatggaatattatcctacattggcaggttaagaacgttatgaaaaatatcatggcaggtttgcagcaaactaacagtgagaaaatcctgctgagttgggtccgacagtcaacgagaaactatccacaggtcaatgtcattaattttactacatcgtggtctgatggcctagccttgaacgccctcatacacagtcatagaccagacctctttgactggaactctgtggtgtgtcagcagagtgctacccagcgactcgagcacgcgtttaacatcgccaggtaccagctgggaattgagaagcttttggaccccgaggatgtggacactacttaccctgacaaaaagagtattctgatgtatatcacatccctgtttcaagtgctgccacagcaggtctctattgaggctatccaagaggtggaaatgttgcccagacctccgaaggttacgaaggaggaacattttcagttgcaccaccagatgcattattcccagcagatcacagtttccctcgcccagggctacgagcggacctcctcacccaaaccccggtttaagtcctatgcatatactcaggctgcatatgtgactacaagtgaccctacaaggagtcccttcccatctcagcatctggaggctcccgaggataagtcttttgggtctagtctcatggagtccgaggtaaaccttgatcgttaccagaccgctctggaggaggtgctgagctggctgctttcagctgaagatactctgcaggcccagggcgagatcagcaatgatgttgaagtggtgaaggaccaatttcatactcacgaggggtacatgatggacctcaccgctcaccaagggcgcgtgggtaatatcctgcaattaggcagcaagcttatagggactggcaaacttagcgaggacgaagaaactgaggtgcaggagcaaatgaatctacttaactcaaggtgggagtgtctcagagtggcctctatggagaagcagtcaaatctgcacagggaaataagttacgtgccaagcacatacctgaccgagatcacccacgtcagccaagcccttctcgaagtggagcagctgctgaacgcgcccgatctgtgcgctaaagattttgaggacctttttaaacaggaggagtcattaaagaacattaaagactcattacagcagtcttccgggaggatcgacatcatccattccaagaagacagccgctcttcagagtgccacccctgtggagagagtaaagctgcaggaagcactaagccagctggatttccaatgggaaaaggtgaacaagatgtataaagatcggcaggggagattcgatcgcagcgtcgagaagtggcgcaggttccattacgacatcaagatcttcaatcaatggctgacggaggcagagcagttcctccgcaagacccagatcccggagaactgggaacacgcaaagtacaaatggtatctgaaagaactacaggacggcattggtcaacggcagaccgtggtacgtaccttgaacgcaactggcgaggagataattcagcagtctagcaagaccgatgctagcattctgcaagagaaattgggttctctgaatttaagatggcaagaggtgtgcaaacaactcagtgataggaaaaagcgactggaagagaccctcgaacgtctgcaggagctgcaagaggccactgatgaactggacttgaaactccgtcaggcggaggtaataaaagggtcttggcagccagtgggggatctgctcatcgactccttacaagatcacctcgagaaggtaaaagctctaaggggggaaattgcccccttgaaggagaatgtttcccatgtgaatgacctggcacgacagctcaccacgctgggcattcaactgtccccctataatctgtctactttggaagatctaaacaccaggtggaaactacttcaagtggctgtcgaagaccgggtgaggcagcttcatgaggcccatcgagattttgggcccgcttcccagcacttcctgagcacctccgtgcagggtccatgggaaagggcgatctcccctaacaaggtgccctactacatcaatcacgagacacagacgacgtgttgggaccaccctaaaatgactgaactataccaatccctggccgatctcaataacgtcaggtttagcgcgtaccgcacagcaatgaaacttagacggctacaaaaagctctgtgcctggatttgctctcactatctgccgcttgtgatgccttggatcagcacaacctcaagcagaacgaccagcctatggacatcttgcaaatcatcaactgccttacgactatctatgatcgcctggagcaggagcataataacttggtgaatgtgcccctttgcgtggacatgtgcttaaactggctgttgaacgtgtacgacaccgggcgaacaggccgcattcgtgtgcttagctttaagaccgggattattagtttatgtaaggcccacctggaagacaaatacaggtatctcttcaaacaggtcgcctcatctactggtttttgtgatcagaggaggctcgggctcctacttcatgatagtatccagattccaagacagctgggagaagtggcatcatttggggggtctaacattgagccctcagtgagatcctgcttccagttcgccaataacaagccggaaatcgaggccgctctgtttttggactggatgaggctcgaaccacaatccatggtgtggctccctgtgctccatcgggtggccgcggccgagaccgccaagcatcaggcaaaatgcaatatttgcaaggagtgtcctataatagggttccggtacaggtctttgaagcacttcaactacgacatttgtcagtcatgcttcttctcaggccgtgtagcgaaggggcacaaaatgcactaccctatggtggagtactgtacacctacaacgtccggcgaggatgtgcgcgacttcgctaaagtgctgaaaaacaagttccggacgaagcggtactttgcgaaacacccacggatggggtacctgcctgtccaaacagtcctcgagggggacaatatggagactgacacaatg

SEQ ID NO: 142827 - DNA, 3432 bp, Artificial Sequence
  derived and/or modified sequence
atgctgtggtgggaggaagtggaagattgctacgagagggaagacgtgcagaaaaaaacgtttacaaagtgggttaacgcccagttttcgaagttcggaaaacagcacatcgagaacctgttctccgacctacaggacggaagaagactgctcgacttgctggaagggctaactgggcagaagctccccaaggagaagggctccacccgagtccacgctctgaataatgtgaataaagcactgcgcgtcttgcaaaataacaacgtggatctagtgaatataggatctacggacatcgtagacggcaatcacaagctcactttgggcctgatatggaatatcatattgcattggcaggtgaagaacgttatgaaaaacatcatggccggcctgcagcagacgaactccgaaaagatcttgcttagctgggtcagacagtccacacgaaactaccctcaggtcaatgtaatcaattttacaacatcttggtcagacggtctcgccctgaacgcacttatccatagccatcggccagatctttttgattggaattctgtcgtgtgccagcagagcgctacccaacgactggaacatgccttcaacattgcaagataccagttagggatcgagaaactgcttgacccagaggacgtcgatactacttaccctgataagaagagcatcctgatgtacataacgagcctgttccaggtgctgccccaacaggtttcaatcgaggcgattcaagaggttgaaatgttgcccaggccaccaaaggtgactaaagaggagcatttccagcttcatcatcagatgcactacagccagcagattacagttagcctggctcagggttacgagaggacatcaagcccaaagcctaggtttaagtcctacgcctatacccaggccgcctatgtgactacgtcagatcccaccaggtccccatttccaagccagcatctggaagctccggaagacaaatcttttggaagctcactgatggagtctgaagtgaatctggataggtatcagaccgcactggaggaggtactctcttggttgctgagtgcggaggacaccctgcaggcccagggagagatctccaacgatgtagaggtagtgaaggatcagttccatacacacgaagggtatatgatggatctcacagcccatcaggggcgcgtgggcaacatcctgcagcttgggtccaagctgatcggcaccggaaaactctctgaggacgaggagaccgaggtccaggaacagatgaacctgttaaactcccgttgggagtgccttcgcgtggcctccatggagaaacaatctaatctccaccgggagattagttacgtgccatcaacttatctaacggagatcactcacgtatctcaggcactactggaagtggagcagctcctgaacgcccccgacctttgtgccaaggatttcgaggatctgtttaaacaggaggaatccctgaagaacatcaaggattccctgcagcagtcctctgggagaatcgacatcatccactccaaaaagaccgccgcccttcagagcgcaacccccgtagagcgggtcaaactccaagaggcacttagccagctggattttcagtgggaaaaagtaaacaagatgtacaaggatagacagggcagatttgatcgcagcgtggagaagtggaggcgtttccactacgacataaaaatcttcaatcaatggctgacagaggctgagcagttcctaagaaaaacgcagattcccgagaactgggagcatgctaagtacaaatggtatctgaaggagctgcaagatggtattggtcaacggcagactgtggtccgaaccctgaacgctacaggtgaagaaatcattcagcaaagctctaaaactgacgcaagcatcctgcaggagaaacttggatccttgaaccttcgctggcaggaggtgtgtaagcagctttccgaccgaaaaaagcgcttagaggagacattagagcgtctgcaggaactgcaggaggcaacagacgagctggacttgaaattacggcaggctgaggtgattaagggtagctggcaacctgtcggcgaccttcttatcgacagtctacaagaccacctggaaaaggtgaaggccctgcgaggtgagattgcacccctgaaggagaacgtgagccatgtcaatgatcttgcacggcagcttacaaccttggggatccagctgtccccctataacctgtcgaccctggaggatctcaacacacgatggaaactgttgcaagtggccgtggaagatagggtgaggcaactgcacgaagctcatcgcgactttggcccggccagtcaacactttttatctaccagtgtccaggggccatgggaaagagctattagccctaataaggtaccctattacattaaccacgagacccagaccacatgttgggaccatccaaagatgactgagttgtatcagtccttggcggatttaaacaacgtgagattttcggcttatagaaccgcgatgaagctcagaagacttcagaaagctttgtgcctggatctcctatccctgtcggcagcatgtgacgctctcgatcagcacaacctaaagcagaatgaccagccaatggatatcctgcagatcatcaattgtctgaccactatctacgacaggctcgaacaagaacacaataatctcgtgaatgttcccctctgcgtggacatgtgcctgaattggctcctgaatgtctatgataccgggaggactggccgaattcgcgtgctgtcatttaagacaggcataatttccctgtgcaaggcacacctggaggataaatatcgctatttgttcaagcaggtcgcttcgagcactggattctgcgatcagcgaaggcttggtctgctcctccatgactctatccaaatccctcgccagctgggtgaggtcgcatcttttggtgggagcaatatcgaaccaagcgtgcgctcttgtttccaattcgcgaacaacaagcctgaaatcgaggcagccctctttctcgattggatgagactggagccccagtccatggtgtggctccctgtcttacaccgggtggcagccgctgagaccgcaaagcatcaggcgaagtgcaacatctgcaaggagtgccccatcatagggtttaggtatagatctctgaagcatttcaactacgacatttgccagtcctgcttcttctccgggagagtagccaaaggacataagatgcactatcctatggtcgaatactgcacacctacaacctcaggtgaagacgtccgcgacttcgcaaaagtcttgaaaaacaaatttcggacgaagcgatatttcgcgaaacacccccggatgggatacctgcccgtgcaaacggtgcttgagggggacaatatggaaaccgacacaatg

SEQ ID NO: 142828 - DNA, 3432 bp, Artificial Sequence
  derived and/or modified sequence
atgctctggtgggaagaggtggaggattgctacgaacgggaagacgtccagaagaagactttcaccaagtgggtgaacgcgcagtttagtaagtttggaaaacagcatattgagaatctgttttccgatcttcaggatgggcgccggctactcgatctgttagaaggcttgacaggtcagaagctgcctaaagaaaagggcagcaccagggttcatgcgttaaataatgtgaacaaggctctacgagtcttgcagaataacaatgtggacctcgtgaatattggatccactgatatagtagacgggaaccataagttgactctgggcttgatttggaacataattttgcactggcaggttaaaaatgtcatgaaaaacattatggctgggctacaacagacgaactccgagaagatattactgagctgggtgcgtcaaagcaccaggaattaccctcaggtgaacgtgattaacttcactacgtcatggagcgacggtttggcacttaatgcgttgatccactcgcacagaccggacctattcgattggaattcagtggtgtgccagcagtctgctacacagagactggagcatgccttcaacatcgctcggtatcagctggggatcgaaaagttgctcgatcccgaggacgtcgacacaacctatcccgataagaagagcatacttatgtacattacctccctcttccaggtgctcccacagcaggtgagcatcgaagcaatccaagaggtcgaaatgttgcctcgccctccgaaagtgactaaagaggagcacttccagctgcatcaccagatgcactacagccagcaaattacagtctcactcgcccagggttatgaaagaacatcgtcccccaagcctaggttcaagagctacgcgtacactcaggctgcatacgtcaccacctccgatcccactagatcgccgtttccgtctcagcaccttgaggcacctgaagataaatcctttgggtcatcactgatggagtctgaagtgaacctcgatcgttatcagactgctctcgaagaggtactcagctggctgttgagtgctgaagacactctgcaggcccaaggcgagattagcaatgatgtggaagtggtaaaggaccaatttcatacccatgagggctatatgatggatctaacagcacaccaaggccgagtgggaaacatcctccagctgggctctaaactgattggtaccggtaaactaagtgaggacgaagagacggaagtccaggagcaaatgaatctgctcaacagccgttgggagtgtctacgagtcgcttccatggaaaagcagagcaatttacatcgcgagatctcctacgtgcccagcacatatcttaccgaaatcacacatgtgtcgcaggcgctgttggaggtggaacagctcctgaacgccccggacttgtgtgccaaggatttcgaagacttatttaagcaggaggaaagcttgaaaaatataaaagatagcctccagcagagttccgggcgaattgacattatacattcaaaaaagactgctgcacttcagtctgctacacccgtggagagagtcaaattgcaggaagcgctctcccaactcgacttccagtgggagaaagtgaacaagatgtataaggaccgacagggacggttcgaccggtccgtcgaaaagtggcggcgattccactacgacattaaaatcttcaaccagtggttgacagaagccgagcagtttctgcgaaagacacagatccctgaaaattgggaacacgccaaatataaatggtacctgaaggaactgcaggatggtattgggcagcgtcagacagttgtgaggacactaaatgctaccggggaggaaatcatacagcagtctagcaagacggatgcgtcaatcttgcaagaaaaactgggatctctgaatctgagatggcaggaggtgtgtaagcagctttctgataggaagaaacgtctggaagagactctcgagagactgcaggagctccaagaagcaaccgacgagttggatctgaaactaagacaggccgaggttatcaagggcagttggcaaccagtaggcgatcttttgattgactccttgcaggaccacctcgagaaggtcaaggccctgcgtggggagatagcccctctcaaggaaaacgtgagtcacgttaacgatctggccagacagctgactaccctgggcattcaattgtcaccctacaacctgagcaccctggaggacctcaatactcgatggaagctccttcaggtcgctgtggaggatagggtgagacagcttcacgaggcccatcgcgactttggtcccgcctcacagcattttttatctaccagtgtccagggaccatgggaacgggccattagtcccaataaagtaccctattatattaatcacgaaacacagactacttgctgggaccacccaaaaatgacagagctttaccagtcacttgcagacctcaataatgttcggttcagcgcctaccgcactgccatgaagctccggcggctccaaaaggcgctttgccttgaccttctgagtctgtcagccgcctgtgacgcactggatcagcacaacttgaaacagaacgaccagcctatggatatactgcagatcattaattgcctaacgacaatctatgacagactagaacaggagcataacaatctggtgaatgtgccactgtgcgtggatatgtgtctcaattggcttctcaacgtgtacgacaccggcagaacagggcggataagggttctttcttttaaaaccgggattataagcctctgtaaggctcacctggaggataagtatagatacctgttcaaacaggttgcaagctcaacggggttttgtgatcagcgtagactcggcttactgttacatgattccattcagatccccagacaactcggagaagtggcatcattcggcggctctaatatcgaaccatccgtcaggtcttgcttccagttcgccaataacaagcctgagattgaggctgctctcttcctcgactggatgaggttagagccacagagcatggtttggttgcctgtccttcatagggttgcagcggccgaaactgccaagcaccaggccaagtgtaacatatgcaaagaatgtccgattattgggttcaggtataggagtctaaaacattttaactatgacatctgccaaagctgttttttctctggaagggttgcaaaaggccacaagatgcactaccccatggtggagtattgcaccccaacaacctctggtgaggacgtccgggacttcgcaaaagttctgaagaataagttcaggacaaaacggtatttcgccaagcaccctaggatggggtacttgcccgtccagactgtgctggaaggggataacatggagacggacaccatg

SEQ ID NO: 142829 - DNA, 3432 bp, Artificial Sequence
  derived and/or modified sequence
atgctgtggtgggaggaagtcgaggattgttatgagagagaagacgtccagaaaaagaccttcaccaagtgggttaatgcccagttttcgaaattcggcaagcagcatatcgaaaacctgttctctgatctccaggatggccgtcggttgctcgatctactggaaggcctgaccggccaaaagttaccaaaggaaaagggatctacccgtgtccatgctcttaacaacgtcaataaggccctccgcgtcttgcaaaataacaacgtggacctggtgaatattggtagcaccgatatcgttgatggcaaccacaagttgaccttaggcctcatctggaacattatcctccactggcaagtcaaaaatgtaatgaaaaacatcatggccggactccagcagactaattccgagaagatcctgctgtcgtgggtgcgtcagagtacacggaattacccgcaagtaaacgtaataaacttcaccacgtcctggagcgatggcctggccctgaacgcgttgattcactcgcaccgcccagatctgtttgattggaactcggttgtttgccagcaatccgccacgcagcgcctcgagcacgcttttaacatcgctcggtaccagctcggcatcgagaagcttctggatccagaagacgttgacacgacctacccggacaagaaatccatcctgatgtacattacgagtctgtttcaagtcctgccccagcaggtttcgatcgaggccattcaagaagtggagatgctacctcgcccaccaaaggtgacaaaagaggagcatttccagctacatcaccagatgcattactcccaacagattactgtgtccttggctcagggctacgagaggaccagttcgcctaaaccacgcttcaaatcatacgcctatacccaggcggcttacgtcacgacctccgacccaacgcggtccccattccccagccagcatctggaggctccggaggataagagtttcggctcgagtctgatggagtccgaagtgaacctggatcgataccaaaccgccctagaggaagtcctgtcttggctgctctccgcagaggacacattgcaagcccaaggagagatctcgaacgatgtcgaggttgttaaagaccagttccatacccacgaagggtacatgatggacttgaccgcacatcagggacgtgtgggcaacatcctgcaactcggaagcaagctgattggtacagggaagttaagcgaggacgaggagaccgaggtgcaggaacaaatgaatttgttgaattcacgctgggagtgcctgagggtggcctccatggaaaagcagtctaacttgcatagagagatcagttatgtcccatccacctacctcacggaaatcacacatgtttcccaggctcttctggaggtggagcagctgttgaacgcccccgacttgtgcgcgaaggattttgaagatctattcaagcaggaggagagcctgaaaaatattaaggatagcctgcagcagtcctcagggcgaattgatatcatccactcaaagaagacagcagcgcttcagtccgcgacgccggtggagagggtgaagctgcaggaggctctaagtcagctggacttccaatgggagaaggtgaacaagatgtacaaggaccgtcagggacgcttcgacaggagcgtcgagaagtggcgtagattccactacgacattaagatttttaaccagtggctgactgaggcggagcaatttttgaggaaaacccagatccccgagaactgggagcatgccaagtataagtggtatttgaaggaactgcaggatggaataggacagcgccagaccgtggtgaggacattgaacgccacgggagaagagattattcaacagagctcaaaaactgatgcgtcaattctgcaagagaagttgggcagcctgaacctgcgatggcaagaggtttgcaagcagctgtccgaccgcaagaagcgactggaggaaaccttggagcgtcttcaagaattacaggaagcaacggacgagcttgatctgaagctgcggcaggccgaagtgattaagggtagctggcagccagtgggtgaccttttgattgactctctgcaggatcacctagagaaggtcaaggcgttgcggggtgagatcgcacctctgaaggaaaacgtttcccatgtcaatgaccttgccagacaattaactaccctaggtattcagttaagcccgtataatctgtccaccttagaggatctgaacacccgctggaagctgttgcaggtggccgttgaggatcgggtgcgccaactgcacgaggctcacagagattttggcccggccagccagcacttcctaagcacgagtgttcagggaccctgggaaagggctatctccccgaataaggtaccgtattacataaatcatgagacgcagaccacctgctgggatcatcctaagatgaccgaactataccaatccctggcggatttgaacaatgttaggtttagcgcctatcgcactgccatgaagctgcgccggctgcagaaagccttgtgtttggatttgctgtccctctccgctgcctgcgacgcactggaccaacacaacttgaagcagaatgatcaacccatggacattttgcagatcatcaactgcctgaccactatctacgaccggctcgaacaggagcacaataacctggtgaatgtgcccctgtgcgtagacatgtgtctgaactggttgttgaatgtttatgatactggtagaaccggccgcatcagggtgctgagctttaaaacgggaatcatctccctgtgcaaggcgcatctagaggataagtaccgctacctgttcaagcaggtagcttctagcactggtttttgcgaccagcgtcgactgggcttgctgttacacgatagtattcagataccgcgccagctcggagaagttgcttccttcggtgggtccaacatagagccctcggtgcgttcctgcttccagttcgccaacaacaagcccgagatcgaggccgctctattcctagattggatgaggttggagccccagagtatggtctggctgcccgtactacatcgcgtggccgccgccgagactgccaaacaccaggctaagtgcaacatctgtaaggagtgcccgatcattggattccggtaccggtccctgaagcactttaactatgatatatgtcaatcgtgctttttctccggccgtgtggcaaaaggccacaaaatgcactatcctatggtggaatactgcactcctacaacctcgggcgaggatgtcagggatttcgcaaaggtgcttaagaacaagttccggaccaaacggtactttgccaaacaccctcgcatgggatacttgccggtgcagaccgtgttagagggcgataatatggagactgatacgatg

SEQ ID NO: 142830 - DNA, 3432 bp, Artificial Sequence
  derived and/or modified sequence
atgctatggtgggaagaggtggaagactgttatgaacgggaggatgtgcagaagaaaacatttactaaatgggtcaacgctcagttctctaaatttgggaaacagcacatcgagaaccttttctccgacctgcaagacggaagacgtttactagatttgttggagggcctcaccggtcagaaactgccaaaagagaagggctccacaagagtgcatgcactaaacaacgtaaataaggcactgcgcgtattgcagaataataatgtggatctggttaatataggctccactgatattgttgatggtaaccataagctgacactgggcctgatttggaacataatcttacattggcaggtgaaaaacgtaatgaagaacatcatggcgggattgcagcagactaacagtgaaaaaattctcctgagttgggttcgtcaatccaccagaaattacccccaggttaatgttatcaactttacaactagttggtctgatggcttggccctgaatgccctgatacattcacaccgtcccgacctttttgactggaacagcgtggtgtgccaacagagcgcgacgcagcggttagagcatgcgttcaacattgcccgctatcaactcggcatcgagaagttgctggatccggaggacgttgacacaacctacccagacaagaagtccattctgatgtatattacttctctgtttcaggtgctgccccagcaggtgtctattgaggccattcaggaggtcgaaatgctgccacgcccacccaaagttacaaaagaagaacatttccagctgcaccaccagatgcactattcacagcagatcacagtaagcctagctcaggggtacgagagaaccagctcaccgaagcctaggttcaaaagttatgcctatacccaagctgcttatgtgactacttcagatcctacaagatctccttttcccagccaacacctcgaagcacctgaggataagtccttcggcagctccctcatggagagcgaagtcaatctcgacagataccagacagctttagaggaggtgctgtcctggctgcttagcgcggaggatactctgcaggcgcagggagagatttccaacgatgttgaagtggtcaaagatcaattccacacccatgaggggtatatgatggatctgactgcgcaccagggaagagtggggaatattctgcaactcggttcaaagttgattgggaccggcaagctgtccgaagacgaggaaactgaagttcaggaacagatgaacctgcttaacagtcggtgggaatgtctgcgcgttgccagtatggagaaacaaagcaacctgcacagagagattagttatgtgccttccacctaccttacagagattacacacgtttcgcaggccctgctggaggtagaacagctgctgaatgctccagacctgtgtgcaaaagatttcgaagatctgttcaagcaggaggagtctctgaagaacattaaggattccctgcagcagagcagcggccggatcgatattattcattccaaaaagaccgcagccctacaatccgccacaccagtagagagggtgaagctgcaggaggctctgagtcagctggactttcaatgggaaaaggtgaataagatgtacaaggatcggcaaggccgattcgatcgctctgtggaaaagtggaggcgcttccattacgacattaagatcttcaatcagtggctcaccgaggccgaacaatttctgcggaagacccaaattcccgagaattgggagcacgctaaatacaagtggtaccttaaagaactgcaggatgggattggacagaggcagaccgtggtccgaacactaaatgcaaccggggaggaaatcattcagcaaagctcaaagacagacgccagcattttacaggagaagctgggaagcttaaatctgagatggcaagaggtgtgtaaacaactctccgacagaaagaagcgattggaagagactctggagaggctccaagagttgcaggaagcgactgacgagcttgatctgaaacttcggcaagcagaggtgattaagggaagctggcagcctgtgggagacctgttaatcgattccctgcaagaccatcttgaaaaggtaaaagccctgcggggcgagatcgcaccacttaaagaaaatgtcagccatgtgaatgacctggcccggcaactaacgaccctcggcattcagttatctccatacaatctctctacactggaagacttgaacacccggtggaagctgctgcaggtggccgtggaggatcgggtgagacagctgcacgaagcccatcgcgattttgggcccgcctcccaacactttctaagcacctcagttcagggcccttgggaacgggccatcagtccgaacaaggtgccttattacatcaatcacgaaacccagaccacttgttgggaccaccccaaaatgactgaactgtaccaaagcctggcagacctgaataatgtacgattctcagcttatagaaccgctatgaaactgcgacggctccaaaaagcactgtgtctggaccttctgtctctgtccgcagcctgcgacgcactggaccagcacaacttgaagcagaacgaccaaccgatggacattctgcaaattatcaattgtcttacgactatctatgatagactggaacaagaacacaacaacctcgtgaatgtgcctctgtgcgtagatatgtgcctcaattggctccttaacgtctatgatactggtagaacagggcggatcagggtcctctctttcaaaaccggaataatcagcttgtgtaaggctcatctggaagacaaatatcggtacctgtttaagcaggtagcttcgagtaccggtttttgcgatcagcgacggctgggtctgctgctgcacgactctatacagattccacggcagctgggcgaggtcgctagtttcggagggtccaatatagaaccatccgttagaagctgctttcaattcgcaaacaataagccggagattgaggctgctctgttcctggattggatgaggctcgaaccgcagagcatggtgtggctcccggtcctgcaccgtgtggctgcagctgaaaccgccaaacaccaggctaagtgcaatatctgtaaagagtgccccatcattggatttcgctatcgctctctgaaacactttaactatgatatatgccagagctgctttttttccggcagagtcgcaaagggccacaagatgcactatcccatggtcgagtactgtaccccaactaccagtggcgaggacgtgcgagacttcgctaaggtacttaaaaacaagttccgaaccaagcggtacttcgctaagcatcccaggatgggctatcttcctgtgcagaccgtattagagggtgataacatggagaccgatacaatg

SEQ ID NO: 142831 - DNA, 3432 bp, Artificial Sequence
  derived and/or modified sequence
atgctgtggtgggaggaagtggaagattgttacgagagagaggacgtgcagaagaaaactttcactaagtgggtgaacgctcagttctcaaagtttggaaagcagcacattgaaaacctcttcagcgacctgcaggacggacgccgcctccttgacttgctggaaggcctgactggacagaagctcccgaaagagaagggatccactagggtgcacgccttgaataatgtgaataaggcgttgcgcgtcctgcaaaacaacaacgtcgaccttgtcaacatcggaagcactgacatcgtggacggcaatcataaactgaccctgggcctcatctggaatatcatcctgcactggcaagtgaagaatgtaatgaagaacattatggctggcctccagcagaccaattcggagaagattttgctgtcgtgggttagacagtcaactagaaattaccctcaagtcaatgtgatcaacttcactacttcctggtcggatggactcgccctcaacgcacttatccatagccatcggcctgacctgtttgattggaattcagtggtgtgccagcagtccgccactcagaggctggagcacgctttcaacatcgcaagataccagctcgggatcgaaaagttgctggaccctgaagatgtggacactacctaccctgataagaagtccattctgatgtacattacgtcgttgttccaagtgctccctcaacaagtctcgatcgaggccatccaggaagtcgagatgctccccagaccgcccaaggtgaccaaagaggaacacttccagctccaccatcagatgcattactcgcaacagatcactgtgtccctcgctcagggatacgagcgcacctccagccccaagccgcgctttaagagctatgcatacactcaggcggcatacgtcacgacttcggacccaactagatcgcctttcccgagccaacacctggaagcacctgaggacaagagctttgggagctccctgatggagtcggaggtgaatctggaccgctaccaaactgcgctcgaagaagtcctgtcctggctcctgtctgccgaggacaccctgcaggcacaaggagagatcagcaacgacgtggaagtggtcaaggatcagttccacactcacgagggatacatgatggatcttaccgcgcatcagggacgagtgggaaacatcctgcaactgggctcaaaactcatcggaaccggcaagctctcggaggatgaagaaactgaggtgcaagaacaaatgaaccttctcaactcccgctgggagtgtctgagggtcgcgtcgatggaaaagcaatcgaacctgcatcgggagatttcctacgtcccatccacttacttgaccgaaataacccacgtttcccaggccctgctggaagtcgagcagctgctgaacgcacctgacctgtgtgcaaaagacttcgaggatctgttcaagcaagaagaatcgctgaagaatatcaaggactcgctccagcagagctccggacggatcgacattatccactcgaaaaagactgctgccctgcagtcggccactcccgtggaacgagtgaagctccaggaagcgctgtctcaactggatttccagtgggaaaaagttaacaagatgtacaaggacagacagggcagatttgacaggtcagtggaaaaatggcggagatttcactatgacatcaagattttcaaccagtggctgactgaagcggaacagttcctgcgaaagactcagattcctgaaaactgggagcacgccaagtacaagtggtatttgaaagagctgcaggatggcatcggacaaagacaaaccgtggtgagaaccctgaacgccactggtgaggagattattcagcagtcctccaagactgatgccagcatcctgcaggagaagctcggatcactcaatttgcgctggcaggaagtgtgcaagcagctgtcagaccggaaaaagcgcctcgaagaaaccctcgagcgtctccaagagctgcaagaagcaaccgatgagctggatctgaaacttcgacaagctgaagtcatcaagggatcgtggcagccggtgggcgatcttctgatcgactcattgcaagatcatctcgaaaaggtgaaggccctccggggagagattgcgccactcaaggaaaacgtgtcccatgtgaacgatcttgctagacagcttactactctcggaatccagcttagcccctataatcttagcaccctggaggatctcaataccaggtggaagctgttgcaggtggccgtggaggaccgggtcaggcagctgcatgaggcacacagagattttgggccggcaagccagcatttcttgagcacttctgtgcagggaccttgggagcgcgcgatctccccaaacaaagtgccgtactacatcaaccacgaaacccagacgacttgctgggatcacccgaagatgaccgagctctaccagtcactggcggatctgaataacgtgcggttctcagcgtaccggaccgcaatgaagttgcggcgcctgcagaaggccctgtgcctggacctgttgtccttgtcggctgcctgcgatgccctggaccaacacaaccttaagcagaacgatcagccgatggatatactccaaatcattaactgcctgactactatctatgaccggctggagcaagagcacaataacctggtgaacgtgccgctttgtgtggacatgtgcttgaactggctgctgaacgtgtacgataccgggcggactggcagaatcagagtcctctcgtttaagaccggtatcatttcgttgtgtaaggcccatctcgaggacaagtaccgctacctgttcaaacaggtcgcctcctctactggtttttgcgatcagaggcgcctgggtctgctcctgcacgactcaatccagatccctcgacagcttggagaggtggcctcatttggaggcagcaatatcgaaccgtcagtccgcagctgcttccaattcgccaataacaagccggaaatcgaagccgccctgttcctcgattggatgcggctggaaccacagtccatggtgtggcttccggtgctccaccgggtcgcggccgcagaaaccgctaagcaccaggcgaagtgcaatatctgcaaggaatgtcctatcattggatttcgttaccgctccttgaagcatttcaactacgatatctgccagtcatgtttcttttccggccgcgtggcaaagggacataagatgcactacccgatggtggagtattgcaccccgactacttccggtgaggacgttcgcgatttcgcgaaggtgctcaagaacaaattccgcactaagcgctacttcgcaaaacacccgcgcatgggatacttgccagtccagaccgtgttggagggtgacaacatggagactgataccatg

SEQ ID NO: 142832 - DNA, 3432 bp, Artificial Sequence
  derived and/or modified sequence
atgctgtggtgggaggaggtcgaggactgctatgagcgagaggatgtgcaaaaaaagactttcacaaaatgggtgaatgcccagttcagcaagttcggtaagcagcatatcgaaaatctgttctctgatcttcaggacgggcgtaggctccttgacctgctcgagggactgactgggcagaagctccccaaagaaaaagggagtacaagagttcatgcactgaataacgtgaacaaggcattaagagttcttcagaataacaatgtagacctggttaacatagggagcactgatatcgtggacggaaaccataagcttaccctcggactcatttggaacatcattctgcactggcaagttaaaaatgtgatgaagaatatcatggccggcctccagcagaccaacagcgaaaaaatcctgctgtcttgggtccgtcaatccactcggaactacccccaggtcaacgtcatcaacttcacaacatcttggagcgacggactggccttgaatgccctgatccactcgcacaggcccgacttattcgattggaattccgtggtttgtcagcaaagcgctacacagcgactggaacatgcttttaacatcgcccgctaccagctgggtattgaaaagctgctggaccctgaagatgtggatacaacctaccctgataaaaaaagtattcttatgtatatcacctccctgttccaagtactgccacaacaggttagcatcgaggcaatacaggaggttgaaatgttaccgcgccccccaaaagtgaccaaggaggaacacttccagctgcaccaccagatgcactactctcagcaaatcaccgtgtccctggcccagggctatgagagaacttcctcccccaaaccccggtttaaatcttatgcctacacccaggcggcctatgtgacgacttccgaccccacacggtctccgttcccaagccagcatctagaggctcccgaggacaagagttttggctcttccttaatggagagcgaagtgaatcttgaccggtaccagacagcactggaagaggtgcttagttggttactatccgccgaagacacattgcaagcccagggcgagatttctaacgacgtggaagtggtgaaagaccagtttcacacccatgaagggtacatgatggacctgacagcccaccaaggacgggttggcaacattctgcagctaggaagcaaacttataggcacagggaaactgtcggaagacgaggagactgaggtgcaggagcagatgaacctgttaaatagcaggtgggaatgtctcagagttgcgagcatggagaaacaatcaaacctgcacagggagattagttatgtacccagtacgtacctgactgaaatcacgcatgtatctcaggccctgctcgaagtagaacagctgcttaacgcaccggacctatgcgcgaaggattttgaagatttgttcaagcaagaggaaagccttaaaaatataaaggattctttgcaacagtcctccgggaggatcgacatcattcactcaaagaaaacggctgctctccagagcgctaccccggttgagagggttaagcttcaggaagccctgagccagcttgacttccagtgggagaaagtgaacaaaatgtataaggaccgacagggcaggttcgataggagcgtcgagaagtggcgccgcttccactatgatatcaaaattttcaaccaatggctgaccgaggctgagcagttcctgaggaagacacagattcctgaaaattgggagcacgccaagtacaagtggtacctgaaggaattacaggacgggatcggccaaagacagaccgttgtccgtacactaaacgcaactggcgaggagatcattcagcagtccagcaaaaccgacgcttccattctacaagagaaactaggcagcctcaacttaaggtggcaggaggtctgtaagcagctgtccgacagaaagaagaggctagaggagacgctcgagcgccttcaggaactacaagaagctactgacgaactggatctaaagcttcgccaggccgaggttatcaagggatcttggcagcccgtcggcgacctgttgatagactcactgcaggatcacctggaaaaggtgaaagctctacggggagagatagcccctctgaaagagaatgtgagccatgtcaatgatctggcaagacagctcaccactctgggaattcagctaagcccgtataacttgagtactctggaggatttgaatactcggtggaaattgctgcaagtcgccgtggaagacagggtgaggcaacttcacgaagcccatcgagacttcggcccagccagccagcattttctctctaccagtgtccaaggcccctgggagagagcgatctcacctaacaaggtgccctactacattaaccatgaaacacagaccacgtgttgggatcatccaaagatgacagaactgtaccaaagcctggccgacttgaacaatgtccgtttctctgcataccggaccgcaatgaagctaagacggcttcagaaggccctgtgtctggatctgctcagcttatcggccgcctgtgacgcactcgatcagcataatctcaagcagaacgaccagccaatggatattctccagataatcaactgtctcacaaccatttacgatcgactcgagcaggaacacaacaaccttgtaaacgtacctttatgcgttgacatgtgcctgaactggctcctgaacgtctacgatacaggacgcacaggcagaatcagagttctgtcctttaagaccggcattatttctctgtgcaaggctcacttagaagacaaataccgctatttgttcaagcaggtggcctccagcactgggttttgtgatcaacgaagattgggacttctgctccatgatagtattcagatcccaagacagttgggcgaggttgcttcatttggagggtctaatattgagccatcagtgagatcctgtttccaattcgctaacaacaaaccggagatcgaggcagcattatttctagattggatgcgtctcgaacctcagagtatggtctggttgcctgtcctgcatcgcgtggcggccgccgagacggctaaacaccaggcaaagtgcaatatttgcaaggagtgccccattattggcttccgctaccgttcattgaagcattttaactacgacatctgccagtcatgtttctttagtgggcgcgtcgccaagggacataagatgcattaccctatggtcgagtactgtaccccaaccacatcgggggaggatgtgcgcgattttgccaaggtgctcaaaaataaatttcgcactaaacgctatttcgcaaagcatccaagaatgggctatctcccagtgcagaccgtgctggagggcgataatatggagacagataccatg

SEQ ID NO: 142833 - DNA, 3432 bp, Artificial Sequence
  derived and/or modified sequence
atgctgtggtgggaggaagtcgaagactgttacgagcgcgaggacgttcaaaagaaaacgtttaccaagtgggtcaacgcacagttttccaagttcgggaagcagcatatcgagaacttgttcagcgacttacaagatggtagacgcttactggatctactcgagggtctgaccgggcagaaactgcctaaggagaagggaagcacaagagtccacgcgctaaataatgtcaataaggctcttcgggtcctccaaaataacaacgtggacctggtcaatatcggctccaccgatatcgtggacggaaaccacaagctcacgttgggccttatttggaacatcatcttacactggcaggtgaagaacgtgatgaagaatataatggccggtcttcagcagaccaatagcgaaaaaatcctcctgtcctgggtaaggcagagcacacgaaactacccccaagtaaatgttattaatttcacgacctcctggtcggacgggctcgccctgaacgccctgatccactcacacaggcccgatctgttcgactggaactccgtggtatgtcagcagagtgcgacacagagattagagcatgctttcaacatcgcccggtaccagcttggaatcgagaagctcttagatcccgaggacgtggacaccacttatcccgacaagaaatccattttgatgtacatcacttcacttttccaggtgctgccacaacaagtcagcattgaagcaatccaggaagtcgaaatgctaccaagaccacccaaggttactaaggaggagcacttccagctccaccaccagatgcactattcgcaacagatcacagtcagtttggctcagggctacgagcgaacctcttcgcccaaaccaaggtttaaatcctacgcctatactcaggcagcatacgtgactacatcagaccccacccggagtcctttccctagccagcatctggaggcccctgaggataagtcttttggcagttccctgatggaatccgaagtgaatcttgacaggtaccagaccgccctggaggaggtcctgtcttggctcttgagcgctgaggataccctacaagcccagggggagatatccaatgatgtggaggttgtcaaggaccagtttcatacccatgaggggtatatgatggatctgaccgctcaccaaggacgggtgggtaacatactgcaactggggtctaaactcattggtaccggcaagttgagtgaggatgaggaaactgaagttcaggaacagatgaatctgttgaattctcgctgggagtgcctgcgcgtagccagtatggagaagcaaagcaatttgcatagggagatctcttatgtcccatcgacctatctgactgaaattactcacgtttctcaggcgctcctggaggtggagcagctgcttaacgcacccgatctgtgtgcaaaagattttgaagacctttttaagcaggaggaaagtctgaagaatattaaagatagtctgcaacagagctctgggaggatcgacataatccactctaaaaagaccgctgctctgcagagcgcgactccggtagaacgtgttaagcttcaggaggctctatcacagttggactttcaatgggagaaagtgaataagatgtataaggatcgccaaggccggttcgaccggtctgtggaaaaatggcgaagatttcactacgatatcaaaattttcaaccagtggctaacggaagctgagcagtttctgagaaagacacagataccagagaactgggagcatgccaagtataaatggtacttgaaggagctgcaagacgggattggccagcgccaaaccgtcgtccggacactgaatgcaaccggcgaggaaataatccagcagtccagcaagaccgacgctagcatacttcaagaaaaattggggtccctgaacttgcgctggcaggaggtatgcaaacaattgtcagatagaaagaaacgccttgaagaaaccctggagcgcctgcaggagctgcaggaggcaactgatgaactcgacttgaagctccggcaagctgaggtgatcaagggatcttggcagcccgttggcgacctcctgattgattccctgcaggatcacctcgagaaggtgaaggcactgaggggcgagatagcaccactcaaggagaacgtcagccacgtgaacgatctagccaggcagttgactacacttggcattcagctgtctccttacaatctctcaaccctggaggatctgaatacacggtggaagttgctccaggtcgcggtcgaggatcgggtacggcagctacatgaggctcacagagactttggccctgcctctcaacacttcctgagcacctccgttcagggaccttgggagcgagcgatctcccccaacaaagtgccgtactacattaaccacgaaactcaaacaacatgctgggaccaccctaagatgaccgagctatatcagtcccttgccgatctcaacaatgtccgcttctctgcataccgcactgccatgaagctcagaagactccagaaggccctgtgcttggacctgcttagcctaagcgcagcttgcgatgccctcgatcagcataatctgaaacaaaacgatcagcccatggatatccttcagattatcaactgcctcacaacaatctacgatcgccttgaacaagaacacaataatctcgtgaacgtgccgttatgtgtagacatgtgtctcaactggctgctcaatgtgtacgacaccggccggacaggcagaataagggtgcttagcttcaaaacaggtattatatcgctttgtaaggctcacttggaagataaataccgctatctgtttaaacaggtcgcatcaagtaccggattctgtgaccagcgcagattgggactactgttgcatgatagtatccagattccacggcagctgggcgaagtggcctcctttggaggttcaaacatagagccgtctgtccgatcctgcttccagttcgccaataataaaccagagattgaagccgctctcttcctggattggatgaggctggaacctcagagtatggtgtggcttccagtactgcaccgggtggccgctgctgaaaccgcaaagcatcaagccaaatgcaacatctgcaaagagtgtcctatcatcgggttccgctataggtcattgaagcacttcaactatgacatctgtcagagttgtttcttctctggcagggtagccaaaggccacaaaatgcactatcccatggtggaatactgtacccctactacatctggggaggacgtgagagacttcgccaaggtcttgaagaataagtttagaacaaagcgatacttcgctaagcaccctcgtatgggataccttcccgtgcagactgtattggagggggataatatggaaaccgataccatg

SEQ ID NO: 142834 - DNA, 3432 bp, Artificial Sequence
  derived and/or modified sequence
atgctctggtgggaagaagtggaagattgctatgagcgggaggacgtgcagaagaaaactttcaccaagtgggtcaacgcgcagttctctaagttcggaaagcaacacattgaaaatctgttctctgacctccaagacggaagaaggctgttggacctgctggaaggactcaccggacaaaagctgccgaaagagaaaggatcaacccgcgtgcacgcacttaacaatgtgaacaaagccctgagagtgctgcaaaacaacaacgtggacctcgtcaacattggatccactgacatcgtggatggcaatcacaagctgacgctcggtttgatctggaacattatcctgcactggcaggtgaagaacgtcatgaagaacattatggccggacttcaacagacgaattcggagaaaatcctcttgagctgggtccggcaatccacccgcaattacccacaggtgaacgtcatcaactttactaccagctggtccgacggactcgcgcttaatgctctgatccacagccataggccggatctgttcgattggaactccgtggtgtgccaacagtcggccactcaacggcttgagcacgccttcaacattgcgcggtaccagcttggaatcgagaaactcctggatccagaggacgtagacacgacctaccccgataagaagtcgatcctgatgtacattaccagcctgtttcaggtgctgccacaacaggtcagcatagaagcgattcaagaagtcgaaatgctcccgcgcccgccgaaagtcactaaggaggagcattttcagcttcatcatcaaatgcactattcccaacaaataactgtgtctctcgcgcagggatacgaaaggacttcgtcgccaaaacctagattcaaatcatacgcatacactcaggccgcctatgtgactactagtgaccctacccgctcgccattccccagccagcatctggaagccccggaggataagtcgttcggtagctctttgatggaatcggaagtgaacctggacagataccagacggccctggaggaggtgctgagctggcttctgagcgccgaagatacgctgcaggcacagggtgaaatctccaacgacgtggaggtcgtgaaggatcagttccacacgcatgaaggatacatgatggatctgactgcacaccaagggcgcgtgggcaatatcctgcagctcggatcgaagctgatcggaactggaaagctgtccgaagatgaggaaactgaagtccaggaacagatgaatctgctgaattcccgctgggagtgcctgcgtgtggcaagcatggaaaagcagtccaatctgcatcgcgaaatctcctacgtcccgtcaacctacctcactgaaatcactcacgtgtcacaggctctgttggaagtggaacagcttctgaacgcgccagatctgtgtgcaaaggactttgaggacctgtttaagcaggaagagtcactcaagaacatcaaagacagcctgcaacagtcctccggccggatcgacattattcattcgaagaaaaccgcggcccttcagtccgctactccggtcgagcgggtgaaacttcaggaggcactgagccagttggacttccaatgggagaaggtcaataagatgtacaaagataggcagggaaggttcgaccggagcgtggagaagtggagacgcttccactacgacattaagatctttaaccaatggctgacggaggctgaacagtttctgcgaaagactcaaattccagaaaactgggaacatgcgaagtacaagtggtaccttaaagaactccaggacggaatcggccagagacagaccgtcgtccgcaccctgaacgctaccggcgaagaaatcatccagcagtcctcgaaaaccgatgcgtccattctgcaggagaaactcggatccctgaatcttcgctggcaggaagtgtgcaaacagctgagcgaccggaagaagcggctcgaagaaacccttgagcgcctccaagaactgcaggaggcaactgacgaactggacctcaagttgcggcaggccgaggtcatcaaggggtcttggcagccggtcggcgacctgttgatcgattcactgcaggaccacttggagaaggtgaaggccctgcgcggcgaaatcgccccactcaaggaaaacgtgtcacatgtgaatgatctggctcggcaactgaccactttgggaatccagctgtcgccctacaatctgtcaacgctggaggacctgaatacccgctggaagttgctccaagtcgcagtcgaggaccgcgtgcgccaactccacgaagctcatagggattttggacctgcgagccagcatttcctctcaaccagcgtgcaagggccatgggagcgggcgatttccccgaacaaggtcccgtactacatcaatcacgaaacccagaccacctgttgggaccacccaaaaatgactgagctctaccagtcactggccgacttgaataacgtccgcttttcagcttaccgcaccgccatgaagctccgccgcctgcaaaaggccctttgcctggatctgcttagcctctccgcagcctgcgatgcgctcgatcagcacaacctgaaacagaacgatcaacccatggacatactgcaaatcatcaattgtcttactaccatctacgatcgactcgaacaggaacacaataacctggtgaatgttcccctgtgtgttgacatgtgcctgaactggctgctgaacgtgtatgacactgggcggaccggcagaatccgcgtcctctcctttaagactggaatcatctcactctgcaaggcgcacctggaagataagtaccgctacctctttaagcaagttgcgagctctaccggattctgtgaccaaaggagactgggactgctgctgcacgacagcatccagattccacgccagctcggagaagtggcctccttcggaggatcaaatatcgagccctccgtgcgctcttgcttccagttcgccaacaataagccggaaatcgaggcggcgcttttcctcgattggatgcgccttgagccgcaatccatggtgtggctcccggtgctgcatagagtggctgccgcggagactgccaaacatcaagcaaagtgtaacatctgcaaggaatgtccaatcatcggatttagataccgctcactcaaacactttaactatgacatctgccaaagctgctttttcagcggccgggtcgcgaagggacacaaaatgcattacccaatggtggagtactgcactcctaccacgtccggcgaggatgtgcgcgatttcgcaaaggtgttgaagaacaagtttagaactaaacggtacttcgccaaacatccacgcatgggttacctcccagtgcagactgtgcttgagggggacaatatggaaaccgacactatg

SEQ ID NO: 142835 - DNA, 3432 bp, Artificial Sequence
  derived and/or modified sequence
atgctgtggtgggaagaagttgaggattgctacgaacgcgaggacgtgcagaagaaaacctttaccaagtgggtgaatgcgcaattttcgaagtttggaaaacagcatatcgaaaacctcttcagcgacctgcaggacggacggcggctgttggacctgctcgaagggctgactgggcagaaactccctaaggagaagggctcgacccgggtgcatgcactcaataatgtgaacaaggctctcagagttctccaaaacaataatgtcgaccttgtgaacatcggttctactgatatcgtggatggcaaccataagttgaccctgggactcatctggaacatcattctgcactggcaggtgaaaaacgtgatgaagaacatcatggctggccttcagcaaaccaacagcgagaagatacttctcagctgggtgcgccagtccacccgcaattacccacaggtgaatgtcatcaatttcaccacctcctggtcagatggactggcacttaatgccctcatccatagccatcgcccagatctgtttgattggaactctgtggtgtgccaacagtccgccactcagagattggaacacgcattcaacatcgcacggtaccagcttggcatcgaaaaactcctggacccggaggatgtcgatactacctaccccgataagaagagcattttgatgtatatcacttccctcttccaggttctgcctcaacaagtctccatcgaagccatacaggaagtggagatgctgccacggccaccgaaggtcaccaaggaggaacatttccagctgcaccaccaaatgcattactcccaacaaatcactgtgtctctggcccaaggatacgagagaactagcagccctaaacctcgcttcaaatcatacgcatatacccaggccgcatacgtcactacctcggacccgactagatctcctttcccttcacagcacctggaggccccggaagataagtcgttcggaagcagcctcatggagagcgaagtgaacctggacaggtaccagacggcactggaggaggtcctgtcgtggctgctctccgccgaggacaccctgcaggcccagggagagatttcaaacgatgtagaagtcgtgaaggatcagtttcacacccatgaaggatacatgatggatctgacggcccaccagggccgagtgggaaacatactgcaattggggtccaagctcatcggaaccggtaaactttctgaggacgaagaaaccgaggttcaagagcagatgaacctgctgaattcgaggtgggagtgcctgcgggtggcctcaatggagaaacaatcgaaccttcacagagagatctcgtacgtgccgtcgacgtacctgaccgaaatcactcatgtgagccaggcactgctggaagtggaacaactcctgaatgcaccggacctgtgcgcaaaggactttgaggacctgttcaagcaggaagaatcactgaagaatatcaaagacagcctgcagcagtcatcgggacgcatcgacatcatccattccaaaaagacggctgccctgcagagcgccactcccgtggaacgggtgaaactgcaggaagccctctcacaactggactttcagtgggagaaagtcaataagatgtacaaggaccgccagggacggttcgaccgatcagtcgaaaagtggcggcgcttccattacgacattaagatctttaaccagtggcttaccgaagcggagcagtttttgcgtaaaacccaaattccggagaattgggagcacgcaaaatacaagtggtacctgaaagaattgcaagacggaattggacagcgccagacggtcgtccgcaccctgaatgccaccggtgaagagatcattcagcaatcatccaagaccgacgcctcaatcctccaagaaaagctggggagcctgaacctgcgctggcaggaagtgtgcaagcagctcagcgatagaaaaaagagacttgaagaaactttggagcgcttgcaggagctccaagaggccaccgatgaactcgacctgaaactgcggcaggcggaggtgataaagggctcctggcagccggtgggagatctgcttatcgactccctgcaagatcacttggaaaaggtcaaggcgctgcgcggggaaatcgctccgctcaaggaaaacgtgtcccatgtcaatgatctggcacgccagctgactactttgggaatccagctctcaccttacaacctgtccaccctggaggacctcaacactagatggaagctccttcaggtggctgtggaggatagagtgagacagctgcacgaggcacaccgggacttcggaccggcttcgcaacacttcttgtccacctcggtgcaaggcccttgggaaagggccatctcaccgaataaggtgccgtattacatcaaccatgaaacgcagactacttgctgggatcatccgaagatgactgaactgtaccagagcctggctgacctcaataacgtccgcttctcagcgtaccggacggctatgaagctgagacggctgcaaaaagctctctgtctcgacttgctgagtctctcagctgcgtgcgacgccttggaccaacacaacctgaaacaaaacgaccagccgatggacattctgcaaatcatcaactgtctcaccaccatctacgaccgcctggaacaagaacacaacaacctggtcaacgtgccgctgtgcgtcgacatgtgtttgaactggctgctgaatgtgtacgataccgggcgcaccggacgaatccgcgtgctctcattcaagaccggcatcatctcactttgcaaagcgcatttggaggacaaataccgctacttgttcaaacaggtggcctcaagtaccggattttgcgaccagaggcggctgggattgctcctgcacgactccattcaaatcccgagacagctgggagaggtggcctcgttcggaggatcgaatattgagcctagcgtgagatcgtgcttccagttcgcaaacaacaagccggaaatcgaggccgctttgttcttggattggatgagacttgaaccacagagcatggtgtggctcccggtactccaccgcgtggccgctgctgagactgctaaacatcaggccaagtgtaacatttgcaaggagtgtcctatcataggtttccggtacaggtcgctcaaacactttaactatgatatctgccaatcgtgctttttctcaggtcgggtggcaaaaggccacaagatgcactacccaatggtggagtattgcaccccaaccacttcgggagaggatgtgcgcgacttcgcaaaagtgttgaagaacaagttccgcaccaagaggtacttcgcgaagcacccaagaatgggctacctgcctgtgcagacggtgctggagggcgacaatatggaaaccgatactatg

SEQ ID NO: 142836 - DNA, 3432 bp, Artificial Sequence
  derived and/or modified sequence
atgctgtggtgggaagaggtcgaggattgctacgagcgagaagatgttcagaaaaagacattcactaaatgggtcaacgctcagttttctaaattcggtaaacagcacatcgaaaatctgttcagcgaccttcaggacggtaggcgtctgctggatctgctcgaaggattgaccggtcagaaactacctaaagagaagggaagtacacgggtgcatgcactgaacaatgtcaacaaggcgctgagagtcctgcagaacaataatgtcgatttggtgaacataggttctacagacatcgtggacggcaaccacaagctcactttaggcctgatatggaatatcatcttgcactggcaggtgaaaaacgttatgaaaaacattatggctggcctacagcagacaaactcagaaaagattcttctgtcatgggtgcgacaaagcacgcgtaactaccctcaggtcaacgtgatcaacttcactacatcctggagtgacggacttgctttgaatgccttaatccattctcaccgacctgacctcttcgactggaactccgtggtgtgccagcagtcggccacccagagattggaacatgcatttaacatcgcaagataccagctgggtatagagaaacttctggaccccgaagacgtggatactacgtaccccgacaagaaatcaatcctgatgtatattacgagtttattccaggtgcttccccaacaagtgtcaattgaagcaattcaagaagtcgagatgctacctagacctcccaaagtgacaaaagaggaacattttcaactccaccatcagatgcattatagtcagcaaatcacagtgagtctcgctcaagggtacgaaagaacttctagtcctaagccgaggtttaaatcatatgcttatactcaagcagcctatgtgaccacgagtgatccgacccgatctcccttcccatcacaacacttagaagctccggaagacaagtccttcggatccagcctgatggaaagcgaggtcaatctggataggtatcagacagcacttgaagaggtactctcgtggttactgtccgctgaagatactctgcaggcgcagggggagataagtaatgacgttgaggttgtgaaggaccagtttcacactcatgagggctatatgatggatctgacagcccatcagggcagagtgggcaatatacttcagttagggtccaaactgatagggaccggtaagcttagcgaggatgaggagactgaagtccaggaacagatgaatctgcttaacagccgatgggaatgcctgagggtcgccagcatggaaaagcagagtaacttgcatcgagagatcagctatgttcctagcacttatctaaccgaaataactcatgtctctcaggcactactcgaagtagagcagcttttaaacgctccagatctctgcgctaaagacttcgaagatttgttcaagcaggaagagtcccttaagaacatcaaagactccctccagcagtcaagcggccgaatagacattatccactcaaagaaaacagcagccctccagtctgccaccccagtggagcgggtaaaactacaggaggctttgtctcagttagacttccagtgggagaaggtaaataagatgtacaaagataggcagggcaggttcgatagatcagtcgaaaagtggaggaggtttcactacgatattaagatatttaatcagtggcttaccgaagccgaacagttcctccgaaagacacagattccagaaaattgggaacatgcgaagtacaagtggtacctgaaggagctacaggacggtatcggccagaggcagaccgtggttcgaactctgaatgctactggggaagaaataattcaacaatccagcaagacggacgcaagcatactacaggagaaactcgggagccttaatctgagatggcaggaagtctgcaagcagctctcggataggaaaaaacgacttgaggaaaccttggagcgccttcaggagctccaggaggctactgacgaactcgacctgaaactgaggcaggccgaggtcattaagggatcttggcagccagtgggggacctcctgatagatagcctgcaggatcacctggagaaagtaaaagccctgcgtggcgaaattgccccacttaaggagaacgtctcacacgtgaatgatctggcaagacagctgactactctgggcatccagctgagcccgtataacctgagcacattagaggacttaaataccaggtggaaactcttacaggtggctgttgaggaccgagtacgacagctccacgaggcccatagggacttcggtccagcttcccaacattttctgagtacgtccgtccaggggccctgggaaagggcaatcagccccaacaaggtgccttactacatcaatcacgaaacccaaacaacctgctgggatcatcccaagatgactgagctataccagtccctggctgatctgaataatgtgaggttttcggcttatcgaactgccatgaagctcaggcggcttcaaaaggctctatgtctggatctgctatctctaagcgccgcctgtgacgcgctcgaccaacacaatctgaagcagaatgaccagcctatggacatcctgcagatcattaattgcctcacgactatctatgacagactggaacaagagcacaataacttggttaatgttcccttgtgtgtggacatgtgtttgaactggctgctgaacgtttacgatactggaaggacaggcaggattagggtgctgtctttcaagactgggataatctctctatgcaaagcgcatctcgaggataagtacaggtacctgttcaagcaagtcgcgagcagcacaggcttctgtgaccaacgaagactgggtctcctcctccatgactctatccagattccacgacagctcggcgaggtggcttcgtttggcgggtctaacatagagccctctgtcagatcttgtttccagtttgcaaataataaacctgagattgaagcggccctgtttctcgactggatgcggcttgagccacagtccatggtttggctccccgtgttacaccgtgtggccgcagcggagacagccaagcaccaggcaaaatgcaatatctgcaaagagtgccctataatcggcttccgttacaggtcactaaagcactttaattacgatatctgtcagagttgcttttttagtgggcgggtcgccaagggacacaaaatgcattaccccatggtggaatactgtacccctacgactagtggggaggacgttcgagacttcgcaaaggttctgaagaacaaatttaggactaaaagatattttgctaagcatccccgcatgggttaccttccggttcagaccgtattggaaggcgataacatggaaacagatacaatg

SEQ ID NO: 142837 - DNA, 3432 bp, Artificial Sequence
  derived and/or modified sequence
atgctctggtgggaggaagttgaggattgttacgaaagggaagatgttcagaagaaaacgttcaccaagtgggtgaacgcccaattcagcaaatttggaaagcagcatattgagaatctgtttagcgatctgcaggatggacgcagacttcttgaccttcttgaaggcctcactggccaaaaacttccaaaagaaaaggggtcgactagggtgcatgcacttaacaacgtcaacaaggcgctccgggtgctccagaataacaacgtggacctggtgaacattggctccaccgatatcgtggatggaaatcacaaattgactcttggtctgatttggaacattatcctgcattggcaagtgaaaaacgtgatgaaaaacataatggcaggtctgcaacagactaactcggaaaagattttgctttcttgggtgcgccaatccacccgaaactacccccaagtgaatgtcataaacttcaccacttcctggtcggatggcttggcattgaatgcccttattcatagccatagacctgatctctttgattggaactcggtcgtgtgtcagcagtcagccactcaacgactcgaacatgcgttcaacatcgctcgttaccagcttgggatcgagaagctgctggatccagaagatgtggacactacctacccagataagaaatcaatccttatgtatatcacctcactgtttcaagtgctgccacagcaggtcagtatagaagcaattcaagaagtggagatgcttcctagaccccccaaggtcactaaagaggaacactttcagctgcatcaccagatgcactactcccagcagatcaccgtctcactcgcccagggttatgagcgcacctctagtcctaaaccaaggtttaagagctacgcctacactcaggcagcatacgtgaccacctcagaccccacgcgttcgccttttccctcacagcatcttgaagcccctgaagataagtcgtttggatcatccctcatggaatcggaagtgaatctggaccggtaccaaaccgcgctcgaagaagtcctgtcctggttgctgtcggcagaggacaccctgcaagcccagggcgaaatcagcaacgatgtggaggtcgtcaaggaccagtttcatactcatgaagggtacatgatggacctcacggcacaccagggtcgggtgggaaatatcctgcagctggggtccaagctgatcggaaccgggaaactctcagaagatgaagagactgaagtgcaggagcaaatgaatctgctgaactctaggtgggagtgtctgagagtcgcctcgatggagaagcaatccaacctgcacagagagatatcctacgtgccaagcacctacctgacggaaattactcacgtgtcgcaggcactgctggaagtggaacaactgctgaacgcaccggatctgtgtgctaaagacttcgaggatcttttcaagcaagaggaatcgctgaaaaacattaaagattccctgcagcaatcttctggccgcatagacatcatccacagtaagaaaactgcggcacttcagtccgcaactccggtggagagggtcaagctccaggaagccctctcgcaacttgattttcagtgggagaaggtcaataagatgtataaggataggcaaggtagatttgatcgttcagtggaaaagtggagaagatttcattatgacatcaagatattcaaccagtggctcaccgaagcagagcaatttctgcgaaagactcagattcccgagaactgggagcatgccaagtacaagtggtacctgaaggaactgcaagatggtattgggcaaagacaaaccgtcgttcgcactctgaatgccactggggaggagatcattcaacaatcctcgaaaaccgacgcttctattcttcaagaaaagctgggatcgcttaatctgaggtggcaagaagtgtgtaagcagctttcggatagaaagaagagacttgaggagactctcgaaagattgcaagaacttcaggaagccaccgatgagctggacctcaagctgcgtcaagctgaggtcataaagggaagctggcaaccagtcggagatttgctcattgacagcctgcaagaccatctggaaaaagtcaaagcccttcggggcgaaatcgcaccacttaaggaaaacgtctctcacgtgaatgatttggctcgccaactgacgacgcttggtatccagctctccccctacaacctttcaaccctggaagatcttaacactagatggaaacttctccaagtggcggtcgaagatcgcgtgcgtcagctgcatgaggcacatagggatttcggaccagcctcgcagcatttccttagcaccagcgtgcaaggtccttgggagcgcgcaattagccccaacaaagtaccctactacattaatcatgaaactcagactacgtgttgggatcatcctaagatgactgaactgtaccaatccctcgccgatctgaacaacgtccggttcagcgcctacaggaccgcgatgaagttgagacggctccagaaggcactttgtcttgatcttctcagcctttcggcagcatgcgacgctcttgatcagcataatcttaaacaaaatgaccaaccaatggatatcctccagattatcaattgccttactacgatttatgaccggcttgaacaagaacataacaatctcgtcaacgttccactgtgcgtcgatatgtgcttgaactggctccttaacgtgtacgacactggaagaacgggaagaattagagtcttgagctttaagaccggaattatcagcctctgcaaagcgcacctggaggacaagtaccgctacttgtttaagcaagtggcatcatcaaccggattttgtgaccagcggaggcttggactcttgctccacgattccattcaaatcccaaggcagcttggagaagtcgcctcatttggaggatccaatattgaaccttcggtcagatcgtgcttccaatttgcaaacaacaagcccgaaattgaggccgccctgtttcttgactggatgagactggagccacagtctatggtgtggctcccagtgctccatagagtcgcagcagcggaaaccgcaaagcatcaggcaaagtgtaacatttgtaaggagtgtccgataataggattccgctacaggtcccttaagcacttcaattacgacatttgtcagtcgtgctttttctctgggagagtggccaaaggacataagatgcattaccctatggtcgaatactgcactcctaccacttcaggagaagatgtgcgtgatttcgcgaaggtgcttaagaataagttcaggaccaagaggtactttgctaagcaccctagaatgggatacctccctgtgcagaccgtgcttgagggggacaacatggaaaccgacaccatg

SEQ ID NO: 142838 - DNA, 3432 bp, Artificial Sequence
  derived and/or modified sequence
atgctctggtgggaggaggttgaggactgctacgagcgcgaagatgtgcagaaaaagacatttactaaatgggtgaacgcccaatttagcaaattcggaaaacagcacatcgaaaatctatttagtgacctccaggacggaagaaggcttcttgacctcttagagggccttaccggccagaaattaccgaaggagaaaggcagcaccagagtgcatgccctaaataatgtgaacaaggccctgcgcgtgctgcagaataataatgtggatctggttaatatagggtctactgacattgtggatggcaaccacaaactgacattgggactgatctggaatataatcttgcactggcaggtgaagaatgtgatgaagaatattatggccggcctgcagcaaaccaattctgaaaaaattctgctctcttgggtgcgccaaagcaccaggaactacccacaggtcaacgttattaacttcactacttcttggagtgatgggctcgcattgaatgccctgatccattcacatagacctgatctttttgactggaactcagtggtgtgtcaacagagtgctacccagcgtcttgaacatgcgttcaacattgccagatatcagctaggcatcgagaagctgctggatccggaggatgtcgatacaacttaccccgacaagaagtctatcctcatgtacattacgtcgttgtttcaggtgctacctcaacaggtgagcattgaggctattcaggaagtggagatgctgcccaggccgcccaaagtaacaaaagaggagcactttcaactccaccaccagatgcactactcccagcagattacagtgtccctggctcagggctacgaacgaacgtcaagtcctaagcccagatttaagtcttatgcatatacccaagccgcttatgtgacaacgtccgacccgacccgctctccatttccctctcagcacctggaggcaccagaggacaaaagctttggtagcagtctcatggagtcggaggttaatctggaccggtatcagacagctctggaggaagtattgagctggctactaagcgccgaagacacgctccaggctcagggcgaaatctcgaatgatgttgaggtcgtgaaggatcagttccatacccacgaggggtatatgatggatctcacagcccatcagggccgtgtgggtaatatcctccagctcggcagcaaactcattgggacaggtaaactctccgaagacgaggaaaccgaagtacaggagcagatgaatctcttgaactcccggtgggaatgtctgcgcgtggcttctatggagaagcagagcaatctgcatagagaaatctcctacgtcccaagcacatatctcactgaaatcacacacgtctcccaggccctgttggaagtggaacagctgctgaacgcgcccgatttgtgcgccaaagacttcgaagacctgttcaagcaggaagaaagtctgaaaaacattaaggactctctgcagcagagttctggacggatcgatataattcacagtaaaaaaactgcagctctccagtccgccaccccagttgagcgagtgaagctgcaggaagctctcagccaactggacttccaatgggaaaaggtgaacaagatgtataaggatagacagggacgattcgatcggtccgtcgagaaatggcgccgattccactatgacattaaaattttcaatcaatggctaaccgaggcagagcagttccttaggaagacccagatccccgagaactgggaacatgctaagtacaagtggtacctcaaggagctccaggatgggatcggacagcgacagactgtggtacgcaccttaaacgctactggggaggagatcattcaacagagttccaagaccgacgctagcatcctacaggaaaaactgggctctctgaacctgcggtggcaagaagtgtgtaagcaactgagcgacaggaagaagcggctggaggaaactttagagagactgcaggagctgcaggaggcgaccgatgaattggatctcaagctgcggcaggcggaagtgattaagggatcttggcagcccgttggcgacctgctgatcgactctctgcaagatcacctggagaaagtgaaggctctccgaggtgagattgcgcccctgaaggagaatgtttcacacgttaatgacctggccaggcagttgacaacgctaggcatacagttgtccccctataatttgagtaccctggaagatctaaacacacggtggaagctgctgcaggttgcagtggaagatagagtacggcagcttcacgaagcccatagagattttggcccggcttcccagcatttcctgtctacaagcgtgcagggtccctgggagcgtgccatcagtccaaacaaggtgccttattatataaaccatgagacccaaaccacctgctgggaccatcctaaaatgactgaactgtaccagagtttggccgacctgaacaatgtgagattcagtgcctacagaaccgccatgaagctccggcggcttcagaaagccctttgtctggacctccttagcctgagtgctgcatgtgacgcactggatcagcacaacttgaaacagaatgatcagcccatggacattcttcagataataaactgtctcacgacaatttacgatagactggagcaggagcataataacttggtgaacgtgcctttatgtgttgacatgtgcctgaattggttgctgaatgtgtatgacactggccgcaccggcagaatcagggtgctgtcattcaagacgggaattatctccctatgtaaggcccatcttgaggataaatatcggtaccttttcaaacaggtcgcatcatccacaggtttttgcgatcaaagacgactgggcctgttactacacgatagtattcagataccgaggcagctgggagaagtagcgtctttcggagggagcaatatcgagcctagcgtccgcagttgtttccagtttgccaacaacaagcccgaaatcgaggccgccctgttcttggactggatgcgcttggaaccccagtcaatggtctggctgccagtgttgcatcgtgtcgctgcagctgagactgccaagcatcaggcgaagtgcaatatttgtaaggagtgtcctatcatcgggtttaggtaccgatctttaaaacactttaattatgatatctgtcagtcttgctttttctcgggtcgggtggcgaagggccacaagatgcactatcccatggtcgagtattgcacaccaaccacctccggggaggacgtcagagattttgctaaggtcctgaaaaataagttccgcaccaagagatactttgctaagcacccccgaatgggctacctgccggtacagaccgtgctcgagggtgacaatatggagactgacaccatg

SEQ ID NO: 142839 - DNA, 3432 bp, Artificial Sequence
  derived and/or modified sequence
atgctctggtgggaagaagtggaagattgttacgaacgggaagatgtccagaaaaagacgtttactaaatgggtcaacgcacagttttcgaagttcggaaagcagcacatcgagaacctgttctccgatctgcaagacggccggagactgctggacctgctggaaggactgactgggcagaaactgccaaaggaaaagggatccacccgggtgcacgcgctgaataacgtcaataaggctcttcgcgtgctgcagaacaacaacgtggacctcgtgaacatcggatcgaccgacatcgttgacggaaatcacaagctcacgcttggccttatctggaatatcattctgcactggcaggtgaaaaatgtcatgaaaaacatcatggctggccttcagcagaccaattccgagaagattttgctctcctgggtccggcaatcgacccgcaattaccctcaagttaatgttatcaatttcaccacctcgtggtcagacggactggcactgaacgccctgattcacagccaccgcccggatctgttcgactggaactcagtcgtgtgccaacagtcagcgacccagcgcctggaacatgcgttcaacatcgcccgttaccaactgggaatcgaaaagctgctggacccagaggatgtcgacactacctacccagacaaaaagagcatcttgatgtacataacttccttgttccaggtcttgccccaacaggtgagcatcgaggccatccaagaggtggaaatgttgcccagaccaccgaaggtgactaaggaagagcattttcagctgcatcatcaaatgcattactcgcagcaaattacggtgtcactggctcagggatatgagcgcacttcctcgcctaagccaagattcaaatcctacgcgtacacccaggcggcttacgtcacgaccagcgaccccacccggtccccgttcccgtctcagcatctcgaagccccggaggacaaatccttcgggagctcacttatggagtccgaggtgaacctcgacagatatcagactgcgctggaggaggtgttgtcgtggctcctgtcagctgaggacacgctgcaagcacaaggcgagatttcaaatgatgtggaggtcgtgaaggaccaattccatactcatgagggatatatgatggatttgaccgcccaccaaggaagggtggggaatatcctgcaattgggctccaagctcatcggaactggtaagctctcagaggatgaagagactgaagttcaagaacagatgaacctgctgaacagccggtgggaatgccttcgagtggcctcaatggaaaagcaaagcaacctgcatagagaaatttcatacgtcccgtcaacctacctcactgaaatcactcatgtgtcccaggcattgctcgaggtggaacagctgctgaacgcgccagatctgtgcgccaaagacttcgaagatctgttcaaacaggaagagtcgttgaagaatatcaaagactcacttcaacagtcgagcgggagaatcgatatcatccactcgaagaaaaccgccgccctgcagtctgcgactccggttgagcgagtgaagctgcaagaagctctctcgcagcttgacttccaatgggaaaaggtgaacaagatgtacaaggaccggcagggacgcttcgatagatcagttgaaaaatggcggcggttccactacgacatcaaaatctttaaccagtggctcactgaagctgaacagtttctgcggaaaacccaaatcccggaaaactgggagcatgcgaagtacaagtggtatctgaaagaactgcaggatggaatcggtcaaaggcaaaccgtggtccgcactttgaatgccactggcgaagagatcatccaacagtccagcaagactgatgccagcatattgcaggaaaagctcggaagcctcaaccttcgctggcaggaagtgtgcaaacagttgtctgatcggaagaagcgcctcgaggagacgcttgaacggttgcaagagctgcaggaagccacggatgagctcgatctcaagttgagacaggccgaagtgatcaaaggcagctggcaacccgtcggcgatctgcttatcgacagccttcaagaccacttggaaaaggttaaggccctcagaggggaaatcgcaccactcaaggaaaacgtgtcacacgtgaacgacctggcgagacagctgaccactctcggaatccaactctcaccgtacaatctgtccacgctggaggacctgaacacccgctggaagctgctccaggtggctgtggaagatcgggtgaggcagctgcacgaagcacaccgcgattttggacctgcctcgcagcacttcctgtcgactagcgtgcagggaccgtgggagcgggctatctcaccgaacaaggtgccgtactatatcaaccatgaaacgcagaccacctgctgggatcatccgaaaatgacggaactgtaccaatcacttgctgatctgaacaacgtgagattcagcgcataccgcactgcgatgaagctgaggcggctgcaaaaggccctttgtctggatctccttagcctgtccgccgcgtgcgacgccctcgaccaacataatctcaagcagaacgaccagccgatggacatccttcagatcattaactgccttaccactatctacgaccgtctcgagcaagagcacaataacctcgtcaatgtgccgctttgcgtcgacatgtgcctgaattggctcctgaacgtgtacgacaccggaaggaccgggaggatcagggtcctgtccttcaagaccggaatcatttcgctgtgcaaggcccatttggaggataagtaccggtacctcttcaaacaagtggcatcatcaactggattttgcgaccagagaagattgggactcctgctccacgatagcattcagattccacggcaactgggtgaggtggcttcgttcggtggaagcaatattgagccgtccgtgcggtcatgtttccagttcgcaaacaataagccggaaatcgaagcggcgctgttcctcgactggatgaggcttgagccgcaatcgatggtgtggctgcctgttctgcatcgggtggcggccgcggaaacggcaaaacaccaggcaaagtgcaacatctgcaaggagtgcccgattatcggatttaggtaccgctccctgaagcacttcaattacgatatctgtcagagctgtttcttctccggccgagtggccaagggccacaagatgcactaccctatggtggaatactgtactccaaccacctctggtgaggacgtccgtgattttgccaaagtccttaagaacaagttccgcaccaagcggtattttgcaaagcaccccagaatgggttacttgcctgtgcagaccgtccttgaaggggataacatggaaaccgacactatg

SEQ ID NO: 142840 - DNA, 3432 bp, Artificial Sequence
  derived and/or modified sequence
atgctgtggtgggaggaagtggaggactgctacgagcgcgaggatgttcagaaaaagactttcaccaaatgggtgaacgcacagttttcgaaattcggaaagcaacacatcgagaacctctttagcgacctccaagacggtcggcgacttctggacctgctggaaggactgaccggacagaaactcccaaaggagaagggatccactcgggtccatgccctcaacaacgtcaacaaagccctcagagtcctccaaaacaacaatgtcgatctggtgaacatcggatcgaccgatatcgtggacggtaatcacaagctgactctcggcctgatctggaatatcattctgcattggcaagtcaaaaacgtgatgaagaacattatggcgggactgcagcagactaatagcgaaaagatcttgctttcttgggttagacaatcaacgagaaactatccgcaagtcaatgtgatcaactttaccacctcgtggtcggacggactcgccttgaacgcactgatccactcacaccggccagatctgttcgactggaactcagtggtgtgccagcagtccgcaactcagcgcctggagcacgccttcaacatcgcccggtaccagctcggtatcgagaagctgctggacccggaagatgtggataccacctacccggacaagaagtctatactgatgtacattacgtcactgtttcaagtgctgccacagcaggtttccatcgaagccattcaggaggtggaaatgctccctcggccgccgaaagtgacgaaggaagaacactttcagctccatcaccagatgcactattcgcagcaaatcactgtctcactcgctcagggatacgaacggacctcgagcccaaagccccgctttaagtcttacgcgtacactcaggccgcgtatgtcactacctccgacccaactagaagcccgttcccgtcgcagcaccttgaagctcccgaagataagtcattcggaagctccctgatggagtcagaagtgaacctcgacagataccaaaccgcactggaagaagtgctctcgtggctgcttagcgccgaggacacccttcaagctcagggtgaaatcagcaatgacgtcgaggtcgtcaaagaccagtttcacacgcatgagggctacatgatggatctgaccgctcaccaaggccgggtcggaaatatcctgcagctgggaagcaagctcatcggcacgggcaagttgtcggaagatgaagagactgaggtccaggagcagatgaacctgctgaattcacgctgggaatgtctgcgcgtggcctctatggaaaaacagagcaatctgcacagggagatcagctacgtgccatcgacctacctgactgagatcacccatgtcagccaggcccttctggaagtggagcaacttctcaatgcaccggatctgtgcgccaaggatttcgaggacctcttcaaacaagaagaatcactcaaaaacatcaaggattccctgcagcagagcagcggaagaatcgacatcatccactccaagaaaaccgcagccctgcaatcagctactccggtggagcgagtgaagctgcaagaagccctctcacagctcgacttccagtgggaaaaagtgaataagatgtacaaggaccgacagggcaggttcgaccgcagcgtggaaaagtggaggagatttcactacgacattaagattttcaatcaatggctgactgaggcagagcagtttctgagaaagacccagatccccgaaaactgggagcacgcgaagtataagtggtatctgaaggagttgcaggacggaatcggacagcggcagaccgtcgtccggaccctgaacgctactggagaggagattattcaacagtcgtccaagacggacgcgtcaatactccaggaaaagttgggttccctgaatctccgctggcaagaggtttgcaagcagctgagcgatcgcaagaaacgccttgaagagactttggaacggctgcaagagctccaggaggcgacggatgagctggacctgaagctgagacaagcagaagtgatcaagggcagctggcagccagttggagatttgttgatcgattcgctgcaggaccatctggagaaagttaaggctttgaggggcgaaatcgcgccgcttaaggaaaatgtgtcgcacgtgaatgacctggcacggcagctgacgactctggggatccagctttccccgtacaacctctccacgctcgaagatctcaacacccgctggaaactccttcaagtggctgtggaagatcgcgttcggcaattgcatgaggcccacagagacttcggacctgcttctcagcactttctctcgacttcggtgcaggggccgtgggagagagcaatcagcccaaacaaagtcccatactacatcaaccacgagactcaaaccacctgctgggaccatcctaaaatgactgagctgtaccagagcctggcggatttgaacaacgtgcgattctcggcttaccgcactgcgatgaagctcagacgtctgcagaaagcactctgcctcgacctcctttctctctcggcggcgtgcgatgccctggaccaacacaatctcaagcagaatgaccagccgatggacatcctccagatcatcaactgcctgaccaccatttatgatcggctcgagcaggaacacaacaatctggtgaatgtgccactctgtgtcgacatgtgcctgaactggctgctgaacgtctacgataccggtcgcaccggccgcatccgggtgctcagcttcaagaccggtattatctctctgtgcaaggcccatctcgaagataagtaccggtaccttttcaagcaggtggcgtcgtcgactggcttttgcgaccagcggagacttggactgctgctccatgactcaattcaaatcccgcgccagctgggagaggtggcgagcttcggggggtccaatatcgagccgtcagtgcgctcctgttttcaattcgctaacaataagcctgaaatcgaagccgccctcttcctggattggatgcggctggaaccgcagtcgatggtgtggctgcctgtgcttcatagggtggcggctgcggaaaccgccaagcaccaagcgaagtgcaacatctgcaaggaatgccccatcatcggcttccggtacaggtcgctgaagcacttcaactacgatatctgtcagagctgtttcttctctggcagggtggccaagggacataagatgcattacccgatggtggagtactgcactccaactacctccggggaggatgtccgggatttcgcgaaggtgcttaagaacaagttccggactaagcgctacttcgcgaaacatcctagaatgggttacttgccggtgcaaactgtgttggaaggtgacaacatggagactgacacgatg

SEQ ID NO: 142841 - DNA, 3432 bp, Artificial Sequence
  derived and/or modified sequence
atgttatggtgggaagaggtagaggattgttacgaaagggaggatgtgcagaaaaaaacgttcacaaagtgggtaaatgcacagttctcgaaattcggaaaacagcacatcgaaaatctcttttctgatcttcaggatgggcggagactccttgatcttctggaagggctaactggacagaaactccctaaagaaaaggggtctacacgggtccacgcacttaataatgtcaacaaggcattacgcgtattgcagaataataatgtagatctggttaacattgggagtacagatatagtggatggaaatcataaactgactttggggttaatttggaatataattctgcattggcaggtcaagaatgttatgaagaacatcatggcgggattacaacagacgaattccgaaaaaattttgctctcatgggtgagacagtctactcgcaactatccacaggttaacgtcattaatttcacaactagttggtcagatggactcgccctcaatgcgctcatacattcccatcgccctgatctatttgattggaactctgtagtgtgccagcagagtgctacacagaggctggagcatgcattcaacattgcccgataccagcttggaatagagaaactgctagatcctgaagatgtggatactacttatcccgataaaaaatcaatcttgatgtatatcactagtctttttcaggtgctcccacaacaggtctcaatagaagccatacaggaagtcgaaatgcttccacgcccacccaaagtaactaaggaggaacactttcagcttcatcaccagatgcactactcccagcagataacggtttccctcgctcagggatatgaaaggacgagttcccccaaaccaaggttcaaaagttatgcttatactcaagcagcttatgtgactacaagtgacccaactaggtctcccttcccttcccagcacttagaggcccctgaagataaatcgtttggatcatccctcatggaaagtgaggttaatctagacaggtatcagacagcactcgaagaggtattatcttggcttctgtcagccgaagatactcttcaggctcagggggaaatttccaacgatgtggaagtagtcaaagaccagtttcatactcatgaagggtacatgatggatcttacggcacaccagggaagagtaggaaatattctgcagctcggatctaagctgattggaacaggaaagttatctgaagatgaagagacagaggttcaggagcagatgaacctgctaaattcgcgatgggaatgtctccgggtggcctcaatggaaaaacagagtaatctccatagagaaatctcatatgttccctcaacatatcttactgagataacacacgtgagtcaggcactgcttgaggtggaacaactgttaaacgctcctgatctctgtgctaaagatttcgaagatctattcaaacaggaagaatctctcaaaaatattaaagattcactacagcagtcttccggacgaatagatataatacattcgaagaaaactgccgctcttcagtccgcaactcccgtggaaagagtgaaacttcaggaagcattgtctcagctggattttcagtgggaaaaagtcaacaagatgtacaaagatagacaggggcgattcgatagatcagtggaaaaatggcgacggttccactatgacataaaaatatttaaccaatggttaactgaggctgagcagttcctcagaaaaacacagatacctgagaattgggaacatgcaaaatataaatggtatcttaaagaactgcaggatggaatcggacagaggcaaactgtggtgaggactctcaatgccacaggggaagagataattcagcagtcctctaaaacagatgcctcaatccttcaagaaaagcttgggagtctcaatcttaggtggcaggaagtctgtaaacagctcagtgatcgcaaaaaacggctggaagaaacattagaaagactccaggaattgcaggaggcaactgatgaactagatctcaaactaaggcaggcagaagtaataaaggggagttggcagcccgtcggagatcttctcatagatagtctccaggaccaccttgagaaagtcaaggccttgaggggggaaatcgcccccttaaaagaaaatgtcagtcatgtgaatgatttagcaaggcagctcacaacactcggaattcagttgtctccatataacctgtctactctggaggatctcaacacaaggtggaaactattgcaggtcgctgtggaagatcgggttcgacagctccatgaagcccatagagatttcgggcccgcaagtcaacacttcctgtcaacttctgtgcagggaccttgggaacgggctatctcacctaataaagtaccctactacatcaatcatgaaacacagacaacttgttgggatcatcccaaaatgacggaactataccagtccctagcagatctaaacaacgtcagattctcagcatatcgaactgccatgaaactgcggcgcttacaaaaagccttatgtctggatctcttatctctgagtgccgcatgtgatgcattagatcagcacaatctgaaacagaacgatcagcctatggacatcctgcagataatcaactgcctcactactatatatgaccgcctcgaacaggaacataacaatttggtgaatgtccctctctgcgtggatatgtgtctcaattggctgttaaacgtctatgacactggacgaacggggcgaattcgagtactgagtttcaagacagggattatatcactctgcaaagcccaccttgaggataagtaccggtacctgtttaaacaggttgcttcatctacaggattctgtgatcagcggcgactcgggcttctcctacatgattctatccagattcctaggcagttaggggaagttgcttctttcggagggtccaatattgagcccagtgtccgcagttgcttccagtttgccaacaacaaacctgagatcgaagccgccctctttctcgattggatgaggctagagccccagtctatggtgtggttaccagtactacatagggttgcagccgctgaaactgccaaacatcaggctaaatgcaacatttgcaaagaatgccctatcatcggatttcggtaccggtcacttaaacactttaattatgatatttgtcagtcatgttttttttctgggagagtggctaaaggacataaaatgcattatcctatggttgaatattgcacacctactacatctggagaagatgtccgtgatttcgctaaggtactgaaaaataagtttcgcactaaacgatattttgccaaacatccccggatggggtatctcccagtgcagactgtccttgaaggggataatatggaaactgatacaatg

SEQ ID NO: 142842 - DNA, 3432 bp, Artificial Sequence
  derived and/or modified sequence
atgttgtggtgggaggaagtggaagactgttatgagcgtgaagatgtccagaagaaaacattcactaaatgggttaacgctcaattctccaaatttggaaagcaacatatcgagaaccttttttcagatttgcaggacggacgacgactgctggatctattggaaggccttactggacagaaactgccaaaggagaaagggtcaacaagggttcacgctctgaacaacgtcaataaggctctgcgcgtactgcagaataacaacgtagacctggtcaacattggatctacagatatagttgatggaaaccacaagctgacccttggccttatttggaatatcatcctgcattggcaggttaagaatgtgatgaaaaacatcatggccggtttgcagcaaactaacagcgagaaaattctcctttcttgggtacggcaaagcaccagaaattatccgcaggtgaacgtgatcaacttcaccacgagctggagcgacgggcttgcgctgaacgccctgatacacagccacagacctgatctattcgactggaactccgtggtgtgccaacagtctgcgacacagagactcgagcatgccttcaatatagcacgctaccaattgggaatcgagaaactcctggatcctgaagacgttgatactacatacccagataagaaatccatcctgatgtacatcaccagcctgttccaggtcctgccacaacaggtctctatcgaagcaatccaagaggtggagatgctgccccgaccccctaaggtgacgaaagaggagcactttcagctccatcaccagatgcattactcccagcaaatcaccgtgagcttagctcagggctatgaaaggacctcctctccgaaacctcgctttaagtcatacgcgtacacccaggctgcttatgtcaccacctcagatcctactagatctccctttcctagccagcatctggaagctccagaggacaagagctttggctcctcactgatggaatctgaagtcaatctggaccgatatcaaactgcactggaagaggtgttaagttggcttctcagtgcagaagacactttacaagcacagggtgaaatcagcaatgacgttgaagtcgtgaaagaccaattccatactcatgaaggatacatgatggatctcacagctcaccagggtagagtcgggaacatcctgcagttgggatccaaattgatcggaaccggtaaactgtctgaggacgaggagaccgaggtgcaagagcagatgaacttgctgaattcaagatgggaatgcctccgggtggctagcatggagaagcagtctaacctgcatcgagagataagttatgtaccatcaacataccttacagagattacccacgtttctcaagctctgctggaagtcgaacagctcctgaacgcacccgacctgtgcgctaaagactttgaagaccttttcaagcaggaggaatcgcttaaaaatatcaaggattccctccagcagtcctctgggaggattgatattattcatagcaagaagactgccgcccttcaatctgcaacacccgtcgagagagtcaagttgcaggaagcactgagccaactggatttccagtgggagaaagttaacaaaatgtataaggacaggcaggggcgcttcgatcgcagcgtggagaagtggaggcgcttccattatgatataaaaatctttaaccaatggttgacagaggcagaacagttcctccggaagacccagattccagagaattgggaacatgctaagtataagtggtacctgaaggagctccaggacggaatcggccaacggcaaacagtcgtgagaaccctcaatgccaccggcgaagaaattatccaacagagtagcaaaaccgatgccagcatccttcaagagaaattgggcagcctgaacctgagatggcaggaagtgtgcaaacagttgagtgaccgcaaaaaaaggctcgaggagacccttgaacgactccaagaactgcaggaggctactgacgaactggatctgaagcttaggcaagcggaagtgattaagggcagctggcagccagtgggagatctgttgatcgactctctgcaagaccacttagaaaaggtgaaagctctgcgtggagagatcgccccgctgaaggagaatgtgagtcatgtaaacgacctcgcacggcagctcacgacactgggcatccagcttagcccctacaacctttccaccctcgaagaccttaacacaaggtggaaactcttacaagtggccgtagaagatcgggtgaggcagttgcatgaagctcacagggacttcggtcccgcttcacagcattttctttcgaccagcgtgcagggcccttgggagagagctatcagtccgaacaaagttccatattacattaaccacgagacccagaccacctgttgggaccaccccaagatgacagagctgtaccagagtctggccgacctgaacaatgtgcgcttttctgcatacaggactgctatgaaactgcgacgcctccaaaaggcgttgtgcctcgacctgttgtctctctctgccgcttgcgacgccttggatcaacacaacctgaagcagaacgatcagccaatggacatcctccagatcattaactgcctgactacaatatacgacaggcttgaacaagaacacaacaacctggtgaatgtcccactgtgtgtggatatgtgtctgaactggctgctgaacgtgtacgacaccggacgcacaggcagaatacgcgtgctaagctttaagactggcataatcagcctgtgtaaggcccatctcgaagacaaatatagataccttttcaaacaggttgcttcatccaccggtttctgtgaccagaggcggttgggattgcttctccatgatagcatccagattccaaggcagctgggagaggttgcgagcttcggaggatccaatattgagcctagcgtcaggagctgtttccagttcgccaataataagccagagatcgaggctgccctgtttctcgattggatgcgactggagccccagtctatggtttggcttccagtgctccacagagtggcagcagcagagaccgcaaagcatcaagcaaaatgtaatatttgcaaggagtgcccaatcatcgggtttcgctacagaagcctcaagcattttaactacgacatttgccaatcttgcttcttctctggaagggtggcaaaaggccacaaaatgcattaccctatggtggaatattgcactccaaccacgtccggcgaggatgttagagatttcgcaaaggtgctgaagaacaagtttagaacaaagagatactttgccaagcacccacgcatgggatatcttcctgtccagactgtcctagagggcgataacatggagaccgataccatg

SEQ ID NO: 142843 - DNA, 3432 bp, Artificial Sequence
  derived and/or modified sequence
atgctgtggtgggaagaggtggaggattgttacgagagggaggatgtccaaaagaagaccttcaccaagtgggtgaacgctcagttcagcaagtttggaaagcagcacattgagaacctgtttagcgatctgcaggacgggcgacggctgctcgaccttctagagggccttactgggcagaaactgcccaaggagaaagggagcacgcgggtgcatgccctgaacaacgtgaacaaagccttgagagtgctccagaacaacaatgtggacttggttaacatagggtccacggatatcgtcgacggtaatcacaaattgaccttgggattgatttggaacataattcttcattggcaagtcaaaaacgtgatgaagaatattatggccggtttgcagcaaactaattccgagaaaattttgctgtcttgggtgagacagtccacacgcaactatccacaggtaaatgtcattaactttacaacctcttggagcgatggactagccctgaatgccttgatacacagccacagacccgacctattcgattggaattccgttgtgtgccaacagagtgcaacacagaggcttgaacatgccttcaacattgctcgttaccagctgggtattgaaaaactgttggaccccgaggatgtcgacaccacctatcctgataaaaagtcaatcttgatgtacatcacttctttgttccaggtgttgccacagcaagtgtccatcgaggctattcaggaggtggaaatgctgcccaggcctcccaaggtgaccaaagaggagcattttcaactgcatcaccagatgcactacagccagcagattaccgtgagcttggcccagggctatgagagaactagttcccccaagccccgcttcaagtcgtatgcttatactcaggcagcctacgtaacaacgtctgacccgacacgcagcccttttccctcacaacatctcgaggctcctgaagacaaatcatttggatcctctctaatggagagtgaagtgaatctggaccggtaccagacagctttggaggaggtattgtcttggctgctgagcgccgaagacaccctccaggctcagggagaaatcagtaacgatgtggaagtcgtcaaagaccagttccacacacacgagggttacatgatggacttgacggcacaccaggggcgggtgggtaatatcttgcaactgggttccaagctgatcgggacaggcaagttgtccgaggacgaggaaacagaagtccaggagcagatgaatttgctgaactctagatgggaatgcctgcgtgttgccagcatggagaaacaatctaatttacatagagagattagttacgtaccatcaacttatctgacggaaatcactcacgtatcccaggcactgctagaggtggagcaactattaaacgctcctgatctgtgcgcgaaagatttcgaggatctctttaagcaagaggagtccctgaaaaacatcaaggactcgctgcaacagagctctgggagaatcgacattatccactccaagaagaccgccgcactgcagtcagccacacctgttgaacgcgtcaagctgcaagaagcattatctcaactagatttccagtgggaaaaggtgaataaaatgtacaaagacagacagggacgcttcgatcggtcggtggagaagtggcggaggttccactacgatatcaaaattttcaaccagtggttgaccgaggccgagcagtttctcagaaaaacccagatccccgagaattgggagcacgccaagtataagtggtacttgaaggaactccaggacggcattggccagcgtcagaccgtcgtgagaacactcaatgccactggggaggagataattcagcaatccagcaagaccgatgcgtctattctccaggagaaacttgggtctctcaatttgcgctggcaggaagtttgcaagcagctgtccgatagaaaaaaaagactggaagagacactggaacgactgcaggaactccaggaggcaactgatgaactagatctgaagcttcgccaggccgaggttatcaaaggcagctggcagccagttggtgacctgttgattgacagtttgcaggatcacctggagaaagtcaaggccttgagaggggaaatcgcccccctgaaggaaaacgtgtcacacgtcaacgatcttgctcgccaattgaccacccttggcattcagctaagcccttataaccttagcactttggaggaccttaataccaggtggaagctgctacaagttgctgtcgaggacagagtgcgccagctccatgaggctcacagggattttggacccgccagtcagcatttcctcagtacaagcgttcagggaccatgggaaagagcaatttctcccaataaagtaccctactatattaatcatgagacgcagacgacatgttgggatcaccctaaaatgacagagctgtaccaatcactagcggacctaaataacgtacgattcagtgcctaccgaactgccatgaagctacggcgacttcagaaggcactgtgtctggacctcctgtctctgagcgcagcctgtgatgccctggaccagcataatctcaaacagaatgatcagcccatggatattttacaaattatcaactgtctaacaacgatctacgaccgactcgagcaggagcataacaacttagtgaacgtccctttatgcgttgatatgtgcctgaattggctgctaaacgtttacgacacggggaggactggccgaatcagggtgctgtcattcaagaccgggatcatctctctatgcaaggcacaccttgaagacaagtataggtatctgtttaagcaggtagcctccagcaccggtttctgcgaccagaggaggctgggtctcctgctgcacgattcgatccagatcccaagacagctcggtgaagtggcaagctttggggggagcaacatagaaccctcggtcagaagttgtttccaatttgccaataacaaacccgagattgaagccgccctttttcttgattggatgcgcctggagccccagtctatggtttggctgcccgtactccacagggttgccgcggcagaaaccgcaaagcaccaggcgaagtgtaacatctgtaaggagtgcccaatcatcggattcagatacagatcactgaagcattttaattatgatatttgccaatcatgtttctttagtggccgcgtagccaaagggcacaagatgcattatccaatggttgaatactgcacacctacaacttctggtgaggatgtaagggattttgctaaggtgctgaaaaataaattccggaccaagaggtattttgcgaaacaccctcgtatgggatacttgccagtgcaaaccgtcctggagggcgacaacatggagaccgacaccatg

SEQ ID NO: 142844 - DNA, 3432 bp, Artificial Sequence
  derived and/or modified sequence
atgctgtggtgggaagaggtggaggattgttacgagagggaggacgttcagaagaaaactttcaccaagtgggtcaacgcccagttttctaagtttggaaaacaacacatcgagaacctgttctccgacctgcaggacggtcgccgcctgctcgatctgctggaaggactgaccggccagaaactccccaaggagaaaggatcaactcgggtgcatgcgctgaataacgtcaataaagccctgagagtgcttcaaaacaacaatgttgacttggtcaacattggaagcactgacatcgtggacggtaatcataaactgaccctgggtcttatctggaacatcatcttgcactggcaggtgaagaacgtgatgaagaacattatggctgggcttcagcagacgaactccgagaagatcctgctctcgtgggtgcgccaatccacccggaactacccgcaagtgaacgtgatcaacttcaccacttcctggtcagacggactggcactcaacgcactcattcattcgcacaggccggatttgttcgattggaactcagtggtctgccagcaaagcgcaactcaacggctcgagcacgccttcaacattgcgaggtaccagttgggaatcgaaaaactgctcgaccccgaagatgtggacactacttacccagataagaagtcgatccttatgtacattaccagcctgttccaagtcttgccgcagcaagtgtcgatcgaggcgatccaagaagtggaaatgctgccgcggcctccgaaagtgactaaggaagagcacttccagttgcatcaccagatgcactacagccaacaaatcaccgtctcactcgcccagggatacgagcggacttcgagccctaaaccacggttcaaatcgtatgcatacacgcaggcagcttacgtgactacctcagatccaactcgatccccgtttccaagccagcacctcgaagctcctgaggacaagtcctttggttcgtcactgatggaatccgaagtcaatctggacagataccaaactgccctcgaagaagtgctgtcatggctcctctcggcggaagatactctgcaagcgcagggagagatcagcaacgatgtggaagtggtcaaggaccagttccatacgcatgaaggttatatgatggacctgacggctcatcaaggccgagtcgggaacatcttgcaactcggttccaaacttattggtaccggaaagctgtcagaggacgaggaaaccgaagtgcaagaacagatgaacctgcttaattcgcggtgggaatgtctgcgcgtcgcttccatggaaaaacaatcaaacctgcaccgggaaatctcctacgtgccgtccacctacttgactgagatcactcatgtctcgcaggcacttctggaagttgaacagctcctgaatgcacctgacctgtgcgccaaggacttcgaagatctgttcaaacaggaagaaagccttaagaatatcaaggattcgctccagcagtcgtcgggacggattgatatcattcacagcaagaaaacggccgcactgcagtccgccactccggtggaacgagtgaaactccaagaagcgctgtcccagctggactttcaatgggaaaaggtgaacaagatgtacaaagaccgccagggccgcttcgacagatccgtggaaaaatggcgccggtttcattacgacatcaagatctttaatcaatggctgaccgaagcagaacagttcctcagaaagactcaaataccggagaactgggaacatgcgaaatacaagtggtatctcaaagaactgcaagacggtatcggccaacgccaaacggtcgtccggaccctgaacgccaccggggaagaaatcatacagcaatcaagcaagactgatgcatccatcttgcaggaaaagttgggatcactcaatcttaggtggcaagaggtctgcaagcaactgtcagatagaaagaagagactcgaagagactctggaacggcttcaagagcttcaggaggccactgacgaactggatctcaagctccgccaggcagaggtgatcaaggggagctggcagcccgtcggagatctcctcatcgactcgctgcaagaccatttggaaaaagtcaaggcacttcgcggcgagattgctccgctgaaggaaaacgtgtcacacgtgaatgatctggctaggcaactgacgacgctgggcatacagttgtcgccatacaatctctccactctggaggacctgaacacccgctggaagctgctgcaagtcgcggtggaggaccgagtcagacagctgcacgaagcgcatcgggactttggacctgccagccagcacttcctgtccacttcggtccagggtccatgggagcgcgcaatttccccgaacaaggtcccatactacattaaccacgagactcagacgacctgctgggatcatccgaaaatgaccgagctgtaccagtcgctcgctgacctcaataacgtgcgctttagcgcgtacagaactgccatgaaactcagacgcctgcagaaagctctgtgcctggatctcttgtcgctttcggccgcttgcgatgctctggaccagcataacctgaaacaaaacgaccagccgatggacatcctgcaaatcatcaactgtctgactactatttacgatcgcctggaacaggagcacaacaacttggtcaacgtgccactctgcgtggatatgtgcctgaattggctcctgaacgtgtacgacaccggaaggactgggaggattcgcgtgttgtcgttcaaaactgggattatcagcctctgcaaggcgcatctcgaggataagtacaggtatctgttcaagcaggtggcatcgtccaccggcttctgcgatcagagacgtctggggctcttgctgcatgactcgatccagatcccgcggcagctgggcgaggtggcttcctttgggggctccaacatcgagccatcggtgcgcagctgcttccagttcgcaaacaataagccagaaatcgaggccgcgctgttcctggactggatgcgcctggaacctcagtcgatggtgtggctgcccgtgctgcaccgggtggcggcagcggaaactgcgaaacaccaggcgaagtgcaatatctgtaaggaatgtccaatcatcggtttccggtacagaagcctgaagcatttcaattacgatatctgtcaaagctgcttcttctccggaagagtggcaaaaggacacaagatgcactaccctatggtggaatactgcacgccgacgacctcgggcgaagatgtccgcgatttcgcaaaggtccttaagaacaaattccggaccaagaggtactttgcaaagcatccacgcatgggttacctcccggttcagacggtgctggagggagataacatggaaaccgacactatg

SEQ ID NO: 142845 - DNA, 3432 bp, Artificial Sequence
  derived and/or modified sequence
atgctttggtgggaggaagtggaagattgttacgagagagaggacgtgcagaagaaaactttcactaaatgggtcaacgcacaattttcaaaattcggaaagcagcatattgagaatttgtttagcgatcttcaagatggtcgtaggctcttggatctgttggaaggactgaccggacaaaaacttccaaaggaaaaaggtagcactcgtgtgcatgctcttaacaacgttaacaaagcgctgcgggtccttcagaacaataacgtcgaccttgttaacatcggttccacggatattgtggacggtaatcacaaactgactttgggactcatctggaacataatccttcactggcaagtgaagaatgttatgaagaacattatggccggtctgcagcagaccaacagcgaaaagatcctcctgtcatgggtccgccagtcaactcggaactaccctcaggtgaacgtgatcaactttaccacgtcgtggtcagatggacttgcactgaacgccctgatccatagccatagaccggacttgtttgattggaacagcgtggtgtgtcagcaatcggccacccagagactcgaacacgctttcaacatcgcacgctaccaactcggcattgaaaaacttctggaccccgaagatgtggataccacttatcccgacaagaaatcaatcctgatgtacataacttcactgttccaggtgcttccccagcaagtgtccattgaggcaatacaagaagttgagatgctcccacgtccacccaaagtgaccaaggaagagcattttcagcttcatcatcaaatgcattactcccaacaaattaccgtctcccttgcccaaggctacgagagaacttcctcgcccaagccccgcttcaaatcatacgcctacacccaagcagcatacgtgactacctcggatcctacccgctcgccctttcctagccagcatcttgaggctcccgaggacaaatcgttcggttccagcttgatggaatccgaagtcaaccttgatagataccaaaccgcgctcgaggaggtgctgtcctggctcctgtcagctgaagatactctgcaggcccaaggagaaattagcaatgacgtggaggtggtgaaggatcagttccatacccacgagggttacatgatggaccttaccgcccaccagggacgggtcggcaacatccttcaactgggatccaagctcattggaactggaaagttgtccgaagatgaggaaaccgaagtgcaggaacagatgaatcttctgaactcaagatgggaatgcctgagggtggctagcatggaaaagcaaagtaacctgcaccgcgaaatttcgtatgtgccttcgacctacctgactgaaattactcatgtgtcgcaagcactgcttgaggtggaacagctgctcaacgcgcccgatctttgtgcaaaagattttgaagatctgtttaaacaagaagaatccctgaagaacatcaaggactctctgcagcaaagctcgggtaggattgacatcattcactcgaagaaaaccgcagccctccagtcggccactccagtggaacgggtgaaacttcaagaggccctctcgcaactggatttccagtgggaaaaggtgaataagatgtacaaggatcgacagggtcgatttgacaggtccgtggagaaatggaggagatttcattacgacattaagattttcaatcagtggctgactgaagcggaacaattccttagaaagactcaaattcccgaaaactgggagcatgcaaagtacaagtggtacctgaaggaactgcaagacggaatcggacaaagacagactgtggtgcgaaccctgaacgcaacgggagaggagattatacagcaatcgtccaagaccgatgcttcaattcttcaggagaagctgggttcgcttaatctcaggtggcaagaggtgtgtaagcagctgtccgacaggaagaagagattggaggaaactcttgagagactccaggaactgcaggaagcaactgacgaactcgacttgaaacttcgacaggccgaagtcattaagggttcctggcaacctgtgggagacttgctgatcgattcattgcaggatcatcttgagaaggtcaaggcacttcggggggagatcgcgccactgaaagagaatgtgagccacgtgaacgacctggctcgtcagcttactacccttggaattcagctttctccgtacaacttgtcgacgttggaagatcttaatactaggtggaagctgttgcaagtggccgtggaagatagggtcagacaacttcacgaagcgcatcgagattttgggcctgcctcacaacattttctgtccacgagcgtccagggaccctgggagagggcaatttcccccaataaggtcccatactacataaaccatgaaacgcaaactacctgctgggatcatccgaagatgaccgagttgtatcagtcgctcgcagacttgaacaatgtgcggtttagcgcgtataggactgcaatgaaactgaggcgcctgcagaaagcactctgtctggacctcctgagcctttcggcagcatgtgacgcacttgatcaacataatctgaaacagaacgatcagcctatggatatactccagattatcaactgtctgaccactatctacgataggctcgaacaggaacataacaaccttgtgaacgtccctctgtgcgtggatatgtgtctcaactggcttcttaatgtgtacgacaccggtagaaccggaagaatacgtgtgctgtcgttcaaaaccggcattatctccttgtgcaaggcacacctggaagataagtaccgatatttgtttaagcaagtggcaagctcaactgggttttgtgatcagcggcgcctgggactccttcttcacgattcgattcaaatcccacggcaacttggtgaagttgctagcttcggagggtcaaacatcgagccaagcgtgcgatcatgtttccaatttgcaaacaacaagcctgagattgaagcagccctttttctcgattggatgagactcgaaccacagtccatggtgtggttgcctgtgcttcatagagtcgcagcagcggaaaccgcaaagcaccaggcgaaatgtaacatttgcaaggagtgccctatcattggtttccgttatcgttcgctcaaacacttcaactacgatatttgtcaatcgtgcttcttttccggtagagtggcgaaaggacacaagatgcattatcccatggtggaatactgcacccctacgacgtccggagaagatgtgcgggactttgcaaaggttctgaagaataagttccggaccaagcgctactttgcgaagcatccacgtatgggatacctgcctgtgcagaccgtattggagggcgacaacatggaaaccgatacgatg

SEQ ID NO: 142846 - DNA, 3432 bp, Artificial Sequence
  derived and/or modified sequence
atgctgtggtgggaagaggtggaagactgctatgagagagaggacgtgcagaaaaaaacgtttacgaagtgggttaatgctcagtttagcaaattcggtaagcagcacattgagaatctttttagcgacctgcaagatgggcgccggctcctggatcttctcgagggattgaccgggcagaagctgcccaaggagaaaggtagtacgagggtgcatgccctcaacaatgtaaacaaggcccttcgggttttacaaaacaataatgtcgacctcgtaaacattggatcaactgatattgtggatggcaaccataaactgaccttaggactgatctggaatatcatcctacattggcaggtgaaaaacgtgatgaagaatattatggcaggactgcagcagaccaactcagaaaaaatactgctgtcttgggtgaggcagtctaccagaaactaccctcaggtgaatgtaattaattttacgactagctggagtgacggactggcattaaacgcactcatacactctcatcgacccgacctgtttgattggaacagtgttgtatgccagcagagtgctactcaaaggctcgaacatgcttttaacattgccagatatcaactgggcatcgagaagctgttggatcctgaggatgtggatactacgtatcctgacaagaaatctatcctcatgtacattacttccctattccaggttctgcctcaacaggtgtccattgaagccatccaagaagtggagatgctgcccaggcctcctaaagttaccaaagaagaacatttccagttgcatcaccagatgcactactctcagcaaattactgtcagtctagcccagggatacgagaggacatcaagccccaaaccgagattcaagtcatacgcctacacgcaggccgcctacgtgactacctcagacccgaccaggagtcccttcccctcccaacatctcgaagctccagaggataagtcattcgggtcatccttgatggagtctgaagtgaatctggaccgttaccaaacggctctggaggaagttctgtcctggctgctgtcggccgaggatactctgcaggcccagggagaaatcagcaacgatgtcgaagtagtgaaggaccaattccatacccatgaggggtatatgatggatcttactgcgcaccagggaagggtgggcaacatcctgcagcttgggagtaagcttatagggacgggaaagcttagtgaagacgaagaaaccgaggtgcaggagcagatgaatctgcttaactcacggtgggagtgcttgagagtggccagcatggaaaagcaaagtaatctgcatagagaaatcagctacgtccctagtacgtacctgaccgagatcactcacgtttcccaggcgcttctcgaggtagagcagctgctgaatgcaccggatctttgcgctaaggactttgaagatctcttcaaacaagaggagagcctcaaaaatatcaaggactccttacagcagtcatccggaaggatcgatattatccattctaaaaagaccgcagctctgcagagcgcgacaccagtcgagagggtgaaactgcaagaggccctttcccagctggactttcaatgggaaaaggtcaacaaaatgtacaaggatagacagggccggtttgacaggagcgtggaaaagtggagacgttttcactatgatattaagatattcaaccagtggctgaccgaagccgagcagttcctgcggaaaacccagatcccagaaaactgggagcacgccaagtataaatggtatctgaaggaactccaggacggcattgggcaacgtcagaccgtcgtgagaacactcaacgccacgggagaggaaatcattcagcagtcgtctaagactgatgctagtatcctgcaggaaaaacttggatccttgaatctgcgctggcaggaggtgtgtaaacagctgagtgaccgaaagaaacgactggaagagactctagagcgcctgcaggagttgcaggaggcgactgatgaattagacctaaaactgcggcaggccgaagtaatcaaaggatcttggcagccagttggggacctgctgatcgattctctgcaggatcatctcgagaaggtgaaggcattgcgcggcgagatcgccccactgaaagagaatgttagtcatgtgaacgatctggccagacagttgactaccctcgggattcagctgagcccttataatctgagtactttggaggatctcaatactaggtggaaactactgcaggtggcggtcgaagatcgtgtgagacagctccatgaggcgcaccgtgactttgggcccgcaagccaacattttctgtccactagtgtccagggtccatgggaaagggccatcagcccgaataaggtcccttactatattaatcatgagactcaaacaacctgttgggaccaccctaagatgacagaactttaccagagcttagccgatcttaataacgtccgcttttcagcctaccgaacagccatgaagctgaggagattacagaaggccctctgcctggacttgctaagtctgtcagcagcgtgtgacgccttagatcagcacaacctgaaacagaatgaccagcctatggacattctacagatcatcaactgcctcaccaccatctacgaccgtctagagcaggagcacaacaacttggtgaacgtccctctatgtgtggatatgtgcctcaactggcttctgaacgtctacgatacggggcgtaccggccgcatcagagtgctctcattcaagaccggaatcatctctctttgcaaggctcacctggaggacaaatacagatacctttttaagcaggtggcaagctccacaggattttgcgaccaacggcgtctgggtttactcctgcacgactctattcagatacccagacagttaggtgaagttgcatcctttgggggtagtaatattgagccatccgtgagatcttgcttccagttcgccaacaataaacccgaaatcgaggcggccttgttcttagactggatgcgcttagagcctcagagcatggtgtggttgcctgtgctgcacagagtggcagcagcggagactgcaaaacaccaagcaaaatgcaacatttgcaaagagtgccccatcataggattcaggtacaggtcactgaagcactttaattacgatatctgccagagctgtttctttagcggaagggtggctaagggccacaagatgcactacccaatggttgagtattgcacaccaacaacttctggagaagatgtccgcgattttgccaaggtgttgaaaaacaaattcagaacaaaaaggtattttgctaagcatccccgcatggggtatctgccagtgcaaaccgtgctggaaggggacaatatggagacggacacgatg

SEQ ID NO: 142847 - DNA, 3432 bp, Artificial Sequence
  derived and/or modified sequence
atgctctggtgggaggaggttgaagactgctacgaaagagaggatgtccagaaaaaaaccttcacgaagtgggtgaatgcgcaattctccaagtttggcaaacagcatatcgagaatctgtttagtgacctgcaggatggacggagactgctggatctgttggaaggcctcactggtcaaaagcttccaaaagagaagggaagcacacgggtccatgccctgaacaacgtgaacaaggctctccgggttcttcaaaacaacaatgtcgacctggtgaatattggcagcactgacatcgtggatggaaaccacaaactgacactcgggctgatttggaacatcatcctccattggcaagttaaaaacgtgatgaagaatatcatggctggattgcagcaaacaaatagtgagaagatactcttatcgtgggtgagacaatccacacggaactatcctcaggtgaatgtgatcaattttaccaccagctggagcgatggcttagcactgaacgcactaattcattctcatcgaccagatttatttgactggaactccgttgtatgtcagcaaagtgccactcagaggcttgagcacgcctttaacatagctagatatcagttgggaatcgagaaactcctcgatcctgaagacgtagacacaacttatcccgacaagaagtcaattctgatgtatattacttctctatttcaggtgctccctcagcaggtcagtatcgaggctatccaagaggttgagatgctgccccggccacccaaggtgacaaaggaggagcactttcagctacaccaccagatgcattatagccagcagatcactgtgtcattggcccaaggatatgaaagaaccagcagcccaaaaccgcgctttaagagctatgcctacacccaggctgcctacgtgacaacatccgacccaacaaggtcaccctttccttcgcagcaccttgaggctcccgaggataagtccttcggatctagcctgatggaaagcgaggtgaatctggaccgctatcagacggcactcgaggaggtactgtcctggctgctcagcgccgaggatacactccaagcgcaaggcgagatctccaatgatgtggaagttgtcaaggaccagttccatacccatgaggggtacatgatggatctgaccgcccaccagggtcgggtaggaaatatcctccagctgggctctaagttgatcgggaccgggaaactgtctgaggacgaggagaccgaggtgcaggaacagatgaatcttctgaattcccgctgggagtgcttacgggttgcctctatggagaagcagtctaatctgcaccgggagatatcgtatgtgcctagtacttatctgacagagatcacacatgtcagccaggctctgctcgaggtggaacaattgctgaatgctccagacctctgtgccaaggattttgaggacttattcaaacaagaggagtcccttaagaacatcaaagattccctccagcagagctctggccgcattgatatcattcacagcaagaagactgccgccctgcagtctgcgacccccgtggaaagagttaaactccaggaagctctgtcccagctagatttccagtgggagaaggtgaacaagatgtacaaagatcgccaagggcggtttgatcggagcgtggaaaagtggcgacgtttccattatgacatcaaaatttttaatcagtggttgaccgaagcagaacagttcctgcgaaaaactcagatcccagagaattgggaacacgccaagtacaagtggtatttgaaggagcttcaggatgggattggtcagaggcagacagtggtgagaactttgaatgcaacgggggaggagattattcagcagtcgtctaagacagatgcctcaatcctccaggaaaaactgggaagcctgaacctccggtggcaggaggtctgtaaacagctaagcgataggaaaaagcgtctcgaggagacactggagcggctgcaggagcttcaggaggccactgatgagctagacctgaaattgaggcaagcagaggtgatcaaaggatcatggcagcccgtcggtgacctgctgattgactccttacaggaccacctggagaaggtgaaggcactgcggggggaaattgctccactgaaggaaaacgtatcccacgttaacgacctcgcaagacaactgactactttgggtatacaactctctccatacaacctgagcacgctagaggacctgaatacacgatggaagctccttcaggtggcagtggaggatagggtgcggcaactgcatgaggcacatagggacttcggcccagccagtcagcactttctcagcaccagcgtacagggaccttgggaacgcgccatttccccaaacaaggttccttattacattaaccatgaaacccagactacttgttgggaccacccaaagatgaccgagttgtatcagtcactggccgacctgaacaacgtgcgattctccgcatacagaacagccatgaagttgaggcgcctgcagaaggcactgtgcctggacctactctccctgagcgcagcatgtgatgctttggaccagcataacctgaaacaaaatgatcaaccgatggatatactgcaaatcattaattgtctgacgactatatacgatcgcttagaacaggagcataacaacctcgttaatgtccctctgtgtgtcgatatgtgtttaaactggcttctgaacgtatatgatacagggcgaaccggccggataagggtcctgagctttaagaccggaattatttcgctttgtaaggcgcacctggaggataaataccggtacctgtttaagcaggtggccagctcaacgggtttctgtgaccagcgccggctgggccttttactgcatgatagtatccagattccaagacagctgggcgaagtggcctctttcgggggatctaatatcgagccctctgttcggtcctgcttccagttcgctaacaacaagcccgaaatcgaggcagccctcttcttggattggatgaggctggagccccagagcatggtctggctgccagtgctccatcgggtggctgcggctgagacagctaaacaccaagccaagtgtaatatttgcaaggagtgccccatcattgggtttcggtacaggtccctgaaacacttcaactacgacatctgccaatcttgcttctttagcggtagagtggccaagggccataagatgcactaccctatggttgagtattgcactcccacgacaagtggagaagacgtgcgagattttgccaaagttctgaagaacaaattccgaactaaaagatacttcgctaaacacccgcgaatgggctatctgccagttcagaccgtgctggagggcgacaacatggaaactgataccatg

SEQ ID NO: 142848 - DNA, 3432 bp, Artificial Sequence
  derived and/or modified sequence
atgctgtggtgggaggaagttgaggactgttatgaacgagaagacgtccagaaaaagacgtttacaaaatgggtaaatgctcagttcagtaaatttgggaagcagcacattgaaaatctttttagtgatttgcaggatggtagaagattactggatctgttggagggattgactggtcaaaaattacccaaggagaagggatcaacccgtgttcacgctctgaataatgtgaataaagctcttcgtgttctacagaataacaacgtcgatttagtcaatattgggtccacggatattgttgacggaaatcacaaattaactcttggactcatctggaacataattctacactggcaggtaaaaaatgtgatgaaaaacattatggctggattacagcaaactaactctgaaaaaattttgttaagttgggtaagacagtcaacgcgaaattacccacaagttaatgtcatcaattttactacatcctggtcagatggtttggcactcaatgctttaattcatagccatagaccagatttgtttgattggaactcggtcgtctgtcaacaatcagccacacagcggctcgagcatgcatttaacattgctcgttatcaattaggaattgagaagctactcgaccctgaagatgtagatacgacatatcctgacaaaaagtcaatactcatgtacatcacctcacttttccaggtactcccacaacaagtgtctatcgaagccatccaagaagtagaaatgttgccacgaccgccaaaagtaacaaaagaagagcatttccaactacaccaccaaatgcactatagtcaacagattactgtatctcttgctcaaggatatgaacgtacgtcatcgcctaagccccgctttaagtcttatgcatacactcaagctgcttatgttaccacgtcagatccgacccgtagtccattcccatcacagcatttggaagcccctgaagataagtcatttggatcaagtttaatggagtcggaggtgaacctcgatcgttatcagactgcacttgaggaagtgctttcttggctacttagtgctgaggacacccttcaagcacagggagagatctctaacgatgtggaagtcgttaaagatcaattccatacacacgaaggctatatgatggatttgaccgcccaccaaggacgggtgggtaacatacttcaacttggaagtaaattaattggaactggaaagctctcagaagatgaggaaacagaagtgcaagaacagatgaatttgctaaactccagatgggaatgtcttcgagtcgcgtcgatggagaaacaatctaacttacaccgtgaaattagttacgtcccaagtacatatcttacagaaatcacacacgtttctcaagcccttctcgaagtcgagcaattgctcaatgcaccggatttgtgtgctaaggattttgaggacctttttaaacaagaagaatcgctaaagaatattaaagattcactacaacaatcgtcgggacgaatagatataattcattcaaagaagactgcagcgctccaatctgcaactccagttgaacgcgttaagttacaagaagcactaagtcagctagatttccagtgggaaaaagtcaataaaatgtacaaagatagacaaggaagatttgatcgttctgttgaaaaatggagaagatttcattatgatatcaaaatattcaatcaatggttaactgaggctgagcaattccttagaaagacacaaatacctgagaattgggagcacgcaaagtataaatggtacctcaaggagctccaggatggaataggacagaggcaaacagtggttcgaacccttaacgcaacaggagaagaaattatccagcaatctagcaagacggatgcaagtattttacaagaaaagcttggttctcttaatctcagatggcaagaagtttgtaaacagctctctgatcgtaagaaaagacttgaagaaacgcttgaacgtctgcaggaattgcaggaggcaacagatgaactcgacctgaaattgagacaagctgaggttattaaaggttcctggcaacctgttggtgacctccttatcgacagtcttcaagaccatttagagaaagttaaggcgctccgtggagagattgctccactgaaagagaatgtttcacacgtaaatgacttggctagacaactaactacacttggtattcaattatccccatataatctgtcaacattagaggatctcaatactcgatggaaactcttgcaggtggccgttgaggacagagttcgtcaacttcacgaggcacatcgagatttcggaccagcttcgcagcattttcttagcacgtcagtgcaaggaccatgggagcgagctataagtccaaataaggtgccatactacattaatcatgagacgcaaaccacctgttgggatcacccaaagatgactgaactatatcaatctcttgctgatttaaacaacgttcgattcagtgcatatcgtactgccatgaaacttagacgcctacagaaagcattatgtcttgacttgttgtcactctcagcggcctgtgacgctcttgatcaacataatttaaaacaaaacgatcaaccgatggacatcctacagattatcaactgcctaactacgatatacgatagacttgaacaagaacataataaccttgttaatgttccattatgtgtagatatgtgtctgaactggctactaaatgtgtacgacactggacgaacaggccgtatccgcgtgctgtcgtttaaaactggtatcatttcactctgcaaggctcatctagaagataagtaccgatatctatttaagcaagttgcttcgtcaacaggtttctgtgaccaacgacgtttaggattactcctccatgattctatacaaattccacggcaattgggagaagtagcctccttcggtggttctaacatagaaccatccgttcgttcgtgctttcaatttgcaaacaataagccagagattgaggctgccttattcctggactggatgcgactggagccacagtccatggtttggcttcccgtgcttcatagagtagcagcggcggaaacagcaaaacatcaggctaaatgtaatatttgtaaggagtgtcccataatcggatttcgatatagatctttgaagcacttcaattatgatatttgtcaaagttgcttcttctccggaagagtggctaaaggacataaaatgcattaccccatggtggaatattgcactcctactactagcggcgaagacgtaagagatttcgctaaggtcctcaagaacaagttcagaacaaagcgctatttcgctaaacatccacgtatgggatatcttccggttcagactgtgttggagggagataacatggagactgatacaatg

SEQ ID NO: 142849 - DNA, 3432 bp, Artificial Sequence
  derived and/or modified sequence
atgttatggtgggaggaggtggaggactgctacgagagggaggacgttcaaaagaagacattcactaagtgggtcaatgcccagttctcaaaatttggaaagcagcatatcgagaaccttttcagtgatctgcaagatggccgaaggcttcttgacctgctcgaagggctgaccgggcaaaagcttccgaaggaaaaagggagcacccgcgtccacgccttgaataatgtcaataaggcgttgagagtcttgcagaacaataacgttgacctcgtcaatatcggctccacggatatcgtggatggcaatcacaaactcaccctcggtctcatttggaatattatactccactggcaggtgaaaaatgtgatgaagaacattatggcagggctgcagcaaactaatagtgaaaagatacttctttcatgggtgcggcaaagtacaagaaactatccccaggttaacgttatcaatttcactacctcatggtccgatggtctcgccttgaatgccctgatacacagccatcggccggatctgttcgattggaactccgttgtctgtcagcagtcagccacacagagacttgagcatgcttttaatatcgccaggtatcagttggggatcgagaaactactggatcctgaggatgttgacacaacttatcctgataaaaagtcaatattgatgtacattacatcactcttccaggtgcttcctcagcaggtgtcaatcgaagccatccaggaggtggagatgttgccaagacctccaaaagtcaccaaggaagagcactttcagcttcaccatcagatgcactattctcagcagattaccgtgagcctggcccagggatacgaaagaaccagcagcccgaagccaagattcaagtcttacgcttatactcaagccgcatatgtgactacctccgatccaacccggagtccattcccaagtcagcatcttgaagcaccagaggacaagtccttcggtagcagcctcatggaaagcgaggtgaatctggatcgctaccagacagccttggaggaagtactatcctggctgttgagtgctgaggatacgctacaggctcaaggcgaaatttccaacgatgtggaagtcgtgaaggatcaattccacacccatgaaggctatatgatggacttgactgcacatcagggcagggttgggaatatactccaactgggcagtaagttgataggtacaggcaagctttctgaagacgaagagaccgaagtgcaggagcaaatgaacctgctaaattcacggtgggagtgtctgcgggtggcctctatggagaaacaatccaatttgcacagagagatttcctacgtacctagcacttatcttacagagataacccatgtttcacaggctctcctggaggtggaacagctgctaaatgccccagacctttgcgccaaagactttgaggacttattcaaacaggaggaaagcctcaagaacattaaggatagtcttcagcagtcatctgggagaattgatataattcattccaaaaaaacggccgctctccagtccgcgaccccggttgagagagtcaagctgcaggaggccctgagccagcttgacttccagtgggagaaggttaacaagatgtacaaggatcgccagggcaggttcgacagatcagttgagaagtggaggcgctttcattacgatatcaagatatttaatcagtggctcactgaggccgagcagttcctgagaaagacacagattcctgagaactgggagcatgctaagtataagtggtatctgaaagaactgcaggacggaataggacagaggcagacggtcgttcgaacgctcaacgcgacgggcgaggaaatcattcagcagtcttcaaagacagacgcctccattttacaagaaaagctgggatcattaaacctcaggtggcaagaagtgtgtaagcaattatcagataggaagaaacgactggaagaaaccttggaaaggctgcaggagctccaggaggcgacggacgagctagatttgaagctgaggcaggctgaggtgattaaaggaagctggcagccggtgggcgacctacttatcgacagcctccaggatcatctggagaaagttaaagctcttcgaggagaaattgctcccctgaaggagaacgtgagccatgttaacgacctcgcaaggcagctgacaacactgggcattcagcttagtccatacaacctctcaactctggaggatctcaataccaggtggaaacttctccaggtggcagtcgaagacagggtgcgtcaactgcacgaggcgcacagggattttggccccgcttctcagcatttcctgtccacaagcgttcagggaccgtgggaacgagcgattagtcctaacaaggtgccgtattatatcaatcacgaaactcagaccacgtgctgggaccatccaaagatgactgaactgtaccagtcgctggctgatctgaataatgtgcggttttcagcctaccgcacagctatgaagctccgccgactgcaaaaagcactctgtctggatctgttgtccctcagtgccgcttgtgacgcactggaccaacataatctcaaacaaaacgaccagccgatggatattctgcagataattaattgcctgacaacaatctacgatagattagaacaagagcacaataacctggttaacgtaccattgtgtgtcgacatgtgcctaaactggctcttaaacgtatatgacaccggcagaaccggccgtatccgcgtgttatctttcaaaaccggtattatctctctctgtaaggctcatctcgaggacaaatatcggtatctgttcaagcaggtcgcaagttcaaccggattttgcgaccagaggaggctggggctcctcctgcacgactccatccagatcccccggcagctcggcgaggtcgcctccttcggagggtccaatatcgaaccctctgtccgttcttgttttcaattcgctaacaacaagcctgaaattgaagccgccctcttcctagactggatgcgcctggagccccagagcatggtatggctcccggtactccaccgagtcgctgctgccgagaccgcaaagcaccaggccaagtgcaatatctgtaaggagtgccctatcataggttttcgataccgctcactgaagcacttcaactatgatatttgtcaatcttgctttttctcaggacgcgtcgctaaaggacataaaatgcactatccaatggtggagtactgcacccctacaacctcaggtgaagacgttcgcgatttcgctaaagtgttgaagaacaaattcaggacgaagcgttatttcgcaaaacaccccaggatgggatatctgcccgtccagaccgtgctcgagggtgataatatggagacagatacgatg

SEQ ID NO: 142850 - DNA, 3432 bp, Artificial Sequence
  derived and/or modified sequence
atgctgtggtgggaggaggtggaggactgctacgaacgggaggacgttcaaaagaaaaccttcactaagtgggtgaacgcacaattctcaaagtttggaaaacagcacatcgagaaccttttcagcgacctgcaagacggccgaaggctcctggatcttctggagggattgactggccagaagttgcctaaggagaaaggatccacccgggtgcatgctttgaacaatgtgaacaaggcgctgcgggtcctccagaacaataatgtggatctggtgaacatcggctccaccgacatcgtggacggaaaccacaagctcaccctcggacttatctggaacatcatcctgcactggcaggtgaagaacgtgatgaagaatatcatggctggacttcaacagacgaactccgaaaagatcctcctgtcatgggtgagacagtcgactcggaattacccccaggtgaacgtgatcaacttcactacttcatggtcggacggactggctctgaacgccctcatccacagccaccgccccgacctgttcgactggaactcagtggtgtgccagcagagcgcaacccaacggctcgagcatgcatttaacatcgcccggtaccaactgggaatcgaaaagctgctggacccagaggatgtagacactacctacccggataagaagtccattctcatgtacattacttccctgttccaagtattgccacaacaagtctcgattgaggccatccaggaggtcgaaatgctgccacgcccgccgaaggtcacgaaggaagaacacttccagctgcaccaccaaatgcattacagccaacagatcaccgtgagtctggcccaaggctacgaacggacctcctcaccgaagcctcggtttaagtcctacgcatatactcaggcagcctacgtcactacctcggaccctactaggtccccgttcccttcccagcatctggaagctccagaagataagtcctttggatcgtcgctcatggaatcggaggtgaatctcgaccgctatcagaccgcgcttgaagaagtgctgtcctggcttctctccgcggaggacactttgcaggcacagggagaaatcagcaatgacgtggaagtggtgaaagatcagtttcacacccatgaggggtatatgatggacctcaccgcacatcagggacgggtgggaaacattctccagttgggttctaaactgatcggaactggtaagctgtcagaggatgaagaaaccgaagtgcaggagcagatgaatctccttaattcgaggtgggaatgcttgagagtcgccagcatggagaagcagtcaaatctccaccgcgaaatctcctacgttccatcgacttatctgaccgaaatcacccacgtcagccaagcccttctcgaagttgagcaattgcttaatgcccctgatctctgtgccaaggatttcgaagatctcttcaagcaggaagagtcacttaagaacatcaaggatagcttgcagcagtcgtctgggcgcatagacatcattcactcaaaaaagaccgcggccctgcaatcagcgaccccagtcgaacgcgtgaagctccaagaagcgctgagccagctcgacttccagtgggaaaaagtgaacaagatgtacaaggatagacaaggacggttcgacaggtcggtggagaaatggagacgcttccactacgacatcaagatcttcaatcagtggctcactgaggcggaacagttcctgcgcaagacccagatcccggaaaactgggagcacgccaagtacaagtggtacctcaaagaactgcaagatggaatcgggcaacggcagactgtcgtgcggactctgaacgccactggagaggaaatcatccaacagagctctaagaccgacgcctccatcctccaggagaagctgggttccctgaacctgcggtggcaggaagtgtgcaaacagctctccgacaggaagaaacgcctggaagaaaccctcgagcggttgcaggagctccaagaggccaccgacgagctggacctgaagctgagacaggcggaggtgatcaaggggtcgtggcaaccagtcggtgacctgctgatcgattcactgcaggatcatttggagaaggtcaaggccctccgtggagaaatcgccccgcttaaggaaaatgtgagccacgtgaatgaccttgcacggcaactcaccactctcggaatccaattgtcgccatataacctgtcaactcttgaggatctgaataccaggtggaagctgctgcaagtcgcggtggaggaccgggtccggcaactgcacgaagctcaccgcgactttggacctgcgtcccagcattttctgtcaacttcagtgcagggaccatgggaaagggcaatctccccaaacaaggtgccgtactacatcaatcacgaaacccagaccacctgctgggaccatccgaagatgactgagctgtaccagtccctcgcagatcttaacaacgtgaggttcagcgcttaccgcactgccatgaaactgcggcggctgcagaaggcactgtgtttggatcttctctcgctctccgcggcttgtgatgcactggatcagcataacctgaagcagaacgaccagccgatggacatcctgcagatcattaactgcttgaccaccatctacgatcgcctggagcaggaacacaataacctggtgaatgtgccgctgtgcgtcgatatgtgtctcaactggctgttgaacgtctacgataccgggcggactggacgtattcgcgtcctgtcgttcaagaccggaatcatttccctttgcaaggcccacctcgaggacaaatatcgctacctctttaagcaggtggcatcttcgaccggattctgtgaccaacgccggctgggattgttgctgcacgatagcatccagatcccgcggcaactgggggaggtggcgtcctttggaggctcgaacatagaaccttctgtgcgctcgtgcttccaatttgcaaacaacaaaccagagatcgaagctgccctgtttctcgattggatgagactggagccgcagtcaatggtgtggctcccagtgttgcatagagtggcagccgcagagactgctaaacaccaagccaagtgtaacatttgcaaggagtgcccgattatcggtttccggtacaggtcactgaagcactttaactacgatatctgccaatcgtgcttcttttcaggccgggtggcgaagggtcacaagatgcattaccctatggtggaatactgtacgccgactacctctggagaagatgtgagagatttcgccaaagtgctgaagaacaagttcagaaccaagcgctactttgccaagcatcccagaatgggatacctgcccgtgcaaacggtgcttgaaggagacaacatggaaaccgacactatg

SEQ ID NO: 142851 - DNA, 3432 bp, Artificial Sequence
  derived and/or modified sequence
atgctttggtgggaggaggtggaagattgttacgaacgcgaagatgtgcaaaagaaaacttttaccaagtgggtgaacgcccaattctccaagttcggtaagcagcacatagaaaatctcttctcggatcttcaggacggacgccgactcctggatctccttgaagggctgactggacaaaaactgcctaaagaaaaaggatctaccagagtgcacgcgctcaataatgtgaacaaggcactgagagtgcttcagaataacaacgtcgacctggtgaacattgggtcgactgatatcgtcgacggcaaccataagctgactctcgggctgatctggaacattatactgcattggcaagtcaaaaacgtcatgaagaacataatggcaggactgcaacaaactaactccgagaagatccttctttcatgggtccgccaatcgacccggaattaccctcaagtgaatgtgatcaactttactacttcctggtccgatggtcttgcgctgaacgccctgattcattcccacagaccagaccttttcgattggaatagcgtcgtgtgtcaacagtcagcaacgcaacgccttgagcacgccttcaatatcgcacggtaccaactcggaattgagaagttgctcgacccagaagatgtggacaccacttaccccgacaagaaatcaatcttgatgtacataacttcgctttttcaggttctcccacagcaagtctcgattgaagcaattcaagaagtggaaatgcttcctagacccccaaaagtaaccaaggaagaacactttcagctgcatcatcaaatgcactactcccaacagatcaccgtctcgctggcccagggatacgagaggacctcgtccccaaaacccagatttaagtcatacgcatacactcaagcagcctacgtcactacctcggaccctaccagatcgccttttccttctcagcacctggaagcacctgaggataagagcttcggttcgtcgctcatggaatcagaagtgaacctggacaggtaccaaaccgcactggaagaggtgctttcgtggcttctcagcgcagaggatacgttgcaagcccaaggggagatctcgaacgacgttgaggtggtcaaggaccagttccacactcatgagggatacatgatggatttgaccgcacatcagggtagagtgggaaacattctccaacttggcagcaagctgattggtactggtaaactctcggaagatgaagagactgaagtccaagaacaaatgaatctcctgaactccagatgggaatgtctgcgggtcgcgtccatggaaaagcaatccaacctgcaccgtgaaatttcatacgtgccatcgacttacctcaccgagatcacgcatgttagccaggccctcctggaggtggagcaattgttgaacgcacccgatctgtgtgctaaggattttgaggaccttttcaagcaggaagagtcactgaagaatatcaaggactcgctgcaacaatcgtcaggacggattgatatcattcattcgaagaaaaccgctgcgcttcaatcggccaccccggtcgaacgggtgaaattgcaggaggccctgagccagctggacttccaatgggaaaaggttaacaaaatgtacaaggatcgccaaggccgatttgatcgatccgtggaaaagtggcgcaggtttcattatgacatcaaaatctttaatcaatggctcaccgaggcagaacaatttctcagaaagacgcagataccagaaaattgggagcacgccaagtacaaatggtacctgaaagaactccaagatgggatcggtcaacgccaaaccgttgtgagaaccctgaacgcaaccggagaagagattatccaacaatcaagcaagacggacgcctcaatcttgcaggaaaaacttggttcactcaatctgcgctggcaagaggtctgcaagcaactctccgacagaaagaagaggcttgaggaaaccctggagcggctgcaagaactgcaagaagcaactgacgaactcgaccttaaactgagacaagccgaggtcataaagggatcgtggcaacctgtgggagacttgctcatagacagccttcaagatcacctggagaaggtaaaagccctgcggggtgagatcgcaccactgaaggaaaacgtgtcacacgtcaacgatcttgcacggcagctgactaccctgggcattcagctttcgccatataacttgtcgactctggaagatctgaacacgcggtggaagctgttgcaagtggcggtggaggaccgcgtgagacaactgcatgaagcacaccgcgatttcggtcctgcaagtcaacattttctttccacctccgtgcagggtccttgggagagagccatctcacctaacaaagtgccctattacattaatcatgagactcagaccacttgctgggaccatccaaaaatgaccgagctgtatcaatcgcttgctgatcttaacaacgtgagatttagcgcatatagaaccgcaatgaagctcagaaggcttcagaaggccctctgccttgatctcctgtcgctttcagccgcatgtgatgcacttgatcagcacaaccttaagcaaaacgatcaacctatggacatcctccagataatcaactgtctcactactatctacgatcgcctggaacaggagcataacaatcttgtcaacgtgcccctgtgcgtggatatgtgtctgaattggctgcttaacgtctacgacaccggtcgtactggaagaattagagtgctctccttcaagactggcattatctcgctttgtaaggctcatctcgaagataagtatcggtacctgtttaagcaagtggcttcctcgactggattttgtgatcagcggaggctcggacttcttctgcatgattccatacaaatacctagacagctgggagaagtcgcatcgtttggcggatccaatatagaaccatcggttagatcgtgctttcaattcgctaacaacaagccggaaatagaagcagcgctttttctggactggatgcgtctggaaccccaatctatggtgtggttgcctgtgctgcacagggttgcagcagcagaaaccgccaagcatcaggcgaagtgcaatatctgcaaagaatgtcccattatcggatttagatacagatcgctcaaacatttcaactacgacatttgtcagtcgtgcttcttttcaggacgcgtcgctaagggacacaaaatgcactaccctatggtcgaatactgtaccccgaccacctccggcgaggatgtccgtgacttcgcaaaagtgcttaagaacaagtttagaaccaagcggtactttgcgaaacatcccaggatggggtatctgccggtgcagaccgtgctggagggggataacatggagactgacaccatg

SEQ ID NO: 142852 - DNA, 3432 bp, Artificial Sequence
  derived and/or modified sequence
atgctgtggtgggaggaggtagaggactgctacgaaagggaagacgtccaaaagaagactttcactaaatgggtgaatgctcaattctcgaagtttggtaagcagcacatcgagaatctgtttagcgatctccaagatggaagacggctgctggatctcttagagggcttgactgggcagaagctcccaaaagaaaaaggatccacacgcgtgcacgcattgaacaacgtcaataaggccctccgtgtgcttcagaataataatgtagatctggtgaacatcggcagcaccgacatcgtcgatggcaaccacaaacttacgctcggcctcatttggaacattatcctgcactggcaggtaaaaaatgtcatgaaaaacatcatggccgggctacaacagaccaactcagagaaaatcctcctttcctgggttcggcagtccactaggaattacccccaggtgaacgtgattaacttcactacgtcatggtctgacggtctcgccctgaacgccctgattcattcacatagacctgatctgttcgattggaattcagtggtatgtcagcagagtgccacacagcgattggaacacgcgtttaacatcgctcgttatcagcttggaatcgagaaactcctggacccagaagatgtagacacaacataccccgacaagaagagcattcttatgtacatcacaagtctgttccaggtcttgccacaacaggtatcaatcgaggcaattcaggaagtggagatgctcccgcgccctccaaaggtgactaaggaggagcacttccagctccatcatcagatgcattactcccaacagattaccgtctcactggcccaggggtatgagaggacctcatctccaaaaccccggttcaaatcctatgcatacacccaggcagcctacgtgactacatcagacccgactcgtagcccattcccttcacagcacctggaggcgcccgaagacaagtccttcggatcatccctgatggagagcgaagtcaacctggatcgctaccagactgccctggaggaggtgctgagctggctgctgtcagccgaagatacgttacaggctcagggcgaaatatctaacgacgttgaggtggtcaaagatcagtttcatactcacgagggttacatgatggacctgacggcacatcagggtcgagtgggcaacatccttcagctgggaagcaagctgattggtaccgggaaactgtcagaggatgaagagaccgaagtccaggagcagatgaatctattgaatagtagatgggaatgtctgcgggtagctagcatggaaaagcagtctaacctacacagagagataagttatgtgccaagcacttacctgaccgaaatcacgcatgtgtctcaggcgctgttagaggtggagcagttattgaacgcgccagatctgtgcgctaaagattttgaggacctgtttaaacaggaagaatctctcaagaacattaaggatagcttgcagcagtcatcagggaggattgacatcatccacagcaaaaaaacggccgcccttcagagcgcgacacccgtcgagagggttaagctgcaagaggccttgtcacaactagatttccagtgggaaaaggtcaataagatgtataaggaccgccaagggcggttcgaccgaagtgtcgaaaaatggagacgattccactacgacatcaagatatttaaccaatggctgactgaagctgagcagttcttaaggaagacgcagatccctgagaactgggagcacgccaagtataagtggtatctgaaggagctgcaagacgggatcggacaaagacagactgtggtgcggaccctgaatgctactggggaagagatcatccagcagtcctccaagaccgatgcatccatcttgcaggaaaaactaggatccctaaatctccgctggcaggaagtctgcaagcaactttcagaccggaagaagaggcttgaggaaacactagagaggctgcaagagctgcaggaggccactgacgaattggacttaaagctccgacaggcagaggtcatcaaaggaagctggcaaccagtgggggaccttctaatagattccctgcaggatcatctagaaaaggtaaaggccctccggggggaaatcgcacctctcaaagaaaatgtgagccatgtaaatgacttggcccgacagctgacaactctcggaatccagctgtcgccatataatctgtcaacgcttgaggatctgaacacgcgctggaagcttctgcaggtggcggtggaagatcgggtgcggcagctgcacgaggcacaccgagatttcgggccagcctcacagcatttcctgtcaacttctgtccagggaccttgggagagggccattagcccaaacaaagtaccctattatatcaaccacgagacacaaaccacatgctgggaccatccgaagatgactgaactgtatcagtccctcgctgacctaaataacgtaagattcagcgcttatcggacggcgatgaagctgagacgcttacaaaaggcactgtgcctggacctgctcagcctgtccgctgcctgcgacgccctcgatcagcataatctgaagcagaacgaccagcccatggacattctgcagattatcaactgcttgaccaccatctatgatagactggaacaagagcacaataacctcgttaatgtccccttgtgcgtggacatgtgcctcaactggctcctgaacgtgtatgatactggtcggaccggccggatcagagtattgtctttcaaaacaggcatcatttctctctgcaaagcccacctcgaagataaataccggtatctctttaagcaggttgcgtcctcaactggattctgtgaccagcggagactcggtctgctgcttcacgactctattcagattccaaggcagctcggggaggtggcatcatttggcggctctaacatagaaccatcagttcggagctgcttccagtttgccaacaacaagccggagatcgaggccgcactgttcctggattggatgaggcttgaaccacagtcaatggtgtggcttccagttctgcacagagtggctgcagctgagaccgctaaacatcaggcaaaatgtaatatctgtaaagagtgtccaataatcggatttaggtacaggtccctcaaacatttcaattatgatatttgtcagtcctgtttcttctcagggagggtggcaaaaggtcataaaatgcattacccgatggttgagtattgtacccccactacttccggcgaggatgtgagggactttgccaaggttctgaagaacaaatttaggacgaagaggtactttgccaaacacccgcggatgggctacctgccggtccagacagtcctggagggagataatatggagaccgacaccatg

SEQ ID NO: 142853 - DNA, 3432 bp, Artificial Sequence
  derived and/or modified sequence
atgctgtggtgggaagaagtggaggattgctatgaacgggaagacgttcagaaaaaaacgttcacaaaatgggtcaacgcccagttctcaaagttcggcaagcagcatatcgaaaacctattcagcgacttgcaggatggaagacgcctcctagatctccttgagggcttgaccggacagaagctgccgaaggaaaagggtagcacaagggtgcatgcacttaacaatgtcaataaggccctgcgggtactgcagaataataatgtggacttggtgaacataggcagtactgatattgtggacggcaaccataaattgaccctcggattgatttggaatataatattgcactggcaggttaagaacgtgatgaaaaatataatggcaggactccagcagacaaacagcgaaaaaattctgctaagctgggtccggcagtcaacgcggaactatccccaggtgaatgtgattaactttacaactagttggtccgatgggctagccctcaacgctttgattcacagccaccgaccggacctgtttgactggaatagcgtggtgtgtcaacagtctgctacgcaacgtctggaacacgccttcaacatagcacggtatcagctgggcatagagaaacttctggacccagaggatgttgataccacataccccgataagaagtctatcctgatgtatatcacgtctctgttccaggttctgccacaacaggttagtatcgaagccattcaagaggttgaaatgcttccacgaccccccaaagttacgaaagaagaacattttcagctgcatcaccaaatgcactacagtcagcagataaccgtgagcttagcgcagggctacgagaggacctcgagccccaagccccgattcaagtcttatgcctatacacaagccgcttatgtgacaacctcagaccccacacgcagcccatttccaagccagcacttggaagcccccgaggacaaatcgttcggtagtagcctgatggagagtgaggtcaatctggataggtaccagacggctttagaggaagtgctgtcttggttgctgtccgcggaggacaccttacaggcccagggtgagatttctaatgatgtggaagtggtcaaggaccagtttcacacgcacgaggggtacatgatggatctgacagcgcatcagggacgggtcgggaacatcctacaactcggctccaaactgatcggcaccggcaaactatcagaggatgaggaaaccgaagttcaggagcagatgaatttgttgaactccagatgggagtgtttgcgtgtggccagcatggaaaagcaatctaaccttcaccgcgagatatcctatgtcccttcaacctacctcactgaaataacccatgtctcccaggccctactggaagtcgagcaactcctgaatgcccccgacctgtgcgcaaaagatttcgaagatctgtttaagcaggaggagtccctcaagaacatcaaagatagtctccagcagtcttctggtaggattgatattatccatagcaaaaagacagccgccttacagtctgccacccctgtggagagagtcaaacttcaggaagctctgtctcagttagatttccagtgggagaaagtgaataagatgtacaaggataggcaaggcagatttgatcgtagcgtggaaaaatggaggagatttcactatgacattaagatttttaaccagtggcttactgaggctgagcaattcctccgaaagacacagatccccgagaactgggagcacgctaaatacaagtggtatctcaaggagttgcaggacggcatcggccagaggcaaaccgtggtcaggaccctcaatgctaccggcgaggagatcatacagcagtcaagtaagacagacgcaagcatattgcaagagaagctgggttccctgaacctgcgttggcaggaggtgtgtaaacagctcagtgatcggaagaaaagactggaggagaccctggaacggctgcaggagttgcaggaggcgaccgatgagctggacttgaagctgcgccaggccgaagtgattaaaggtagctggcagcctgtaggcgacctgttaatcgatagccttcaggatcatctagaaaaggtaaaagctttgcgcggcgaaatcgctccactaaaggaaaatgtatctcacgtgaacgacctcgcaaggcagctaactaccctgggcatccagcttagcccatataacctcagcacactggaagaccttaacacccgctggaaactgctccaagtcgccgttgaagacagagtacggcagcttcacgaagcccaccgagatttcggtccagccagtcaacattttctgtctaccagcgtccagggaccttgggaaagggcaatatctcctaacaaggtgccatactatatcaatcacgagacccagactacatgttgggaccaccccaagatgactgagctgtatcagtctctggccgatctgaacaatgtgagattcagtgcataccgcacagctatgaagctgcggcgattacaaaaggccctgtgtctggatctgctctcactctcagcagcctgcgatgctttggatcaacataatcttaagcaaaatgaccagccgatggatatactccaaataattaactgtttaacgacaatttacgatcgcctggaacaggagcataataaccttgtcaacgtccctctctgtgtagacatgtgtctaaactggctgcttaatgtttacgacaccgggaggacgggccgcatccgagtcctgtcgttcaagactggcataatctctctgtgcaaggctcatctcgaggacaaatatagatatctgtttaagcaggtcgcctctagcaccggcttttgtgaccagagaagactcggccttcttcttcacgacagcattcaaatccctaggcagcttggcgaggtcgcaagctttggcgggtcaaatatcgagccttctgtgagatcctgttttcagttcgctaacaataaacccgagatcgaggccgcccttttcctagattggatgaggcttgagccccagtccatggtgtggctcccggttttacatcgagtcgcggcagcggagaccgcaaaacaccaggctaagtgtaatatctgcaaggaatgtcccatcataggatttaggtacaggagcttgaagcacttcaactacgacatctgccagagctgtttcttttctggaagggtggccaaggggcacaagatgcactatcctatggtcgagtactgtaccccaacaaccagcggcgaggatgttcgcgactttgcgaaggtactcaaaaataagtttaggacaaaaagatatttcgccaaacaccccaggatgggatatttgcccgtacagaccgttctagaaggggataatatggaaactgacacaatg

SEQ ID NO: 142854 - DNA, 3432 bp, Artificial Sequence
  derived and/or modified sequence
atgctgtggtgggaagaagtcgaggactgttacgagcgcgaagatgtgcagaaaaagacttttactaagtgggtgaatgcgcagttctcaaaattcggaaaacagcatattgagaacctcttcagcgacctgcaggacggcagacgcctcctcgacctgcttgagggtcttacgggacagaaactgccgaaggagaaagggtctacccgcgttcacgcgctgaacaacgtgaataaggcacttcgcgtgttgcagaacaataacgtcgacctggttaacatcggttcaaccgatatcgtggacggaaaccataagctgactctggggctcatctggaacatcatcctccattggcaagtgaagaacgtgatgaagaacatcatggctggactgcagcagactaattccgagaagatcctgctcagttgggtccgccaaagcacccgcaactaccctcaggtgaatgtgattaacttcactacctcctggtcagatggcctggccctgaatgcgctgatccactcccaccgcccagatctgttcgactggaattccgtggtgtgccagcaatcggctacccagcgcctggagcatgccttcaacatcgctagataccaactcggaatcgagaaacttctcgatccggaggacgtcgacaccacttacccggacaaaaagagcatcctgatgtacattacttcgctgtttcaggtgctcccccagcaggtgtcaattgaagcgatccaggaggtggagatgctgcctcgccctcctaaggttaccaaggaagaacatttccagttgcatcaccagatgcactactctcagcagatcaccgtctccctcgcacagggctacgagagaacttcaagccccaagcctcgcttcaaaagctacgcgtacacccaagcagcctacgtgacgacttcggacccaactagaagcccgtttccaagccagcatcttgaggctcccgaggacaagtccttcggatcctcactcatggaatccgaggttaatctggatcggtaccaaactgctcttgaagaggtgctctcatggttgctcagcgcggaggatactctccaggcccagggcgaaatctccaatgacgtcgaggtggtgaaagatcagttccatacccacgagggttacatgatggacctgactgctcatcaggggcgcgtgggaaacatccttcagctgggctcaaagctgatcggcactggtaagctctctgaggatgaggaaactgaagtgcaggagcaaatgaaccttttgaacagccgctgggaatgcttgagagtggcgtcgatggagaagcagagcaatcttcatagggaaatttcatacgtgccgtcgacctacctgactgaaatcacgcatgtgtcccaggccctcctggaggtcgagcagctccttaacgccccagatctgtgcgcaaaggactttgaggatctcttcaaacaggaagaatccttgaagaacattaaagatagcctccaacaatcgtccggaagaattgacatcatacactcaaagaaaactgccgccctgcaaagcgccaccccggtggaacgggtgaaactgcaagaggcccttagccaattggacttccaatgggagaaggtgaacaagatgtacaaagacagacaaggccggttcgatagatccgtggagaaatggcggcgcttccactacgatatcaaaatcttcaaccaatggctgacggaggccgagcaattcctgcgcaagacgcagatccccgagaattgggagcatgcaaagtacaagtggtatctcaaggaattgcaggacggaattggtcaacgccagaccgtggtccgcaccttgaacgccaccggcgaagagatcatccagcagtcctcgaaaaccgacgcctcaatcctccaagaaaagttgggatcgctgaacttgcggtggcaggaagtgtgcaagcaactctcggacaggaagaagcggctcgaggagactctcgaacgcctccaggaactccaggaagcgaccgacgagctggacctcaagctccggcaggcggaagtgatcaaaggatcgtggcagcccgtgggggacctgctgattgactccttgcaggaccatctggaaaaggtgaaggcactccggggggagatcgcaccactgaaggaaaatgtcagccacgtgaatgatctggctcggcagctcactactttgggcatccagctgtccccatataacctgtccactctcgaggatctgaatactcgctggaaattgctgcaggtcgcagtcgaggatagagtgagacagctgcacgaagcccatcgagactttggcccggcttcgcaacatttcctctcgacctccgtgcaaggaccgtgggaacgggctatctcgcccaacaaggtgccatactacatcaaccatgaaactcagaccacttgttgggatcaccccaaaatgaccgagctgtaccaatctctggctgacctgaacaacgttcgattctcggcatatcgtaccgccatgaagctgcgccgactgcagaaggccctgtgtttggatctgctctccctgtctgcagcgtgcgacgcgctggaccagcacaatctgaagcagaacgaccagccaatggatatcctgcaaatcataaactgcctgaccaccatctacgatagactggaacaagaacacaataatctggtgaacgtgccgctctgcgtcgacatgtgcctgaattggttgcttaatgtgtacgacaccggtcggaccgggcgcatccgagtgctgagcttcaaaactggtatcatcagcttgtgcaaagcgcacctggaggacaaataccgctatctcttcaagcaggtggcttcatcaactggattctgcgaccagagaagattgggcctgctcctgcacgactcaatccagatcccaagacagttgggagaagtcgcgtcattcgggggatccaacatcgaaccgtcggttcgctcgtgcttccagttcgccaacaataagccggagatcgaggcggcactcttcctggattggatgagacttgaaccccaatccatggtctggctgccggttctccatcgcgtggcggccgccgaaactgcaaagcaccaggccaagtgtaatatctgcaaggagtgtccgatcattggattccgctacagatccctgaagcacttcaattacgatatctgccagtcatgctttttctccggacgcgtggccaaaggacacaaaatgcattatcctatggtggagtattgcaccccgacgacttcgggagaggatgtgagagacttcgcgaaggtgctgaagaacaagtttcgaactaaacgctactttgctaagcaccccaggatggggtacctcccggtccaaaccgtgctggagggggacaacatggaaactgatacgatg

SEQ ID NO: 142855 - DNA, 3432 bp, Artificial Sequence
  derived and/or modified sequence
atgttgtggtgggaagaggtggaggattgttacgaacgggaggacgtgcagaaaaaaacctttaccaaatgggtgaacgcgcagttttccaagtttggaaagcagcacatcgaaaatctgtttagcgacctgcaagacggcagaaggctgctggacctgcttgaaggtttgacaggccaaaaactgccgaaggaaaaaggatctactcgcgttcatgctctgaataatgtgaacaaggctttaagagtgctgcagaacaacaacgtggatctggtcaacatcggatcaacagacatcgtagacgggaaccataaacttaccctcggactgatctggaacatcatccttcactggcaggttaaaaatgtgatgaaaaacattatggctggtctgcagcagaccaacagcgaaaagatcctgctcagctgggtgaggcagagtacccgcaactacccacaagtcaacgtcatcaactttacaacttcctggtctgatggcctggctttgaacgctctgattcacagccacaggccagacctttttgactggaatagcgttgtatgccagcaaagtgccacacagaggctagagcacgctttcaacatagcaaggtaccagcttggcatcgaaaaactgcttgatccagaggacgttgacacgacttaccctgacaagaaaagcattttgatgtatatcacctcgctctttcaggtgctcccccagcaagtgtctattgaagctatccaagaagtagagatgcttccaaggcctccgaaagtaactaaggaagaacacttccagttacatcaccagatgcactactctcagcaaattactgtgtctcttgcccaaggctacgaaaggacatcctcccccaaaccaaggtttaagtcttacgcctacacccaggcggcctacgtgactactagcgaccctaccagaagtccgttccccagccaacacctggaagcgcctgaagacaagtccttcgggtcctccctcatggaaagcgaagtaaacctggatcgctaccaaacggcacttgaggaagtcctgagctggcttttgtcagccgaggacactctccaggcccagggagaaatctcgaatgatgtcgaagtcgtgaaagatcaatttcacacccatgagggatacatgatggatctcacagctcatcagggccgagtgggcaacatcctccaacttggtagtaagctgattggaaccggaaaactgtctgaggacgaggaaaccgaggtccaggagcagatgaatctgcttaatagtaggtgggagtgcttgagagtggcttcaatggaaaaacagagcaacttgcaccgagagatatcttatgtgccctccacctacctgacagagatcacacacgtgagccaagcattgctggaagtggagcagctgcttaacgctcctgatttgtgcgcgaaggacttcgaggacctgtttaagcaggaagagtctctgaagaatatcaaggatagtctccaacagagtagtggacggattgatatcatccacagtaagaaaactgcagcccttcaatctgccaccccagtggaacgggtgaagctgcaggaggccctgagtcagctggactttcagtgggagaaagtcaacaaaatgtataaggacagacaaggccgcttcgataggagcgtagagaagtggcgcagatttcactatgatatcaagatcttcaaccaatggctgacagaggcggagcagttcttgaggaaaacccagatccctgagaactgggagcacgcaaaatacaaatggtacctgaaggagctgcaggacggaatcggacaacgccaaaccgtcgtgcgcaccctgaacgctacaggagaggaaattattcagcagtcttcaaagacagacgccagcatcctgcaagaaaagctgggaagcctaaatttgaggtggcaagaggtgtgtaaacagctttcagaccgcaaaaagcgtctggaagagacactggaaagacttcaggaactgcaggaggctaccgatgagttggacctgaagctcagacaagccgaggtgataaaagggagctggcagcccgtcggggacctcttaatcgatagtctccaagatcatttagaaaaggtgaaagctctgaggggggaaatcgccccactgaaagaaaatgtctctcatgtgaacgatctggctagacaattgacaaccctgggaatccagctgtccccatataatctaagcacacttgaggatctgaacaccaggtggaagctgctccaggtcgcagtcgaagacagagtcaggcagttgcacgaggcccatagggattttggcccagcatctcaacatttcttgtctacttccgtgcaaggcccttgggagcgtgcaatatcaccaaataaggttccttactacatcaatcatgagacacagactacatgctgggatcaccctaaaatgacagaactctatcaatcgttggccgaccttaataatgtcaggtttagcgcttaccgcactgctatgaagttaaggcgtttacagaaggctctgtgtctggacttactgtcattatccgcagcttgcgacgctctggatcagcacaacctgaagcagaacgaccagccaatggacattcttcaaattatcaactgccttaccacaatctatgatagattggagcaagaacataacaaccttgtgaacgtgcccctttgtgtggatatgtgtctgaactggctgctcaacgtgtacgacaccggtaggaccggtcggattagggtgctctctttcaaaacaggaattatctctctctgtaaagcccaccttgaggacaaatacaggtacttgtttaaacaggtcgctagctctaccggattctgcgatcagagaagactggggctgcttttgcatgactcaatccaaatccccagacaactgggagaggttgctagctttggaggatcgaacatagagccatccgtgcggagttgtttccagtttgctaacaacaagcccgagatcgaagctgccctctttctggactggatgcgccttgaacctcagtctatggtttggcttcccgtactgcaccgcgtggctgctgctgaaaccgctaaacaccaagctaaatgcaatatttgcaaagagtgtcctattattgggttcaggtacagatctttgaagcattttaactacgacatctgtcagagctgctttttttctgggcgcgtggcaaaagggcacaaaatgcattatccaatggtcgaatattgtacccctaccacttccggggaagacgtgagggactttgcaaaagtcctgaaaaacaagtttagaaccaagcgctatttcgcgaagcacccaagaatgggatacttgccagtgcagactgtgctggagggcgacaacatggagacggataccatg

SEQ ID NO: 142856 - DNA, 3432 bp, Artificial Sequence
  derived and/or modified sequence
atgctctggtgggaagaggtcgaagattgttacgaaagggaggatgtccagaagaaaaccttcaccaaatgggtgaatgcacagtttagcaagttcggaaagcagcacatagagaacttgttttcagatctgcaagacggacgacggctgctggatctcttggaaggtcttaccggacagaagctgcctaaagaaaagggttccactagagtccacgctctgaacaatgtcaataaggcactccgtgtgctgcaaaacaacaatgtggatcttgtgaacatcggatccactgacatcgtggatggaaaccacaagttgactcttggtctgatctggaacattatactccattggcaggtgaaaaacgtgatgaagaacattatggcagggcttcagcaaaccaactcagaaaagatccttctgtcgtgggttcgtcagagcacgcgtaactaccctcaagtcaatgtgataaacttcaccacctcgtggtccgatggactcgcactgaacgcactgatccacagccatcgccccgatttgttcgactggaactccgtggtgtgccagcaatccgctacccaaaggcttgagcatgcatttaacatagcacgctaccaacttggaatcgaaaaacttctcgatcccgaagatgttgacaccacttatccagataagaagtcgatattgatgtacataacttcgctctttcaagtcctgccgcaacaggtgtccattgaggctattcaagaagtggaaatgctcccaaggccacccaaggtgactaaagaagaacattttcaactgcatcatcagatgcattacagccaacaaatcactgtgtcattggcccagggctacgagcggacctcatcccctaaaccccgtttcaagtcgtacgcatacacccaagccgcatacgtgacgacttcagatcccactcggtcaccttttccatcgcaacatctcgaagctcccgaggacaagtcctttggttcatcactcatggagagcgaagtcaacctcgatcggtaccagaccgctctggaggaggtgctttcgtggcttctgtccgcagaagataccctccaagcacaaggggagatttcgaacgatgtggaagtggtgaaggaccaatttcatactcatgaaggctacatgatggatctcactgctcatcaaggtagggtcggaaacattcttcaacttgggagcaagctcattggaactggaaaactgtccgaggacgaggaaaccgaagtccaggaacagatgaatctgcttaactcgcgttgggaatgtcttagggttgcatcaatggagaaacagtcaaacctgcaccgcgaaatctcttacgttccctccacctacttgaccgaaattacccatgtcagccaggcacttcttgaggtcgaacagcttctcaacgcgcctgacctgtgtgcaaaggacttcgaagatctcttcaagcaagaggaaagcctcaaaaacataaaggattcgcttcaacagtcgtccggtagaatcgacatcattcactcgaagaaaaccgccgcactgcaatcagccacgccggtggaacgagtcaaacttcaagaagcactcagccaactggatttccaatgggaaaaggtgaacaaaatgtacaaggatagacagggcagatttgaccggtccgtggagaagtggcggcggttccattatgatatcaagatctttaaccaatggctgacggaggccgaacagttcttgagaaagactcaaattccagaaaactgggagcatgcaaagtacaagtggtaccttaaggaactgcaagatgggatcggccagagacaaactgtggtccgcactttgaatgccactggtgaagaaatcattcagcagtcgtcgaaaacggatgcttccatcttgcaagaaaaacttggtagcctgaacttgcggtggcaggaagtctgtaagcagctgagcgatagaaagaaacgacttgaagagactcttgaaaggctgcaggagctgcaagaagcgaccgacgaactggatctgaaactgagacaggcggaggtgataaagggatcgtggcaaccggtgggagatctcctgattgattccctccaagatcaccttgaaaaagtgaaggcacttcgtggtgaaatcgcacctcttaaagagaacgtgtcgcacgttaatgatcttgcgcgacagctcactactctcggaattcagctgtctccctacaatctgtcgactctggaggatcttaatactcgatggaaactgctgcaggtggccgtcgaagatcgtgtccgacaattgcatgaagctcatcgcgacttcgggcctgcatcccagcactttctttcgacctcggtgcaaggtccttgggaacgcgccatctcacctaacaaggttccatactacataaaccatgaaacccaaactacctgttgggaccatcctaagatgacggaactttaccaatcgctggcagatcttaacaacgtgaggtttagcgcataccgcactgctatgaaacttagacggctgcagaaagccctttgtctggatctgctttccctttcggctgcctgcgacgcgctggaccagcacaatctgaagcaaaacgatcagcctatggacattctgcaaatcattaactgcctgactaccatttacgacagacttgagcaagagcataacaatctggtcaacgtcccattgtgtgtggatatgtgcctcaactggctcctcaacgtctacgacaccggaagaaccggtaggatccgcgtcctgagcttcaagaccggaatcatttcactctgcaaggcccatctcgaagataagtaccgatacctcttcaaacaggtggccagctctaccgggttttgcgaccagaggaggcttggccttcttctgcacgattccattcagattcctcggcagctcggagaggtcgctagctttggcggatccaacatcgagccttcagtgcgctcatgctttcagtttgcaaataacaagcctgagatcgaggcagcactttttcttgattggatgcgactggagccacagtcgatggtctggcttccagtgctgcatagggttgccgcagccgagactgctaagcaccaggcaaagtgtaacatttgtaaagaatgcccaatcataggttttagatacaggtcactcaaacatttcaattacgatatttgccagtcgtgcttcttttcgggacgtgtcgcgaagggacataagatgcactaccctatggtggaatactgtacccctacgaccagcggtgaggatgtgcgcgattttgcaaaggtgctgaagaataagtttagaaccaagagatactttgcaaaacacccgagaatgggatacctgccggtgcaaacggtgctcgagggcgacaacatggagactgatactatg

SEQ ID NO: 142857 - DNA, 3432 bp, Artificial Sequence
  derived and/or modified sequence
atgctgtggtgggaggaagtggaagattgttacgaacgcgaggatgtgcaaaagaaaacctttactaagtgggtgaacgcacagttttcgaaatttggaaagcagcatatcgaaaaccttttctccgatctgcaagacggtcggcgccttctggaccttcttgagggactgacggggcagaagctcccaaaagagaagggttccactagagttcacgcactgaataacgtaaacaaagccctgcgggtgcttcagaacaacaacgtggatctcgtgaacataggctcgacggatatcgtggacggaaatcataagctgactctgggccttatatggaacataattctccattggcaggtgaaaaacgtcatgaaaaacatcatggcaggactgcagcaaaccaactcggaaaagattcttcttagctgggtccgacagtcaacccgaaactaccctcaggttaacgtcattaactttactactagctggtccgatggacttgcactcaatgcactgatacattcccaccgtccagatctgtttgattggaactccgtggtttgccaacagtcggcaacccagaggctcgagcatgcattcaacattgctcgataccagctgggcattgagaagttgcttgaccctgaagatgtggatactacttaccctgacaagaaatctatccttatgtatatcacctcgctctttcaagtgctgcctcaacaagtgtcgattgaggccatccaagaagtggaaatgctgcccagaccgcccaaggtgactaaagaagaacattttcaactccaccatcaaatgcactattcccaacaaatcactgtatcgctggcgcaggggtacgagcgcacctcatcgccaaagcctcgttttaagtcatacgcgtacactcaagctgcctacgtgaccacctcagatcccactcgcagcccttttccttcccagcatctggaagcgcctgaagataaatcttttggttcctcccttatggaaagcgaagtcaatcttgatcggtaccagacggcgcttgaagaagtccttagctggctgctctcggcagaagataccctgcaagcacagggagagatctcgaacgatgtggaggtggtgaaagatcaatttcatactcatgaagggtacatgatggacctcaccgcccaccaaggaagagtgggaaatatcctccagttgggctccaagctgataggaaccggtaagctgtctgaagatgaggaaaccgaagtccaggaacaaatgaatctgcttaattcgagatgggaatgtctgcgggtggcgagcatggagaaacagtccaatctgcaccgggagatttcatacgtgccttcaacctaccttactgagattactcacgtctcgcaagcacttttggaagttgaacaacttctgaacgcaccagacctttgtgccaaggattttgaagatctgtttaaacaagaagaatcactcaaaaacattaaggattccttgcagcagtcctcgggacggattgacataatccattcgaaaaagactgcggcactgcaaagcgcaacgcccgtcgagcgggtgaaacttcaggaggctctgtcccaactcgattttcaatgggaaaaggtgaataagatgtacaaggatagacaaggcagatttgatcgctccgtggaaaagtggaggagatttcactacgacatcaaaatctttaatcagtggcttacggaggcagagcagttcctcagaaaaacgcagattccagaaaattgggaacatgcaaaatacaagtggtaccttaaggaactgcaggacggtatcggacagaggcagactgtggtgcggaccctgaacgcaacgggggaagagatcatacaacagtcatccaagaccgatgcatcaatactgcaagagaaacttggcagcctcaatctgcgttggcaggaggtgtgtaagcagctgtccgatcggaaaaaacggctggaagaaaccctggaaagactccaggaactgcaagaagcaactgacgaactcgatctcaaactgaggcaggctgaggtgatcaagggatcgtggcaacctgtgggtgatcttctcatagatagcttgcaagatcacctggagaaagtgaaggcgctcaggggtgaaattgcacccctgaaggaaaacgtgtcacacgttaacgacttggctcgacagctgactacccttggcatccagctgagcccatacaacctgagcactctcgaggatctcaacactcgctggaagctcctgcaagtggccgtggaggacagagtgcgccagctccatgaagcacatagggattttggacccgcatcgcagcatttccttagcacctcagtccaaggcccatgggaacgcgcaatttcgccaaataaggtcccgtactatatcaaccacgaaacccaaaccacctgctgggaccaccctaagatgactgagctgtatcaatcccttgccgaccttaacaacgtccggttttcagcataccggaccgcaatgaagctcagacgcctccagaaagccctctgtctcgacctgctgtcccttagcgcggcctgtgatgcccttgatcaacataaccttaagcaaaacgatcagcctatggacatactgcagataatcaactgcctgaccactatctacgatcgtctggaacaagaacacaacaatctcgtgaacgtccccctttgtgtcgatatgtgtttgaactggctgctgaacgtgtacgataccggcagaaccggacgcatccgggtcctttcctttaagaccggtatcatttcactttgtaaggcacatctggaagataagtaccggtatttgttcaagcaagtggcatcaagcaccgggttttgtgatcaacggcgtctcgggctgctgcttcatgactccatccaaattcctcgtcaacttggtgaggtggcatctttcggcggatcgaacatcgagccctctgtgcgctcatgtttccaatttgccaataacaagccagaaattgaagcagcgctcttcctcgattggatgcgactggaaccccagtcgatggtctggcttccagtgttgcatcgtgtggcggccgctgaaaccgccaagcatcaggccaagtgtaatatctgtaaggaatgtccgataataggattcagataccgatcacttaagcactttaactacgacatctgtcaatcatgctttttcagcgggagagtcgcaaagggacataagatgcattacccaatggtggagtactgtactcccaccacttccggcgaagatgtcagggactttgcgaaggtgctcaagaataagtttagaaccaagcgttactttgctaaacatcccagaatgggatacctgccggtccagaccgtgctggaaggcgacaacatggaaactgataccatg

SEQ ID NO: 142858 - DNA, 3432 bp, Artificial Sequence
  derived and/or modified sequence
atgctctggtgggaggaggtggaggattgttacgagagggaagatgtgcagaaaaagaccttcacgaagtgggttaacgcacagttctcaaagtttggaaagcagcacattgagaatctgttttccgaccttcaggacggccggcgccttctggatctgctggaggggctgactggacaaaagctgcctaaggagaagggatcaacccgcgtgcacgctctcaataatgtgaacaaagcactgagggtgctgcagaataacaatgtcgaccttgtgaatattggttcgaccgacatcgtggatggaaaccacaaacttacgttgggcttgatctggaacattatcctgcattggcaagtgaaaaacgtcatgaagaacataatggcaggactgcagcaaacgaactccgaaaagattctgttgtcgtgggttcgccaatcgactagaaattaccctcaggtgaacgtcataaactttaccacctcgtggtcagatggactggcattgaacgccctcattcactcccatcggcccgacctttttgactggaactctgtggtttgtcagcagtcagcaactcagaggctggaacacgcatttaacattgcccggtaccaactgggaatcgagaagttgcttgatcccgaggacgtggacactacctacccagataagaagtccattctgatgtatatcacctccctgttccaggtgctgcctcagcaagtgagtattgaagctattcaagaagtggaaatgcttccccgaccaccaaaggttaccaaggaggagcattttcagctccaccatcagatgcactactcccagcagattaccgtgtccctggcacaaggatacgaaagaacttcctcgcctaagcccaggtttaagtcctatgcctatacccaggcagcttacgtgaccactagcgacccaactaggtcaccctttccatcccagcaccttgaagcccctgaagataagtcgttcggatccagcctgatggaatccgaagtcaacctggatagatatcaaaccgcactcgaggaagtgctgtcctggcttctgtcggcagaggacaccctgcaagcacaaggcgagatctcgaacgatgtggaagtggtgaaggatcaatttcatacccacgaaggctacatgatggacctgaccgcacatcagggccgcgtgggaaatatcctgcaactcggctcaaagctgattggtaccgggaaacttagcgaggacgaggaaactgaggttcaggaacaaatgaatttgttgaattcacgatgggaatgcttgcgcgttgcgtcaatggaaaaacagtcgaaccttcatagagaaatctcgtacgtcccttccacctaccttaccgaaattacccatgtgagccaggcgctccttgaggtggagcagctgctgaacgcacctgatctgtgtgcgaaggattttgaggatctcttcaaacaagaagagtccctcaagaacatcaaggactcgctgcagcaatcatccggtcgcattgatatcatacatagcaagaaaactgccgccctgcagtcggctacccctgtcgagcgggtcaaactgcaagaagcactcagccaactcgacttccagtgggaaaaagttaacaagatgtacaaagatcgccagggacggtttgataggagcgttgaaaagtggagaagattccattacgatatcaagatctttaaccaatggcttaccgaagcagaacaattccttcggaaaacccagatccctgaaaactgggagcatgcaaagtataagtggtacctgaaagaattgcaagatggtataggccaaagacagaccgtggtgagaacccttaatgcaactggcgaggagatcattcagcaatcgtcaaagaccgacgcgtcgatcctgcaggagaagctgggtagccttaaccttagatggcaagaagtgtgtaagcagctctccgacaggaaaaaacggctggaagaaaccttggagagactgcaagagcttcaggaagcaaccgatgagctggaccttaaactcagacaggctgaagtgattaaaggatcgtggcagcctgtcggagatcttctgatagactcgctgcaagaccaccttgagaaggtgaaagccctcagaggtgagattgccccgctgaaggaaaacgtgtcgcatgtcaatgatcttgcgaggcaactgaccactcttggaatacaactgtcgccatataacctgagcactctggaagatctgaacactagatggaaactgctgcaagtcgctgtggaagatcgtgtccggcaactgcacgaagcacaccgggattttggtcctgcaagccaacatttcctgtccactagtgttcaaggcccctgggaacgggcgatctctcctaacaaggttccgtactatatcaatcatgaaacgcagaccacttgttgggaccatcctaagatgactgaactttaccaaagcctggcagacctgaacaacgtccgcttcagcgcctaccggaccgccatgaagctccgacggcttcagaaggcactgtgtcttgatctcttgtccctgagcgcagcatgtgatgcacttgatcagcataatctgaaacaaaacgatcagcctatggacattcttcagattatcaattgtcttacgactatctacgatcgtctggaacaggagcataacaaccttgtgaacgtgccactttgtgtcgatatgtgccttaattggcttcttaatgtctacgacaccggacgaactgggcgtattagggtcctctcttttaagactggaattatcagcctctgcaaggcacatctggaagataagtaccgatacctgttcaagcaggtcgcaagctcgacggggttttgtgaccagcgccggctgggtcttttgcttcatgattccatccaaattccccgtcaactcggagaagtggcttcgttcggaggtagcaacattgaaccttcggtgcggtcctgctttcagtttgctaacaataagccagaaatcgaagctgcattgttccttgattggatgcggctggaacctcagtccatggtgtggcttccagtattgcatagagtggccgcagccgagactgcaaagcatcaggcaaagtgtaatatctgcaaagaatgtcctattatcgggtttaggtacagatcacttaagcactttaactacgatatttgtcaatcatgcttcttttccggtagagtggcgaagggacataagatgcactacccaatggtggaatactgcaccccgaccacttcgggtgaagatgtgagggatttcgcgaaggttttgaaaaacaagtttagaaccaaaagatacttcgccaagcatccacggatgggatacctgccagtgcagactgttcttgaaggagacaatatggaaaccgacactatg

SEQ ID NO: 142859 - DNA, 3432 bp, Artificial Sequence
  derived and/or modified sequence
atgttgtggtgggaagaggtagaagattgttatgaaagggaggatgtgcaaaagaagactttcaccaagtgggtgaatgcccagttttcaaaattcggcaaacaacatattgaaaatctatttagcgatctgcaggacggacgccgtctgctagacctcttagagggcttgacaggacagaaactgcccaaagagaaagggtccacaagggtacacgcgctgaataatgttaacaaagctttacgggtcttacaaaataataatgtagacctggttaatattggaagcaccgatatcgttgacggcaaccacaaactcaccctagggctgatatggaacattatcctgcattggcaggttaaaaacgtaatgaagaacattatggcaggactgcagcagaccaactcagagaagattctgctgtcatgggtgcgccagtcaacccggaattacccccaagtgaacgtcatcaattttacaacatcctggagcgatgggctcgctctgaatgccctgatacattctcaccggccggatctgtttgattggaactctgtggtctgccagcaatcagcaacacaacgtctagagcacgctttcaatatcgccagatatcagctgggcatcgagaagctgctcgatcctgaagatgtagataccacataccctgataagaaatccattctgatgtacatcacaagtttgtttcaggtactgcctcagcaggtttccatagaagccatccaagaagtggagatgctccctcgcccacctaaagtcacgaaggaggagcatttccagctccaccaccaaatgcactacagtcagcagatcaccgtgagcctggcccagggatatgagcgcacaagcagccctaagccgcgtttcaagagttacgcttacacacaagccgcctacgtgacaacctctgatcccaccaggtccccgtttccaagtcagcatctagaagcgcccgaggataagtcttttggctcctctttaatggagtctgaagttaacctagatcggtaccagacggcgctggaggaggtcctgtcatggctgctgtccgctgaggatactcttcaggcacagggcgaaatctcgaatgatgtcgaggtagtgaaagaccagttccatacacatgagggttatatgatggacctaaccgcgcaccagggacgggtgggcaatatcctccagttgggcagcaaactgatcggaacgggtaaactttccgaggatgaggaaacagaggtccaagaacagatgaatctcctgaatagtcgatgggagtgtctgagagtggcgagtatggaaaagcaaagcaacttacatagagaaatctcctacgtgccttctacctacctgaccgagatcacccatgtgtctcaggcactgttggaggtggagcaactgctgaacgcaccagatctgtgtgccaaagatttcgaggatctgtttaaacaggaagagtcgttgaagaatatcaaagattctctgcagcaatcctctggccgaattgacatcatccactccaaaaagacagcagctctccaaagtgccactcccgtagagagggtcaagctacaggaagcactctcacagctggactttcagtgggaaaaggtgaataagatgtacaaggatcgtcagggaagattcgaccggagcgtagagaaatggcggagattccactacgacattaagatatttaaccagtggttaacggaggcggaacagttcctgagaaaaacccagatccccgagaattgggaacacgccaaatataaatggtacctgaaggaactgcaggatggtatcgggcagaggcagactgtggtaaggaccttgaacgcaacaggggaggaaatcatccagcagagcagtaagaccgatgcttcgattctccaagaaaaactcggttcacttaatctgcgctggcaggaggtttgcaagcaattatccgaccgaaagaaacggctcgaggaaacgttggagagattgcaagagctccaggaggctactgatgagctggatttgaagcttagacaggctgaggtgatcaagggttcatggcaaccagtcggagatctgctgatcgattccctgcaggaccatctcgagaaagtgaaggctcttcgtggcgaaattgctccattaaaggaaaatgtgagtcacgtgaacgatctggcccgccagctgactacactgggcatccagctgtcgccttacaatctgagcactcttgaggatctgaataccaggtggaaactgctgcaggtcgcagtggaagacagggtgcgtcaactgcacgaggcccaccgtgattttggacccgccagccagcatttcctaagtacttctgtacagggcccctgggagagagccatcagccctaacaaggtaccatactacatcaaccacgagactcaaactacctgctgggaccaccccaagatgacggaactctatcagtccctggctgatctcaataacgtacggttctccgcctaccggacagcaatgaaattgcgacggctgcagaaggcactctgtctggaccttctgagtttgtctgccgcctgtgacgctctcgaccaacataacctgaaacagaacgatcagcctatggatatactgcagattattaattgtctcacgactatctacgaccggctcgagcaggaacataacaatctagtgaatgttccgctgtgcgtggacatgtgtctgaactggctgctgaacgtttatgacaccggccgcaccggtaggattcgggttttgtcctttaaaacagggattatctccctgtgtaaggcccatttggaggataagtatagatatctgttcaaacaggtcgcgtcgtcaacaggattctgcgaccagaggaggctgggactactgctgcatgattctatccaaatcccaagacagcttggcgaagtagcctcattcggtgggagtaacatcgagccatccgtacgatcctgctttcagttcgcaaataataaacccgaaatcgaggccgccctgttccttgattggatgaggctggaacctcagagtatggtttggctgcccgtgcttcatcgtgtggcggcggctgagaccgccaaacatcaagccaagtgcaacatctgtaaagagtgccctatcatcgggttcagataccgaagtctcaaacacttcaattatgatatctgccagagctgtttttttagtggacgagtcgctaaaggccacaagatgcactatccgatggtggaatactgtactcctaccacgagtggagaagatgtccgggactttgccaaggttctcaagaacaagtttagaactaagagatattttgccaagcacccgcggatgggctatctccccgtgcagacggtgctcgaaggtgacaacatggaaaccgatacaatg

SEQ ID NO: 142860 - DNA, 3432 bp, Artificial Sequence
  derived and/or modified sequence
atgctgtggtgggaggaagtggaggattgctacgaaagggaagacgttcaaaagaagaccttcacgaaatgggtgaatgctcagttttccaaatttggaaagcagcatatagaaaatctgtttagcgacctgcaagacggaaggaggctattagatctccttgaggggttaacaggacagaagttgccaaaagagaagggctctacaagagtgcatgccctgaacaatgtgaataaagctcttagagtcctgcagaataacaacgttgatttggtcaatattgggtctacggatatagtcgatggcaaccataaacttaccttaggcctgatctggaatattattctgcactggcaggtgaagaatgtgatgaagaatatcatggctggactccaacaaacgaacagtgaaaaaatactgctgagttgggtgaggcagagcaccaggaactacccccaggtcaacgtgattaatttcacaacttcatggtcagatggcttggctctgaacgccttgatccactcccatcgaccagacctgttcgattggaacagtgtagtctgccagcagtccgcaacacagcggctagagcacgcttttaacatagcccgctatcagctcggcatcgagaagctgctggatcccgaggatgtggatacaacgtatcccgacaaaaagagcatcctcatgtatataacctctttatttcaagttctgccccagcaggtctccatcgaggcgattcaagaggtggagatgctgccccgccctcccaaagtaacgaaggaggagcactttcagctccaccatcaaatgcactactctcaacagatcacagttagccttgcccagggttatgagagaacgtcttccccaaagccacgctttaagtcctacgcctatacccaggccgcctacgtgacgacaagtgacccaacacggagcccttttccgagccagcatttggaggctcctgaagacaaatcctttggttctagcctgatggagtccgaagtgaacctagacagataccagacagcgctggaagaagtgctgtcatggcttctgtcagcagaggacactttgcaagcccagggggagattagcaacgatgttgaagtagttaaggatcagtttcatacgcacgagggttatatgatggacctgaccgcgcaccaggggcgggttggcaacatcttacagcttggctccaaactgattgggaccggcaagctgtccgaggacgaagaaacagaggtgcaggaacagatgaatttgcttaattcgcgatgggaatgcctgcgggtggcctctatggagaagcagtccaatctccaccgcgagatatcatatgtcccctccacttatctcacggagataacccacgtctctcaagcgctgctcgaggtagaacagctgctcaacgccccagatctgtgtgccaaagattttgaggacctattcaaacaggaagaatcactgaaaaatatcaaggatagcctgcaacagagtagcggacgaattgatattatccattccaagaagactgcagccctccagtcagcgactcctgtagagcgcgttaagctgcaggaagcattaagccagttggacttccaatgggagaaagttaacaagatgtataaagacagacaggggcgctttgatcgttcggtagagaagtggcgaaggtttcattacgatatcaagattttcaatcagtggctgactgaggcggagcagtttctccgtaaaacccagattcctgaaaactgggagcacgcgaaatacaagtggtatctcaaggagctgcaagacggcatcggacagcgtcaaactgtagtcaggacactaaacgcgacaggagaagagatcattcagcagagttcgaaaactgatgcaagcatcctgcaggaaaaactagggtcattgaatctccggtggcaggaagtctgtaagcaactgtctgataggaaaaaacgactggaggaaaccctcgagaggttacaggagctacaggaggctactgacgagttggatctgaagctcagacaggctgaggtgattaaaggctcttggcagcctgtgggcgacctgctaatagacagcttgcaagaccatttggagaaggtaaaggctctcaggggcgaaatcgctccactgaaggaaaatgtcagccatgtgaacgatctcgcccgccaactcactacactgggcattcagctgtctccgtacaacttgtcgacactggaggatctgaacaccagatggaagctcctgcaggtggccgtggaagacagggtcagacagttgcacgaggcccaccgcgattttggccctgcttcccaacattttctttctactagtgtgcagggtccatgggagcgagcaatctcacctaacaaggtgccttattacattaatcacgagacccagacaacttgttgggatcacccgaagatgacagagctttatcaaagtttggccgatttaaacaatgtgcggtttagtgcgtatcgcacagcaatgaaactgaggagactgcagaaggctctatgtttggacctgctgtcactgtcagcggcctgtgacgccttagaccagcataatcttaaacagaacgaccaacctatggatatcctccagatcattaactgtctcactaccatatacgatcgccttgagcaagagcacaacaacctggttaacgtcccgctgtgcgtggacatgtgcctgaactggttgcttaatgtgtacgacacagggagaaccggcaggatccgggtgttaagtttcaagacaggtatcatttccctgtgtaaagctcatctcgaggacaaatatagatacctcttcaagcaggtggctagcagcaccggtttttgcgatcagagaagactgggactgcttcttcacgactctatccagattccaaggcagctgggggaggtggcttcatttggcgggtcaaatattgaaccaagcgttcggtcatgctttcaatttgcaaacaacaaaccagagatcgaggccgccttgtttctggattggatgagactggaaccccagagcatggtatggctgcccgtccttcaccgagtcgccgccgctgagactgcgaagcatcaggctaaatgtaatatatgcaaggagtgtcccataattggattcagatatcgttcgctcaaacacttcaattacgacatttgtcagagctgttttttctccggaagggtggctaagggccacaaaatgcattaccctatggtggaatattgtactcccaccacatccggggaggacgtacgtgactttgctaaggtgctaaagaacaaattcaggaccaaaaggtattttgccaagcacccgcggatgggttatctcccagttcagaccgttctggagggcgacaatatggagactgacaccatg

SEQ ID NO: 142861 - DNA, 3432 bp, Artificial Sequence
  derived and/or modified sequence
atgctttggtgggaagaagtcgaagattgttatgaaagagaagatgtgcagaagaaaacctttaccaagtgggtgaatgctcagttttccaagtttggaaagcagcacatcgaaaatcttttttccgatcttcaagatggccgcagacttctggacctcctggagggccttactgggcaaaaacttcctaaggagaagggtagcactcgtgtgcatgcactgaataatgtgaacaaggcactccgcgtgctgcagaacaacaatgttgacctggtgaacattggttccactgacatagtggacgggaaccataagctgacgctgggccttatctggaacattatcttgcattggcaagtgaaaaatgtgatgaaaaacataatggcaggccttcaacagactaactcggaaaagattctgctttcgtgggtgcggcagtccactagaaattaccctcaggtgaacgtcatcaacttcaccactagctggagcgacggactggcgctgaatgcactgatccattcccatcgacctgacctgtttgattggaactctgtggtgtgccagcaatccgcgacgcagcgcctcgagcacgcctttaacatcgcaagataccagctgggcatagaaaagctgcttgatcctgaggacgtggacaccacttaccccgataagaagtccatccttatgtacatcacctcgttgtttcaggtcctgccacagcaggtgtccatcgaagccatacaggaggtggaaatgctgcctaggccgcccaaggtgaccaaggaggagcactttcagctccatcaccagatgcattacagccagcaaattactgtctccttggcacaaggttacgaacgtactagctcccctaagcctcggttcaaatcgtacgcgtatacccaagcagcgtacgtgactacgagcgatccgaccaggagtccattcccttcacaacatcttgaagctccagaagataaatcatttggatcaagcctgatggagtccgaggtgaaccttgataggtaccagaccgcactggaagaggtgctgtcgtggctcctttcggcagaagatactctgcaggcacaaggtgaaatttctaacgatgttgaggtggtgaaggatcagttccacactcacgaggggtacatgatggacctcacggcacatcagggtagggtggggaacatcttgcagctgggatccaagttgattggtaccggaaagctgtcggaagatgaggaaactgaagtccaggaacagatgaatcttctcaatagcagatgggagtgtctgagagtcgcctcgatggagaagcaaagcaatctgcacagggaaatctcttacgtgccatcgacctacctcactgaaatcacccacgtttcccaggcgctgcttgaagtggaacaacttctcaacgcacccgatctctgcgcaaaagacttcgaggacctctttaagcaagaggaatcgctgaagaacatcaaagactccctccaacaatcctccgggcgaatagacattattcactcaaagaaaacggcagcactccaatccgcaaccccagtcgaacgagtcaaacttcaggaggcgctgtcccagcttgattttcaatgggaaaaggtgaacaaaatgtacaaggatagacagggacgatttgatagatcggtggagaaatggaggagattccattatgatatcaagatattcaatcaatggctgactgaagcagagcagttcttgcggaaaacccaaatacctgaaaactgggaacatgcaaaatacaaatggtacctgaaggaattgcaagatggcataggacaacgtcaaaccgttgttcgcaccctcaacgcgactggcgaagaaatcattcagcaatcttccaaaactgatgcctcaattctgcaggaaaagctggggtcccttaatctgcgatggcaagaagtgtgcaagcaactgagcgatagaaaaaagcggcttgaagaaactctcgaaagactccaagaattgcaggaggcgaccgatgaacttgacctcaaactgagacaagcagaagtcattaagggatcctggcaaccagtgggagatcttctcattgactcactccaagaccatcttgaaaaagtgaaggccttgagaggcgagatagcccctctcaaggagaacgtgtcccatgtgaacgatctggcacggcaattgaccaccctggggatccagctgagcccttacaacctctcgactctcgaggatcttaacacccgctggaagctgctccaagtggcagtggaggacagggtgagacagctgcatgaagctcatagagactttggaccagcctcccagcattttctctctactagcgtgcaaggtccgtgggaaagggccatctccccgaacaaggttccctactacattaaccatgagacgcagactacgtgttgggatcatccaaagatgaccgagctctaccaatcactcgccgacttgaacaatgtccgtttttctgcctacagaaccgcgatgaagctgcgcaggctgcagaaggccctgtgtctggatctccttagccttagcgcagcatgtgatgcacttgatcaacacaatcttaagcagaacgatcagccaatggatatccttcaaatcatcaattgtcttactaccatttatgaccgccttgaacaggaacataacaacctggtgaacgtgcccctttgtgtcgacatgtgccttaattggctccttaacgtgtacgatactggcagaaccgggcgcatccgggtgctgtcgtttaagaccggaatcatctcactttgtaaggcgcatttggaagataagtaccgatacctgttcaagcaagtggcctcctcaaccggattttgcgatcaaaggagactgggacttctgctgcacgattctattcaaattccccgccaattgggcgaggtcgcatcttttggcggctcgaatatcgagcctagcgtcaggtcgtgtttccaatttgcgaataacaagccggaaattgaagcagcactgtttttggactggatgcgtcttgagccccaaagcatggtgtggctccctgtgcttcaccgggtggccgcagcagagactgcgaaacaccaggccaaatgcaacatttgtaaggaatgtccaataatcggattccgttacagatccctcaaacatttcaattatgatatttgccaatcatgttttttctcgggacgggtggcgaagggacataagatgcactacccaatggtggagtattgtacccccactaccagcggggaagatgtgcgggactttgcaaaggtgctgaagaacaagttccggaccaagaggtacttcgcgaagcatcctagaatgggataccttccggtgcagaccgtgcttgagggtgataacatggaaactgacaccatg

SEQ ID NO: 142862 - DNA, 3432 bp, Artificial Sequence
  derived and/or modified sequence
atgttatggtgggaggaagtagaagactgctatgagcgcgaggatgtgcaaaagaaaacctttacaaagtgggtgaatgcacagttttcaaagttcggtaaacagcacatcgagaacctgttcagcgacttacaggatgggcgtagactgctggatctgcttgagggactcacaggacagaaactgcctaaagaaaaagggtcaaccagggtgcacgctctaaataacgttaacaaggcgttgagggtgctgcagaataacaacgtggacctagtcaatatcggctccacagacattgttgacggtaatcacaagctaacactgggcttgatttggaacattatcttgcactggcaggtgaagaacgttatgaaaaatatcatggccggccttcagcaaacaaattcggaaaagatattgctgagttgggtccggcagtccacccggaactacccacaggtgaacgttataaactttaccacctcatggagtgacggacttgcattgaacgccctgattcattcccacagacccgatctgtttgattggaatagtgttgtttgccagcagtcggctacgcagagattagaacacgcgtttaatatcgcacgataccagctgggtatagaaaagcttctggatcccgaggacgtggatacaacttacccagacaagaagagcatcctcatgtatataacctccctcttccaagtgctgccacagcaagtgagtatcgaggctatccaggaggtggaaatgctcccaagaccgccaaaggttaccaaggaggagcatttccagttgcaccatcaaatgcattatagccagcagattaccgtgtcattggcccaggggtacgagcgaacatctagccctaagccacgattcaaaagctatgcatatactcaggccgcttacgtcacaacttccgaccccacccgatcacctttcccatctcagcacttagaagcccctgaggacaaatctttcgggtcatcgctcatggaatccgaggtgaacctggaccggtaccaaacggccttggaggaagttctatcctggctcctatcagctgaggatactctccaggctcagggcgagatatctaatgatgtcgaagtcgtcaaagatcagttccacactcatgaagggtacatgatggatctgactgcacatcagggacgggtcggtaacatcctgcagctcggatccaaattgattggcactggaaagctctctgaagacgaagagactgaggttcaggagcagatgaatttgctgaatagtaggtgggagtgcctcagggtagctagtatggagaagcagtccaacctgcaccgtgagatctcctatgtgccttctacatacctcaccgagattacacatgtgagccaggcccttctagaggtggaacaattgctgaacgctcctgacctgtgtgcaaaagattttgaagacctctttaagcaggaggaatcccttaaaaacatcaaggatagcctccagcagtctagtggccgaattgatatcatccactccaaaaaaacagctgccctgcagagcgccacgccggtggagagagtgaagctccaggaggccctgtcacagctggattttcaatgggagaaggtgaacaagatgtacaaagatcgtcagggtcggttcgaccgctccgtcgagaagtggaggcggtttcattacgatatcaagatattcaatcagtggcttacagaggcagagcagtttctgagaaaaactcagatcccagagaactgggaacacgctaagtacaaatggtacttgaaagagttgcaggatggaattggccagagacagacagttgttcggaccctgaacgcaaccggggaagagattatccagcaatcctctaaaactgatgcttctatactgcaggagaaacttgggtcactgaacttgcggtggcaagaggtgtgcaagcagctgagcgatcggaagaaaaggttggaggaaactctggaaaggttgcaggaacttcaagaggccaccgatgagctcgatttgaagctaagacaggcagaggtaatcaagggctcttggcagcccgtgggagatctcctgatcgattcactgcaagaccatttagagaaggtgaaagccctcagaggcgagatcgcacccctaaaggagaatgtttcccatgtgaacgatctggctcggcagcttacgactctaggaatccaactatccccttataacctctctaccttggaggacctgaatacaaggtggaaactgctgcaggttgccgtggaagatcgcgtgaggcagttgcacgaggcgcaccgtgatttcggcccggcttcccagcactttctcagcaccagtgtgcaaggcccgtgggagagagcaatttccccaaataaggtaccctattacataaaccatgagacacagactacctgctgggaccatcctaagatgaccgagttgtaccaaagcctggcggacctcaacaatgtcaggttctctgcttaccggaccgcgatgaaactacgtagactgcagaaggcgttgtgtttagacctgttgagtcttagtgctgcctgcgatgctcttgaccaacacaacctgaagcagaatgaccagcccatggatatccttcagatcattaactgtctgaccaccatttacgatcggctggaacaggagcacaacaacttagtgaacgtaccgctgtgtgttgacatgtgtctaaattggctgctgaatgtttacgacaccgggcggaccggtcgcattcgtgttttatctttcaaaaccgggataataagcctgtgtaaggcccatctggaagacaaatatagatacctgtttaaacaggtggcgagctccaccggcttttgtgaccagagacgactggggttgctactgcatgactccatccagatcccgcgccagttgggcgaagtcgcatccttcgggggctccaatatcgagccaagcgtcaggtcttgtttccagttcgctaacaataaaccagaaatagaggctgccctgtttctagactggatgaggctcgagcctcaaagcatggtgtggcttcccgtgttgcatagggtcgcagccgcagaaaccgccaagcaccaggccaagtgtaatatctgtaaggaatgcccaattatcggcttcaggtaccgaagcttgaagcactttaattatgacatctgccagagctgttttttttccggtagggtagctaaaggccataagatgcactatccaatggtggagtactgcacgccaacgacttcaggagaagacgtgcgcgacttcgccaaagttctcaagaataaatttaggactaaaagatatttcgctaagcaccctcgtatgggctacctacctgtgcagactgtgctggaaggtgacaacatggaaaccgatactatg

SEQ ID NO: 142863 - DNA, 3432 bp, Artificial Sequence
  derived and/or modified sequence
atgctttggtgggaagaagtggaagattgttacgaacgcgaggatgtccaaaagaaaaccttcaccaagtgggtcaacgcccaattttccaaattcggaaagcagcatatcgagaatctgttttcggaccttcaagatggccgccgcctcctcgatctgctcgaaggactgactgggcagaaacttcctaaggagaaaggatcaactcgcgtgcatgcgctcaacaacgtgaacaaggcactccgcgtgttgcagaacaacaacgtggatctggtgaacattgggtccaccgatatagtggatggtaaccacaagctcactctgggccttatttggaacattattcttcactggcaggtgaaaaatgtgatgaagaacatcatggcgggccttcaacagacgaactccgagaagattttgctctcctgggtccggcagtcgactagaaactacccccaagtgaacgtgataaactttactacctcctggagcgacggtctggccctgaacgcactgatccattcgcacaggccagatctgttcgattggaatagcgtcgtctgtcagcaatccgcaacccaacgcctggaacatgcatttaacatcgcaagataccaacttggcatcgagaaacttcttgatcccgaagatgtcgacacgacttaccctgataagaagtcaattcttatgtacatcacctccctcttccaagtgctgccacagcaagtgtccatcgaggcgattcaggaagtggaaatgcttccacgacctcctaaggttactaaggaagaacattttcaactgcaccatcaaatgcactacagccagcaaataactgtctcgcttgcccaaggttacgaacgaacctcgtctcctaaacctcgctttaagtcgtacgcatacactcaagcagcctacgtcactacctcggatccaaccagatcgccgttcccgtcacaacaccttgaagcaccagaagataagagcttcggttcgtcactcatggagtccgaggtcaacttggatcgctatcagaccgccctggaagaagtgctctcctggctgctgtccgcagaggatacccttcaggcccaaggagaaatctcgaacgacgtggaagtggtgaaggatcagtttcatactcacgaggggtacatgatggaccttactgcccaccagggcagagtcggtaacatccttcagctggggagcaagctcatcggcacgggtaagctctcggaggacgaggaaaccgaggtccaggaacagatgaatcttcttaactcaaggtgggaatgtcttagagtcgcgtcgatggagaagcaatccaaccttcaccgcgaaatttcatacgtgccttcgacttacttgactgaaattacccacgtgtcccaggcactgctggaggtagaacaactccttaatgcaccagatctttgtgccaaggactttgaggatcttttcaagcaagaagagtcactgaagaacattaaggatagtctccagcagagctccggcaggattgacattattcattcgaagaaaactgcagcattgcagtcggccacgccagtggaacgtgtgaagctgcaagaggcccttagccagctggactttcaatgggaaaaggtcaacaaaatgtacaaggatcgccaggggcgctttgaccgatctgtggaaaagtggcggaggttccattacgacattaagatctttaaccagtggctcaccgaggcggagcaatttctcagaaagacgcaaattcccgagaactgggagcatgcaaagtacaagtggtaccttaaggaactgcaggatggaatcggtcaacgccaaacggtggtgagaactctgaacgccacgggagaagagattatccaacagtcatccaaaacggacgcaagcattctccaggagaaactgggatcactcaacctgagatggcaagaagtgtgcaagcaattgtccgacagaaagaagagactggaagaaactcttgaaagactgcaagagcttcaagaggcaaccgatgaattggatctgaaacttaggcaagcagaagtcatcaagggttcatggcaacctgtcggagatctcctgattgattccctgcaagaccaccttgaaaaggtgaaggccctcagaggagaaatagcgccacttaaagaaaacgtctcccacgtcaacgatcttgcccgacagctcactaccctgggtattcagctcagcccttacaacctctcgacccttgaagatctgaacacccgttggaagctgctccaagtggctgtggaggaccgcgtgagacaactgcatgaagcacatagggattttggcccagcgagccagcatttcctctccacctcggtccagggtccttgggaacgcgcaatttcccctaacaaagtgccttactacatcaatcacgagacgcagaccacctgttgggatcacccaaagatgaccgagctctaccagtccctggctgaccttaacaacgtgcgtttttccgcgtaccgaactgccatgaaactccgtagacttcagaaagccctctgccttgatctgctctcactgtcggcagcgtgtgacgcgctcgaccaacataatctgaagcaaaacgatcaacctatggacatactgcagattatcaactgccttaccaccatttacgatcgattggaacaggagcacaataaccttgtcaacgtgcctctgtgcgtcgatatgtgtcttaattggctgcttaatgtctatgacaccggaaggactggaagaattcgcgtcctctcgtttaagactggaataatctcgctttgcaaggcgcacctcgaagataagtaccgttaccttttcaaacaggtcgcctcctccactggtttttgtgatcagcggagacttgggcttctgcttcatgattcgatacaaattccccgccaacttggcgaagtcgcgagcttcggagggtcaaatatcgaaccttccgtgcgatcgtgctttcaattcgccaacaacaagcctgaaattgaagcagcactgtttctcgattggatgaggttggagccacagtcgatggtgtggcttcctgttctgcatagagtggccgcagctgagacggcaaagcatcaggctaagtgcaacatttgtaaagagtgtcctatcattggtttcagatacagatccctcaaacatttcaattacgatatctgtcagagctgcttcttttcgggaagggtggccaagggacataagatgcactaccccatggtggaatactgcaccccaactacttcaggtgaggatgtgcgggattttgcgaaagtgcttaagaacaagtttagaaccaagcggtactttgcgaagcatccgaggatgggatacttgcctgtgcagaccgtgctggaaggagacaacatggagactgacaccatg

SEQ ID NO: 142864 - DNA, 3432 bp, Artificial Sequence
  derived and/or modified sequence
atgctgtggtgggaggaggtggaggattgttatgaaagagaagatgttcagaaaaagaccttcacgaaatgggtgaatgcacagttttcgaaatttggaaagcagcacatagagaacctgttttcggatctccaggacggaagaagattgcttgatctgctggagggcctgactggtcagaaacttcctaaggaaaagggaagcactcgtgtgcacgccttgaacaacgtgaacaaggcacttcgagttcttcaaaacaataatgtcgacctcgtcaatatcggatccactgacatcgtcgatggtaaccacaagctcacccttggacttatatggaacattatccttcattggcaagtgaaaaatgtgatgaaaaacattatggccggcctccaacaaacgaactccgaaaagatactgctctcttgggtgcgacagtctactagaaactatccccaggtgaatgtgattaactttaccactagctggtcggacggattggcactgaacgcacttatccactcacatagaccagacctgttcgattggaactccgtcgtctgtcagcaatcggccactcaacgccttgagcatgcattcaacattgcaagataccagcttggaatagagaaacttctggatcctgaagatgtcgacactacgtaccctgataagaagtccatccttatgtacatcacctcgctttttcaggtgctgccccagcaagtgtcgatcgaggcgatacaagaagtggaaatgctgccacggcctcctaaagtcactaaggaggaacatttccaactgcaccatcagatgcactacagccagcaaatcactgtgtcgcttgctcaaggttatgaacgtacctcgagcccaaaacctagattcaagtcttacgcatacactcaagccgcctacgtgaccacttccgatcctacccgttccccattcccatcccaacatcttgaagcgcctgaggataagagcttcgggtcatctttgatggaaagcgaggtcaatcttgacagataccagacggcacttgaagaggtgttgtcgtggctcctttcggctgaagatacgcttcaagctcaaggagagattagcaacgacgtggaggtggtgaaggatcagtttcatacccacgaagggtacatgatggatcttactgcccatcaaggtagagtcggaaatatcctccagctgggctcaaagctgataggaaccggtaaactttcggaagatgaggaaaccgaagtgcaggaacaaatgaatctgttgaactcacggtgggaatgtctccgggtggcgtctatggagaagcaatccaatcttcatagagagatttcctatgtgccaagcacttatcttaccgagattacccacgtgtcgcaagcgttgcttgaagtggagcagcttcttaacgcacctgacttgtgcgccaaggattttgaggatctgtttaagcaagaagagtcgcttaagaacataaaggatagcctccagcaatcttctggcaggatcgacataattcattccaaaaagaccgccgccctgcagtccgctaccccagtcgaacgcgtgaagctccaggaagcactgagccaacttgattttcaatgggagaaggtgaacaagatgtacaaggaccggcagggaagatttgaccgttcggtggaaaaatggcgacggttccattacgacataaagattttcaaccagtggctcactgaggcagagcagtttctgcgcaagacgcagatacccgagaattgggaacacgcaaagtacaagtggtacctcaaagaactgcaagatggcatcgggcagcgtcaaaccgtcgttaggacgcttaacgcgaccggtgaagaaatcattcaacaaagctccaaaaccgatgcatccatcctccaggaaaagctgggctcactgaatctgagatggcaggaggtgtgcaagcagttgtccgatcgtaagaagaggcttgaagaaaccctcgaacgacttcaggagcttcaggaggcaaccgatgaacttgacctgaagctccggcaagcagaggtgattaagggttcgtggcaaccggtgggtgaccttcttatcgattcactccaggatcatctcgagaaggtgaaggcactgaggggtgagattgcacctcttaaggaaaacgtctcccatgtcaacgatctcgccaggcagcttacgactttgggcattcaactctcgccttacaacctgtcgacccttgaagatctcaacacccgctggaagctgctgcaagtggctgtggaagatcgggtccgtcaactgcatgaagcacatagggatttcggtcccgcatcgcaacatttcttgtccacttcggtccaaggaccgtgggaaagagctatctccccaaacaaggtgccttactacattaatcatgaaacccaaaccacctgttgggaccacccgaaaatgaccgaactctaccagtccctggctgacttgaataatgtgcgatttagcgcgtaccgaaccgcaatgaagttgaggagacttcagaaggcactctgtctcgatcttctgtccctgtcggccgcttgcgacgcactggaccaacacaatcttaagcagaacgaccagccaatggatatcctgcagatcataaactgcctcaccactatctacgaccgactggaacaagagcacaataaccttgtgaacgtgcctctctgtgtagacatgtgtcttaattggctcctgaacgtctacgatactggacggaccggacgcattcgcgtgctttcgtttaagacgggcatcatttcgctgtgcaaagcccatctcgaagataagtaccgctacttgttcaagcaggttgcctcctccactggattctgtgatcagcggcgcctcgggctcctgctgcatgatagcattcaaatcccaagacaactgggggaggtggcttcatttggagggtcaaatatcgaaccttccgtgaggtcttgctttcaatttgcgaacaataaacccgagattgaggctgccctctttcttgattggatgcgccttgaacctcaatccatggtgtggctgcctgtgctccaccgtgtcgcagcagcagagactgcaaagcaccaagcaaagtgtaacatctgtaaggagtgtcccattataggatttaggtaccgttcgctgaaacactttaactacgatatctgccaatcgtgctttttctcggggagagtcgccaaaggacataagatgcactacccgatggtggaatactgtaccccaacgaccagcggggaagatgtgagggattttgctaaggtgctcaagaacaagttccgcaccaaaagatactttgcaaaacatcctagaatggggtaccttcccgtgcaaacggtgctggaaggtgacaacatggaaactgataccatg

SEQ ID NO: 142865 - DNA, 3432 bp, Artificial Sequence
  derived and/or modified sequence
atgttgtggtgggaggaagtggaagactgttacgagagggaagatgtacaaaagaaaacatttacgaagtgggtgaatgcccaatttagcaagtttgggaagcagcatattgaaaatctattctcagatttgcaagatggtcgacgcctgctagatctgctcgaaggccttacgggccagaagttaccaaaggagaaagggtcaactcgcgtgcatgccctaaataatgtgaacaaggcattaagagttcttcagaacaacaacgtggacttggtgaatatcggtagcactgatatcgttgacggtaatcataagttgactttggggctcatctggaatatcatcctccactggcaggttaagaacgttatgaagaacattatggccggcttgcaacagactaacagtgaaaagattttgttgagttgggtacgccagagcaccaggaactaccctcaggtcaatgtcatcaattttaccaccagctggtcagatggactagcgctcaacgcactaattcactcacatcgccccgacctatttgattggaattccgtcgtgtgccagcagtcggccacacaacgcctagagcacgcattcaatattgcccgttaccagcttgggatcgaaaagttactggacccagaagacgtggacactacataccccgacaaaaagtcaattttgatgtatatcacctctctctttcaggtgcttcctcaacaggtgtcaatagaggctatacaggaggtagaaatgctgcccagaccccccaaggttactaaggaagaacacttccagctccatcaccagatgcattatagccaacaaataaccgttagcttagcccagggctatgagcggacatcttcacctaagccacgattcaaatcctatgcatatactcaagcagcgtacgttactacatcggatcccacgcgatctcccttccctagtcagcatttggaggctcccgaggacaagtctttcggatcctctttgatggagagtgaagtcaatttagaccggtaccagacggccctcgaggaggtactttcttggcttctatctgccgaagacactcttcaggctcaaggcgagatttccaatgatgtagaagtggtcaaggaccagtttcacacccacgagggttacatgatggatctcactgcccatcaggggcgtgttggcaacattttacagctgggatcaaaattgatcggcacaggcaaactttcagaggacgaagaaaccgaggtgcaggagcagatgaaccttctgaactctaggtgggagtgcttgcgagttgcttccatggagaaacaatcgaacttgcaccgtgagattagttatgtgcctagcacttatctcaccgaaattacccacgtgagtcaggcacttctcgaagtcgagcaactcttgaacgccccggacctttgtgctaaggatttcgaggatctcttcaaacaagaggagtcccttaagaacatcaaagattcgctgcagcaatcctctggtcggatcgatattatccactctaaaaagaccgctgccctccagagtgccacgcccgtggaacgtgttaaactgcaggaggctctatcacaactcgatttccagtgggaaaaggtcaacaaaatgtataaagaccgacaggggcggtttgacagatccgtggagaaatggcgccgctttcattatgacatcaagatattcaatcagtggttaactgaagctgaacagtttcttagaaaaacccaaattcctgagaattgggaacatgctaagtacaagtggtacctaaaagagttacaggacggtataggccaacggcaaaccgtggtccgcacactgaatgcaacgggcgaagaaataatccaacaatcatcaaagacggacgctagcatcttacaggagaaactcggctcccttaacctacggtggcaggaggtgtgcaaacagctttccgatcgcaagaagcgactcgaggagactttggagcggttgcaggaacttcaagaggccacagatgagctcgaccttaagctccggcaagctgaggtaattaagggatcatggcagccggtcggggatctcctcatagattccctccaggaccatttggaaaaggttaaagccctgaggggcgaaatagctcccctcaaagagaatgtcagccatgtgaatgacctcgctcggcagctaactactctcggcatccaactatccccctacaacctttctaccctggaagatcttaacacccgttggaaattgctgcaagtggccgttgaagatcgagtccgccagcttcatgaggcacatagagacttcggcccagcatcacaacatttcctgtctacttcggttcaggggccgtgggagcgggcgatctctcccaataaggtgccttactatattaaccacgaaacacaaactacatgttgggaccatcctaaaatgactgaactgtaccaaagcttggcagatctgaacaatgtccgtttttctgcctaccgcaccgccatgaaactacggaggttgcagaaggccctttgcttggatctcctgtcgctctcagccgcatgtgacgctcttgaccaacacaatctaaaacagaatgatcagccaatggacattctccaaatcataaattgccttactactatctacgatcggttggaacaggaacataacaacctagtaaacgtacccctgtgtgtcgatatgtgcttgaactggctcctaaatgtttatgatacaggcagaactgggcgcattcgtgtgctttccttcaagaccggcattatcagtttgtgtaaggcccatttagaggacaaatatcgatatctatttaagcaggtcgcctcctctacaggtttctgcgaccagaggcggcttggactcttgctgcatgattctattcaaatacctcgccagctaggagaggtagcctcgttcggcggttctaacatcgagccctccgtgcgttcctgtttccagttcgccaataacaaaccagagattgaggcagctctcttcctggattggatgcgcctcgaaccacagtcgatggtgtggctacccgtgctccatcgtgttgcggctgctgagacggccaaacaccaagccaagtgcaacatttgcaaggagtgtccgattataggtttccggtataggtctctgaaacactttaactacgacatctgccagtcttgttttttcagtggtagggtcgccaaaggccataagatgcattaccctatggtggagtattgtaccccaacgactagtggtgaagacgtgagggacttcgcaaaggtcttgaaaaataagtttcgcacgaagcgttatttcgccaagcatccccggatgggatacctcccggtccagaccgtcctcgagggtgataatatggagaccgatactatg

SEQ ID NO: 142866 - DNA, 3432 bp, Artificial Sequence
  derived and/or modified sequence
atgctctggtgggaggaggtggaagattgttacgaacgtgaggatgtccagaaaaaaacattcaccaagtgggtgaacgcacagtttagcaagttcggaaaacaacacattgagaatctcttctccgatctccaggatgggcggaggctgttggacctcctggaaggactgacaggacagaagttaccaaaagaaaaaggatcgaccagggtacacgcccttaataacgtgaacaaggccctccgcgtcctccaaaataacaatgtcgacttggtgaacataggatcaactgatatcgtggacgggaatcataagctaaccttgggccttatatggaatatcatcttgcattggcaggtaaaaaacgtgatgaagaatatcatggcaggcctccagcagactaactctgagaagatcttgctgagctgggtcagacagtcaaccaggaattatccccaagtcaacgttatcaacttcactaccagctggtctgatggattggccttaaatgcattgattcactcacataggccagatctgtttgattggaactccgtagtatgccaacagtctgccacccagagactagagcatgccttcaatatcgccagataccagctcggtattgagaaactgcttgacccggaagatgtagacaccacatatcccgacaagaaatctattctgatgtacataacatcgctgttccaggtgctgccccagcaggtatctattgaggccatccaagaggtagaaatgttgcccaggcctcctaaggtgactaaggaggagcattttcagttgcatcaccagatgcactacagccagcagatcaccgtgagtctggcccagggctatgagaggacatcatcacccaagccaagatttaagtcctacgcgtacacccaggcggcctacgtaaccaccagcgatcccactcggagtccttttccaagccagcatctagaggcccctgaggacaaaagcttcggcagttcactgatggaaagcgaagtcaatcttgatagatatcagactgcacttgaggaggtgttgagctggctactttctgctgaggacacgcttcaggcgcaaggagagatttctaacgatgtagaagtagtcaaagatcagttccatacccatgagggctatatgatggacttgaccgctcatcaagggcgggtgggtaacatacttcagctggggtctaagttgatcggaaccggaaagttgtcggaggacgaggaaaccgaagtgcaggagcagatgaatctcctgaacagcagatgggaatgtctgcgcgtggcatcgatggagaaacagagcaatctacaccgtgagattagctatgtgcccagcacctatctgacagagatcacacatgtgtcccaggccctgttggaggtggaacagctgctgaatgctcctgatttgtgtgctaaggatttcgaagacctgtttaagcaggaggagagcctcaaaaacatcaaggacagtcttcagcagagcagcggccgaatcgatatcatccactccaaaaagacagcagccttgcaaagcgctactccggttgagcgcgtgaaactgcaggaggccttgagccagttggacttccagtgggaaaaagtgaacaaaatgtataaagaccgacaaggacgatttgacaggagcgtcgaaaagtggaggcgatttcattatgatattaagatttttaatcaatggttgacagaggctgagcaattcctgcggaaaacacaaattcccgagaattgggagcacgctaagtacaagtggtatctgaaagagttacaggacggcataggacaacgccagacagttgttaggacgttgaacgctacaggggaggagatcatacagcagagctctaagactgatgcttccatcctgcaggagaagcttggaagtctcaatctgaggtggcaggaggtgtgcaaacagctttcagacagaaagaaacgactcgaggagacactggagagactgcaggaattacaggaggcaaccgatgaactggatctgaaacttaggcaggccgaggttattaagggaagctggcagccagtgggggacctcttgatcgattctctacaggatcacttagaaaaggtaaaagctctcaggggcgagattgccccattgaaagagaacgtgtcccatgtgaatgacttggccaggcagctgactactttaggcattcagctctcaccctataatctatctacactagaggacctgaacactcggtggaaactgctgcaggtcgcagttgaagacagagtgcgccagctgcatgaagcccacagagactttgggccagcttctcagcactttttgtcaacatcggtccagggaccctgggaaagggctattagcccaaataaagtcccgtattatatcaaccatgaaacccaaaccacgtgttgggatcatcccaaaatgacggagttgtaccaatccctggcagacttaaataatgtccggttcagtgcataccggacagccatgaaactgcgtcggctccagaaagcactgtgtctcgatctcctttcactgagtgcagcatgcgacgccctggaccaacacaatcttaagcagaacgaccagcccatggatatcctgcagataattaattgtttaaccaccatctacgatcggctcgaacaggaacacaacaatttggtgaacgtacccctgtgcgtggacatgtgtcttaactggttgcttaacgtttatgacactggcagaacaggcaggattcgcgtgttgagcttcaaaaccgggatcatctctttgtgcaaggcccatttggaagacaaatacagatacttgttcaaacaagtggcctccagcacgggtttttgtgatcagcgcagactgggcctactgctgcacgatagcattcagattcctagacagctaggcgaagttgcttccttcggaggaagcaatatagaaccaagcgttcgatcctgtttccagttcgctaataataagcctgagatcgaggctgccctatttctggactggatgcgacttgagccccaatcaatggtgtggctgccggtgctgcacagagtggctgccgctgagacggcaaaacaccaggcgaaatgcaacatctgcaaggagtgtcctattattggcttcaggtacaggtctttgaaacacttcaattatgatatctgtcaatcttgtttttttagtggaagggtggcaaaaggacacaaaatgcattacccaatggtagagtactgcaccccaacaaccagcggggaggacgtacgcgattttgccaaagtgctcaaaaataagtttcggaccaagcgttattttgccaagcatccacgcatgggctatctccctgtccagactgtcttagaaggcgataatatggaaacagatactatg

SEQ ID NO: 142867 - DNA, 3432 bp, Artificial Sequence
  derived and/or modified sequence
atgctatggtgggaggaagtcgaagattgttatgagagggaagacgtccagaagaagaccttcactaaatgggtaaatgcccagttcagtaaatttgggaagcagcacattgaaaatctgttttccgatctccaagacggacgtagactgctggatttgctggagggccttacggggcaaaaactcccgaaggagaaagggtccacacgcgtgcatgccctgaacaacgttaataaggcattaagggtgttgcagaataacaacgtcgaccttgtgaacataggtagcacggacattgtcgacgggaaccacaagctgacactcggtttaatctggaatattattttgcactggcaggtgaagaacgtgatgaaaaatatcatggccggccttcaacagaccaatagtgagaagatcctgttgagctgggtgcggcagtccacccgcaattatcctcaagtgaacgtgattaactttactacaagctggagcgacgggctggctcttaatgctctgatccacagtcacagacccgatctgttcgactggaactccgtagtatgccagcaaagtgctacgcagagactggaacacgcctttaatatcgcacgctatcagcttggtatcgagaagctgctggaccctgaggatgtggacacaacttacccagacaaaaagagcatcctgatgtacatcacaagcctgtttcaagtgctaccccagcaagtatccatcgaagctattcaagaagtggagatgttaccgagacctccaaaggtcacgaaggaggagcattttcagctccaccatcagatgcactactcgcagcaaattacggtgtcccttgcgcagggttacgagcgcacaagctcgccgaagccgcggttcaagtcttatgcctatacacaggcagcatacgttaccaccagtgacccgactcggtccccttttccaagccagcatttggaggcaccagaggataagagttttggaagttcgcttatggagtctgaagtgaacctcgaccgatatcagactgctctggaagaggttctaagctggctattatcggctgaggacaccctccaggcccagggtgaaatatcaaacgacgtggaagtcgtgaaggatcaattccacacccacgagggatacatgatggacctcacagcacaccagggcagggtaggcaatatactacagctcggttccaaactcatcggcaccgggaaactgagcgaagatgaggagactgaggtccaggagcagatgaaccttcttaattcgagatgggagtgccttagagtggcatctatggaaaaacaatctaacttgcaccgcgagatttcctacgtaccatccacttacctcacggaaatcacccatgtaagccaagcgcttctcgaggtggagcagttactgaacgcccctgacctctgtgccaaggacttcgaggacctgtttaaacaggaggagagtctcaagaatattaaggacagcctgcaacagagctccggccggattgacatcatacactcaaagaaaactgccgcattacagtccgcgacacctgttgaacgcgtcaaactccaggaggcgctgtcccagctggacttccagtgggagaaggtcaataaaatgtataaggacagacagggccggtttgaccggtcagtcgaaaaatggcgccgctttcactacgacattaaaatctttaatcaatggctgaccgaggcagagcagttcctccgcaaaacgcagatacctgaaaattgggagcatgccaaatacaagtggtaccttaaggagttgcaagatggcatcggccaacggcaaacagtcgtgcgaactctgaacgcaactggagaagaaattattcagcagagctccaagacagatgcgtccatccttcaggaaaagttgggaagcctgaatctgaggtggcaggaggtgtgcaaacagctttcagataggaaaaagcgtctagaagagacactggaacgcttgcaagaactgcaggaagctactgacgaactagatctaaagttgagacaagcggaagttattaagggaagctggcagccggtcggagatttactaatcgattctctgcaggaccacctggagaaggttaaagccctgagaggagaaatcgccccactgaaggaaaatgtgtcgcatgtgaacgacctggccaggcaactaacgacactgggcatccagctctccccttataacctttctaccctcgaggacctcaataccaggtggaagttgcttcaggtggctgtcgaggaccgcgtgcggcagctccatgaggcgcaccgggatttcgggcccgcttcgcaacactttctaagcaccagcgttcagggaccatgggagagggccatcagccctaataaggtgccctactatataaatcacgagactcaaaccacctgctgggaccaccccaaaatgacggagttgtatcaaagcctggctgacttgaataatgtccgcttcagcgcgtaccgcacagccatgaagctaagacgcctccagaaggccctttgcttggacctgttatccctgtcggccgcttgtgatgcactagatcagcacaatctaaaacagaacgatcaaccaatggatatactacagattatcaactgcctgacgactatctatgatagactagaacaggaacataacaatttggtcaatgtacccctgtgtgtcgatatgtgtctcaactggttgttgaatgtctatgataccgggaggacgggccgcatccgcgtgctgagctttaagactggtatcatttccctgtgcaaggcccatctggaggacaaatatcggtatctgtttaagcaggtcgcttccagtactggcttctgcgatcagcgcagattaggcctgctactgcacgacagcatccagatacccagacagctgggcgaagtcgcttccttcggagggtctaacattgagccatccgtgcgctcttgtttccagttcgcaaacaacaagcctgaaatcgaagctgccctcttcttagattggatgaggctcgaaccccaatcgatggtgtggctccctgtactgcacagggtcgccgctgctgagactgctaagcaccaggcaaaatgcaatatctgcaaggagtgtcctataatcggtttcaggtacagatccctgaagcactttaactatgacatttgccagagttgtttctttagcggtcgagttgccaagggacacaaaatgcattatcctatggtggagtactgtactcccaccacctctggagaagatgtgcgggattttgccaaagttttaaaaaacaagtttcgtacaaagagatactttgcaaagcaccctcgcatggggtacctaccggtccaaaccgtgttggagggcgacaatatggaaaccgacacaatg

SEQ ID NO: 142868 - DNA, 3432 bp, Artificial Sequence
  derived and/or modified sequence
atgctgtggtgggaagaggtggaggattgctacgagcgcgaggacgtgcaaaagaaaaccttcactaagtgggtgaacgcgcaattctcgaagttcggcaagcaacacatcgaaaacctgttctcagaccttcaagatggacggcggctcctggacctgttggagggcctcactggtcaaaagctcccaaaggaaaaaggatcgactcgagtgcacgctctgaacaacgtgaacaaggcgcttcgcgtgctccagaataacaatgtggatctggtgaacatcggatcgaccgatatcgtggacggcaaccataaactgaccctgggactcatttggaatatcatcctgcactggcaagtgaaaaacgtcatgaaaaacatcatggccgggctccaacaaaccaactccgagaagatcttgctgtcgtgggtgcggcagtcaactagaaactacccgcaggtcaacgtgatcaatttcaccacctcctggtccgacggactcgcgctgaatgcactgatccattcgcataggccggatctcttcgactggaactcggtggtgtgtcagcagagcgccactcagagactggaacatgcattcaacattgctcgctaccaactgggcatcgagaaattgctggacccggaggacgtggacactacctacccagacaagaaatcaatcctgatgtacattacttcactcttccaggtgctgccccaacaggtgtccatcgaggctatccaggaagttgagatgctcccgcggccaccaaaagtgaccaaggaagagcatttccagcttcaccaccaaatgcactacagccagcagatcactgtgtcactcgcccaaggctacgagcgtacttcatcgcctaaacccaggttcaagtcttacgcttacacccaagccgcgtacgtgaccacctccgacccgactaggagccccttcccatctcagcacctggaggccccggaggataagtcattcggctcgtccctcatggaaagcgaagtcaacttggaccgctaccagactgcgttggaggaagtgctgagctggctgctgtccgcagaggacaccctgcaagcccagggggagatatccaacgacgtggaagtggtgaaggatcagttccacactcacgagggatacatgatggacctgaccgcgcaccaaggcagggtgggaaacatcttgcagctgggctcgaagctgatcgggactggaaagttgtcagaagatgaggaaaccgaagtgcaagagcaaatgaacctcctgaacagccggtgggaatgtctgcgcgtggccagcatggagaagcagtcgaacctgcaccgcgaaatctcatacgtcccttcgacctacctgaccgaaatcacccatgtgtcgcaggcactcttggaggtggaacaactgctgaatgcaccagatctgtgtgccaaggatttcgaggacttgttcaagcaggaggaaagcctgaagaatatcaaggattcgctgcagcaatcgtcgggaaggatcgacatcattcacagcaaaaagaccgccgccctgcagagtgccaccccagtcgaaagagtaaagctgcaggaagccttgagccagctcgatttccaatgggagaaggtcaacaagatgtacaaggaccggcagggacgcttcgatagatcggttgagaagtggagaagattccactacgatatcaagatattcaaccagtggctgaccgaagcggaacagttcctgcgcaagacccagattccggaaaactgggaacatgcgaagtacaagtggtaccttaaagaacttcaggacggaatcgggcagcggcagactgtcgtgcggactctcaacgcgacgggggaagagatcattcagcagtccagcaagactgacgcgtccatcctccaggaaaaactgggatcgctgaacctgaggtggcaagaggtgtgcaaacaactttcagacagaaaaaagcgcctcgaagaaaccctggaacgcctgcaggaactgcaggaggccacggatgagctcgacctgaagctgcggcaggccgaagtgatcaaagggtcctggcagccggtcggggaccttctgatcgactccctgcaggaccacctggaaaaggtgaaggccctgagaggagagattgcccctctgaaggaaaacgtgagccacgtcaatgacctggctcgccaactgaccactctgggtattcagctgagcccgtacaacctctccaccctggaagatctgaacaccagatggaagctgctgcaagtggcggtcgaagatcgcgtgcgccaactgcacgaggcccaccgggacttcggacccgcctcccaacacttcctgtcaacttcggtgcagggaccttgggagcgcgcaatctcaccgaacaaggtgccgtactacatcaaccacgaaactcaaaccacttgctgggaccacccaaagatgaccgagctgtaccagtcgcttgccgatctgaacaatgtgagattctcggcctatcggactgctatgaaactgcgcagactgcaaaaggccctgtgcctggaccttctgtcactgagcgcggcatgtgacgcgcttgatcaacacaacttgaagcaaaacgaccaaccaatggacatcttgcagatcatcaattgcctgactacgatctacgaccgcctggaacaggaacacaacaacctggtcaatgttcctctgtgtgtggacatgtgccttaattggctcctgaatgtctacgacactgggagaactggtcgcatccgcgtgctgtcgtttaagaccggcatcatcagcctgtgcaaagcacacctggaggacaagtacagatacctctttaagcaagtcgcctcgtcaactggtttctgcgaccagcggcggctgggcctgctgctgcacgatagcattcagatcccgcgccagctgggcgaggtggcgtctttcggcggatccaacatcgaaccgtccgtgcggtcctgttttcaattcgcaaataacaagcccgaaatcgaagccgcgctcttcctcgactggatgaggctggagcctcaatccatggtgtggctccctgtcctgcatagagtggctgccgccgaaaccgcgaagcaccaggccaaatgcaatatctgtaaagaatgcccaatcatcggattccggtaccgcagccttaagcatttcaactatgacatctgccagagctgcttcttctccggccgggtggccaaaggacataagatgcactacccgatggtcgagtactgcactccgaccacttccggggaggacgtccgcgactttgctaaggtgctcaagaataagttcagaaccaagaggtacttcgcgaagcatcctcgcatgggatacctgcccgtgcagaccgtgcttgaaggagataacatggagactgataccatg

SEQ ID NO: 142869 - DNA, 3432 bp, Artificial Sequence
  derived and/or modified sequence
atgctgtggtgggaagaggtggaggactgttatgagagagaggatgttcagaaaaaaacatttacgaagtgggttaacgcgcaatttagcaagtttggcaagcaacacattgagaacctgttcagcgatttgcaggacggcaggaggttgctggacctcctggaaggtttgacgggtcagaagcttcctaaagagaagggctcaaccagggttcacgcgctcaataacgtaaacaaggctctgagggtattgcagaacaataatgtggacctggtgaatatcggcagtacagacattgtcgatggtaatcacaagctgaccctgggtttgatctggaacatcattctccactggcaggtcaaaaacgtgatgaaaaacattatggccggtctccaacaaaccaactccgaaaagattcttttgtcttgggttcgccagagcaccagaaactatccgcaggtgaatgtcatcaattttacgacctcatggagtgatggcctggccttgaatgcgcttatccatagccacaggcccgacctgttcgattggaacagtgtagtctgccaacagagcgctacccagagactcgagcacgcattcaatatcgcccgctatcagctgggtatcgaaaagctgcttgatccagaggatgtagacactacataccctgacaagaagagcatattgatgtatattactagtctctttcaggtactcccacagcaagtgtctatcgaggccatccaagaggtggagatgctcccaagaccaccaaaggtcacaaaggaggaacactttcaactgcaccaccagatgcactatagccagcaaatcacggtgtctttggcccagggctacgaaaggacctccagcccgaagcctcgcttcaaaagctacgcgtatacacaggctgcttatgtgaccacatctgacccgactcgctccccctttcccagccaacacttggaagctcccgaggataagagcttcggctctagcctcatggagtccgaggtcaatctggataggtaccaaacagcactggaggaagtcctctcctggctcctgtccgcagaggatacactgcaggcccagggagagattagcaatgatgtcgaggtggtgaaagaccagttccatacacatgagggatatatgatggatctgacagcacatcaaggtcgcgtgggaaacattttgcagcttggatctaagctgattggcacgggcaagctgagcgaagatgaggagaccgaagtgcaggagcaaatgaatcttctgaatagtcgctgggaatgcctgagggtcgcctcaatggagaaacagtccaacctgcatagagagatctcctatgttccctctacatatctgactgagataactcatgtttcacaagccttgcttgaggtcgagcagctgctcaatgcgccagacctctgtgcgaaagatttcgaagaccttttcaagcaggaagagtcactgaaaaatatcaaggattcactccagcagtccagtggtaggattgacatcatccactctaagaagaccgccgcgctccaatccgccacccctgttgagcgcgtaaagttgcaggaggctctttctcaactggactttcaatgggaaaaagtcaataaaatgtataaggacagacaaggtaggtttgacaggtcagttgagaagtggagaagatttcactatgacattaagatcttcaatcaatggctgacggaggccgagcaattcctgcgcaagactcagataccagagaactgggagcacgctaaatataaatggtacctcaaagagttgcaagacggcatcggacagaggcagacagtggtgaggactttgaatgcaactggagaagaaatcatccagcagagctccaaaactgatgccagtatccttcaagaaaagctgggaagcctcaacctgcgctggcaggaagtttgtaaacaattgagcgataggaagaagaggctggaggagacgctggaaaggttgcaggaactgcaggaagctaccgacgagctggacctgaagcttagacaggccgaggtcatcaagggttcttggcaaccggtgggcgatctgctgattgattccttgcaggatcacctggagaaggtaaaggccttgagaggcgagatcgccccattgaaggaaaacgtgagtcacgtgaacgacctcgccagacaactcaccacactgggtatccagctgtcaccttataacctgtcaaccctggaggatttgaacactaggtggaaactcctccaggtagcagttgaggatagggtgaggcagctgcatgaagcacacagggatttcggtccggcgagccagcattttcttagcacatcagtacagggaccgtgggaacgcgctatctccccaaacaaggtcccatactacattaaccatgagacccaaactacatgctgggaccacccaaaaatgaccgagttgtaccaatctctggctgatcttaacaacgtgaggttctccgcctacagaaccgccatgaaattgaggaggctccaaaaggctctgtgtctggatctcctgagtcttagcgcggcttgtgacgccctggaccaacataatctgaagcagaacgatcagcctatggacatactgcagattatcaattgcctcactactatctatgaccgcctggagcaagagcacaacaatctggtcaatgtccccctgtgtgtcgatatgtgcttgaactggctgctcaatgtgtacgatacaggcagaactggtaggattcgcgtgctctcctttaagaccggcatcatatctctctgtaaggctcacctggaagacaagtacagatacctctttaagcaagtggcctctagcacaggtttttgcgaccagaggaggctcggtctgctcctccatgactctatccagatccccagacaactgggcgaggtggcaagtttcggtggatcaaacattgagcctagcgtgaggtcctgctttcagttcgctaacaacaagcctgagatagaggctgcactgttcctggattggatgcgcctcgagccccaatccatggtgtggctccctgttctgcacagggtggccgctgctgaaaccgctaagcaccaggccaaatgtaacatttgtaaggagtgcccaataattggctttagatataggtctctgaagcacttcaactacgacatctgccagagctgtttcttttctggtagagtagccaagggccataagatgcattaccccatggtagagtactgtacccctacaacttcaggtgaagacgttagggatttcgccaaagttctgaagaataagttcaggaccaaacgctacttcgccaagcatcctcgcatgggttacctccccgttcagacagttctggagggagataacatggagactgacactatg

SEQ ID NO: 142870 - DNA, 3432 bp, Artificial Sequence
  derived and/or modified sequence
atgttatggtgggaagaggtcgaagactgctatgagcgtgaggacgtccaaaagaaaacttttaccaagtgggtcaatgctcagttctcgaaattcggcaaacagcatatcgagaatctgttctccgacttgcaggatggtcggcgcctgcttgacttattggagggccttaccggccaaaaattgccgaaagagaaaggtagcacccgcgtgcacgcgttaaataacgtaaacaaggcgctgcgggtccttcaaaacaataatgtggatctggttaacatcggctctaccgacatcgtagatggtaatcataagctgacgctgggtttgatttggaacattatcctgcactggcaagtgaagaacgtaatgaagaatatcatggcgggtctgcagcaaacaaatagcgaaaaaattctgctgagctgggttcgccagtcaacccggaattatccgcaggtcaatgtgattaattttacaacatcctggtccgacggactggccctcaatgcactgatccactcccacaggccagacttattcgactggaattccgttgtttgtcaacagtcagctacccaacgtctggaacatgcttttaacatcgcccgctaccagctgggtatcgagaagctgctcgaccctgaggatgtggacactacttaccctgacaagaagtcaattctgatgtatattacttcgctcttccaagttttgccacagcaagtttccatcgaggccatccaggaggtggagatgctccctcgccctcctaaagtgactaaggaagaacacttccagctacaccatcagatgcattatagtcaacagataacggtctccctggcgcaaggttatgagcgtacatccagccctaagccgcgttttaaatcttacgcatacacccaggctgcgtacgtcacgacttccgatcctacgcgctcaccattcccaagccaacatctagaggcgccggaggacaagtctttcgggagctccctgatggagagcgaggtcaacctggatcgttatcaaaccgcccttgaagaagttctgagctggttgctgtcagccgaggacacgcttcaagcacagggggagatatccaacgatgttgaggtcgtgaaagatcaattccacacacatgaaggctatatgatggacctgaccgcacatcagggacgtgtaggtaacatcctgcagctgggttcaaagttgatcggtaccggcaaattgtctgaagacgaggaaactgaagtgcaggaacagatgaacctgctgaatagcaggtgggagtgcctacgcgtggcgagtatggagaaacagagcaatttgcaccgcgaaatttcctacgtgcctagcacctatctcactgagattactcacgtgtctcaagcgctgcttgaggtggagcaactgttgaatgcgccggatctgtgtgcaaaggattttgaggatctcttcaagcaagaggagagccttaagaatattaaggacagcctgcaacagagcagcggtcgcatcgatatcatccactcaaaaaaaaccgccgctcttcagtctgcgaccccagtcgagcgcgtgaagctgcaggaagcgctgtcccagctcgacttccagtgggagaaggtgaataaaatgtacaaagatcgccaggggcgttttgatcgcagcgtcgagaagtggcgcagattccactatgatattaagatttttaaccaatggctcacagaagccgagcagttcttgcgcaaaactcagatcccggagaactgggaacatgcgaaatacaagtggtatctcaaagagttgcaggatggtataggccagcgccagactgttgttcgaaccctgaacgcgacgggggaggagattattcaacaatcaagcaagactgatgccagcatcttgcaggagaaactgggtagtttgaacctgcgttggcaggaggtttgcaaacaattaagcgacaggaaaaaaagactcgaggagactctcgaacgattgcaggagctgcaggaggcaacagacgagttggatttgaagctgcggcaggccgaagtgattaaaggtagctggcaaccggtgggtgatctgttgatcgattcccttcaagatcacttggaaaaggtcaaggcgctccgtggcgaaatcgcaccgctaaaagagaatgtcagccacgtgaatgacctggctcgccagttaactaccttgggtatccagctgagcccctataatctcagcacgcttgaagatctgaatactcgctggaagctcttgcaggtggccgttgaagaccgcgtcaggcagttacacgaggcgcatcgcgattttggcccagccagccaacattttctgagcactagtgtgcagggcccatgggagagggcgatcagcccgaataaggttccatattatatcaatcacgagacccagaccacctgttgggatcaccctaagatgacagaactttatcagtctctcgctgatttgaacaatgtacggttcagcgcctaccgcacggcaatgaagctgcgccgcctgcaaaaagctttgtgcctcgatctgttgagcctgagcgcagcgtgcgacgcactggaccaacacaacttgaaacagaatgatcaaccaatggatatcctgcagattataaattgcctgactacaatctacgaccgcctcgagcaggaacacaataacctcgtcaacgtgccgctgtgtgtggatatgtgcctgaattggctacttaacgtttacgacacggggagaactggccgcatccgtgtgctatcatttaaaactggcatcatctccctgtgtaaagcgcacttggaagataaataccgctatctgttcaagcaggtcgcttctagcactggtttctgtgaccaacggcgcctagggcttctgctgcacgattctattcagatcccacgccaactgggcgaagtggcgtctttcggcggttctaatatagaaccttctgtgcgatcctgtttccaattcgccaacaacaaacctgagattgaagctgcattgttcctggattggatgcgcctggagccacagtccatggtttggctgcctgtgttgcaccgtgtggccgccgctgaaacagctaaacatcaggcgaaatgcaatatttgcaaagaatgcccgatcatcggattccgctatcgctctttgaaacacttcaactacgacatatgccagtcctgctttttttcgggacgcgtggctaagggacataaaatgcactaccctatggtggaatactgcacacctacgacctctggtgaagacgtccgcgacttcgccaaagtgttaaagaataaattcaggaccaagcgctactttgcaaagcatccgaggatgggttatctcccggttcaaactgtgctggaaggtgacaatatggagaccgacaccatg

SEQ ID NO: 142871 - DNA, 3432 bp, Artificial Sequence
  derived and/or modified sequence
atgttgtggtgggaagaggtggaggattgttacgagagggaagatgtccagaaaaagacctttactaaatgggtcaacgcacaattttccaagtttggcaagcaacacatcgagaaccttttttcggatctgcaagatggacggaggctcttggatctcctcgagggtctgaccggacaaaagctgccaaaggaaaagggatccactagggtgcacgctctgaacaacgtgaataaagcgctgagagtacttcagaacaacaacgtggatctcgtcaacattgggagtaccgacattgtggatggaaaccataagctcaccctcggcctgatttggaacattatcttgcattggcaggtcaaaaacgtgatgaagaacatcatggccggcctccaacaaactaattccgaaaagatacttctttcctgggtgcgacagagcacccgcaactacccgcaagtgaatgtgatcaatttcacgacctcttggtcagacggacttgcactgaacgctctgatccattcccaccggcctgacctttttgattggaattctgtagtgtgccagcagtccgccactcagcgacttgaacacgcatttaacatcgcaagataccaacttggaattgagaaacttctggatcctgaggatgtggacactacctaccccgacaagaaatcgattctgatgtacattacctccctcttccaagttctcccacagcaagtctctatagaggcaattcaggaagtggaaatgctgcctcgacctccaaaggttactaaggaagaacattttcaactccatcatcagatgcattactctcagcagattaccgtatcgttggcacaaggttacgaaagaacgagctcaccgaagccccggtttaagtcgtacgcctacacccaggcagcctacgtgactacttccgatccaacgcggtcaccatttccatcacaacacctggaagcgccggaggacaagagctttgggtcatccctgatggaatccgaagtgaatttggatagataccaaactgcacttgaggaagtgctgagctggcttctctccgcagaggacacccttcaggcacaaggagaaatatcaaacgatgtggaagtggtgaaggatcagtttcatactcatgaaggttatatgatggaccttactgcgcaccaaggtcgcgtggggaatattctgcaactgggctcgaagctgattgggaccggtaaactttccgaagatgaggaaactgaagttcaagaacaaatgaacctgctgaattccagatgggagtgtctgcgtgttgcatcgatggaaaagcaatccaatcttcatcgcgaaataagctacgtgcctagcacctaccttactgagatcacgcacgtgtcccaagcacttctggaagtggagcagctcctgaacgcgccagatctttgtgcaaaggacttcgaagatcttttcaagcaggaggagtccctcaagaatatcaaggattcgctccaacagagctcgggacgaattgatatcatccattctaagaaaaccgccgccctccagtcagccacccctgtcgagagagtgaagctccaggaagcactgagccagctcgactttcagtgggagaaggtgaacaagatgtacaaagatagacaggggcgatttgatagatcggtcgaaaaatggcggaggtttcattatgacataaagatcttcaaccagtggttgaccgaagcagagcaatttcttaggaaaactcaaattcccgaaaattgggaacatgcgaagtacaagtggtaccttaaagaattgcaggacggaataggacaaagacagactgtggtccgaaccctgaacgcaacgggcgaagagattatccaacagtcaagtaagactgatgcatcgattcttcaagaaaaactgggatccttgaaccttcgttggcaggaagtctgtaagcaactgtcagaccggaagaagcgcctcgaagaaactctcgagagactccaagagcttcaagaagcaactgatgaacttgatttgaaactccgccaggccgaagtgattaaggggtcatggcaaccagtcggagatcttcttatagattcgttgcaagatcacctcgaaaaggtgaaggcactgagaggtgagattgccccacttaaagagaatgtgtcacatgtcaacgatcttgctagacagcttaccaccctgggtattcaactttcgccctacaatctttcgacccttgaggatctcaatactcgctggaagctgcttcaagtggcggtggaagatagggtacgtcagctgcacgaagcccaccgggacttcggtcctgcatcgcagcatttcttgagcacctcggtgcagggtccatgggaaagagccatttcacctaacaaagtgccgtactacattaaccatgaaacccaaacgacttgctgggatcaccctaagatgaccgaactgtaccaatcgctcgcagatctgaacaatgtcagattttcggcatatagaaccgccatgaagctccggagacttcagaaagcactctgcctggatctgctgtcactctcagcagcctgtgacgccctcgaccaacataatctgaaacaaaacgatcaaccgatggacatcctgcagattatcaactgccttactaccatatacgatcgccttgaacaggagcacaataaccttgtcaatgtgccattgtgtgttgatatgtgtctgaactggctcttgaacgtttacgacactggacggacgggaagaatcagagtcctctcgttcaaaaccggtatcatttccctgtgcaaagcacatctggaggacaaatacaggtaccttttcaagcaagtagcttcgagcaccgggttttgcgaccaacggaggctggggttgctgcttcacgactccatccagatcccccgtcagctcggagaggtggctagcttcggcggcagcaatattgaaccaagcgtgcgttcctgttttcaattcgcgaacaataagcctgaaatcgaagcggcactttttcttgactggatgagactggaacctcaatccatggtttggttgccggtgctgcatcgggtggcggcggcagaaaccgcgaagcatcaagcaaaatgcaacatttgcaaggagtgtcctatcattggatttcgctaccggtccctgaaacatttcaactacgacatttgtcaaagctgtttcttttcgggtagggtggccaagggccacaagatgcattaccccatggtcgaatattgtacgcctactacctctggtgaggacgtgcgcgattttgcaaaagtgctcaagaataagttccgtactaagcgctacttcgctaaacatcctcgcatgggatacctccccgtccagaccgttctggaaggagacaacatggaaacggacactatg

SEQ ID NO: 142872 - DNA, 3432 bp, Artificial Sequence
  derived and/or modified sequence
atgctgtggtgggaggaagtggaagattgctacgagcgagaggatgtccaaaagaaaacgtttactaagtgggtgaatgctcaattctcaaagttcggaaagcagcatatcgagaatctctttagcgacctgcaggacggacgccggctcctcgatctgctggaaggactgaccgggcagaagctgccgaaagagaagggatcaactagagtgcacgccctcaacaacgtgaataaggcacttcgggtgctgcaaaacaacaatgtagatctcgtcaacattggatcgactgacatcgtcgacgggaatcacaagttgaccctgggacttatctggaatatcatccttcactggcaggtgaagaacgtgatgaagaatatcatggccggtctgcaacagaccaactccgagaaaattctcctgtcttgggtgagacagtcgactcgcaattacccacaggtcaacgtgatcaacttcacgacctcgtggagcgatgggctggcccttaacgcccttatccactcccaccgcccggatttgttcgactggaatagcgtggtgtgccagcagtccgctacgcagagacttgagcatgcatttaacatcgcacgctaccaactggggattgaaaaactgttggatcctgaagatgtggacaccacctaccctgacaaaaagagcatcctgatgtatatcacgtccttgttccaagtcctgccgcaacaggtgtcaattgaggccatccaggaggtcgagatgctgccacgccctccaaaggttaccaaagaagaacacttccagctgcaccaccagatgcactattctcagcaaatcaccgtgtctctcgctcaggggtacgagcgcacctccagcccgaagccaagatttaagagctacgcatacactcaagcggcctatgtgaccacctccgacccgactcgcagcccgttcccttcgcagcacttggaggcgcctgaagataaaagtttcggctcatccctgatggagtctgaggtcaatctcgaccgctatcagactgcgcttgaagaagtgctgtcctggctgttgtctgccgaggacaccctccaagcgcaaggcgagatctcgaatgatgtggaggttgtgaaagaccagttccatactcacgaaggatacatgatggatctgactgctcatcagggacgcgtgggaaacattctgcagttgggaagcaagctgattggcaccgggaagctgagcgaggacgaagaaaccgaggtgcaggagcagatgaacctgctgaactcgcgctgggaatgtcttagagtggcctccatggaaaagcagtctaatctccatcgggaaatctcatacgtgccgtccacttacctcactgaaatcacccatgtttctcaggcacttctggaggtggaacagctcctgaatgctccggacctgtgcgctaaggacttcgaggatctgttcaagcaggaggaatcgcttaagaacatcaaggactcactgcagcaatcaagcggccggatcgatatcatccatagcaaaaagactgccgcgttgcaaagcgcaactcctgtggagcgggtgaagctccaagaagcactgtcccagctggatttccagtgggaaaaagtcaacaagatgtacaaggatcggcaggggagattcgacaggagtgtcgaaaagtggaggcgtttccactacgacatcaaaatctttaaccaatggctcactgaggctgagcaattcctgcgcaaaacccagatcccggagaactgggaacatgccaagtacaagtggtaccttaaagaattgcaagatggcatcggtcaacggcaaacggttgtccggaccctcaacgcgactggagaagaaatcattcagcaatcgtctaagaccgacgcaagtattctccaggaaaaactggggtcgctcaacctcagatggcaggaggtctgcaaacagctgtctgacaggaagaagagactggaagaaaccctcgaacgtttgcaggaactccaggaagcaaccgacgagctcgaccttaaactgcggcaggccgaagtgatcaagggatcctggcaaccggtgggggacctcctgatcgactcgctgcaggaccacctggaaaaggtgaaggcgttgcggggagaaattgcacccctgaaggagaacgtgtcccacgtgaatgatctggcccggcaactgaccactcttggaatacagttgagcccgtacaatctttccaccctggaggacctgaacactaggtggaagctcctccaagtcgctgttgaggaccgagtccgccagctgcacgaagcccatcgcgatttcggtcctgcgtcgcaacactttctgtccacctccgttcaagggccttgggaacgcgcaatcagcccaaacaaagtgccatactacatcaaccatgaaactcaaaccacttgttgggaccacccgaagatgactgaactctaccaatcactggcggatctgaacaatgttcgcttttccgcttaccgcaccgcaatgaagttgcgaaggctgcagaaggcgctctgcctggatttgctctcgctgagcgctgcctgtgatgcactggaccagcataatcttaagcagaacgaccaacccatggacattctccagatcataaactgtctgaccactatctacgatagactggaacaggagcacaacaacctggtcaacgttccgctctgcgtggacatgtgcctgaattggctcctcaatgtgtacgataccggaaggaccggacggatcagagtgctgtcctttaagacggggataatctccctgtgtaaagcgcatcttgaagataagtataggtacctgttcaaacaggtggcatcgtccaccggtttttgcgaccaacgccgcctcggactcctgctccacgattcaatccagatcccccggcaactgggcgaagtcgcttcctttggaggatcaaatatcgaaccatccgtgcgctcctgttttcagttcgccaataacaagcccgaaatcgaggccgcgctcttcttggattggatgcggctggagccgcagtccatggtgtggctgcccgtactccatcgggtggccgcggccgagacggccaagcaccaagccaagtgcaatatctgcaaggaatgcccgatcatcgggttccgctaccggtcgctgaagcacttcaactacgacatctgccagagctgcttcttcagcggcagggtggctaaaggccacaaaatgcattacccgatggtcgagtactgcaccccgactactagcggcgaggacgtgagagacttcgcgaaggttttgaagaacaaattcaggactaagagatacttcgctaaacatccaagaatgggatacttgcctgtgcaaactgtgctggaaggcgacaacatggaaaccgatactatg

SEQ ID NO: 142873 - DNA, 3432 bp, Artificial Sequence
  derived and/or modified sequence
atgttgtggtgggaggaggtagaggactgctatgaaagggaggatgtgcagaagaagacatttacaaaatgggttaatgcccagttttccaagttcggtaaacagcacattgagaacctgttctcagacctgcaggatggtcgccgcctccttgaccttctggaaggtcttaccggtcagaaactgcctaaggagaagggctctactcgcgtgcacgccctgaacaacgtaaacaaggcccttagagtgcttcagaacaacaacgttgaccttgttaacatcggctctactgatatagttgacggcaaccacaagcttaccctgggactgatttggaatatcatcctgcattggcaagtgaagaacgtcatgaagaatatcatggctggccttcagcagacaaactccgagaaaatcctgctttcttgggtcagacaaagcacacgtaattaccctcaggttaatgttatcaatttcaccacaagctggagtgacggtctggctctcaacgcactcatacattcccatcgtccagacttgttcgactggaactccgtagtatgtcagcaaagcgcaactcagcgccttgaacatgctttcaacatcgcccgctaccaactgggaattgagaagctcctggatccagaggatgtggacaccacatatccagataagaagtccatccttatgtatatcacatctctgttccaggtcctgccacagcaggttagcatcgaggcaattcaagaagtcgagatgttgccacgtccacctaaggtgaccaaagaagagcatttccagttgcatcatcaaatgcactactcacagcagataacagtctctctcgctcagggttacgaaaggacctcctctcccaaacctcgtttcaaatcttatgcttacacacaagctgcctatgtaaccacatccgaccctactagatccccttttccatcacagcacttggaggctcccgaagacaagtccttcggatcttccttgatggaatccgaggtgaaccttgatcgctaccagaccgccctggaagaggttctgtcctggctgctttcagcagaggatactttgcaggctcagggagagatttcaaacgacgtggaggtggttaaagaccaatttcacacccacgaaggttacatgatggaccttactgctcaccagggacgcgtgggtaatattctgcagttgggcagcaaacttatcggaaccggaaaactgtccgaagacgaggaaaccgaggttcaggagcagatgaacctgctcaattcaaggtgggaatgtctgcgtgtggcttccatggagaagcagtctaacttgcatcgtgagatttcctacgtgccctctacttacctcaccgagataacccatgtgtcacaggcattgttggaagtcgaacagctgctcaatgcacctgacttgtgtgctaaagacttcgaggatctttttaagcaggaggaaagtctcaagaacattaaggactccttgcagcagtcttcaggccgtatcgatattatccacagcaagaaaaccgctgcccttcagtctgctactcctgttgagagggtaaagctgcaggaagccttgagtcagcttgacttccaatgggaaaaggtgaataagatgtataaagatcgtcaaggaaggttcgataggtcagtcgagaaatggcgcaggtttcactatgacatcaaaatcttcaaccagtggcttaccgaggctgaacaattcctccgtaagacacagattccagagaattgggaacatgcaaagtacaaatggtacctgaaagagctgcaggacggtattggtcagaggcagactgtggtgagaaccctgaatgcaaccggtgaggagataatccaacagtcctccaagaccgatgcatccatccttcaggagaagttgggcagtttgaatttgagatggcaggaggtctgtaagcagttgtccgataggaaaaagcgcttggaggaaaccttggagaggttgcaagagctgcaggaggcaacagacgaactggatctcaaattgaggcaggccgaggttataaaaggctcctggcagcctgtcggcgacttgttgattgactccctccaggaccacctcgagaaggtaaaggccctgcgcggcgagattgccccccttaaggagaatgtttctcatgttaatgatcttgcccgtcagctcactaccttgggcatacaactctcaccttacaatctctcaactttggaggacctgaatacacgctggaagctgctgcaggttgcagtggaagatagggtccgccagctgcacgaggctcaccgcgacttcggaccagcctcacagcacttcttgtccacctctgtgcagggcccttgggagcgcgctatatcccctaacaaagtgccttactatataaatcatgaaactcagacaacttgttgggaccaccctaagatgacagagctgtaccagagtctggctgatctgaataatgtccgcttttctgcctataggacagcaatgaagcttcgcaggctgcaaaaggcactgtgcctcgacttgctgagcctgtccgctgcctgtgacgctctggatcagcacaatcttaagcagaacgaccagcctatggacattctccagataatcaattgccttaccaccatctacgaccgtctggaacaggagcacaataatctcgtgaacgtgcccctgtgcgtggacatgtgtcttaattggctgctgaatgtgtacgatactggtagaacaggacgcattagagtcctgtctttcaaaacaggaattatcagcctctgcaaagcccacttggaggacaagtaccgttacctcttcaagcaagttgccagcagcaccggattctgtgatcagcgtagactgggcttgcttctccacgactcaatccagatccctaggcagcttggagaagtggcctccttcggaggctccaatattgagcccagcgttcgttcctgctttcagtttgctaacaataagcccgagattgaagcagccttgttcttggactggatgagacttgagccccaaagcatggtttggctgcccgtgcttcaccgtgttgctgccgcagaaaccgccaaacatcaggccaagtgcaacatatgcaaggagtgtccaataatcggcttcagatacaggtccctgaaacacttcaattacgatatctgtcagagttgtttcttctctggaagagtggctaagggacacaagatgcactaccccatggtcgagtactgtactcctaccacatccggagaggatgtgagagacttcgctaaggtgcttaagaataagttcaggactaagcgctactttgctaagcatccccgtatgggctatctgccagtgcagacagtgctggagggagacaacatggagacagacacaatg

SEQ ID NO: 142874 - DNA, 3432 bp, Artificial Sequence
  derived and/or modified sequence
atgttgtggtgggaagaggtggaggattgctatgagcgggaggacgtacagaaaaagacgtttactaagtgggtgaacgcgcagttctccaagttcggaaagcagcacatcgaaaacttgttcagcgacttgcaagacggccgccgactcctggatctgctggagggcctgaccggacagaaactgcccaaagaaaagggatcgacccgtgtccatgctctgaacaatgtcaataaagcgctgcgcgttctccaaaacaacaacgtggacctcgtgaatatcggatccactgatatcgtggacggcaatcacaagctcaccttgggtcttatctggaatatcatcctccactggcaggtgaagaacgtaatgaagaatatcatggcgggactgcaacagaccaactcagaaaagatcctcctgtcgtgggtcaggcaatccactcgcaactacccgcaagtcaacgtgatcaacttcacgacttcgtggtcggatggcctggcactgaacgcgctgatccactctcacagaccggatctcttcgattggaactcagtggtgtgccagcaatccgcgacccagcgcctggagcatgcattcaacatcgcccgctaccagttgggcatcgaaaagctcctcgacccagaggatgtggacaccacctaccccgacaagaaatcgattctcatgtacatcacttccctgtttcaagtgcttccgcaacaagtctcaatcgaagcaatccaagaggtcgaaatgcttccacgtccaccaaaagtgacgaaggaggagcacttccagctgcatcaccagatgcactactcacaacagattacggtgtctctcgcgcaaggttacgaacgcacgtcaagccctaagccgcgctttaagagctacgcttacactcaggcggcctacgtgaccacctccgaccctacgagatcaccgtttccgagccaacacttggaagcacctgaagataaatccttcggatcgtcgctcatggaaagcgaggtcaatctcgaccggtaccagactgcccttgaagaggtgctgtcatggctgctctcagcagaggatactctccaggcccagggggagatcagcaatgacgtggaggtcgtgaaggaccaattccacactcatgaagggtacatgatggacctgactgcccatcagggacgggtgggcaacatcctccagcttggatcaaagctgattggcactggcaagctgagcgaggatgaggaaactgaggtccaagagcagatgaacctgctgaactccagatgggagtgtctgcgcgtggcctcgatggaaaagcagtcaaatctgcaccgggaaatctcgtacgtgcctagcacttacttgacggagatcactcatgtgagccaggccctgctggaggtggaacagttgctgaacgcaccggacctgtgcgccaaggatttcgaagatcttttcaagcaggaggaatcactgaagaacattaaggactccctgcagcaatcgtccggccgcatcgacatcattcatagcaaaaagaccgccgctctccaatcggcaactcctgtggagcgggtgaagctgcaggaagcactctcacagctggatttccagtgggagaaggtgaacaagatgtacaaagatcgccagggaaggttcgaccgcagcgtcgaaaaatggcggagatttcattatgacataaagatattcaaccaatggcttaccgaggccgagcagttcctgcgcaagactcagatcccagagaactgggaacacgccaagtacaagtggtacctcaaggaactgcaagatgggatcgggcaacgacagaccgtggtgagaactctcaacgccaccggagaagagattattcagcaatcatcaaaaacggacgcttcaatcctccaagaaaaactgggaagcctgaacctgagatggcaagaagtgtgcaagcagctctcggaccgcaaaaagaggctggaggagactctggaacgactccaagaactgcaggaagcgactgacgaactcgatctcaagctgaggcaagccgaagtgatcaagggatcgtggcagcccgtcggcgacctgctcattgatagcctccaggaccacctggaaaaagtcaaggctctgaggggtgaaattgcgcccctgaaggagaatgtttcgcacgtgaatgacctggcacgccagctgactactctggggatccagctgtctccgtacaatctctcaacgctcgaagatctgaacacccgctggaaactgctgcaggtggctgtcgaagatagagtcagacaactccacgaagcacacagggatttcggaccggcatctcagcattttctctcaacttcagttcagggaccttgggagcgagctatctccccgaacaaggtgccgtactacatcaaccacgagactcagactacgtgctgggaccacccaaaaatgaccgaactgtaccagtccctggcagacctgaataatgttagatttagcgcctaccggacggcaatgaagctgcgcagattgcagaaagcgctctgtctggatctcttgtccctctctgccgcctgcgacgcacttgatcaacacaatctgaaacagaacgaccagccaatggacatcctccagatcatcaattgtcttaccactatctatgatcgcctggagcaggaacacaataacctcgtcaacgtcccgctgtgcgttgacatgtgtctgaactggctgctgaatgtctacgacactgggagaactggacgcattcgcgtgctgtcgttcaaaacggggattatcagcctgtgtaaggcccatctggaggataagtatcgatacctgtttaagcaagtcgcctccagcactggcttctgcgatcagcgccgcctcggactgcttcttcatgactcaatccagatccctagacaactgggtgaagtggcatcgttcggcggatctaatatcgagccgagtgtgcggtcatgcttccagttcgccaacaataaaccagagatcgaggctgcactgtttttggactggatgcgccttgagccgcagagcatggtctggctgccggtgctccacagggtggccgccgcggagacggccaagcatcaagctaagtgcaacatttgcaaggaatgcccgatcattggattccggtaccgctccctgaagcatttcaactacgacatctgccagagctgtttcttcagcggaagggtggccaaaggccacaaaatgcattacccaatggtggaatactgcacccctacgacctcgggtgaagatgtgcgcgacttcgccaaggtgctgaagaacaaattccggaccaagcgctacttcgcgaagcacccacgcatggggtacctgccggtccagactgttctggagggtgataacatggagacggatactatg

SEQ ID NO: 142875 - DNA, 3432 bp, Artificial Sequence
  derived and/or modified sequence
atgctgtggtgggaagaagtggaagattgctacgagcgcgaagatgtgcaaaagaaaacgttcactaaatgggtgaacgctcagtttagcaaatttggaaagcaacacatcgagaatctgttctcagatctccaagatggccgaaggcttcttgacctgctcgagggactcaccggtcaaaagttgcctaaggaaaagggatccaccagagttcacgcactgaataatgtgaacaaggcactgcgggtgttgcaaaacaacaatgtggacttggtgaacattggatcgaccgacattgttgatggcaatcacaaattgactctcggactgatatggaatatcattctccactggcaagtgaagaacgtcatgaagaacattatggcaggactgcaacaaacgaactccgagaagattctgctgtcatgggtgcgtcagtcgactcgcaactaccctcaagtgaacgtgattaactttaccacttcctggtctgatggccttgcactgaatgccctcattcatagccatcgtcccgatctgtttgattggaacagtgtggtgtgtcagcaaagcgcaactcaacgcctcgagcacgcatttaacatcgcacggtaccaacttgggatagagaagctccttgatcccgaggatgtggatactacgtaccccgacaaaaagtcgatcctgatgtatatcacttccctgtttcaagtcctgccacagcaggtgtccattgaagccattcaagaagtcgaaatgctcccaagaccaccaaaggtgactaaagaagaacactttcaactgcatcatcaaatgcattactcccaacagatcacggtgtcactggcacaaggatatgaaaggacctcgtctccgaagccccgttttaagagctacgcatatacccaggcggcctatgtgactaccagcgaccctacccgtagcccttttcctagccagcatcttgaggcaccggaagataagtcctttggtagctcattgatggagtccgaggtgaaccttgatagataccagactgcactggaagaggtgcttagctggctcctgtcggcggaggacacgctgcaagcccagggtgaaattagcaacgatgtggaagtggtgaaagaccaattccatacccatgagggctacatgatggatctcactgcccatcaaggtagggtgggaaacatcctccaactcggatccaaactgatcggcactggaaaactttcagaagatgaagaaacggaagtccaagaacagatgaatctgctgaactcgcgctgggagtgtctgcgcgttgccagcatggaaaaacaaagcaatctgcatcgtgaaatctcctacgtgccttcaacctacctgaccgaaatcacccacgtgtctcaggcattgcttgaggtggaacaactgctcaacgcaccggatctctgtgcaaaagatttcgaggacctgttcaagcaagaagagtcgctgaagaacataaaagatagcctccaacagtccagcggcagaatagacatcatccactccaaaaagactgctgcgcttcaatcagcgacccctgtggagcgagtcaagctgcaagaagcgcttagccagctggattttcaatgggaaaaggtaaacaagatgtacaaggaccgccaaggaagatttgatagaagcgtggaaaagtggcggagattccactatgatatcaagatattcaatcaatggcttactgaggccgagcagttccttcgcaaaacgcagattcccgaaaattgggagcatgcaaagtacaagtggtaccttaaggagctgcaagacggaatcggccaacggcagaccgtcgtgcgcactcttaatgcaaccggagaggaaatcattcaacaatcgagcaaaactgatgcgtccattcttcaagagaagttgggcagcttgaacctgagatggcaggaagtgtgtaagcagctctcggatcgtaagaaacggctggaagaaactctcgagcggcttcaagagttgcaggaggcaacggatgaactggatcttaagctcagacaggcagaagtcatcaagggatcgtggcagcctgtcggtgatctgctcattgactcgttgcaggaccatctggagaaggtcaaggcgctgcgtggagaaattgccccgcttaaagaaaacgtgtcccacgtgaacgacctggccagacaacttaccaccttgggaatccagctgtccccgtataacctttcgaccctggaagatttgaacacgaggtggaaacttctccaagtcgcagttgaggaccgagtccgacagcttcacgaagcgcacagagactttggccccgcctcgcagcatttcctcagcacctcagtacaagggccttgggaaagagcgatcagcccgaataaagttccatactacatcaatcatgaaacccagactacgtgttgggaccatcctaagatgaccgagctttaccagtccctcgcagatttgaataatgttagattttccgcttacaggacggcgatgaaacttcgcagactccagaaggccctgtgccttgatctgctttcactgtcggcagcttgtgatgcactggatcaacataacctgaaacaaaacgatcaaccaatggacattcttcagatcataaactgcctgaccactatttacgatcgccttgaacaggaacacaacaaccttgtgaatgtgcctctgtgtgtcgatatgtgtcttaactggcttctcaatgtgtacgacacgggacggaccggtagaattcgggtgttgtccttcaagaccgggattatctcgctttgcaaggctcacctggaggacaagtacagatacctgtttaagcaagttgcctctagcaccggattttgtgatcaacgtaggcttggcctgctgctgcatgattccatacaaataccacggcaacttggtgaagtggcgtccttcggcgggtccaacatcgaaccttcggtccgcagctgctttcagttcgcaaataacaagcccgagattgaggcagcattgtttcttgactggatgagactcgagccccagtcaatggtctggcttccagtgttgcatagggtggctgcagcggaaaccgccaagcatcaggcaaaatgcaacatttgcaaagagtgtcctataatcggattccgctacagatccctgaagcatttcaattacgacatatgtcaaagctgttttttctcgggtagagtcgcaaaggggcacaaaatgcattacccaatggtggaatactgcacccctaccacgtcaggcgaggatgtccgagatttcgccaaagtcctcaagaataagtttagaaccaagcgttactttgcaaagcacccacggatgggataccttccggtgcagaccgtcctggagggagataacatggagactgacacgatg

SEQ ID NO: 142876 - DNA, 3432 bp, Artificial Sequence
  derived and/or modified sequence
atgctgtggtgggaagaagtcgaggattgctacgaaagggaggacgtgcagaagaaaactttcaccaaatgggtgaacgcccaattctcgaagttcggtaagcagcacatagaaaacctgttttcagatcttcaggacggacggagactccttgacctcctggagggtctgactggtcaaaaactgcctaaggaaaaaggttcaacgcgagtgcatgcgctcaataatgtcaataaggcacttcgcgtgctgcagaataacaacgtcgacttggtgaatatcggctctactgatattgtggatggtaaccacaaacttacgctgggactgatttggaacattattctccattggcaagtgaagaatgtgatgaagaacataatggccggactgcaacagacgaatagcgaaaagatactgctttcgtgggtgcgacaatccactaggaattatccacaggtgaacgtgataaacttcactacgtcctggagcgacggtcttgcccttaacgcacttatccatagccatcggccagatctttttgactggaacagcgtcgtttgccaacagtccgcaacccaacgcctggagcacgctttcaacattgcacgctaccaacttggcatcgaaaagctgcttgatccagaagatgtcgacaccacctacccggacaagaagtccattctgatgtacattacttcgctttttcaagtcctcccccagcaagtgtcgatcgaagctatccaagaagtggaaatgctgccaaggccacctaaggtgactaaggaagagcattttcagctgcaccatcaaatgcattacagccaacaaataactgtgtcgctggcccaaggatatgagcggacgagcagcccaaaacctagattcaagtcgtacgcatacactcaagccgcatatgtgactacctcggatcccaccaggtcaccattcccatcgcagcatcttgaggcccccgaagataagtcattcggatcgtcgcttatggagagtgaggtcaatctggatcgttaccagactgccctggaagaagtgctgtcgtggctccttagcgccgaagatacccttcaggctcaaggtgaaatttcgaacgatgtagaagtcgtgaaggaccaattccatactcatgaggggtacatgatggacctgactgcgcaccagggacgagtgggaaacatcctccagcttggatcaaagctgatcggcaccggtaaactcagcgaagatgaggagactgaagtgcaggaacagatgaacctgctcaattcacgttgggaatgtcttagagtcgcctcaatggagaaacagtcgaacctgcatagggagatatcctacgtgcctagcacgtacctgactgaaattactcatgtctcgcaagccctgcttgaagtggaacaactgcttaacgcgccagatctctgcgctaaggatttcgaggacctctttaagcaagaggaatcactcaaaaacattaaggactcgctgcagcagtcctcaggccgtatcgatatcatccattcaaagaaaaccgcggcactgcaatctgcaacccctgtcgaaagagtgaaacttcaagaggctctttcccaattggacttccaatgggaaaaagtcaataagatgtacaaagatcggcaaggccgtttcgatcgctcggtggaaaagtggaggcgcttccattacgatatcaaaatctttaaccagtggctgaccgaagcagaacaatttctgcgcaaaactcagatccctgaaaactgggaacatgcaaagtacaaatggtaccttaaggaactgcaggatggtattggccaaagacaaaccgtcgtgagaactcttaacgcaacgggtgaggaaatcattcagcaatcttccaagaccgatgcatcgatccttcaggaaaaactgggaagcctgaacctgaggtggcaggaagtgtgtaagcagctctcggatcgcaagaagcgcctggaagagactcttgaaaggctccaggagctgcaagaggccactgatgaattggatctgaagctgcgtcaggccgaggtgatcaagggttcctggcagcctgtgggtgatctgcttattgatagccttcaggaccacttggagaaggtgaaagcactgcgcggcgagattgccccacttaaggagaatgtgtcgcacgttaacgatcttgcacgccaactgaccaccctcggcattcaactttcgccctacaacttgtcgactcttgaagatcttaacacccgctggaagctgttgcaggtcgcagtcgaagatagggtccgccaacttcacgaagcacatcgtgattttggaccagcttcacaacattttctctcgacgtccgtgcagggcccatgggaaagagcaatctcaccgaacaaagtgccgtactatatcaatcatgaaactcagacgacctgttgggatcaccccaagatgacggagctgtaccaatcgcttgcagacttgaataacgtcaggttttcggcatacagaactgcaatgaagctcaggagactccagaaagccctctgcctcgacctgcttagcctgtccgcagcctgtgacgcgttggatcagcacaatctgaagcaaaacgaccaacctatggatattctgcaaatcattaactgcctgactaccatctacgatcggctggaacaggagcataacaacctggtgaatgtccctctctgcgtggatatgtgtcttaactggcttctgaatgtgtacgataccggacgcaccggccgcattcgggtgctctcgtttaagaccggcatcatttcactgtgcaaggcccatctggaggataagtatagatacctcttcaagcaagttgcatcttccaccgggttttgtgatcagagacgcctgggactgctgttgcatgactcgatacaaatcccccgacagctgggtgaagtggccagctttgggggatcaaacatcgaacctagcgtgcgtagctgctttcagtttgcaaacaacaaacctgaaattgaagccgctctgtttcttgattggatgcgacttgaacctcaatcgatggtttggctcccggtgctgcatagagtcgcggcagcagaaacggctaagcatcaagctaagtgcaacatctgtaaggaatgtccgattattggttttaggtacagatcgctcaagcatttcaattacgatatttgccaaagctgttttttctcgggaagagtggcgaagggccacaaaatgcattaccctatggtggagtactgtacccctaccactagcggcgaagatgtgcgggactttgccaaggtccttaagaacaagtttcgtaccaagcgatactttgcaaaacatcctcggatggggtacctcccagtgcagaccgtcctcgaaggtgataacatggaaaccgacactatg

SEQ ID NO: 142877 - DNA, 3432 bp, Artificial Sequence
  derived and/or modified sequence
atgttgtggtgggaagaagtggaggattgctatgagagggaggacgtgcagaagaagacctttacaaagtgggttaacgcccaattctctaaattcggcaaacaacacatcgagaatctgtttagcgatcttcaggacggacgacgactgttggacctgttggagggcctcactggtcagaagttacctaaggagaagggttccacaagagtgcatgccctcaataacgtgaacaaggcgcttagggtgttgcagaacaataacgtggatctcgttaacataggcagtactgacattgtggatggaaatcacaaactcaccttaggactgatctggaatataatccttcactggcaggtgaagaacgtgatgaagaatatcatggcgggactgcagcagaccaacagcgagaagatcctactatcctgggtgcgtcagagcactaggaattacccgcaagtgaacgtgataaacttcactacgagctggtccgacggactggcactcaatgctctcattcactcacataggccggacctgtttgattggaatagtgttgtgtgccagcagagtgccactcaacgactagaacacgcattcaacattgcaaggtatcaacttggcattgagaaactgctcgacccggaagacgtggacactacataccccgataaaaagtctatcctgatgtacattacttcactttttcaagtgttgcctcagcaggtgagcatagaagcaatacaggaagtcgagatgctgccacgtccacccaaagttaccaaggaggagcacttccagttgcatcatcagatgcattacagccaacagattacagtgtcattggctcagggatacgaacgtacctcatctcccaaacccagatttaagagttacgcgtacacacaggccgcgtacgtcaccacctcggatcccaccagaagccctttcccctcccagcatctcgaggctcccgaggacaagtccttcggcagttctctcatggagtccgaagtaaatctggatagataccagacagccctcgaagaagtgctctcatggctcctctcagctgaagacacgttgcaggcacagggcgaaatatctaacgacgtcgaggtggttaaggatcagttccatacccatgaaggctatatgatggatctgacagcccaccaaggccgcgtcggtaatatcctgcagctgggttccaagttaattggcacaggcaagctgtcagaggacgaggagacagaagtacaagagcagatgaacctgctcaatagcagatgggaatgtcttagggtggcttcaatggagaagcaatctaatttgcatagggagatctcgtatgtgccctccacctaccttaccgaaattacccacgtgtcccaggcactactggaggtggaacaactcctaaatgcccctgacctctgtgctaaagatttcgaagacttgtttaagcaagaggagagcctcaaaaacataaaggatagtcttcagcaatcttcaggcaggatcgatattatccattccaagaaaacagcagcacttcagtcagctacacccgtagaaagagtcaaattgcaagaagctctgagccagctggactttcaatgggagaaggtgaacaagatgtacaaggacaggcagggacgttttgatcgttccgtggagaagtggaggagatttcactacgacataaaaatatttaatcagtggctcaccgaggcagagcagttcctacgcaagacccagatccctgaaaattgggagcacgccaaatacaagtggtacttgaaagagctgcaagacggaataggccagcgtcagactgtagtccgtacactcaacgctaccggggaggagatcattcagcagagctccaaaaccgatgcttccattctgcaggaaaaactagggtcactgaatttaaggtggcaggaagtgtgtaagcagctcagcgatcgaaagaaaaggctcgaggagaccctggaaagacttcaggaactccaggaggccaccgacgaactggacctgaaacttagacaagctgaagtgattaaggggtcgtggcagccggtcggcgacctgctgattgattctctgcaggatcacctcgagaaggtcaaagccctgaggggggagattgcccccctgaaggagaacgtgtcccacgttaatgacctggctaggcagctgaccacactcgggattcagctcagtccttacaacctgtctaccctagaagacctgaacacacggtggaaattactgcaggtagccgtggaagacagggtaagacagctccacgaggcccaccgagacttcggcccagcctctcagcacttcctctctacttcagtgcaaggaccttgggagagggccatctcaccgaacaaagtgccttattatattaatcatgaaacccagaccacctgctgggatcatcctaaaatgaccgaactgtatcagagcctcgcagaccttaataacgtccggttttctgcctatcgtacagccatgaagctgaggaggctgcaaaaagcactctgtctcgacctcctgtcgctgagcgccgcttgcgacgcactcgaccagcacaacctcaagcagaacgatcagcccatggacatacttcaaattattaattgcctgactactatatatgatcgactcgaacaggaacataataacctagtgaacgttcccctgtgcgtggatatgtgtcttaactggctgctgaatgtgtacgacaccgggaggacaggaaggatccgagtgcttagcttcaagacaggtatcatttctctctgcaaggcacatctggaggacaagtatcgctatctattcaaacaggttgcaagctccacagggttttgtgatcaaaggaggcttggcctgttactccatgactctattcagatccctcgacagttaggcgaggtggccagcttcggggggtcaaacatcgaaccctcggtaaggtcctgcttccagtttgccaataataaacctgagattgaagctgcactgttcttggattggatgagactggaaccccagtcaatggtatggctcccggtgcttcatagagtggccgccgcggagacggcaaagcatcaagccaagtgcaatatctgcaaagaatgtcctatcattggatttagatatcgatccctaaagcattttaattacgacatctgtcagtcctgtttttttagtggcagggtggccaagggccataagatgcattaccctatggtggagtactgtacacctacaacttctggtgaagatgtaagggactttgctaaagtcctcaagaacaaattccgcactaagaggtacttcgccaagcacccaagaatggggtatctgcccgttcagactgtgctggagggtgataacatggaaactgacacgatg

SEQ ID NO: 142878 - DNA, 3432 bp, Artificial Sequence
  derived and/or modified sequence
atgttatggtgggaagaggttgaagattgttatgaaagagaagatgttcaaaaaaagacttttacaaagtgggttaatgctcaattttctaagtttggaaaacaacatattgaaaatttattttcagatttacaagatggaagaagattgttagacttattagaaggattaacaggtcaaaaactcccaaaagagaagggaagtacacgtgtacatgcacttaataatgttaataaagctttgagagttttacaaaataataatgttgatcttgtcaatattggtagtactgatattgtagatggtaatcataagcttacattaggtcttatttggaatattattttgcattggcaagttaagaatgtaatgaaaaacatcatggcaggattacaacaaactaacagtgaaaaaatccttctctcatgggttagacaatctacccgtaattatccacaagttaatgttattaatttcacaactagttggtctgacggattagcactcaatgctttaatccattcacataggccagatttatttgactggaattcagttgtatgtcaacaaagtgctactcaaagattggaacatgcttttaatatagcaagataccaacttggaattgaaaaactattagatccagaagatgttgatacaacttatcctgataaaaaatctatacttatgtatattacgagcttatttcaagttcttccacaacaggtttctattgaagctatacaagaagttgaaatgttacctagaccacctaaagttacaaaagaagagcattttcaattacatcatcaaatgcattattcacaacaaattacagtatctttagctcaaggatatgaaagaacaagttctccaaagccaagatttaaatcatatgcatatacccaagctgcttatgttacaacatctgatccaactagatctccatttccatcacaacatttagaggctccagaagataaaagttttggaagtagtttaatggaaagtgaagttaaccttgatagatatcaaacagctttggaagaagttttatcatggttattatcagctgaagatactcttcaagcacaaggtgaaatttctaatgacgttgaagttgtaaaagatcaatttcatacacatgaaggatatatgatggatttaacagcccatcaaggaagagttggtaacattcttcaattaggatcaaaacttattgggactggaaaactttcagaagatgaagaaacagaggtgcaagagcaaatgaacttacttaactcaagatgggaatgtcttagagtagcttcaatggaaaagcaaagtaatttacatagagaaataagttatgtgccatcaacgtatttaacagaaatcacacatgttagtcaagcattattagaagttgaacaacttcttaatgctccagatttatgcgctaaagatttcgaagatttattcaaacaagaggaatctcttaaaaatataaaagattctcttcagcaatcaagtggtagaatcgatattattcattcaaaaaaaaccgctgcactacaatcagcaaccccagtggaaagagtgaaattacaagaagctttaagtcaattagattttcaatgggaaaaagttaataagatgtataaggatagacaagggagatttgacagaagcgttgaaaaatggagaagatttcattacgatattaaaattttcaatcaatggttaactgaagctgaacaatttcttagaaaaacacaaataccagagaattgggaacatgctaaatataaatggtatttaaaagaacttcaagatggaattggtcaaagacaaactgttgttagaactcttaatgctacaggagaagaaattatccaacaatcttcaaaaactgatgcatcaattcttcaagagaaattaggttcattaaatttaagatggcaagaagtatgcaaacaactaagtgatagaaaaaaaagattagaagaaacattagaaagattacaagaacttcaagaggcaacagatgagttagatttaaagttgcgacaagctgaagttattaaagggtcttggcaacctgttggagatttattaatagatagtttacaagatcatcttgagaaagtaaaagctcttagaggagagattgctccattaaaggagaatgtttctcatgtaaatgatcttgcaagacaacttacaactttaggaattcaattaagtccatacaatttaagtactcttgaagaccttaatactagatggaaactattacaagttgctgtagaagatagagttcgtcaattacatgaagctcatcgagattttggtcctgcatcacaacatttcttaagtacttctgttcaaggtccatgggaaagagcaatatctcctaataaagtaccatactatattaatcatgaaacacaaactacttgttgggatcatccaaaaatgactgaattatatcaatctttagcagatttaaataatgtaagattttcagcatatagaactgctatgaaattaagacgtttacaaaaagctctttgtttagatcttttatcactttcagctgcttgtgatgctttagatcaacacaatttaaaacaaaatgatcaaccaatggacatattacaaatcattaattgtcttactaccatttatgatagattagaacaagaacataacaatttagttaatgtaccattatgtgtcgatatgtgtcttaattggttattaaatgtctatgatacaggtagaactggacgaattagagttttatcttttaagactggaattattagtttatgtaaggctcatttagaagataaatatagatatcttttcaaacaagtagcaagttcaactggtttttgtgatcaacgaagattaggactccttcttcatgactcaatccaaataccaagacagttgggagaagtagctagtttcggtggatcaaatattgaaccatcagtacgaagttgttttcaatttgcaaataacaaacctgaaatagaagctgcattattccttgattggatgagattagaaccacaatctatggtatggttaccagttttacatagagttgctgcagcagaaacagcaaaacatcaagctaagtgtaatatttgtaaagaatgcccaataattgggttcagatatcgttcattaaaacattttaattatgatatttgccaaagttgttttttttcagggagagttgcaaagggacataaaatgcattatccaatggttgaatattgtacaccaactacttctggagaagatgtaagagacttcgcaaaagttttaaaaaataaatttagaacaaaacgttattttgcaaaacatccaagaatgggatatcttccagttcaaactgttttagaaggtgataatatggaaacagatacaatg

SEQ ID NO: 142879 - DNA, 3432 bp, Artificial Sequence
  derived and/or modified sequence
atgctgtggtgggaagaggtcgaggactgctacgaacgcgaagatgtccaaaagaaaaccttcaccaagtgggtcaacgcccaattttcgaaatttggaaagcaacatatcgagaatctcttcagcgaccttcaagacggacgacgccttctggacctgctcgaaggtcttaccggacagaagctccctaaggagaagggatccaccagagtccatgcccttaacaatgtgaataaagccctgagggtcctgcagaataacaacgtcgacctggtgaacatcggttccaccgatattgtcgatggtaaccacaaacttacgctgggtcttatttggaacatcattcttcactggcaggtgaagaacgtgatgaagaacattatggcaggcctgcaacagaccaactcagagaaaattcttcttagctgggtgcggcagtccacccgcaactacccgcaagtcaatgtgattaactttactacctcgtggtccgacggactggccttgaatgcactcatacactcccaccgccctgatctctttgattggaattcagtggtctgtcagcaaagcgctacgcaaaggctggagcatgcattcaatatagcgagataccagcttggaattgaaaagttgcttgatcctgaagatgtggacaccacttaccctgataagaagtcaatcctgatgtacattacttccctgttccaggtgctgcctcagcaagtgagcatcgaagcaattcaagaagtggagatgttgcctaggcctccaaaggtgacgaaggaagaacattttcaactgcatcatcaaatgcattactcccaacaaattaccgtctcattggcacaagggtatgagaggacctcgtcgcccaaacctcgttttaagagctacgcgtatacccaggcagcctacgtgactacttcagacccaactaggagcccttttccctctcaacatctcgaggcacctgaagataagtcgttcggtagctcactcatggaatcggaagtgaatttggaccgctaccaaactgcacttgaagaggtgctgtcctggcttctgtcagcagaagatactcttcaagcacagggggaaataagcaacgacgtcgaagtcgtgaaagaccagtttcatacccatgaaggttacatgatggatctgactgcccatcaaggacgggtgggtaatatcctgcagctgggatcgaaacttatcgggaccggcaaactttcagaagatgaagaaaccgaagtccaagagcagatgaatctgctgaactcacggtgggaatgtctgcgtgtggcctcgatggagaaacaatctaaccttcatagagagatatcatacgtgccttcgacttacttgactgagatcactcatgtgtcgcaagcacttttggaggttgagcaacttctgaatgcacctgatctttgtgcgaaggattttgaagatctgttcaagcaggaagaatcgctgaaaaacattaaagactccctgcagcaaagctcgggtagaattgacattatccactcaaaaaagaccgcagcactccagtcggcaaccccagtggaaagagtcaagctccaagaggcgcttagccaactggactttcagtgggaaaaggtgaataagatgtacaaggaccggcagggaagatttgatcgcagcgtggagaaatggcgacggtttcattacgacataaagattttcaaccagtggctcactgaagccgaacagtttctgcgaaagacgcagattcctgagaattgggagcacgctaagtacaagtggtatttgaaggaactgcaggacggtatcggacagcgtcaaactgtggtgcgtactttgaacgcaactggcgaagaaatcatacaacaatccagtaagaccgatgcatccattctccaagaaaagctggggtccctgaatctgcgctggcaagaagtgtgtaaacagctcagcgaccgaaagaaaagactcgaagagacgttggagcggctccaagaactgcaagaggcaaccgatgagcttgatctgaaattgagacaagccgaggtgatcaaaggttcctggcagcccgtgggcgaccttctcattgactcccttcaagaccacttggagaaagtgaaggcacttaggggcgagatcgcacctcttaaagaaaacgtgtcccatgtcaatgacctggctcgccagctcacgactctgggaatccaacttagcccttacaacctgtcgactcttgaggacctcaataccagatggaagttgcttcaagtggcagtggaagatcgcgtccgacagcttcacgaagcacacagagattttggacctgcctcgcagcactttctctcgacttccgtgcagggtccatgggagagggcaatttcccccaacaaggtgccatattacatcaaccatgaaacccaaactacgtgctgggaccatcctaagatgacggagctgtaccaaagcctggctgacctcaacaatgtgaggttcagcgcctacagaacggcaatgaagctgcgccggctccagaaggctctctgtcttgatctcctgtcactgtccgccgcatgtgacgcacttgaccagcacaatctgaaacagaacgaccagccgatggacattcttcagattatcaattgcctcaccaccatctatgacagattggaacaggagcataacaacctggttaatgtgcccttgtgtgtggatatgtgccttaattggcttcttaatgtctacgatacggggagaactggacgtatcagggtgcttagctttaagacgggaattatctctctttgtaaggcccatcttgaggacaagtatcggtacctctttaaacaggtggcatcctcgactggattttgtgatcagcgtagacttggacttctgctccacgattccattcagattcctagacagctgggggaggtggcctccttcggcggtagcaacatcgaaccatccgtcagaagctgttttcaattcgcgaacaataagcccgaaattgaagccgcgctttttcttgattggatgcgacttgaacctcaatcgatggtctggctgccagttctgcatcgagtggcggcagcagagacggccaaacatcaagcaaaatgtaacatctgcaaggaatgtcccattatcggttttagataccggagcctcaagcactttaactatgatatttgtcaaagctgtttcttttccggtcgagttgcaaaaggacataagatgcattacccgatggtggaatactgcacccctaccactagcggtgaggatgtcagagatttcgcaaaggtgctgaagaataagttccgcactaaaagatactttgcgaaacatccccggatgggataccttcctgtgcagactgtgctggagggcgacaatatggagactgatactatg

SEQ ID NO: 142880 - protein, 938 aa, Artificial Sequence
  derived and/or modified sequence
MTAREHSPRHGARARAMQRASTIDVAADMLGLSLAGNIQDPDEPILEFSLACSELHTPSLDRKPNSFVAVSVTTPPQAFWTKHAQTEIIEGTNNPIFLSSIAFFQDSLINQMTQVKLSVYDVKDRSQGTMYLLGSGTFIVKDLLQDRHHRLHLTLRSAESDRVGNITVIGWQMEEKSDQRPPVTRSVDTVNGRMVLPVDESLTEALGIRSKYASLRKDTLLKSVFGGAICRMYRFPTTDGNHLRILEQMAESVLSLHVPRQFVKLLLEEDAARVCELEELGELSPCWESLRRQIVTQYQTIILTYQENLTDLHQYRGPSFKASSLKADKKLEFVPTNLHIQRMRVQDDGGSDQNYDIVTIGAPAAHCQGFKSGGLRKKLHKFEETKKHFEECCTSSGCQSIIYIPQDVVRAKEIIAQINTLKTQVSYYAERLSRAAKDRSATGLERTLAILADKTRQLVTVCDCKLLANSIHGLNAARPDYIASKASPTSTEEEQVMLRNDQDTLMARWTGRNSRSSLQVDWHEEEWEKVWLNVDKSLECIIQRVDKLLQKERLHGEGCEDVFPCAGSCTSKKDCSPPPEESSPGEWSEALYPLLTTLTDCVAMMSDKAKKAMVFLLMQDSAPTIATYLSLQYRRDVVFCQTLTALICGFIIKLRNCLHDDGFLRQLYTIGLLAQFESLLSTYGEELAMLEDMSLGIMDLRNVTFKVTQATSSASADMLPVITGNRDGFNVRVPLPGPLFDALPREIQSGMLLRVQPVLFNVGINEQQTLAERFGDTSLQEVINVESLVRLNSYFEQFKEVLPEDCLPRSRSQTCLPELLRFLGQNVHARKNKNVDILWQAAEICRRLNGVRFTSCKSAKDRTAMSVTLEQCLILQHEHGMAPQVFTQALECMRSEGCRRENTMKNVGSRKYAFNSLQLKAFPKHYRPPEGTYGKVET

SEQ ID NO: 142881 - protein, 938 aa, Artificial Sequence
  derived and/or modified sequence
MTAREHSPRHGARARAMQRASTIDVAADMLGLSLAGNIQDPDEPILEFSLACSELHTPSLDRKPNSFVAVSVTTPPQAFWTKHAQTEIIEGTNNPIFLSSIAFFQDSLINQMTQVKLSVYDVKDRSQGTMYLLGSGTFIVKDLLQDRHHRLHLTLRSAESDRVGNITVIGWQMEEKSDQRPPVTRSVDTVNGRMVLPVDESLTEALGIRSKYASLRKDTLLKSVFGGAICRMYRFPTTDGNHLRILEQMAESVLSLHVPRQFVKLLLEEDAARVCELEELGELSPCWESLRRQIVTQYQTIILTYQENLTDLHQYRGPSFKASSLKADKKLEFVPTNLHIQRMRVQDDGGSDQNYDIVTIGAPAAHCQGFKSGGLRKKLHKFEETKKQQEESRTSSGCQSIIYIPQDVVRAKEIIAQINTLKTQVSYYAERLSRAAKDRSATGLERTLAILADKTRQLVTVCDCKLLANSIHGLNAARPDYIASKASPTSTEEEQVMLRNDQDTLMARWTGRNSRSSLQVDWHEEEWEKVWLNVDKSLECIIQRVDKLLQKERLHGEGCEDVFPCAGSCTSKKDCSPPPEESSPGEWSEALYPLLTTLTDCVAMMSDKAKKAMVFLLMQDSAPTIATYLSLQYRRDVVFCQTLTALICGFIIKLRNCLHDDGFLRQLYTIGLLAQFESLLSTYGEELAMLEDMSLGIMDLRNVTFKVTQATSSASADMLPVITGNRDGFNVRVPLPGPLFDALPREIQSGMLLRVQPVLFNVGINEQQTLAERFGDTSLQEVINVESLVRLNSYFEQFKEVLPEDCLPRSRSQTCLPELLRFLGQNVHARKNKNVDILWQAAEICRRLNGVRFTSCKSAKDRTAMSVTLEQCLILQHEHGMAPQVFTQALECMRSEGCRRENTMKNVGSRKYAFNSLQLKAFPKHYRPPEGTYGKVET

SEQ ID NO: 142882 - DNA, 2817 bp, Artificial Sequence
  derived and/or modified sequence
atgacagcacgggagcactctccgcgccatggcgcgcgcgcccgagctatgcagagggctagcacaatcgacgtggctgctgacatgctgggacttagccttgctgggaacattcaagatccagatgaacccatcttagagttctccttggcctgctccgaactccacacgccatcactggaccggaaacccaattcgttcgtggctgtatctgtgacaactcctcctcaggccttttggacaaaacacgcccagactgagattatcgagggaacgaataaccctatcttcttgagctcaattgccttttttcaagatagccttataaaccaaatgacccaggtgaaactgtcggtctacgatgttaaggacaggagtcaaggcacgatgtatctcctggggagcggaaccttcatcgtgaaggatctgctgcaggacagacaccatcggcttcacttgacgctcaggtctgctgaatcagatcgcgtcggcaacataaccgttatcgggtggcagatggaggagaaatccgatcagcgcccgcccgtgacacgcagtgtcgacaccgttaacggaagaatggtgctgccagtagacgagtccctaacagaggccctggggatcagatcaaagtacgcctcattgcggaaggataccctgctcaagagcgttttcggcggcgccatctgccgaatgtatcggttcccaaccaccgatggcaatcatctgcgcattctggaacagatggcggagtctgtgctgtcactgcatgtcccacgtcagttcgtgaaactgctgcttgaagaagacgccgctagagtctgtgaacttgaggagctcggtgaactgagtccatgttgggagtctctcaggaggcagatcgtgactcagtaccagacaattattttaacataccaagagaacttaacagacctgcaccaatacagggggccctcatttaaagcctcctcacttaaggctgataaaaagttagagtttgtgccaacgaacctgcatattcagagaatgagagtccaagatgacggtggatcagaccagaattacgatattgtgacaatcggcgcccctgccgcgcattgtcagggttttaagtccggtggcctaaggaagaagctacacaagtttgaagaaacgaagaagcattttgaggagtgctgcacatcctctggctgccaatctatcatctacatcccccaggatgtggttcgggcgaaggagattatagcgcagattaatactctaaaaacacaagtttcttattatgcagaacgtctaagcagggccgccaaagatcgcagcgctactgggctggagcgaactctggccatcttggctgataagactaggcagctagtaaccgtttgcgactgcaaactccttgctaattctattcacgggcttaatgccgctagacccgactacatcgcttctaaagcgtccccaacctctacggaagaggaacaggtgatgctgagaaacgaccaggacaccctgatggctcggtggaccggtcgcaactccaggtcaagtttgcaggtggactggcacgaggaagaatgggaaaaggtttggcttaacgtcgacaagtcactggagtgcatcattcaaagagtagacaagctgctgcagaaagagcgccttcatggagagggctgcgaagatgtctttccgtgtgccgggtcctgtacctccaagaaggactgttctcctccacccgaggaatcatctcccggcgagtggagtgaagccttgtatcctctactgaccactttaaccgattgcgtcgccatgatgtccgataaggccaagaaagccatggtattcctgctcatgcaggatagcgcacccacaattgctacctacctaagcctgcagtaccgacgcgatgttgtgttttgccaaacgctcacagctttgatctgtgggttcataataaagctgcggaactgtctccacgacgacggattcttacgtcaattatacaccatcgggctactcgcccagttcgaaagcttgttgtccacctatggggaggagttggctatgctagaggacatgtctctgggcataatggacctgcgcaatgtcaccttcaaagtcacccaggccacgagcagtgcttctgccgatatgttacccgtaataactggaaatagggacgggtttaacgtgagggtaccactcccaggacccctattcgacgccctgcctagggaaattcagtccggtatgctcttgagagtgcaacctgtgctgtttaacgtgggcataaatgaacagcagacccttgcggagaggttcggggacacatcattgcaggaagttattaatgttgaatccttggtaaggctgaactcatactttgagcagtttaaggaggtgctgccagaggactgcctgccccggagccgatctcaaacatgtctgccagaattgctgagattcttgggtcagaatgtgcatgcccgcaagaataagaacgtggatattttatggcaggcagctgagatatgtagaagattaaatggcgtgaggtttacatcatgcaaaagcgctaaagaccgcaccgctatgtccgtcactttagagcagtgcctgatccttcagcatgaacacggaatggcgccccaagtttttacccaggcattagaatgtatgcggtctgaaggctgccgtagggagaacactatgaagaatgtcggatctaggaaatacgcatttaattccctgcaattgaaggcattccctaagcattaccgccctcccgaaggcacctacggcaaggtcgagacgtag

SEQ ID NO: 142883 - DNA, 2817 bp, Artificial Sequence
  derived and/or modified sequence
atgaccgccagagagcactccccccggcacggagcacgtgcacgagctatgcaacgcgctagtactatcgacgttgcggcggacatgctgggcctgtccctggccggcaacatccaggacccggatgagcccattttggagttctccctggcctgttcggagttgcacacgccctccctggatcggaaacccaattcttttgtagctgtgtccgtgaccactcctccacaggccttctggacaaagcacgcacagacagagattattgaggggactaataatccaatctttctttcgagcatcgccttctttcaggatagtttaatcaatcaaatgactcaggttaaactgtctgtatacgacgtgaaggatcgttcccaggggaccatgtacctcctgggctctgggacatttatcgtgaaagacctactgcaggatcggcaccaccgactgcacctaaccctgagatccgctgaatcggaccgggtggggaacatcaccgtaattggctggcagatggaagagaagagcgaccaacggccacctgtgactcgctcggtcgacactgtgaatggtcgcatggttctccctgtcgatgaaagcctgacggaggctctgggcatacgatctaaatacgcgagtcttcggaaagacacactgctcaaatctgtgttcggaggcgccatttgcagaatgtaccgtttccctacaacagatggaaatcacttgcggatactcgagcagatggccgaatctgtcctgtctctccatgtcccacggcagttcgtgaaactactgctggaagaggatgccgcacgtgtgtgcgagctggaggagctgggagaactgtcaccttgctgggagtctctgagaagacagattgtcacccaatatcagacgattatactgacctaccaggagaatctaacagatcttcatcaatacagggggccctcttttaaagcatcctccctgaaagccgacaaaaaactggagtttgtgcctacaaacctgcacatccagaggatgagagtccaggacgacggcgggagcgatcagaattatgatattgtgacaattggcgctcccgctgctcactgccagggctttaaatcaggcgggctaaggaagaagctgcacaagttcgaggaaaccaaaaaacagcaagaagaatcacggacaagctccggctgtcagtccatcatctacatcccacaggacgtcgtccgggctaaagagataatagcacagattaacaccctgaaaacccaggtgtcctattatgcagagaggctgtcgagggccgctaaggatagatccgccactgggctagagagaacactcgccatactggccgataaaacacgtcagctcgtgacggtatgtgattgcaaattgctcgctaactccatccacggtcttaacgctgccaggcccgattatatcgcgagcaaagcttcacccaccagcaccgaggaggagcaagtgatgctgaggaatgaccaagacactttgatggcaagatggacgggaagaaattctaggtcatctctgcaggtagattggcacgaggaggaatgggagaaggtgtggttgaacgtggataaatctctggaatgtatcattcaacgggtcgataagctgttacagaaggagagattacatggagagggctgtgaggacgtctttccttgtgctggttcttgtacatctaaaaaggattgttctccgcctcccgaggagagtagccctggtgaatggtctgaagcactctacccgttattaaccaccctgaccgattgcgttgctatgatgtccgacaaagctaagaaggcaatggtgtttctgctgatgcaggactccgcacctacaattgcgacttacctgagcctacagtatcgccgcgatgttgtcttttgccaaactcttacagccctcatttgcggattcatcataaagcttcgcaattgtttgcatgacgatggcttcctaaggcagctgtatactataggtctcctcgctcagtttgagagcttgttatccacatacggcgaagagttggcaatgcttgaagacatgagtctgggcatcatggacctgcggaacgtcaccttcaaagtgacgcaagcaacctcgagcgcaagtgcagatatgctccctgtgatcacagggaatcgagacggatttaatgtgagggtgcctctccctggaccactgttcgatgccctgcccagggagatccagtcaggcatgctcttacgggtccagcccgtcctgttcaacgtgggtattaacgagcagcagacgttggctgaaagatttggggacacgtcactgcaggaagtgataaacgtggaatctttagtaaggctaaattcctatttcgaacagttcaaagaagtactacccgaggattgtctccctagatcaagatcgcagacctgtctccccgaactgctccggttcctaggtcagaatgtccacgctagaaaaaataaaaacgtcgatattctgtggcaggctgccgagatttgtcgaagactgaacggcgtgaggtttacaagctgcaaatctgctaaggatcggacggctatgagtgttacgttagaacagtgtctaatcctccaacatgaacatggaatggctccccaagtgtttacacaagctttagagtgcatgcggtccgagggctgccgccgggagaacactatgaaaaacgtggggagccgcaagtacgccttcaactctctgcagttaaaggcgttccctaagcactatcgtccgccggaaggaacctacggcaaggtggagacgtag

SEQ ID NO: 142884 - DNA, 6406 bp, Artificial Sequence
  derived and/or modified sequence
cggcgtctagagcggcggcggctggctagggctgcggcgcgcgtggagggttcgctgctggtttgccgccgggtcgggctccgtgggccggggcaggaggaccagcacctgaggccgggcccgcagcccgcgacttcacagccaggcggcggcgctgctgctgctgcggggctctggcgcgcagcccggcgggacagcggggcggctggcgccgggggccggggagcgccagatgatggatttggacatgcttctatgaagaaatgccacatggtccgagagcaaacatgtccaggctactgccactttagtggactagggctcggtgccagcacttcccgggtaatcaggcgtggtctgaccgaggatcaagaagcacatcatcaccaatgacatcatgacagcaagagagcacagccctcgccatggtgccagggcccgtgcaatgcagcgggcttccaccatcgacgtggcggccgacatgctgggcctctctctggcaggaaatatacaagacccagatgagcccattttagaatttagcttagcttgcagtgagctgcatactccatcgctagatcgaaagccaaatagttttgttgcggtgagtgtcaccacccctcctcaggcattctggacgaagcatgcacagacggagatcattgagggaaccaacaatcctatatttctaagcagtattgccttctttcaagactctcttatcaatcagatgacacaagtcaaactctccgtgtatgatgtcaaagatagatctcagggaacaatgtatttactgggctctggaacgttcattgtcaaagatctgctccaggacaggcatcataggttgcatttaacactaaggtctgcagagagtgaccgtgtaggtaacatcaccgtgattggctggcagatggaggagaagtcagaccaacggccccctgtgacccggtctgtggacactgtcaatgggaggatggttcttcctgtcgatgagagcttgacggaggcgttaggaatccgatccaaatacgcttcattgcgaaaggacactttgctgaaatcggtgttcggtggtgccatctgccgcatgtaccggtttccaaccactgatggtaaccatttgcggatcctggagcagatggcagagagcgtgctctccctgcacgtgccccggcagttcgtgaagctcctactagaggaagatgcagccagagtgtgtgagctggaggagctgggagagctgtccccttgctgggagagcctccggcgccaaattgtcacccagtaccagaccatcatcctcacataccaggagaacctgaccgacctccatcagtacagagggccctcgtttaaagcaagcagtttgaaagcagataaaaagttagaatttgttcccacaaacttgcacatacaaaggatgagagttcaagacgatggaggatcagatcagaactacgacatcgtcaccattggggcgccagcagcacactgccaaggttttaagtcaggaggtctccgcaaaaagctgcacaaatttgaagagaccaagaaacattttgaggagtgttgtacatcatctggctgccagtccataatctacataccccaggatgttgtcagagccaaggagatcatcgcccagatcaacaccctgaaaacccaagtgagttactacgcagagcggctgtcaagggcagccaaggacaggtctgccactggccttgagaggacactcgccatcttggcagacaagacacggcagctggtcacggtctgcgactgcaagctcctggccaactccatccatgggctgaacgctgcacggcctgactacattgcctccaaggcctctcccacttcgactgaggaggagcaggtgatgcttagaaatgaccaggacaccctcatggcccggtggacagggagaaacagccgatcttccctgcaggtggactggcacgaggaggagtgggagaaagtgtggctgaacgtggacaagagcctagagtgcatcattcagcgtgtggacaagctgctgcagaaggagcggctgcatggcgagggctgtgaggatgtcttcccctgtgcaggcagctgcaccagcaagaaagattgcagtccccctcctgaagagtccagcccaggtgaatggagtgaggccctttacccgctgctgaccactctcaccgactgcgtggccatgatgagtgacaaggccaagaaggccatggtattcctgctcatgcaggacagcgcgcccaccatagccacctacctgagcctgcagtaccgccgtgacgtggtcttctgccagacgctgaccgccctcatctgcggcttcatcattaagctgaggaactgcctgcatgacgacggcttcctgcgccagctctacaccatcgggctgctggcccagttcgagagcctgctgagcacctacggggaggagctggcaatgctggaggacatgagccttgggatcatggacttgaggaacgtgaccttcaaagtcactcaggccacttccagcgcctccgcagacatgctgcccgtcatcacaggaaatcgcgacgggtttaacgtgcgggtccctctgccgggcccgctgtttgacgccttgccccgggagatccagagtggcatgctgctgcgagtgcagcccgtcctcttcaacgtgggcatcaatgagcagcagacactggccgagaggtttggcgatacgtctttacaagaagtcatcaacgtggagagtttggtgcggttaaattcctactttgagcagtttaaggaagttttgcctgaggattgcctgcctcggtctcgcagtcagacgtgcctgccagagctgctgcggtttctgggtcagaacgtgcatgcccggaagaataagaacgtcgacattctctggcaagctgctgagatctgccgccgccttaatggggtccggttcaccagctgcaagagcgctaaggaccgtacagccatgtcggtgacactggagcagtgcctgatcctgcaacacgagcatggcatggccccgcaggtcttcacccaggccctggagtgcatgcgcagtgagggttgtcgaagagaaaatacaatgaagaatgttggaagtcgcaaatatgcatttaattccctgcagctgaaggctttccccaagcattacaggcctcccgaagggacttacggaaaagttgaaacgtgaacacacggtttcctctaattagctgttacataataaatgtgggtaccctctagtgtcatatatgaattcttcaagaagacctgaaggattggtttttattttttgtggtttttttaaaaaaaacatttcactaaagagtctctggagcatgttttttgttttttgggtttttttccccattggaatcaataggaggtaatgtttggctcaatagtgtggatagtaacaactgcctatttaaattaaatagcctttggctgtaactacacagatctcatcaatagttacctacatgaatcaagctaggtttgtctgaaatgctagaagactttttcaaatgcctgcttgctcacttacttttctacagagtaactcaaaagtaaccattgaattacaatccactttgtaaaaatctgaatgtaaaacagtaaataataaattaaataattggatcctaggcataccaataaatgttatttggggaaagaagctagcactatctcatgcagtgagaataacgggttctagtgaattatcctatctacactaccacctgaagaagttgaaagaaagattgataaatcaacgggagataagactttattagaaggtaacacctgcaaggtaccccacatagttggggccactcttttttctgtcccttatgagttacagaacagggagtctgctggagacacaaagccagcagtaaggtccctttagcctgtctcctgttctctgaagctccctgccgaggctccctcacgcccagaggacacatctccccttcttctctagatgttaatgtagggcctcagatgtggcatgtcaacactcccatggggaatttatgaccatagagatagtagaaacctaaatattttcagaaaaaaaattttttttgcaggatttccaatttatctttgaaaagacagtacaatcatgtttgaatgtctgatgaaagtgtcttatttttaggtttgcaataattgttactttcttattctcattcttatgtaagatgactattgagaaacagttgaaatttattctcctcaaatgagattttgaaagggatttatgggccataaaacttaggaatttcatagaaaattttgtctggtcatcttttataagatgatgatgagtcttatctgcacatagcagagtttgtttcttaggagtttatatgttttattgattctgtttacgatgtttacatgttcttgaaaaggttgtaaaagaaatacatatggcacatattaatgatgctgatcctaatgatttgtgaacctcttagaaattcttttgtctaaaagcctagagattcttctggttcctttagaaacatgtaacaaacttgggccaggggtgctgaggcatggggaggactgcttattggcaggaacacagagggggtgggcatcaggtagggtggaactggatgaccttccagaccccctcctactcagaagtcagcatgcaagcagcgcctgctgtctcccgatgcctgcagggaggaaaatgtctgtgaaggacactttaatgaaggacgaagctctctgctgctccctcaaagctgagttcactgtggcaggcaggaagcagagaagctcctgcccgccaaacccactgcacaggtggctgctgctggtatcagattctcctttttaagtgtcaatttctgttcacagacagtttgttttcaatatggctgatttaccctttcacctctccaccatctcatttaatttgtaaatttttagttctgtcttttctcattttaacttttaaaaaatctccttgctttttaaaaataaatattacccacatagttttcagatcttttttgtctggagagcattaaatatctgcactcatcaaagggaatatagcaaatgttgatcatctgtcagcagttttgcatgtgacacctttatatgaattattttcccaatttttgctctatgtaatgggtcaccataaaactgtaagacttggcaaatgctatagaaaaggttcaggtttcagtattctctctgaaggcatcattcctgggcttccggcagcatcacacgcttccagtgcctgcagggtgagggtgtgtggcacagaggcaagcagctcctctcttctgtaggagctttgggttttcagaggtgcagggaaggcagttttacaggttaccgtaaaacagaggttccgtccagtgttccttatgatgcctccccatttaaaaagaaaagagatctatggaaaactgggaatgtaatgtggattctgtcagagctcctacagagcacagttgcctttagtttcctttaaagatgtaaaaatattgtataatacagttttgtccctacacaattgtatttgccaagcttagtgcattatgatacctttatttatttgttttgggcagtattactatatatatataaacatacagttactgttttatatattcttaggtcattcaaagccatgtatgctgtaaatgtgctagtctttagaatgacacataataaataactgacaagatattaaatgtggtcttgcctgattcatcctattaggaggactagttctatgtgaccagcctgtgactggaccattgttcttgggcattgcattgagtgctcgggtgctgaatacatgtttgtaaacatgggaccatgggagacttccattttataagcttgtttctgcctaatttgaagcagaggggcaacagcgttgaggttaagagcacggactttgggagcacacagaccaggtcccaatcctggttctgcccctgactggctggtgactctgagcaagttgcttgacctctccaagcctccgtttcctcatgtgcaaagtgtggacaacaacagtaccttcctcataaggaacgtgcgacgcgcctcagaagtacgtgttcataaatggtagccattgttgttaccttcccgtctgtgaacatggatcacatcatctctgtgggtaacccagtcctcgttgtatgacttgtcaaaatgcagttccacttgtattaatattgaccctgttcatcgtcaccaggactgcatcttgcaccactgtgccgtcttctaggcacacacgacccgttatctcccttggaaaaattcctctcactggaaatgtacaattaaaggatgattgaaatgtttaactcttggagttttt

SEQ ID NO: 142885 - DNA, 6635 bp, Artificial Sequence
  derived and/or modified sequence
gtctagagcggcggcggctggctagggctgcggcgcgcgtggagggttcgctgctggtttgccgccgggtcgggctccgtgggccggggcaggaggaccagcacctgaggccgggcccgcagcccgcgacttcacagccaggcggcggcgctgctgctgctgcggggctctggcgcgcagcccggcgggacagcggggcggctggcgccgggggccggggagcgccagatgatggatttggacatgcttctatgaagaaatgccacatggtccgagagcaaacatgtccaggctactgccactttagtggactagggctcggtgccagcacttcccgggtaatcaggcgtggtctgaccgaggatcaagaagcacatcatcaccaatgacatcatgacagcaagagagcacagccctcgccatggtgccagggcccgtgcaatgcagcgggcttccaccatcgacgtggcggccgacatgctgggcctctctctggcaggaaatatacaagacccagatgagcccattttagaatttagcttagcttgcagtgagctgcatactccatcgctagatcgaaagccaaatagttttgttgcggtgagtgtcaccacccctcctcaggcattctggacgaagcatgcacagacggagatcattgagggaaccaacaatcctatatttctaagcagtattgccttctttcaagactctcttatcaatcagatgacacaagtcaaactctccgtgtatgatgtcaaagatagatctcagggaacaatgtatttactgggctctggaacgttcattgtcaaagatctgctccaggacaggcatcataggttgcatttaacactaaggtctgcagagagtgaccgtgtaggtaacatcaccgtgattggctggcagatggaggagaagtcagaccaacggccccctgtgacccggtctgtggacactgtcaatgggaggatggttcttcctgtcgatgagagcttgacggaggcgttaggaatccgatccaaatacgcttcattgcgaaaggacactttgctgaaatcggtgttcggtggtgccatctgccgcatgtaccggtttccaaccactgatggtaaccatttgcggatcctggagcagatggcagagagcgtgctctccctgcacgtgccccggcagttcgtgaagctcctactagaggaagatgcagccagagtgtgtgagctggaggagctgggagagctgtccccttgctgggagagcctccggcgccaaattgtcacccagtaccagaccatcatcctcacataccaggagaacctgaccgacctccatcagtacagagggccctcgtttaaagcaagcagtttgaaagcagataaaaagttagaatttgttcccacaaacttgcacatacaaaggatgagagttcaagacgatggaggatcagatcagaactacgacatcgtcaccattggggcgccagcagcacactgccaaggttttaagtcaggaggtctccgcaaaaagctgcacaaatttgaagagaccaagaaacaacaggaagaatctcgtacatcatctggctgccagtccataatctacataccccaggatgttgtcagagccaaggagatcatcgcccagatcaacaccctgaaaacccaagtgagttactacgcagagcggctgtcaagggcagccaaggacaggtctgccactggccttgagaggacactcgccatcttggcagacaagacacggcagctggtcacggtctgcgactgcaagctcctggccaactccatccatgggctgaacgctgcacggcctgactacattgcctccaaggcctctcccacttcgactgaggaggagcaggtgatgcttagaaatgaccaggacaccctcatggcccggtggacagggagaaacagccgatcttccctgcaggtggactggcacgaggaggagtgggagaaagtgtggctgaacgtggacaagagcctagagtgcatcattcagcgtgtggacaagctgctgcagaaggagcggctgcatggcgagggctgtgaggatgtcttcccctgtgcaggcagctgcaccagcaagaaagattgcagtccccctcctgaagagtccagcccaggtgaatggagtgaggccctttacccgctgctgaccactctcaccgactgcgtggccatgatgagtgacaaggccaagaaggccatggtattcctgctcatgcaggacagcgcgcccaccatagccacctacctgagcctgcagtaccgccgtgacgtggtcttctgccagacgctgaccgccctcatctgcggcttcatcattaagctgaggaactgcctgcatgacgacggcttcctgcgccagctctacaccatcgggctgctggcccagttcgagagcctgctgagcacctacggggaggagctggcaatgctggaggacatgagccttgggatcatggacttgaggaacgtgaccttcaaagtcactcaggccacttccagcgcctccgcagacatgctgcccgtcatcacaggaaatcgcgacgggtttaacgtgcgggtccctctgccgggcccgctgtttgacgccttgccccgggagatccagagtggcatgctgctgcgagtgcagcccgtcctcttcaacgtgggcatcaatgagcagcagacactggccgagaggtttggcgatacgtctttacaagaagtcatcaacgtggagagtttggtgcggttaaattcctactttgagcagtttaaggaagttttgcctgaggattgcctgcctcggtctcgcagtcagacgtgcctgccagagctgctgcggtttctgggtcagaacgtgcatgcccggaagaataagaacgtcgacattctctggcaagctgctgagatctgccgccgccttaatggggtccggttcaccagctgcaagagcgctaaggaccgtacagccatgtcggtgacactggagcagtgcctgatcctgcaacacgagcatggcatggccccgcaggtcttcacccaggccctggagtgcatgcgcagtgagggttgtcgaagagaaaatacaatgaagaatgttggaagtcgcaaatatgcatttaattccctgcagctgaaggctttccccaagcattacaggcctcccgaagggacttacggaaaagttgaaacgtgaacacacggtttcctctaattagctgttacataataaatgtgggtaccctctagtgtcatatatgaattcttcaagaagacctgaaggattggtttttattttttgtggtttttttaaaaaaaacatttcactaaagagtctctggagcatgttttttgttttttgggtttttttccccattggaatcaataggaggtaatgtttggctcaatagtgtggatagtaacaactgcctatttaaattaaatagcctttggctgtaactacacagatctcatcaatagttacctacatgaatcaagctaggtttgtctgaaatgctagaagactttttcaaatgcctgcttgctcacttacttttctacagagtaactcaaaagtaaccattgaattacaatccactttgtaaaaatctgaatgtaaaacagtaaataataaattaaataattggatcctaggcataccaataaatgttatttggggaaagaagctagcactatctcatgcagtgagaataacgggttctagtgaattatcctatctacactaccacctgaagaagttgaaagaaagattgataaatcaacgggagataagactttattagaaggtaacacctgcaaggtaccccacatagttggggccactcttttttctgtcccttatgagttacagaacagggagtctgctggagacacaaagccagcagtaaggtccctttagcctgtctcctgttctctgaagctccctgccgaggctccctcacgcccagaggacacatctccccttcttctctagatgttaatgtagggcctcagatgtggcatgtcaacactcccatggggaatttatgaccatagagatagtagaaacctaaatattttcagaaaaaaaattttttttgcaggatttccaatttatctttgaaaagacagtacaatcatgtttgaatgtctgatgaaagtgtcttatttttaggtttgcaataattgttactttcttattctcattcttatgtaagatgactattgagaaacagttgaaatttattctcctcaaatgagattttgaaagggatttatgggccataaaacttaggaatttcatagaaaattttgtctggtcatcttttataagatgatgatgagtcttatctgcacatagcagagtttgtttcttaggagtttatatgttttattgattctgtttacgatgtttacatgttcttgaaaaggttgtaaaagaaatacatatggcacatattaatgatgctgatcctaatgatttgtgaacctcttagaaattcttttgtctaaaagcctagagattcttctggttcctttagaaacatgtaacaaacttgggccaggggtgctgaggcatggggaggactgcttattggcaggaacacagagggggtgggcatcaggtagggtggaactggatgaccttccagaccccctcctactcagaagtcagcatgcaagcagcgcctgctgtctcccgatgcctgcagggaggaaaatgtctgtgaaggacactttaatgaaggacgaagctctctgctgctccctcaaagctgagttcactgtggcaggcaggaagcagagaagctcctgcccgccaaacccactgcacaggtggctgctgctggtatcagattctcctttttaagtgtcaatttctgttcacagacagtttgttttcaatatggctgatttaccctttcacctctccaccatctcatttaatttgtaaatttttagttctgtcttttctcattttaacttttaaaaaatctccttgctttttaaaaataaatattacccacatagttttcagatcttttttgtctggagagcattaaatatctgcactcatcaaagggaatatagcaaatgttgatcatctgtcagcagttttgcatgtgacacctttatatgaattattttcccaatttttgctctatgtaatgggtcaccataaaactgtaagacttggcaaatgctatagaaaaggttcaggtttcagtattctctctgaaggcatcattcctgggcttccggcagcatcacacgcttccagtgcctgcagggtgagggtgtgtggcacagaggcaagcagctcctctcttctgtaggagctttgggttttcagaggtgcagggaaggcagttttacaggttaccgtaaaacagaggttccgtccagtgttccttatgatgcctccccatttaaaaagaaaagagatctatggaaaactgggaatgtaatgtggattctgtcagagctcctacagagcacagttgcctttagtttcctttaaagatgtaaaaatattgtataatacagttttgtccctacacaattgtatttgccaagcttagtgcattatgatacctttatttatttgttttgggcagtattactatatatatataaacatacagttactgttttatatattcttaggtcattcaaagccatgtatgctgtaaatgtgctagtctttagaatgacacataataaataactgacaagatattaaatgtggtcttgcctgattcatcctattaggaggactagttctatgtgaccagcctgtgactggaccattgttcttgggcattgcattgagtgctcgggtgctgaatacatgtttgtaaacatgggaccatgggagacttccattttataagcttgtttctgcctaatttgaagcagaggggcaacagcgttgaggttaagagcacggactttgggagcacacagaccaggtcccaatcctggttctgcccctgactggctggtgactctgagcaagttgcttgacctctccaagcctccgtttcctcatgtgcaaagtgtggacaacaacagtaccttcctcataaggaacgtgcgacgcgcctcagaagtacgtgttcataaatggtagccattgttgttaccttcccgtctgtgaacatggatcacatcatctctgtgggtaacccagtcctcgttgtatgacttgtcaaaatgcagttccacttgtattaatattgaccctgttcatcgtcaccaggactgcatcttgcaccactgtgccgtcttctaggcacacacgacccgttatctcccttggaaaaattcctctcactggaaatgtacaattaaaggatgattgaaatgtttaactcttggagtttttagtattaccaaactcctagaaatttaagctaccaccaaaaataacatgtgccttttccctttattctcattgatggtagcagtgcacctcgtttcagtgtcctgattccttgattactgtgaacactgaacatcttttatacctttatgatatttctatgtttgtgacttcattggaatgttgatctatttcatatagattgtttttaatatacaatgtattagcccctgtca

SEQ ID NO: 142886 - DNA, 2817 bp, Artificial Sequence
  derived and/or modified sequence
atgacagcccgggagcacagccccaggcatggagcccgggcccgggccatgcagagggccagcaccattgatgtggccgctgacatgctgggcctgagcctggccggcaacatccaggaccctgatgagcccatcctggagttcagcctggcctgcagcgagctgcacacccccagcctggacaggaagcccaacagctttgtggccgtgtctgtgaccaccccaccccaggccttctggaccaagcacgcccagacagagatcatcgagggcaccaacaaccccatcttcctgagcagcatcgccttcttccaggacagcctcatcaaccagatgacccaggtgaagctgtctgtgtatgatgtgaaggacaggagccagggcaccatgtacctgctgggcagcggcaccttcatcgtgaaggacctgctgcaggacagacaccaccggctgcacctgaccctgcggtctgctgagagtgacagagtgggcaacatcaccgtgattggctggcagatggaggagaagagtgaccagaggcctcctgtgaccaggtctgtggacacagtgaatggaaggatggtgctgcctgtggatgagagcctgacagaggccctgggcatccgcagcaaatatgccagcctgaggaaggacaccctgctgaagtctgtgtttggaggagccatctgcaggatgtaccgcttccccaccacagatggcaaccacctgcgcatcctggagcagatggccgagagcgtgctgagcctgcacgtgccccggcagtttgtgaagctgctgctggaggaggatgctgcccgggtgtgtgagctggaggagctgggggagctgagcccctgctgggagagcctgcggcggcagatcgtgacccagtaccagaccatcatcctgacctaccaggagaacctgacagacctgcaccagtaccggggccccagcttcaaggccagcagcctgaaggctgacaagaagctggagtttgtgcccaccaacctgcacatccagaggatgagggtgcaggatgatggcggcagtgaccagaactatgacatcgtgaccatcggggccccagctgcccactgccagggcttcaagagcggcggcctgaggaagaagctgcacaagtttgaggagaccaagaagcactttgaggagtgctgcaccagcagcggctgccagagcatcatctacatcccccaggatgtggtgcgggccaaggagatcatcgcccagatcaacaccctgaagacccaggtgtcctactatgcagagcggctgagcagagctgccaaggacagaagtgccaccggcctggagaggaccctggccatcctggccgacaagacccggcagctggtgacagtgtgtgactgcaagctgctggccaacagcatccacggcctgaatgctgcccggccagactacatcgccagcaaggccagccccaccagcacagaggaggagcaggtgatgctgagaaatgaccaggacaccctgatggcccgctggacaggcaggaacagccgcagcagcctgcaggtggactggcatgaggaggagtgggagaaggtgtggctgaatgtggacaagagcctggagtgcatcatccagagggtggacaagctgctgcagaaggagcggctgcatggagagggctgtgaagatgtgttcccctgtgccggcagctgcaccagcaagaaggactgcagccccccacctgaggagagcagccctggagagtggagcgaggccctgtaccccctgctgaccaccctgacagactgtgtggccatgatgtctgacaaggccaagaaggccatggtgttcctgctgatgcaggacagcgcccccaccatcgccacctacctgagcctgcagtacagaagagatgtggtgttctgccagaccctgacagccctgatctgtggcttcatcatcaagctgaggaactgcctgcatgatgatggcttcctgcggcagctgtacaccatcggcctgctggcccagtttgagagcctgctgagcacctatggagaggagctggccatgctggaggacatgagcctgggcatcatggacctgagaaatgtgaccttcaaggtgacccaggccaccagcagcgccagcgctgacatgctgcccgtcatcactggaaacagagatggcttcaacgtgcgggtgcccctgcccggccccctgtttgatgccctgccccgggagatccagagcggcatgctgctgcgggtgcagcctgtgctcttcaacgtgggcatcaatgagcagcagaccctggccgagagatttggagacaccagcctgcaggaggtgatcaacgtggagagcctggtgcggctgaacagctactttgagcagttcaaggaggtgctgcctgaggactgcctgcccaggagccgcagccagacctgcctgcctgagctgctgcgcttcctgggccagaatgtgcacgccaggaagaacaagaatgtggacatcctgtggcaggccgctgagatctgccggcggctgaatggagtgcgcttcaccagctgcaagagcgccaaggacagaacagccatgtctgtgaccctggagcagtgcctgatcctgcagcatgaacatggcatggccccccaggtgttcacccaggccctggagtgcatgaggtctgagggctgcagaagagagaacaccatgaagaatgtgggcagcaggaaatatgccttcaacagcctgcagctgaaggccttccccaagcactaccggcccccagagggcacctacggcaaggtggagacctag

SEQ ID NO: 142887 - DNA, 2817 bp, Artificial Sequence
  derived and/or modified sequence
atgacagcccgggagcacagccccaggcatggagcccgggcccgggccatgcagagggccagcaccattgatgtggccgctgacatgctgggcctgagcctggccggcaacatccaggaccctgatgagcccatcctggagttcagcctggcctgcagcgagctgcacacccccagcctggacaggaagcccaacagctttgtggccgtgtctgtgaccaccccaccccaggccttctggaccaagcacgcccagacagagatcatcgagggcaccaacaaccccatcttcctgagcagcatcgccttcttccaggacagcctcatcaaccagatgacccaggtgaagctgtctgtgtatgatgtgaaggacaggagccagggcaccatgtacctgctgggcagcggcaccttcatcgtgaaggacctgctgcaggacagacaccaccggctgcacctgaccctgcggtctgctgagagtgacagagtgggcaacatcaccgtgattggctggcagatggaggagaagagtgaccagaggcctcctgtgaccaggtctgtggacacagtgaatggaaggatggtgctgcctgtggatgagagcctgacagaggccctgggcatccgcagcaaatatgccagcctgaggaaggacaccctgctgaagtctgtgtttggaggagccatctgcaggatgtaccgcttccccaccacagatggcaaccacctgcgcatcctggagcagatggccgagagcgtgctgagcctgcacgtgccccggcagtttgtgaagctgctgctggaggaggatgctgcccgggtgtgtgagctggaggagctgggggagctgagcccctgctgggagagcctgcggcggcagatcgtgacccagtaccagaccatcatcctgacctaccaggagaacctgacagacctgcaccagtaccggggccccagcttcaaggccagcagcctgaaggctgacaagaagctggagtttgtgcccaccaacctgcacatccagaggatgagggtgcaggatgatggcggcagtgaccagaactatgacatcgtgaccatcggggccccagctgcccactgccagggcttcaagagcggcggcctgaggaagaagctgcacaagtttgaggagaccaagaagcagcaggaggagagcaggaccagcagcggctgccagagcatcatctacatcccccaggatgtggtgcgggccaaggagatcatcgcccagatcaacaccctgaagacccaggtgtcctactatgcagagcggctgagcagagctgccaaggacagaagtgccaccggcctggagaggaccctggccatcctggccgacaagacccggcagctggtgacagtgtgtgactgcaagctgctggccaacagcatccacggcctgaatgctgcccggccagactacatcgccagcaaggccagccccaccagcacagaggaggagcaggtgatgctgagaaatgaccaggacaccctgatggcccgctggacaggcaggaacagccgcagcagcctgcaggtggactggcatgaggaggagtgggagaaggtgtggctgaatgtggacaagagcctggagtgcatcatccagagggtggacaagctgctgcagaaggagcggctgcatggagagggctgtgaagatgtgttcccctgtgccggcagctgcaccagcaagaaggactgcagccccccacctgaggagagcagccctggagagtggagcgaggccctgtaccccctgctgaccaccctgacagactgtgtggccatgatgtctgacaaggccaagaaggccatggtgttcctgctgatgcaggacagcgcccccaccatcgccacctacctgagcctgcagtacagaagagatgtggtgttctgccagaccctgacagccctgatctgtggcttcatcatcaagctgaggaactgcctgcatgatgatggcttcctgcggcagctgtacaccatcggcctgctggcccagtttgagagcctgctgagcacctatggagaggagctggccatgctggaggacatgagcctgggcatcatggacctgagaaatgtgaccttcaaggtgacccaggccaccagcagcgccagcgctgacatgctgcccgtcatcactggaaacagagatggcttcaacgtgcgggtgcccctgcccggccccctgtttgatgccctgccccgggagatccagagcggcatgctgctgcgggtgcagcctgtgctcttcaacgtgggcatcaatgagcagcagaccctggccgagagatttggagacaccagcctgcaggaggtgatcaacgtggagagcctggtgcggctgaacagctactttgagcagttcaaggaggtgctgcctgaggactgcctgcccaggagccgcagccagacctgcctgcctgagctgctgcgcttcctgggccagaatgtgcacgccaggaagaacaagaatgtggacatcctgtggcaggccgctgagatctgccggcggctgaatggagtgcgcttcaccagctgcaagagcgccaaggacagaacagccatgtctgtgaccctggagcagtgcctgatcctgcagcatgaacatggcatggccccccaggtgttcacccaggccctggagtgcatgaggtctgagggctgcagaagagagaacaccatgaagaatgtgggcagcaggaaatatgccttcaacagcctgcagctgaaggccttccccaagcactaccggcccccagagggcacctacggcaaggtggagacctag

SEQ ID NO: 142888 - DNA, 2817 bp, Artificial Sequence
  derived and/or modified sequence
atgaccgcccgggagcacagcccccggcacggcgcccgggcccgggccatgcagagagcttctaccatcgatgtcgctgccgatatgcttggcctgtcacttgccgggaatatccaagaccccgacgagccaatactggagttctctctggcttgtagtgaactgcacacgccctcccttgataggaagcccaacagctttgtggctgtgtcagtgaccactcccccacaggctttttggacaaagcatgcccagacagagatcattgagggaaccaacaatcccatttttctgagtagtattgcattttttcaggactcactgatcaaccagatgacccaggtgaagctgtcagtctatgacgttaaggacaggtctcaaggaaccatgtatctgctcgggtcggggacatttatagtgaaggacctgttgcaagatagacaccaccggctccatctgaccttacgtagcgccgagagcgaccgagtaggcaacatcactgtcataggatggcagatggaagaaaaatcagatcaacgcccaccagtaaccagaagcgttgacactgtcaatgggcgtatggtgctgcccgtggatgaatccttaaccgaagcactggggataaggagtaaatacgccagcttgaggaaggacacactgttgaagtctgtattcggtggggcaatctgccggatgtaccgtttcccaaccactgacggaaaccacctgcggattctcgaacaaatggcagaatcggttctcagcctccacgttcccaggcagtttgtcaagttgctcctggaagaggacgccgcaagagtttgcgagctggaagagctgggggaactgtccccttgctgggagtcactgagacggcagatcgttacacaataccaaactatcatcctgacctatcaagagaatctcaccgatttacatcaatacagaggccccagttttaaagcaagtagcctgaaggccgataaaaagctcgaattcgttcccaccaacctgcacatccagagaatgcgtgttcaggatgatggaggatctgaccaaaattacgacattgtgactatcggcgcccccgcagcacattgccagggcttcaagagcggcggactcagaaaaaagctgcataagttcgaagagacgaaaaagcatttcgaggagtgttgtacatcttccggatgtcagagcattatttatatcccccaggacgtggttcgcgccaaggagatcatcgcccagataaacactttgaaaacacaggtttcttactatgctgaacggctgtcacgagccgcaaaggatagatcagcaaccggtctcgagcgcacgctcgcgatactggccgacaaaaccagacagttggtcaccgtttgtgactgcaagctcttagccaattccatacacggcctcaacgcagcacgaccggattacatcgcctccaaagcctctcccacatccaccgaagaagaacaggtgatgctgaggaacgaccaggataccctgatggcgaggtggactggccgcaactcccgctcatcactgcaggtggactggcacgaggaggagtgggagaaagtctggcttaatgtcgacaagtctttagaatgcattatacagagagtggacaagcttcttcaaaaagagagattacacggggaggggtgtgaagacgtgttcccctgcgctggatcttgcacttccaaaaaagactgttctccacctcccgaggagagcagccccggtgagtggtccgaggccctctatcccctcctgaccacattaaccgactgcgtcgccatgatgtccgataaggcgaagaaagccatggtcttcctgctgatgcaggactccgccccaacgatcgctacctatttatctttacagtaccggcgcgacgttgtgttttgccagacactcaccgccttaatttgcggtttcattatcaagctgaggaattgcctgcacgacgacggatttcttagacagctgtataccatcggattgttagcacagttcgagtctctgttatccacttatggagaggagctggctatgctggaggatatgagcctgggaattatggacctgcgcaatgtaactttcaaagtaacccaggccacctcctctgcgagcgcggacatgctccccgtcatcactggaaaccgagacggctttaatgttcgggtgccgcttcccggcccactattcgatgctctgccaagagagatacagtccgggatgctgctgcgggtccaaccagtgttgtttaatgtgggcataaatgaacagcaaaccctggcagagcgcttcggggacacaagcctgcaggaggtgattaatgtggaaagccttgtcagactgaacagctacttcgagcagttcaaagaggtgctgcctgaggattgtctccctagatccagaagtcagacttgcctgcccgagctgttgaggtttttggggcaaaatgtccacgcaagaaaaaacaagaacgtggacatattgtggcaggctgccgaaatctgtagacgtctgaatggtgtgcgcttcacctcctgcaagtccgccaaagatcgcacggccatgagcgtcaccttggagcaatgtctgatacttcagcacgaacatggaatggctcctcaggtgttcacccaagcgctcgagtgcatgaggtcagaaggctgtcgccgagaaaacacaatgaaaaatgttggctcgcggaagtatgcctttaactcgctccaactcaaggcttttcccaaacattacaggcctcctgaaggcacgtacgggaaggtggaaacgtag

SEQ ID NO: 142889 - DNA, 2817 bp, Artificial Sequence
  derived and/or modified sequence
atgaccgcccgggagcacagcccccggcacggcgcccgggcccgggccatgcagcgcgcatctaccatcgacgtggcagccgacatgcttggactatcattggcaggcaatattcaggaccctgatgagcctatcttggagttctccttggcatgttccgagcttcacacgcctagcctcgatcgcaagccaaatagctttgtcgcagtgtcggtgacaacaccgccccaagcattttggacaaaacacgcccagacagagatcatagaggggaccaacaacccaatattcctaagttccattgcgttttttcaggattcgctgatcaaccaaatgacgcaggtgaagctgtctgtgtacgacgtgaaagatcgcagccaagggactatgtacctgctaggctccggcacgttcattgttaaagacctgttgcaagatcggcaccatagactacaccttactctgcgctccgccgagtcagatcgggtgggcaacattaccgttatcggatggcaaatggaggaaaagagcgaccagcggcctccagtgacaaggtctgtcgataccgttaacgggagaatggtattacccgttgatgaatcattgacagaggctctcgggattcggagcaaatacgcttccctgcggaaagatacccttctcaaaagcgtctttgggggagccatctgtcgtatgtacaggttccccactacagatgggaatcatctccgcatcctcgagcaaatggctgaaagcgtcctgtctctccacgtcccccgccagtttgtcaagctgctgctggaggaggatgctgcccgtgtgtgcgaactggaggagttgggggagctttccccatgttgggaatcgctcaggaggcagatcgttactcaataccaaacaatcatactcacttatcaggaaaacctgaccgatctgcaccagtacagaggaccgagttttaaggcgtcttccttgaaagctgataaaaaactggaattcgttcccacaaatctgcacattcaaaggatgagagtgcaggatgatgggggatcggatcagaactatgatattgttactatcggcgctcccgcggcccattgtcagggctttaagagcggagggctgagaaagaagcttcacaagttcgaggagaccaaaaagcagcaagaggagagccgtaccagcagtggatgtcagtccatcatttatatacctcaggacgttgtgcgggcaaaggagataatcgcccaaatcaatacattgaagacgcaggtgtcctactacgctgagaggctctctcgtgctgccaaagatcgatcagccaccggattagagagaacccttgcaattctggcagataaaacgaggcagttggtaactgtgtgtgactgcaagctccttgctaattcaatccatggactcaacgcggctaggcccgattatatagcctctaaggcatcacctacgtctacagaagaggagcaggtcatgctcaggaacgaccaggatacactgatggctagatggacagggaggaatagtcggagctccctgcaagttgattggcatgaggaggagtgggagaaggtgtggctgaacgtggacaaaagccttgagtgtattatacagcgagtggataagctgctgcagaaagagcggctgcatggcgagggttgtgaagatgttttcccatgcgcaggttcttgtacgagtaaaaaggattgcagtcctccacctgaggaaagttctcccggagagtggagcgaagccctttatccattactcacaaccctgactgattgtgtagctatgatgagcgataaagccaagaaggcaatggtgttcctcctaatgcaggacagcgcgcccacaattgctacctatctgtctctgcagtacaggagagacgtggtcttctgtcagacactcactgcgctcatttgcggcttcataattaaactcaggaattgtctccatgatgacggctttctgcggcaactctacaccattgggctgctggctcagtttgagtcgctgttgtcaacatacggcgaggaactagcgatgctggaagacatgtccctgggtataatggacctccgaaacgtgacattcaaagtcacacaggcaacctcctctgcgtcagccgatatgttgccggttattaccgggaatagagacggtttcaatgtcagagtgcctctgccaggacctctgtttgatgctctgcctcgagaaattcaatcggggatgttactgagagtccagcccgtgctgttcaatgtgggaataaacgagcaacagacactcgccgagcggtttggagacacctccctgcaagaggtaatcaatgtggagtccctagtacgcctgaattcttactttgaacagtttaaggaagtgttgcccgaggattgtctgccaagaagccggtcccagacttgtctccctgagcttctacggtttctcggccagaatgttcatgcccggaaaaacaagaatgttgatatcctgtggcaggccgccgaaatttgcaggagacttaatggcgtcaggtttacatcctgtaaatccgccaaggacaggacggcaatgtctgtgacacttgagcagtgcctgatcctacagcacgagcacggcatggctccacaagtgttcacacaagccctggaatgtatgcgcagcgagggttgccggagggaaaataccatgaagaacgttggctctcgcaagtacgcctttaatagtctacaactgaaggccttcccgaagcactatcgtccccctgagggcacttatggcaaagttgaaacatag

SEQ ID NO: 142890 - DNA, 2817 bp, Artificial Sequence
  derived and/or modified sequence
atgacagcacgcgagcattcacccagacacggtgcccgtgctcgtgctatgcagcgcgcatctaccattgatgtagctgctgatatgctcggtttgagcctagcaggcaatattcaggatccggacgaacccattcttgaattctctctggcctgtagtgaactgcacacaccttccctagaccgaaagccaaattcctttgttgccgtgtccgtgacaactcccccacaagctttttggaccaagcacgctcagactgagataatagagggcacaaacaatccaatattcctgtcaagcatcgcctttttccaggactctctgatcaatcagatgactcaagtgaaactctccgtgtatgatgtgaaagatagaagtcagggtaccatgtacctcctgggaagtggaacctttatcgtcaaagacttgttgcaggaccggcatcatcggctccacctcaccctcaggagtgctgagtcggatcgcgtgggaaatatcactgtgattgggtggcagatggaggaaaagtcggaccaacgtcccccagtcactcgatccgtcgacaccgttaatgggagaatggttttgcccgtggacgagtctctgacggaggctctggggataaggtcaaagtatgccagtctccgtaaggatacattactcaagagtgtgtttgggggagctatttgtcggatgtaccgctttccaactacggacggcaatcacctgaggatcctggagcagatggctgaatccgtgctcagccttcacgtcccccgtcagttcgtgaaactcctgctcgaggaggacgctgccagggtgtgcgaattggaagaattgggcgagttaagtccctgttgggagtctctcaggcgccagatcgtgactcagtaccagaccataatcctgacttaccaggaaaatctaacagacctacatcagtatcgcggaccctctttcaaggcctcctcactcaaagctgacaaaaagctcgagttcgttccaaccaatctgcatatacaacgcatgagggtgcaggatgacggcggttccgatcagaattacgatatcgtgactatcggcgcacccgctgcacactgccaaggatttaaaagtggcggattacgaaagaagcttcacaaattcgaagagactaagaaacacttcgaagaatgctgtacaagctccgggtgtcagagtatcatctacatcccacaagatgtcgtgagagcaaaggagattatcgctcagatcaacacactcaagacgcaggtgagctactatgccgagcgattatccagagctgcgaaagaccggtcggcaacagggctggagcgcactcttgccattctggctgataagacacgccagttggtgacagtgtgcgactgcaagctcttggccaacagcatccacgggctgaatgcagctagaccggattatatcgccagcaaggccagccccacgagtacagaggaggaacaggttatgctgcggaatgatcaggacaccttgatggctcgctggaccggtaggaatagtagatcaagtctccaggtggattggcacgaagaagagtgggagaaggtatggctgaacgtggacaagtctttagaatgtataattcagcgcgtggacaagttgctgcagaaagagagactgcacggagagggatgcgaggacgtctttccttgcgcaggatcatgtacgtctaagaaggattgctctccacccccagaggagtcatcccctggagagtggagcgaggccctgtaccccctcctcaccacactcactgactgcgtggctatgatgtcagacaaagctaagaaggccatggtcttcctgttgatgcaagacagtgctcctacaattgcaacctacctatctcttcaatacaggcgagacgtcgtcttttgtcagaccctgactgcgcttatttgcgggttcatcattaagctccggaattgtctgcacgacgatgggttcctcagacagctttacaccattggtcttctggctcagtttgagagtctgctgagcacgtatggggaggaactggcaatgctggaggacatgagtttgggcattatggacctgcggaacgtaacattcaaagtcactcaggccacttcaagcgcctccgcagatatgctgcctgtgattactgggaacagagatggattcaatgtcagggtgcccctgccgggacccctcttcgatgcgctccccagagagattcaatcagggatgttgctccgcgttcagcctgtgctgttcaatgtgggcattaatgaacaacagacactcgccgaacggtttggcgacaccagccttcaggaagtcatcaacgtagagtctctcgtcaggctgaattcttacttcgaacagtttaaggaggtgctcccagaggattgtctgcccagaagtagaagccagacgtgcttacctgaactgttgcgattcttaggtcagaacgttcacgctaggaaaaataagaatgttgacattctttggcaggcagccgagatatgcagaagactgaacggagtgcggtttacaagctgtaagtccgcaaaggacaggaccgcaatgagtgtcacactggagcagtgtttaatactgcaacacgaacacggaatggccccacaagtgttcacccaagctctcgagtgcatgcggtccgaagggtgtagacgcgagaatactatgaaaaacgtcggtagcagaaaatacgcttttaattcactacagctgaaggcttttcccaagcattatagacctccagaaggcacatatggcaaggtggaaacctag

SEQ ID NO: 142891 - DNA, 2817 bp, Artificial Sequence
  derived and/or modified sequence
atgactgctcgcgaacattcgccacgacatggcgctcgcgcacgggcaatgcaacgggcatccaccatcgatgtggctgctgacatgcttggactgtctttggcgggaaatatccaggacccagatgaacctattctggagtttagcttagcctgctcggagctgcacactccgtcactggaccgcaaacctaattcttttgtggccgtgtccgtgaccactcccccacaggctttctggacaaaacatgctcagaccgagatcattgaaggtacaaacaaccccatttttctttcctccattgctttctttcaagattctctgattaaccagatgacccaggtgaagctctctgtgtacgacgtcaaagaccggtcacagggaacgatgtatctgctgggctcaggcacctttattgtcaaggatctgctgcaggacaggcatcatagactccatctgactcttagaagtgccgagtcggacagagtcggtaacataacggtcattggatggcagatggaagagaagtcagatcagcgtcctcctgtgacccgctctgtggacaccgtgaacgggagaatggttctacccgttgatgagtccctcacagaagctttgggcattcgaagtaagtacgcaagtctgagaaaggacaccttgctgaagagcgtgttcggaggggcaatttgtcgaatgtatcgattcccgaccactgatgggaatcaccttagaattctggaacagatggcggaaagtgtgctttccctgcacgtccctagacaatttgtgaaacttctgcttgaggaagacgcagcaagggtgtgcgagctggaggaacttggagaactgtctccgtgctgggaatccctgcggaggcagattgtgacccagtatcagacaataattctgacttaccaggaaaatctgacggatctgcatcagtatagaggtccctcttttaaagcgagctccttaaaagctgacaaaaagcttgagttcgtgcccaccaatctccacattcaacgcatgcgtgtacaggatgacggcggatctgaccagaattatgacattgtcaccattggtgctcctgctgcacattgtcagggttttaagtcagggggattgagaaaaaaattacataaattcgaagaaacaaagaagcagcaagaagaatcccgtacgtcctcaggctgccagagtattatctacatcccccaggatgttgttcgcgcaaaggaaattattgctcagatcaataccctcaaaacccaggtgtcctactatgcggagcgactgtcccgcgctgccaaggaccggtcggcgaccgggctcgaaagaaccctggctatactggcagataaaactaggcagcttgtgacagtctgtgattgcaaactgctggccaacagcattcatgggctgaacgcggcacgcccagactatatagcctctaaagccagccctacttccaccgaggaggagcaggtcatgttgcgtaatgatcaggatactctgatggctaggtggacaggaagaaacagcaggtccagcctccaagtggactggcacgaggaagagtgggagaaggtgtggctaaatgttgataagtcactcgagtgcatcatacaaagggttgataaattactgcagaaagaacgcctgcacggggagggctgcgaagacgtatttccttgcgctgggtcctgtacttcaaagaaggactgttcgccacctcctgaggaatcttcacccggtgaatggagtgaagcactttacccactgctgaccacactgaccgactgtgtggcgatgatgagtgacaaagcgaaaaaggccatggtgttcttgctgatgcaggacagcgcacccaccatcgccacttacctctcactgcagtaccgacgagatgtggtgttttgccagacactgacagctctcatttgtgggtttattatcaagcttcgtaattgcctgcatgacgacggcttcctacggcagctatacaccatcggcctgctggcccagttcgagtcactgctgtctacttacggcgaggagcttgcgatgctagaagacatgtcactcgggatcatggacctacggaacgtcacctttaaggttacacaggccacctcatctgcatcagccgacatgctgccggtaattacaggcaatagggatggttttaatgttcgggttccactgcctgggccactcttcgatgcactcccgagagagatccagtcagggatgcttctccgagttcaacccgtcctgttcaacgtagggataaacgaacagcagactctggcagagaggttcggcgacacgtccttgcaggaagtgataaatgtcgagagcctggtgcgattgaatagctacttcgaacagtttaaggaggtcctgcctgaggattgcctgcctcggtcccgaagccagacctgccttccagagcttctgagattcctgggtcagaatgtgcatgccaggaagaacaagaacgttgacattctttggcaggccgctgaaatttgcaggagattgaacggtgttcggttcacctcttgtaagtcggccaaggacaggaccgcgatgagcgtgactctggagcagtgtctcatccttcagcacgagcacggaatggcccctcaagttttcactcaggctctagagtgcatgcggagtgagggctgcagacgcgaaaacactatgaagaacgttggctccaggaagtacgccttcaacagcttgcagctgaaagcatttcccaaacattatcgaccaccagaaggaacatacgggaaggtggaaacatag

SEQ ID NO: 142892 - DNA, 2817 bp, Artificial Sequence
  derived and/or modified sequence
atgaccgccagagagcacagccccagacacggcgccagagccagagccatgcagagagccagcaccatcgacgtggccgccgacatgctgggcctgagcctggccggcaacatccaggaccccgacgagcccatcctggagttcagcctggcctgcagcgagctgcacacccccagcctggacagaaagcccaacagcttcgtggccgtgagcgtgaccacccccccccaggccttctggaccaagcacgcccagaccgagatcatcgagggcaccaacaaccccatcttcctgagcagcatcgccttcttccaggacagcctgatcaaccagatgacccaggtgaagctgagcgtgtacgacgtgaaggacagaagccagggcaccatgtacctgctgggcagcggcaccttcatcgtgaaggacctgctgcaggacagacaccacagactgcacctgaccctgagaagcgccgagagcgacagagtgggcaacatcaccgtgatcggctggcagatggaggagaagagcgaccagagaccccccgtgaccagaagcgtggacaccgtgaacggcagaatggtgctgcccgtggacgagagcctgaccgaggccctgggcatcagaagcaagtacgccagcctgagaaaggacaccctgctgaagagcgtgttcggcggcgccatctgcagaatgtacagattccccaccaccgacggcaaccacctgagaatcctggagcagatggccgagagcgtgctgagcctgcacgtgcccagacagttcgtgaagctgctgctggaggaggacgccgccagagtgtgcgagctggaggagctgggcgagctgagcccctgctgggagagcctgagaagacagatcgtgacccagtaccagaccatcatcctgacctaccaggagaacctgaccgacctgcaccagtacagaggccccagcttcaaggccagcagcctgaaggccgacaagaagctggagttcgtgcccaccaacctgcacatccagagaatgagagtgcaggacgacggcggcagcgaccagaactacgacatcgtgaccatcggcgcccccgccgcccactgccagggcttcaagagcggcggcctgagaaagaagctgcacaagttcgaggagaccaagaagcacttcgaggagtgctgcaccagcagcggctgccagagcatcatctacatcccccaggacgtggtgagagccaaggagatcatcgcccagatcaacaccctgaagacccaggtgagctactacgccgagagactgagcagagccgccaaggacagaagcgccaccggcctggagagaaccctggccatcctggccgacaagaccagacagctggtgaccgtgtgcgactgcaagctgctggccaacagcatccacggcctgaacgccgccagacccgactacatcgccagcaaggccagccccaccagcaccgaggaggagcaggtgatgctgagaaacgaccaggacaccctgatggccagatggaccggcagaaacagcagaagcagcctgcaggtggactggcacgaggaggagtgggagaaggtgtggctgaacgtggacaagagcctggagtgcatcatccagagagtggacaagctgctgcagaaggagagactgcacggcgagggctgcgaggacgtgttcccctgcgccggcagctgcaccagcaagaaggactgcagccccccccccgaggagagcagccccggcgagtggagcgaggccctgtaccccctgctgaccaccctgaccgactgcgtggccatgatgagcgacaaggccaagaaggccatggtgttcctgctgatgcaggacagcgcccccaccatcgccacctacctgagcctgcagtacagaagagacgtggtgttctgccagaccctgaccgccctgatctgcggcttcatcatcaagctgagaaactgcctgcacgacgacggcttcctgagacagctgtacaccatcggcctgctggcccagttcgagagcctgctgagcacctacggcgaggagctggccatgctggaggacatgagcctgggcatcatggacctgagaaacgtgaccttcaaggtgacccaggccaccagcagcgccagcgccgacatgctgcccgtgatcaccggcaacagagacggcttcaacgtgagagtgcccctgcccggccccctgttcgacgccctgcccagagagatccagagcggcatgctgctgagagtgcagcccgtgctgttcaacgtgggcatcaacgagcagcagaccctggccgagagattcggcgacaccagcctgcaggaggtgatcaacgtggagagcctggtgagactgaacagctacttcgagcagttcaaggaggtgctgcccgaggactgcctgcccagaagcagaagccagacctgcctgcccgagctgctgagattcctgggccagaacgtgcacgccagaaagaacaagaacgtggacatcctgtggcaggccgccgagatctgcagaagactgaacggcgtgagattcaccagctgcaagagcgccaaggacagaaccgccatgagcgtgaccctggagcagtgcctgatcctgcagcacgagcacggcatggccccccaggtgttcacccaggccctggagtgcatgagaagcgagggctgcagaagagagaacaccatgaagaacgtgggcagcagaaagtacgccttcaacagcctgcagctgaaggccttccccaagcactacagaccccccgagggcacctacggcaaggtggagacctag

SEQ ID NO: 142893 - DNA, 2817 bp, Artificial Sequence
  derived and/or modified sequence
atgaccgccagagagcacagccccagacacggcgccagagccagagccatgcagagagccagcaccatcgacgtggccgccgacatgctgggcctgagcctggccggcaacatccaggaccccgacgagcccatcctggagttcagcctggcctgcagcgagctgcacacccccagcctggacagaaagcccaacagcttcgtggccgtgagcgtgaccacccccccccaggccttctggaccaagcacgcccagaccgagatcatcgagggcaccaacaaccccatcttcctgagcagcatcgccttcttccaggacagcctgatcaaccagatgacccaggtgaagctgagcgtgtacgacgtgaaggacagaagccagggcaccatgtacctgctgggcagcggcaccttcatcgtgaaggacctgctgcaggacagacaccacagactgcacctgaccctgagaagcgccgagagcgacagagtgggcaacatcaccgtgatcggctggcagatggaggagaagagcgaccagagaccccccgtgaccagaagcgtggacaccgtgaacggcagaatggtgctgcccgtggacgagagcctgaccgaggccctgggcatcagaagcaagtacgccagcctgagaaaggacaccctgctgaagagcgtgttcggcggcgccatctgcagaatgtacagattccccaccaccgacggcaaccacctgagaatcctggagcagatggccgagagcgtgctgagcctgcacgtgcccagacagttcgtgaagctgctgctggaggaggacgccgccagagtgtgcgagctggaggagctgggcgagctgagcccctgctgggagagcctgagaagacagatcgtgacccagtaccagaccatcatcctgacctaccaggagaacctgaccgacctgcaccagtacagaggccccagcttcaaggccagcagcctgaaggccgacaagaagctggagttcgtgcccaccaacctgcacatccagagaatgagagtgcaggacgacggcggcagcgaccagaactacgacatcgtgaccatcggcgcccccgccgcccactgccagggcttcaagagcggcggcctgagaaagaagctgcacaagttcgaggagaccaagaagcagcaggaggagagcagaaccagcagcggctgccagagcatcatctacatcccccaggacgtggtgagagccaaggagatcatcgcccagatcaacaccctgaagacccaggtgagctactacgccgagagactgagcagagccgccaaggacagaagcgccaccggcctggagagaaccctggccatcctggccgacaagaccagacagctggtgaccgtgtgcgactgcaagctgctggccaacagcatccacggcctgaacgccgccagacccgactacatcgccagcaaggccagccccaccagcaccgaggaggagcaggtgatgctgagaaacgaccaggacaccctgatggccagatggaccggcagaaacagcagaagcagcctgcaggtggactggcacgaggaggagtgggagaaggtgtggctgaacgtggacaagagcctggagtgcatcatccagagagtggacaagctgctgcagaaggagagactgcacggcgagggctgcgaggacgtgttcccctgcgccggcagctgcaccagcaagaaggactgcagccccccccccgaggagagcagccccggcgagtggagcgaggccctgtaccccctgctgaccaccctgaccgactgcgtggccatgatgagcgacaaggccaagaaggccatggtgttcctgctgatgcaggacagcgcccccaccatcgccacctacctgagcctgcagtacagaagagacgtggtgttctgccagaccctgaccgccctgatctgcggcttcatcatcaagctgagaaactgcctgcacgacgacggcttcctgagacagctgtacaccatcggcctgctggcccagttcgagagcctgctgagcacctacggcgaggagctggccatgctggaggacatgagcctgggcatcatggacctgagaaacgtgaccttcaaggtgacccaggccaccagcagcgccagcgccgacatgctgcccgtgatcaccggcaacagagacggcttcaacgtgagagtgcccctgcccggccccctgttcgacgccctgcccagagagatccagagcggcatgctgctgagagtgcagcccgtgctgttcaacgtgggcatcaacgagcagcagaccctggccgagagattcggcgacaccagcctgcaggaggtgatcaacgtggagagcctggtgagactgaacagctacttcgagcagttcaaggaggtgctgcccgaggactgcctgcccagaagcagaagccagacctgcctgcccgagctgctgagattcctgggccagaacgtgcacgccagaaagaacaagaacgtggacatcctgtggcaggccgccgagatctgcagaagactgaacggcgtgagattcaccagctgcaagagcgccaaggacagaaccgccatgagcgtgaccctggagcagtgcctgatcctgcagcacgagcacggcatggccccccaggtgttcacccaggccctggagtgcatgagaagcgagggctgcagaagagagaacaccatgaagaacgtgggcagcagaaagtacgccttcaacagcctgcagctgaaggccttccccaagcactacagaccccccgagggcacctacggcaaggtggagacctag

SEQ ID NO: 142894 - protein, 474 aa, Artificial Sequence
  derived and/or modified sequence
MALAPERAAPRVLFGEWLLGEISSGCYEGLQWLDEARTCFRVPWKHFARKDLSEADARIFKAWAVARGRWPPSSRGGGPPPEAETAERAGWKTNFRCALRSTRRFVMLRDNSGDPADPHKVYALSRELCWREGPGTDQTEAEAPAAVPPPQGGPPGPFLAHTHAGLQAPGPLPAPAGDKGDLLLQAVQQSCLADHLLTASWGADPVPTKAPGEGQEGLPLTGACAGGEAAAPESPHQAEPYLSPSPSACTAVQEPSPGALDVTIMYKGRTVLQKVVGHPSCTFLYGPPDPAVRATDPQQVAFPSPAELPDQKQLRYTEELLRHVAPGLHLELRGPQLWARRMGKCKVYWEVGGPPGSASPSTPACLLPRNCDTPIFDFRVFFQELVEFRARQRRGSPRYTIYLGFGQDLSAGRPKEKSLVLVKLEPWLCRVHLEGTQREGVSSLDSSSLSLCLSSANSLYDDIECFLMELEQPA

SEQ ID NO: 142895 - DNA, 1425 bp, Artificial Sequence
  derived and/or modified sequence
atggccctggcccccgagagagccgcccccagagtgctgttcggcgagtggctgctgggcgagatcagcagcggctgctacgagggcctgcagtggctggacgaggccagaacctgcttcagagtgccctggaagcacttcgccagaaaggacctgagcgaggccgacgccagaatcttcaaggcctgggccgtggccagaggcagatggccccccagcagcagaggcggcggccccccccccgaggccgagaccgccgagagagccggctggaagaccaacttcagatgcgccctgagaagcaccagaagattcgtgatgctgagagacaacagcggcgaccccgccgacccccacaaggtgtacgccctgagcagagagctgtgctggagagagggccccggcaccgaccagaccgaggccgaggcccccgccgccgtgccccccccccagggcggcccccccggccccttcctggcccacacccacgccggcctgcaggcccccggccccctgcccgcccccgccggcgacaagggcgacctgctgctgcaggccgtgcagcagagctgcctggccgaccacctgctgaccgccagctggggcgccgaccccgtgcccaccaaggcccccggcgagggccaggagggcctgcccctgaccggcgcctgcgccggcggcgaggccgccgcccccgagagcccccaccaggccgagccctacctgagccccagccccagcgcctgcaccgccgtgcaggagcccagccccggcgccctggacgtgaccatcatgtacaagggcagaaccgtgctgcagaaggtggtgggccaccccagctgcaccttcctgtacggcccccccgaccccgccgtgagagccaccgacccccagcaggtggccttccccagccccgccgagctgcccgaccagaagcagctgagatacaccgaggagctgctgagacacgtggcccccggcctgcacctggagctgagaggcccccagctgtgggccagaagaatgggcaagtgcaaggtgtactgggaggtgggcggcccccccggcagcgccagccccagcacccccgcctgcctgctgcccagaaactgcgacacccccatcttcgacttcagagtgttcttccaggagctggtggagttcagagccagacagagaagaggcagccccagatacaccatctacctgggcttcggccaggacctgagcgccggcagacccaaggagaagagcctggtgctggtgaagctggagccctggctgtgcagagtgcacctggagggcacccagagagagggcgtgagcagcctggacagcagcagcctgagcctgtgcctgagcagcgccaacagcctgtacgacgacatcgagtgcttcctgatggagctggagcagcccgcctag

SEQ ID NO: 142896 - DNA, 633 bp, Artificial Sequence
  derived and/or modified sequence
atgtacaagggcagaaccgtgctgcagaaggtggtgggccaccccagctgcaccttcctgtacggcccccccgaccccgccgtgagagccaccgacccccagcaggtggccttccccagccccgccgagctgcccgaccagaagcagctgagatacaccgaggagctgctgagacacgtggcccccggcctgcacctggagctgagaggcccccagctgtgggccagaagaatgggcaagtgcaaggtgtactgggaggtgggcggcccccccggcagcgccagccccagcacccccgcctgcctgctgcccagaaactgcgacacccccatcttcgacttcagagtgttcttccaggagctggtggagttcagagccagacagagaagaggcagccccagatacaccatctacctgggcttcggccaggacctgagcgccggcagacccaaggagaagagcctggtgctggtgaagctggagccctggctgtgcagagtgcacctggagggcacccagagagagggcgtgagcagcctggacagcagcagcctgagcctgtgcctgagcagcgccaacagcctgtacgacgacatcgagtgcttcctgatggagctggagcagcccgcctag

SEQ ID NO: 142897 - DNA, 1425 bp, Artificial Sequence
  derived and/or modified sequence
atggcgttggcaccagagcgggctgctcctcgggtcctgttcggggagtggttactaggagaaatctccagtgggtgctacgaggggcttcaatggctcgatgaagcgcgcacctgcttccgtgtaccctggaagcactttgcccggaaggatctgtctgaagctgatgcccggatctttaaggcctgggctgtagctaggggcagatggcccccgtctagtcgaggggggggacccccacctgaagccgaaaccgctgaacgcgccggatggaagactaatttcaggtgcgcactgcggagcactcgccgatttgtcatgttgagagacaattccggggacccagccgatccgcataaggtatacgccctgagtagagaactgtgttggcgggaaggtccaggcaccgatcagacagaggccgaagctcctgccgcagtaccaccaccccaggggggtcctcctgggcccttcctggctcacactcacgcaggcctgcaggcccctggcccactgccagcccctgctggggataagggagatttgttactccaggccgtacagcaaagttgcttggctgatcatttgttaactgccagttggggggctgaccctgtgccaaccaaagcgccaggagaagggcaggaaggactacctctcaccggtgcatgcgccggtggtgaggcagcggctcccgagtcaccacaccaagccgagccctacttaagtccctctccttctgcttgtacagcagttcaggaaccgtcccctggggcacttgacgtaaccattatgtacaaaggcagaacagtactgcaaaaggtggtgggccatcccagctgtaccttcctctatggacctcccgatcctgcggtgcgggctactgatccccaacaggttgcctttccttcacccgcagaattgccagaccagaagcagctgagatacacagaagagctcctgcggcatgtcgcgcctgggcttcaccttgaactgcgcggaccgcagttgtgggctaggagaatggggaaatgtaaagtttattgggaagttggtggacctccgggctctgcctctcccagtactcctgcctgtctgctacctagaaattgtgacacgcccatttttgatttccgggttttttttcaggaactggtcgagtttcgagcacggcaaagacgagggtcacctcgatacaccatctacctaggctttggccaagatctgtcagccggtcggcccaaagagaagtcattggtgctggtcaaactggagccatggctatgccgagtccacttagagggaacccagcgggagggggtgtcatcgctggactcctcctcacttagtctgtgcctcagctcagcaaattccttgtacgatgatattgagtgtttcctaatggagcttgagcagcctgcatag

SEQ ID NO: 142898 - DNA, 633 bp, Artificial Sequence
  derived and/or modified sequence
atgtacaaaggacggacggtcctgcagaaagtggttggacatccttcctgtacttttttgtatggcccgccagaccccgcagtcagggcaacagacccccaacaagtcgcctttcccagtcctgcagaactgccagaccagaagcagctgagatacactgaggaactacttaggcatgtggcaccaggcctccacctggagttgcgtgggccacaactctgggctagaagaatgggcaagtgcaaagtctactgggaggtaggcggcccacctgggtctgcctctcccagcacaccagcttgtctgctgcctcgaaactgcgatacgcctatctttgattttagggtgttcttccaagagttggtggaatttagagctagacagagacgcggctctccgaggtacactatttatctgggctttgggcaggacctctctgccgggcggccgaaggagaaaagtctggtattagtgaaactggagccttggttatgtcgtgttcacttggaaggtacccaaagggaaggggtgtcaagtttagatagctcctccctgtcactgtgtctcagcagtgccaattctctctatgacgatatcgagtgctttttgatggagctggagcagccagcttag

SEQ ID NO: 142899 - DNA, 1425 bp, Artificial Sequence
  derived and/or modified sequence
atggctctggcaccagaacgcgccgctccccgcgtccttttcggcgagtggctcctgggggagatctcttcagggtgttatgaggggctgcaatggctcgatgaagcaagaacatgtttccgtgtaccgtggaaacactttgctcgaaaagatctgagtgaagctgatgcacgcatctttaaggcatgggctgtcgcacgggggcgctggccgccatcttcccgtggcggagggcccccacctgaggctgaaactgccgagcgggctggctggaagactaacttccggtgcgccctcagatcaactagacgcttcgtaatgctccgcgataactcgggcgatcccgccgacccccacaaggtctatgccctatcccgggagttgtgttggagggaaggccctggtaccgatcagacagaagcggaagctcctgccgccgtgccccctcctcaaggcggcccacccggcccttttcttgctcacacacatgctggattacaggctccaggaccccttcctgcaccagctggcgataaaggggatctgttgctgcaggcggtgcaacagtcttgcttggctgaccacctgctgacagcttcgtggggggctgacccagtacctacaaaagcacccggcgagggccaggagggcctcccactcacgggggcatgcgccgggggcgaagccgcggcccccgagtctccacaccaggcggagccctacctgtctcccagtcccagcgcctgtactgcagttcaagaacccagcccgggagccctggatgtcaccataatgtataaaggaagaaccgtgctgcagaaggtggtgggccacccaagttgcacttttctctacgggcctccagatcccgctgtgcgggcgacagatccacaacaagtggcttttccttctccagcggagcttccagatcaaaagcaactgagatatacagaggaacttcttagacacgttgcccctggattgcatctcgagttaagagggcctcagctatgggcccggaggatgggcaagtgtaaagtctattgggaagttgggggacctcccgggtctgcctctccaagcactccagcctgcctgctgccacgcaactgtgacacgcctatttttgatttccgtgtcttctttcaggaactcgtcgagttccgcgccagacagagaagaggaagccctagatacaccatctacctcggttttggacaggaccttagtgctggacgtccaaaagaaaagtccttggttctggttaaactcgagccttggctctgccgcgtgcatctggagggtactcagagggaaggcgtttcttcccttgatagctctagcctctcactgtgcctttccagtgcaaatagtctctacgatgatatagaatgtttcctaatggaactggagcaaccggcatag

SEQ ID NO: 142900 - DNA, 1801 bp, Artificial Sequence
  derived and/or modified sequence
cagggtccggcctgcgccttcccgccaggcctggacactggttcaacacctgtgacttcatgtgtgcgcgccggccacacctgcagtcacacctgtagccccctctgccaagagatccataccgaggcagcgtcggtggctacaagccctcagtccacacctgtggacacctgtgacacctggccacacgacctgtggccgcggcctggcgtctgctgcgacaggagcccttacctcccctgttataacacctgaccgccacctaactgcccctgcagaaggagcaatggccttggctcctgagagggcagccccacgcgtgctgttcggagagtggctccttggagagatcagcagcggctgctatgaggggctgcagtggctggacgaggcccgcacctgtttccgcgtgccctggaagcacttcgcgcgcaaggacctgagcgaggccgacgcgcgcatcttcaaggcctgggctgtggcccgcggcaggtggccgcctagcagcaggggaggtggcccgccccccgaggctgagactgcggagcgcgccggctggaaaaccaacttccgctgcgcactgcgcagcacgcgtcgcttcgtgatgctgcgggataactcgggggacccggccgacccgcacaaggtgtacgcgctcagccgggagctgtgctggcgagaaggcccaggcacggaccagactgaggcagaggcccccgcagctgtcccaccaccacagggtgggcccccagggccattcctggcacacacacatgctggactccaagccccaggccccctccctgccccagctggtgacaagggggacctcctgctccaggcagtgcaacagagctgcctggcagaccatctgctgacagcgtcatggggggcagatccagtcccaaccaaggctcctggagagggacaagaagggcttcccctgactggggcctgtgctggaggcgaggccgcggccccagagtccccgcaccaggcagagccgtacctgtcaccctccccaagcgcctgcaccgcggtgcaagagcccagcccaggggcgctggacgtgaccatcatgtacaagggccgcacggtgctgcagaaggtggtgggacacccgagctgcacgttcctatacggccccccagacccagctgtccgggccacagacccccagcaggtagcattccccagccctgccgagctcccggaccagaagcagctgcgctacacggaggaactgctgcggcacgtggcccctgggttgcacctggagcttcgggggccacagctgtgggcccggcgcatgggcaagtgcaaggtgtactgggaggtgggcggacccccaggctccgccagcccctccaccccagcctgcctgctgcctcggaactgtgacacccccatcttcgacttcagagtcttcttccaagagctggtggaattccgggcacggcagcgccgtggctccccacgctataccatctacctgggcttcgggcaggacctgtcagctgggaggcccaaggagaagagcctggtcctggtgaagctggaaccctggctgtgccgagtgcacctagagggcacgcagcgtgagggtgtgtcttccctggatagcagcagcctcagcctctgcctgtccagcgccaacagcctctatgacgacatcgagtgcttccttatggagctggagcagcccgcctagaacccagtctaatgagaactccagaaagctggagcagcccacctagagctggccgcggccgcccagtctaataaaaagaactccagaaca

SEQ ID NO: 142901 - DNA, 1761 bp, Artificial Sequence
  derived and/or modified sequence
gagacgaaacttcccgtcccggcggctctggcacccagggtccggcctgcgccttcccgccaggcctggacactggttcaacacctgtgacttcatgtgtgcgcgccggccacacctgcagtcacacctgtagccccctctgccaagagatccataccgaggcagcgtcggtggctacaagccctcagtccacacctgtggacacctgtgacacctggccacacgacctgtggccgcggcctggcgtctgctgcgacaggagcccttacctcccctgttataacacctgaccgccacctaactgcccctgcagaaggagcaatggccttggctcctgagagggcagccccacgcgtgctgttcggagagtggctccttggagagatcagcagcggctgctatgaggggctgcagtggctggacgaggcccgcacctgtttccgcgtgccctggaagcacttcgcgcgcaaggacctgagcgaggccgacgcgcgcatcttcaaggcctgggctgtggcccgcggcaggtggccgcctagcagcaggggaggtggcccgccccccgaggctgagactgcggagcgcgccggctggaaaaccaacttccgctgcgcactgcgcagcacgcgtcgcttcgtgatgctgcgggataactcgggggacccggccgacccgcacaaggtgtacgcgctcagccgggagctgtgctggcgagaaggcccaggcacggaccagactgaggcagaggcccccgcagctgtcccaccaccacaggcccagggctccctgctggggagctgtacgggtgggcagtagagacgacccccagccccgggccccagcccgcggcactaacgacaggtgagaggggtaggggttgggaggcctggggcacagggagaggctagggatgaggtgccagcacaggattcccttccggatgcaggcgaggccgcggccccagagtccccgcaccaggcagagccgtacctgtcaccctccccaagcgcctgcaccgcggtgcaagagcccagcccaggggcgctggacgtgaccatcatgtacaagggccgcacggtgctgcagaaggtggtgggacacccgagctgcacgttcctatacggccccccagacccagctgtccgggccacagacccccagcaggtagcattccccagccctgccgagctcccggaccagaagcagctgcgctacacggaggaactgctgcggcacgtggcccctgggttgcacctggagcttcgggggccacagctgtgggcccggcgcatgggcaagtgcaaggtgtactgggaggtgggcggacccccaggctccgccagcccctccaccccagcctgcctgctgcctcggaactgtgacacccccatcttcgacttcagagtcttcttccaagagctggtggaattccgggcacggcagcgccgtggctccccacgctataccatctacctgggcttcgggcaggacctgtcagctgggaggcccaaggagaagagcctggtcctggtgaagctggaaccctggctgtgccgagtgcacctagagggcacgcagcgtgagggtgtgtcttccctggatagcagcagcctcagcctctgcctgtccagcgccaacagcctctatgacgacatcgagtgcttccttatggagctggagcagcccgcctagaacccagtctaatgagaactccagaaagctggagcagcccacctagagctggccgcggccgcccagtct

SEQ ID NO: 142902 - DNA, 1885 bp, Artificial Sequence
  derived and/or modified sequence
gaaactcccgcctggccaccataaaagcgccggccctccgcttccccgcgagacgaaacttcccgtcccggcggctctggcacccagggtccggcctgcgccttcccgccaggcctggacactggttcaacacctgtgacttcatgtgtgcgcgccggccacacctgcagtcacacctgtagccccctctgccaagagatccataccgaggcagcgtcggtggctacaagccctcagtccacacctgtggacacctgtgacacctggccacacgacctgtggccgcggcctggcgtctgctgcgacaggagcccttacctcccctgttataacacctgaccgccacctaactgcccctgcagaaggagcaatggccttggctcctgagagggcagccccacgcgtgctgttcggagagtggctccttggagagatcagcagcggctgctatgaggggctgcagtggctggacgaggcccgcacctgtttccgcgtgccctggaagcacttcgcgcgcaaggacctgagcgaggccgacgcgcgcatcttcaaggcctgggctgtggcccgcggcaggtggccgcctagcagcaggggaggtggcccgccccccgaggctgagactgcggagcgcgccggctggaaaaccaacttccgctgcgcactgcgcagcacgcgtcgcttcgtgatgctgcgggataactcgggggacccggccgacccgcacaaggtgtacgcgctcagccgggagctgtgctggcgagaaggcccaggcacggaccagactgaggcagaggcccccgcagctgtcccaccaccacagggtgggcccccagggccattcctggcacacacacatgctggactccaagccccaggccccctccctgccccagctggtgacaagggggacctcctgctccaggcagtgcaacagagctgcctggcagaccatctgctgacagcgtcatggggggcagatccagtcccaaccaaggctcctggagagggacaagaagggcttcccctgactggggcctgtgctggaggcgaggccgcggccccagagtccccgcaccaggcagagccgtacctgtcaccctccccaagcgcctgcaccgcggtgcaagagcccagcccaggggcgctggacgtgaccatcatgtacaagggccgcacggtgctgcagaaggtggtgggacacccgagctgcacgttcctatacggccccccagacccagctgtccgggccacagacccccagcaggtagcattccccagccctgccgagctcccggaccagaagcagctgcgctacacggaggaactgctgcggcacgtggcccctgggttgcacctggagcttcgggggccacagctgtgggcccggcgcatgggcaagtgcaaggtgtactgggaggtgggcggacccccaggctccgccagcccctccaccccagcctgcctgctgcctcggaactgtgacacccccatcttcgacttcagagtcttcttccaagagctggtggaattccgggcacggcagcgccgtggctccccacgctataccatctacctgggcttcgggcaggacctgtcagctgggaggcccaaggagaagagcctggtcctggtgaagctggaaccctggctgtgccgagtgcacctagagggcacgcagcgtgagggtgtgtcttccctggatagcagcagcctcagcctctgcctgtccagcgccaacagcctctatgacgacatcgagtgcttccttatggagctggagcagcccgcctagaacccagtctaatgagaactccagaaagctggagcagcccacctagagctggccgcggccgcccagtctaataaaaagaactccagaaca

SEQ ID NO: 142903 - DNA, 1425 bp, Artificial Sequence
  derived and/or modified sequence
atggccctggcccctgagcgggccgccccccgggtgctgtttggagagtggctgctgggggagatcagcagcggctgctatgagggcctgcagtggctggatgaggcccggacctgcttccgggtgccctggaagcactttgccaggaaggacctgtctgaggctgatgcccgcatcttcaaggcctgggccgtggcccggggccgctggccacccagcagccggggcggcggccccccacctgaggccgagacagctgagagagctggctggaagaccaacttccgctgtgccctgcggagcaccaggagatttgtgatgctgcgggacaacagcggggaccctgctgacccccacaaggtgtatgccctgagccgggagctgtgctggagggagggccctggaacagaccagacagaagctgaggccccagctgctgtgcccccaccccagggcggccccccaggccccttcctggcccacacccacgccggcctgcaggcccctggccccctgcctgccccagctggggacaagggggacctgctgctgcaggccgtgcagcagagctgcctggccgaccacctgctgacagcctcctggggcgctgaccctgtgcccaccaaggcccctggagagggccaggagggcctgcccctgactggagcctgtgccggcggggaggccgccgcccctgagagcccccaccaggccgagccctacctgagccccagccccagcgcctgcacagctgtgcaggagcccagccctggggccctggatgtgaccatcatgtacaagggccgcacagtgctgcagaaggtggtgggccaccccagctgcaccttcctgtatggccccccagaccctgctgtgcgggccacagacccccagcaggtggccttccccagccctgctgagctgcctgaccagaagcagctgcgctacacagaggagctgctgcggcacgtggcccctggcctgcacctggagctgcggggcccccagctgtgggcccggaggatgggcaagtgcaaggtgtactgggaggtgggcggccccccaggcagcgccagccccagcaccccagcctgcctgctgcccaggaactgtgacacccccatctttgacttccgggtcttcttccaggagctggtggagttccgggcccggcagaggcggggcagcccccgctacaccatctacctgggcttcggccaggacctgtctgctggccggcccaaggagaagagcctggtgctggtgaagctggagccctggctgtgccgggtgcacctggagggcacccagcgggagggcgtgagcagcctggacagcagcagcctgagcctgtgcctgagcagcgccaacagcctgtatgatgacatcgagtgcttcctgatggagctggagcagcctgcctag

SEQ ID NO: 142904 - DNA, 633 bp, Artificial Sequence
  derived and/or modified sequence
atgtacaagggccgcacagtgctgcagaaggtggtgggccaccccagctgcaccttcctgtatggccccccagaccctgctgtgcgggccacagacccccagcaggtggccttccccagccctgctgagctgcctgaccagaagcagctgcgctacacagaggagctgctgcggcacgtggcccctggcctgcacctggagctgcggggcccccagctgtgggcccggaggatgggcaagtgcaaggtgtactgggaggtgggcggccccccaggcagcgccagccccagcaccccagcctgcctgctgcccaggaactgtgacacccccatctttgacttccgggtcttcttccaggagctggtggagttccgggcccggcagaggcggggcagcccccgctacaccatctacctgggcttcggccaggacctgtctgctggccggcccaaggagaagagcctggtgctggtgaagctggagccctggctgtgccgggtgcacctggagggcacccagcgggagggcgtgagcagcctggacagcagcagcctgagcctgtgcctgagcagcgccaacagcctgtatgatgacatcgagtgcttcctgatggagctggagcagcctgcctag

SEQ ID NO: 142905 - DNA, 1425 bp, Artificial Sequence
  derived and/or modified sequence
atggccctggcccccgagcgggccgccccccgggtgctgttcggcgagtggttgttaggggagatcagtagtgggtgctatgagggcttacagtggctggacgaggcaagaacctgtttcagagtaccttggaaacacttcgcacgaaaggatctgtcagaggctgatgccaggatttttaaggcttgggctgtggcaagaggccgctggccgccgtcaagtcgaggaggcggaccgccacccgaagccgagactgcggagagggccggctggaaaaccaacttcaggtgtgcgctgcgaagcacccggcgattcgtcatgctgagggacaacagtggagaccccgcagacccccataaggtctacgccctctcgcgagaactgtgctggcgtgagggtcctgggacagatcagactgaggccgaggccccagcggctgtgcctccaccacaaggtggacctccggggccctttttggcacacacacacgccggtctccaggcaccagggccgcttcccgcgccagccggggataaaggcgatctgctattgcaagccgtccaacagagttgcctggcagatcacctgctgacagcctcctggggcgccgatcccgtaccaacaaaggcacctggcgaaggccaggagggtttacctttaactggagcgtgtgccgggggcgaggcagcagctccggaaagcccccatcaggctgagccgtacctgtccccctcacccagtgcttgtactgccgtgcaagaaccctctccaggagctctggacgtcaccattatgtacaaaggcaggaccgtcttacaaaaagtggtgggccatccatcctgtacctttctgtacggaccgccagaccccgcagttagagcaaccgaccctcaacaggttgctttcccttcacccgcggaattacccgatcaaaagcaactgcgctatacagaggagctcctccggcacgtggctccaggcctgcacctggaactgaggggtcctcagctttgggcgagacgcatgggaaagtgcaaggtgtactgggaagtgggcggaccccccggttccgcatctccgagtactccagcatgtttactgccacggaattgtgacactcccattttcgatttccgggtcttttttcaggagctggtcgagttcagggctcgacaaaggcgagggagcccccggtatacaatctatctcggtttcgggcaggatctgagcgctgggaggcctaaggagaaatctttagtgttggtgaaactggaaccttggctgtgccgcgtgcacctggaaggaacacagcgggagggggtgtccagtctggatagctcatccctgtctctgtgcttgtcgagcgcaaactccctgtatgacgacattgagtgctttttaatggaactcgaacaacccgcctag

SEQ ID NO: 142906 - DNA, 633 bp, Artificial Sequence
  derived and/or modified sequence
atgtacaagggccggaccgtgctgcagaaggtggtgggccaccccagttgcacatttctctacggaccacctgaccctgctgtgcgggccactgacccccagcaggttgcattcccctcacctgccgagctgccagaccagaagcagctgcgctacactgaagagctcctgcgccatgtcgcccccggcttacacttggagctccgggggcctcaattgtgggcgagacgtatgggcaagtgcaaagtgtactgggaggtcggcggacccccaggaagcgcatccccttctacgccggcatgcctgctccctagaaattgcgacacgcctatcttcgatttcagggtgttcttccaggagttagttgagtttcgcgcaagacagaggcgaggcagccctaggtatacaatctacctaggatttggccaggacctttcagctgggaggcccaaagagaaatccctggtgctggtgaagctcgagccatggctgtgtcgcgttcacctcgaagggacacagcgggaaggagtgagttcactggactcttccagcctatcactgtgtcttagctctgcaaattctctgtatgacgacatcgaatgtttcttgatggaactcgagcagcccgcctag

SEQ ID NO: 142907 - DNA, 1425 bp, Artificial Sequence
  derived and/or modified sequence
atggccctggcccccgagcgggccgccccccgggtgctgttcggcgaatggttactgggtgagatttcctcaggatgctatgaagggctgcagtggctagacgaggcaagaacatgctttagagtgccttggaaacactttgcaagaaaagacctgtcagaggccgacgcaagaatcttcaaagcctgggcagtagctaggggtaggtggcctccttcttccagaggtggcggaccaccccccgaagctgagaccgcggaacgagctggctggaagaccaactttagatgcgcacttagatctacccgccggtttgttatgctgagagataactcaggcgatcccgccgatcctcataaagtttatgccttgagtcgagagttatgttggcgggagggaccgggaactgaccagacagaggcagaagcacctgcggctgttcctccccctcagggaggtcctccaggccctttcctcgcacacacccacgccggactgcaggcccctgggcctctacccgccccagcaggcgacaagggcgacctgctcctgcaggcggtgcagcagagctgtcttgcggaccacctgctgaccgccagttggggggcggaccccgtgccaacaaaggctcctggagaggggcaagaagggcttccgctaactggagcatgtgcaggaggggaagctgcagcccctgaaagtccacaccaggcagagccctatctcagcccctctccttccgcctgcaccgcagtgcaggagccaagcccgggtgccctggacgttacgatcatgtacaaagggcggacagttctgcagaaagtcgttggccatccttcttgtacattcctctacggaccaccagatcctgccgtgcgagccaccgacccccagcaggtggcctttccatctccagccgaactgcctgatcagaaacagctacggtatacagaagagcttcttcgtcacgtcgcccctgggcttcacttggagctgcgtgggcctcagctgtgggcccgccgaatgggcaaatgtaaggtgtattgggaagtgggaggaccacccgggtctgcaagtccttccacaccagcatgtcttctgcccagaaattgtgatactccgatttttgattttcgcgtgttctttcaagagcttgtcgagtttcgcgccaggcagaggcgggggagcccccgctatactatatacctgggattcggccaggatctgtccgccggaagacccaaagaaaaatctctagtgttagtcaagctggaaccttggctgtgtagagtgcacctggagggaacacagcgagagggggtttcttcactggacagtagttctcttagcctctgtctttcctctgccaactctttatacgacgacatagagtgctttctaatggagctggagcagcctgcctag

SEQ ID NO: 142908 - DNA, 1425 bp, Artificial Sequence
  derived and/or modified sequence
atggcattggcgcctgagagggccgctcctcgcgtcctcttcggagagtggttgctcggcgagatctcctccggatgctacgaagggcttcagtggctggacgaggcaaggacttgtttccgcgtaccttggaagcactttgcccgtaaagatctctccgaggcagacgctcggatatttaaggcctgggcagtggcgcgagggagatggcctccctcttcgcgcggtggcggaccccctcccgaagctgagaccgcagaacgcgcagggtggaagacaaattttcggtgtgcccttaggtctaccagacggtttgtaatgctccgtgataatagcggggacccggctgacccacataaggtctacgcattatcaagagaattgtgctggcgggagggcccaggaacagaccaaacagaagcggaggctcccgcagccgtaccgccacctcaggggggtcccccaggcccattcttagcacacacccacgcaggactgcaggcacctggcccactcccagccccagctggggacaaaggggacctgctgctccaggccgtacagcaaagctgcctggcagatcatctcttaacagcgagttggggggcagaccccgtccctacaaaggccccaggggaggggcaagaaggtctaccgctgacaggcgcttgcgctggcggtgaagccgctgcacctgagtcaccccaccaggctgagccttacctttcacccagccctagcgcctgtacagccgtgcaagagcccagccccggagcactcgacgtcacaatcatgtacaaggggagaacagtcctgcaaaaggttgttggccatccttcgtgcaccttcctctacggtccccctgatccagcagtgagggctaccgacccccagcaggtggctttcccgtccccagctgagttgcccgaccagaagcaactgcgatataccgaggagctcctccggcatgtggcccctgggctgcacctggaactgagaggccctcaactgtgggccagaaggatggggaagtgcaaagtatactgggaggtgggcggaccccctggctctgcatccccatcaacccccgcatgcctgctgcctaggaactgcgacacccccatatttgatttccgcgtgtttttccaggaactagtggaattcagggccagacagaggagggggtcaccaaggtacacaatctacctcggtttcggccaggatctgagcgccggaaggccaaaggaaaaatcccttgtgctggttaagctggaaccttggctgtgtagagtgcacctggagggcacacagagagagggggtgtcttctctggactccagctccctgagtttgtgtctcagcagtgcaaactccttgtacgacgacatagagtgcttcctgatggaattggaacagcccgcttag

SEQ ID NO: 142909 - DNA, 633 bp, Artificial Sequence
  derived and/or modified sequence
atgtataaggggaggaccgtattgcaaaaagtcgtgggccacccttcctgtactttcttgtacggcccaccagatcctgcagtacgagccactgatcctcaacaggtcgctttccctagtcccgcagaacttcctgaccagaagcagctgcgatatacggaagagcttctgaggcatgttgcccctggtttgcatttggaactacggggaccacaactctgggcaaggcgcatgggaaaatgcaaggtctactgggaggttggaggacctcccggttctgccagcccatcgacacccgcttgtttactgccgcgtaactgtgatacacctatattcgacttcagggtttttttccaggagttggtcgagtttagggctagacaaaggcgcggaagcccccgatataccatttacctaggcttcggacaagacctctcagcaggcaggccaaaagaaaaaagcctagtgctcgtcaagctggagccctggctgtgccgtgtgcacttggagggcacccagagggagggcgtgtccagtcttgactctagttcattaagcctctgcctgtcttcagcgaattcactttatgacgatatcgagtgtttcttaatggagctggagcagccggcttag

SEQ ID NO: 142910 - DNA, 1425 bp, Artificial Sequence
  derived and/or modified sequence
atggccctcgcccctgagcgggcagctcctcgagtcctgtttggggagtggttattgggagaaatcagcagtgggtgctacgagggactgcaatggctcgacgaggcccgaacctgctttcgggtgccctggaagcattttgctagaaaggatctcagcgaggcagacgccaggattttcaaagcatgggcggtagctcgagggagatggcctcccagctcacgcggaggtggtccacctcctgaagcggagacagcagagcgggctggttggaagacaaatttccgttgtgccctgcgctcgacacgacgatttgttatgctgagagataattcaggagacccagcagatcctcacaaggtttatgcgctttctcgtgagttgtgttggcgcgagggccctggaactgatcagacagaagctgaggcccctgccgcagttccgcctcctcagggaggccctcctggcccattcttggcgcatactcacgctggactacaagctccgggtccgctccccgcacctgccggagataagggagacttgttgttgcaggcggtgcagcaatcgtgtctggcggaccatctgctaaccgctagctggggtgcggatccagtgcctacaaaggcacccggtgagggccaggaaggacttccattgaccggagcatgcgctggcggagaggccgcagctcctgagtcacctcatcaggcggagccgtacttgagtcctagcccttctgcctgcacggccgtgcaggaacccagccctggagctcttgacgtgactattatgtacaaaggccgtactgttctgcagaaggtagttgggcatccgagctgcacatttctttatgggcctcctgatcctgccgtgcgagccaccgatccccagcaggttgcattcccctctccggcagagttgccagatcagaaacagctccggtatactgaggaactactccgacatgtggcccctggcctccacctagagctgagaggccctcagctatgggccagaagaatgggcaagtgtaaggtttattgggaggtcggcggacctccagggtcagccagcccttctactcccgcatgccttttaccacgcaattgcgacactccaatctttgactttcgggtgttctttcaggaactggttgagttcagagccaggcaacgccgaggatccccacgctacactatctacctcggatttggacaggatctgtccgccggtagacctaaagaaaagtccctggtgctggttaagctggaaccttggctgtgtagggtacatctagaagggacacagagagaaggcgtgtccagcttggactctagcagcctcagtctgtgcctgtctagtgctaattccttgtatgacgatatagagtgtttcctcatggaactggagcagcctgcctag

SEQ ID NO: 142911 - protein, 516 aa, Artificial Sequence
  derived and/or modified sequence
MPVPERPAAGPDSPRPGTRRAAPRVLFGEWLLGEISSGCYEGLQWLDEARTCFRVPWKHFARKDLSEADARIFKAWAVARGRWPPSSRGGGPPPEAETAERAGWKTNFRCALRSTRRFVMLRDNSGDPADPHKVYALSRELCWREGPGTDQTEAEAPAAVPPPQGGPPGPFLAHTHAGLQAPGPLPAPAGDKGDLLLQAVQQSCLADHLLTASWGADPVPTKAPGEGQEGLPLTGACAGGPGLPAGELYGWAVETTPSPGPQPAALTTGEAAAPESPHQAEPYLSPSPSACTAVQEPSPGALDVTIMYKGRTVLQKVVGHPSCTFLYGPPDPAVRATDPQQVAFPSPAELPDQKQLRYTEELLRHVAPGLHLELRGPQLWARRMGKCKVYWEVGGPPGSASPSTPACLLPRNCDTPIFDFRVFFQELVEFRARQRRGSPRYTIYLGFGQDLSAGRPKEKSLVLVKLEPWLCRVHLEGTQREGVSSLDSSSLSLCLSSANSLYDDIECFLMELEQPA

SEQ ID NO: 142912 - DNA, 1551 bp, Artificial Sequence
  derived and/or modified sequence
atgcccgtgcccgagagacccgccgccggccccgacagccccagacccggcaccagaagagccgcccccagagtgctgttcggcgagtggctgctgggcgagatcagcagcggctgctacgagggcctgcagtggctggacgaggccagaacctgcttcagagtgccctggaagcacttcgccagaaaggacctgagcgaggccgacgccagaatcttcaaggcctgggccgtggccagaggcagatggccccccagcagcagaggcggcggccccccccccgaggccgagaccgccgagagagccggctggaagaccaacttcagatgcgccctgagaagcaccagaagattcgtgatgctgagagacaacagcggcgaccccgccgacccccacaaggtgtacgccctgagcagagagctgtgctggagagagggccccggcaccgaccagaccgaggccgaggcccccgccgccgtgccccccccccagggcggcccccccggccccttcctggcccacacccacgccggcctgcaggcccccggccccctgcccgcccccgccggcgacaagggcgacctgctgctgcaggccgtgcagcagagctgcctggccgaccacctgctgaccgccagctggggcgccgaccccgtgcccaccaaggcccccggcgagggccaggagggcctgcccctgaccggcgcctgcgccggcggccccggcctgcccgccggcgagctgtacggctgggccgtggagaccacccccagccccggcccccagcccgccgccctgaccaccggcgaggccgccgcccccgagagcccccaccaggccgagccctacctgagccccagccccagcgcctgcaccgccgtgcaggagcccagccccggcgccctggacgtgaccatcatgtacaagggcagaaccgtgctgcagaaggtggtgggccaccccagctgcaccttcctgtacggcccccccgaccccgccgtgagagccaccgacccccagcaggtggccttccccagccccgccgagctgcccgaccagaagcagctgagatacaccgaggagctgctgagacacgtggcccccggcctgcacctggagctgagaggcccccagctgtgggccagaagaatgggcaagtgcaaggtgtactgggaggtgggcggcccccccggcagcgccagccccagcacccccgcctgcctgctgcccagaaactgcgacacccccatcttcgacttcagagtgttcttccaggagctggtggagttcagagccagacagagaagaggcagccccagatacaccatctacctgggcttcggccaggacctgagcgccggcagacccaaggagaagagcctggtgctggtgaagctggagccctggctgtgcagagtgcacctggagggcacccagagagagggcgtgagcagcctggacagcagcagcctgagcctgtgcctgagcagcgccaacagcctgtacgacgacatcgagtgcttcctgatggagctggagcagcccgcctag

SEQ ID NO: 142913 - DNA, 1551 bp, Artificial Sequence
  derived and/or modified sequence
atgcctgtccccgagaggccagccgccgggcccgacagtcctaggcctggcaccagaagggcagctcccagggtactattcggagagtggttgctgggggaaataagctcagggtgctacgagggtctgcagtggctcgatgaagctcggacatgctttcgagtgccctggaaacactttgcccgcaaggatctgagcgaagctgacgcaagaatctttaaagcctgggccgttgccagaggacggtggccaccatcatcaaggggcggaggaccaccccctgaggcagaaacagccgaaagggcaggctggaagaccaatttccggtgcgccttaaggtctactaggaggtttgtgatgttgcgtgataatagcggtgacccagctgatccccataaagtatacgccttgtcccgagagctgtgttggagagagggacccggcactgaccagacagaagctgaggccccggctgccgtccctcctcctcaggggggccccccaggcccttttctggcacatacacatgcgggactccaggctccaggcccacttccagcacccgcaggggacaagggagatctgttgcttcaagcagtccagcaatcttgtcttgccgaccatctgctgactgcatcatggggcgccgatcccgtgcctaccaaggctccgggcgagggccaggagggcctccctctgacaggcgcctgtgccgggggccccggacttccagctggcgaactatacggatgggctgtggagactaccccctcacctggtcctcagcccgccgcactgactaccggcgaggctgcagctccggaaagtccacatcaagcggagccgtacctgtctccctctccctccgcctgtacagccgtgcaagagccctctcccggcgccttagatgttaccataatgtataaaggcagaacagtgttacagaaggtggtagggcacccaagctgcacttttttatacggcccccctgaccccgccgtccgggcgacagatccgcagcaagtggccttcccgtccccggctgaattgcccgatcaaaagcaactccgttacaccgaggaactgctacgccacgtagccccgggactgcacctagagctgaggggcccccagctctgggcacggcggatgggcaagtgcaaggtgtattgggaagtgggcggtcccccagggagcgcctctccttctacccctgcctgtttgttgcccagaaattgtgacacacctatcttcgacttcagggtcttctttcaggagttggtggagttccgggcccgccagcgtcgagggtctccccgctacactatctacctgggttttggacaggacctgtctgcaggcagacccaaggaaaagagtctggttctggtcaaattggaaccatggctgtgtcgggtacacctggagggcacccagagagagggcgttagctcactagatagctcctcccttagtctctgtttgagctccgccaactccctctatgatgatatcgagtgctttttgatggagctggagcagccggcttag

SEQ ID NO: 142914 - DNA, 1551 bp, Artificial Sequence
  derived and/or modified sequence
atgcccgtgcccgaacgccctgctgctggccctgactcccccagacctggcacccgccgggctgctccgcgtgttttattcggggagtggctgcttggcgagatctcgagtggatgctatgaggggctgcagtggctcgacgaggctcgcacgtgtttccgtgtgccatggaagcacttcgcaaggaaggatctgtccgaagcggatgctcgaatcttcaaggcctgggccgtcgccagaggaagatggcccccgtcctcacggggagggggtccccccccggaggcagagaccgcagaaagggccggttggaaaactaatttcagatgtgcattacgatccaccaggaggttcgtgatgctgagggataattctggcgatcctgccgatcctcataaagtatacgctttgtcaagggagctctgctggcgggaggggccaggcacggaccaaactgaggccgaagccccagccgcggtgccccctccacaggggggccccccagggcctttcctggcacacacacatgcaggcttgcaagcccccggtccactcccagcccctgctggtgataaaggggacctgctactccaggctgtgcaacagagctgcctcgcagaccatctgctcacagcctcctggggagccgacccagttccgacaaaggctcccggggaaggacaggaaggactacctcttaccggggcctgtgccggtggacccgggctacccgctggcgagctgtatgggtgggctgtagagaccacaccgtctcctggccctcaacccgccgccctcactaccggggaagcagccgcccccgagagtccgcaccaagccgagccataccttagtccaagtcccagtgcatgcactgcggtgcaagaaccctcccctggcgcactggacgtgaccattatgtataaaggacgtaccgtgctgcagaaggttgtgggacacccatcttgtacattcctttacggcccacctgaccctgctgttagagccacagatccacaacaagtggctttcccaagcccagctgaactgccagatcagaagcagctgcgatatacggaagaactgctcaggcatgtagcgccaggactccacttggaactgcgggggccacagctatgggcgaggcggatgggcaaatgtaaagtgtattgggaggtgggcggtcctcccggcagcgcctccccctctacacccgcctgcctgctgccacggaactgcgatacgcctatcttcgatttcagggtgttcttccaggaactggtggagttccgcgctcggcagcgacgtggctccccccgctatactatctacctgggatttgggcaagatctttctgccgggaggccaaaggaaaaaagcttggtcctggttaagctcgagccgtggttgtgcagggttcacttagaaggtacacagagggaaggcgtgtctagcttggattctagtagcctatctctttgtctctcttccgccaactctctgtacgacgacatcgagtgttttctgatggaattggaacagcctgcatag

SEQ ID NO: 142915 - DNA, 1992 bp, Artificial Sequence
  derived and/or modified sequence
ccggccctccgcttccccgcgagacgaaacttcccgtcccggcggctctggcacccagggtccggcctgcgccttcccgccaggcctggacactggttcaacacctgtgacttcatgtgtgcgcgccggccacacctgcagtcacacctgtagccccctctgccaagagatccataccgaggcagcgtcggtggctacaagccctcagtccacacctgtggacacctgtgacacctggccacacgacctgtggccgcggcctggcgtctgctgcgacaggagcccttacctcccctgttataacacctgaccgccacctaactgcccctgcagaaggagcaatggccttggctcctgagaggtaagagcccggcccaccctctccagatgccagtccccgagcgccctgcagccggccctgactctccgcggccgggcacccgcagggcagccccacgcgtgctgttcggagagtggctccttggagagatcagcagcggctgctatgaggggctgcagtggctggacgaggcccgcacctgtttccgcgtgccctggaagcacttcgcgcgcaaggacctgagcgaggccgacgcgcgcatcttcaaggcctgggctgtggcccgcggcaggtggccgcctagcagcaggggaggtggcccgccccccgaggctgagactgcggagcgcgccggctggaaaaccaacttccgctgcgcactgcgcagcacgcgtcgcttcgtgatgctgcgggataactcgggggacccggccgacccgcacaaggtgtacgcgctcagccgggagctgtgctggcgagaaggcccaggcacggaccagactgaggcagaggcccccgcagctgtcccaccaccacagggtgggcccccagggccattcctggcacacacacatgctggactccaagccccaggccccctccctgccccagctggtgacaagggggacctcctgctccaggcagtgcaacagagctgcctggcagaccatctgctgacagcgtcatggggggcagatccagtcccaaccaaggctcctggagagggacaagaagggcttcccctgactggggcctgtgctggaggcccagggctccctgctggggagctgtacgggtgggcagtagagacgacccccagccccgggccccagcccgcggcactaacgacaggcgaggccgcggccccagagtccccgcaccaggcagagccgtacctgtcaccctccccaagcgcctgcaccgcggtgcaagagcccagcccaggggcgctggacgtgaccatcatgtacaagggccgcacggtgctgcagaaggtggtgggacacccgagctgcacgttcctatacggccccccagacccagctgtccgggccacagacccccagcaggtagcattccccagccctgccgagctcccggaccagaagcagctgcgctacacggaggaactgctgcggcacgtggcccctgggttgcacctggagcttcgggggccacagctgtgggcccggcgcatgggcaagtgcaaggtgtactgggaggtgggcggacccccaggctccgccagcccctccaccccagcctgcctgctgcctcggaactgtgacacccccatcttcgacttcagagtcttcttccaagagctggtggaattccgggcacggcagcgccgtggctccccacgctataccatctacctgggcttcgggcaggacctgtcagctgggaggcccaaggagaagagcctggtcctggtgaagctggaaccctggctgtgccgagtgcacctagagggcacgcagcgtgagggtgtgtcttccctggatagcagcagcctcagcctctgcctgtccagcgccaacagcctctatgacgacatcgagtgcttccttatggagctggagcagcccgcctagaacccagtctaatgagaactccagaaagctggagcagcccacctagagctggcc

SEQ ID NO: 142916 - DNA, 2051 bp, Artificial Sequence
  derived and/or modified sequence
agggtgcgaagcgccactgtttaggtttcgctttcccgggagcctgacccgcccctgacgtcgcctttcccgtctccgcagggtccggcctgcgccttcccgccaggcctggacactggttcaacacctgtgacttcatgtgtgcgcgccggccacacctgcagtcacacctgtagccccctctgccaagagatccataccgaggcagcgtcggtggctacaagccctcagtccacacctgtggacacctgtgacacctggccacacgacctgtggccgcggcctggcgtctgctgcgacaggagcccttacctcccctgttataacacctgaccgccacctaactgcccctgcagaaggagcaatggccttggctcctgagaggtaagagcccggcccaccctctccagatgccagtccccgagcgccctgcagccggccctgactctccgcggccgggcacccgcagggcagccccacgcgtgctgttcggagagtggctccttggagagatcagcagcggctgctatgaggggctgcagtggctggacgaggcccgcacctgtttccgcgtgccctggaagcacttcgcgcgcaaggacctgagcgaggccgacgcgcgcatcttcaaggcctgggctgtggcccgcggcaggtggccgcctagcagcaggggaggtggcccgccccccgaggctgagactgcggagcgcgccggctggaaaaccaacttccgctgcgcactgcgcagcacgcgtcgcttcgtgatgctgcgggataactcgggggacccggccgacccgcacaaggtgtacgcgctcagccgggagctgtgctggcgagaaggcccaggcacggaccagactgaggcagaggcccccgcagctgtcccaccaccacagggtgggcccccagggccattcctggcacacacacatgctggactccaagccccaggccccctccctgccccagctggtgacaagggggacctcctgctccaggcagtgcaacagagctgcctggcagaccatctgctgacagcgtcatggggggcagatccagtcccaaccaaggctcctggagagggacaagaagggcttcccctgactggggcctgtgctggaggcccagggctccctgctggggagctgtacgggtgggcagtagagacgacccccagccccgggccccagcccgcggcactaacgacaggcgaggccgcggccccagagtccccgcaccaggcagagccgtacctgtcaccctccccaagcgcctgcaccgcggtgcaagagcccagcccaggggcgctggacgtgaccatcatgtacaagggccgcacggtgctgcagaaggtggtgggacacccgagctgcacgttcctatacggccccccagacccagctgtccgggccacagacccccagcaggtagcattccccagccctgccgagctcccggaccagaagcagctgcgctacacggaggaactgctgcggcacgtggcccctgggttgcacctggagcttcgggggccacagctgtgggcccggcgcatgggcaagtgcaaggtgtactgggaggtgggcggacccccaggctccgccagcccctccaccccagcctgcctgctgcctcggaactgtgacacccccatcttcgacttcagagtcttcttccaagagctggtggaattccgggcacggcagcgccgtggctccccacgctataccatctacctgggcttcgggcaggacctgtcagctgggaggcccaaggagaagagcctggtcctggtgaagctggaaccctggctgtgccgagtgcacctagagggcacgcagcgtgagggtgtgtcttccctggatagcagcagcctcagcctctgcctgtccagcgccaacagcctctatgacgacatcgagtgcttccttatggagctggagcagcccgcctagaacccagtctaatgagaactccagaaagctggagcagcccacctagagctggccgcggccgcccagtctaataaaaagaactccagaaca

SEQ ID NO: 142917 - DNA, 1551 bp, Artificial Sequence
  derived and/or modified sequence
atgcctgtgcctgagaggcctgctgctggccctgacagcccccggcccggcaccaggagagctgccccccgggtgctgtttggagagtggctgctgggggagatcagcagcggctgctatgagggcctgcagtggctggatgaggcccggacctgcttccgggtgccctggaagcactttgccaggaaggacctgtctgaggctgatgcccgcatcttcaaggcctgggccgtggcccggggccgctggccacccagcagcagaggaggcggccccccacctgaggccgagacagctgagcgggccggctggaagaccaacttccgctgtgccctgcggagcaccaggagatttgtgatgctgcgggacaacagcggggaccctgctgacccccacaaggtgtatgccctgagccgggagctgtgctggagggagggccctggaacagaccagacagaggccgaggccccagctgctgtgcccccaccccagggcggccccccaggccccttcctggcccacacccatgctggcctgcaggcccctggccccctgcctgccccagctggggacaagggggacctgctgctgcaggccgtgcagcagagctgcctggccgaccacctgctgacagcctcctggggcgctgaccctgtgcccaccaaggcccctggagagggccaggagggcctgcccctgaccggggcctgtgccggcggccctggcctgcctgctggggagctgtatggctgggccgtggagaccacccccagccctggcccccagcctgctgccctgaccaccggggaggccgccgcccctgagagcccccaccaggccgagccctacctgagccccagccccagcgcctgcacagctgtgcaggagcccagccctggggccctggatgtgaccatcatgtacaagggccgcacagtgctgcagaaggtggtgggccaccccagctgcaccttcctgtatggccccccagaccctgctgtgcgggccacagacccccagcaggtggccttccccagccctgctgagctgcctgaccagaagcagctgcgctacacagaggagctgctgcggcacgtggcccctggcctgcacctggagctgcggggcccccagctgtgggcccggaggatgggcaagtgcaaggtgtactgggaggtgggcggccccccaggcagcgccagccccagcaccccagcctgcctgctgcccaggaactgtgacacccccatctttgacttccgggtcttcttccaggagctggtggagttccgggcccggcagaggcggggcagcccccgctacaccatctacctgggcttcggccaggacctgtctgctggccggcccaaggagaagagcctggtgctggtgaagctggagccctggctgtgccgggtgcacctggagggcacccagcgggagggcgtgagcagcctggacagcagcagcctgagcctgtgcctgagcagcgccaacagcctgtatgatgacatcgagtgcttcctgatggagctggagcagcctgcctag

SEQ ID NO: 142918 - DNA, 1551 bp, Artificial Sequence
  derived and/or modified sequence
atgcccgtgcccgagcggcccgccgccggccccgacagcccccggcccggaacaaggagggccgctccccgagtgttgtttggagaatggctgttgggtgagatcagcagcggatgttatgaaggattgcaatggctggatgaggccagaacgtgctttagagtcccttggaagcattttgcgcgtaaagatctgtctgaggccgatgcccggatctttaaagcctgggcagtggctcggggtcgttggccaccaagttcaaggggaggcggacctcctccggaggccgagacagccgagcgcgctggctggaaaaccaactttcggtgcgcgctacgctccaccaggaggtttgtgatgctgagagataattctggggacccagccgaccctcataaggtatacgccctctctcgggagctgtgttggcgggagggaccaggcaccgaccaaaccgaagctgaagcccctgccgcagtgcccccccctcagggaggcccacccggcccgtttctggcgcacacccatgcaggattgcaggcccccggccccttacctgcgcctgctggcgacaaaggagatttactattgcaggccgtgcaacagagctgcttggccgaccatttactgactgcatcatggggtgctgatcccgtcccaacaaaggctcccggggaaggtcaggaaggactgcccctgactggggcctgcgctgggggcccgggtctgccagcaggagagctgtatggatgggcggtggaaactacaccaagccctggaccccaaccggctgctttgaccaccggtgaggccgccgccccagagtccccacaccaggctgagccctatctatccccctccccatctgcctgcacagccgtacaggaacccagcccgggagctctagatgtcaccatcatgtacaaaggacgaacagtgcttcagaaggtggtgggtcatccgagctgtacatttctctacggacccccggaccctgccgtaagagccacggatccacagcaggtcgctttcccctccccagccgagctccctgaccagaaacagctgagatatacagaggaactcctgcgacacgttgctcccggccttcacctcgaattgaggggtccacaattgtgggctagaaggatgggaaagtgtaaagtctactgggaggtaggaggccctccagggagtgcctctccttcaacgcccgcttgtttgctgccacgcaattgtgatacccccatattcgacttccgcgtcttcttccaggagctggtggaattccgcgctcggcaacgcaggggttcccccagatatactatctatctgggcttcggacaggatctctcggccggtaggcctaaagaaaagagcctcgtcctggtgaaactggagccctggctctgtagagtgcacctcgagggcacacagagagagggagtgagttctctggacagcagttcactgtcactgtgcctctcttcagcgaacagtttgtacgatgacatcgagtgcttcctgatggagctcgagcagccagcctag

SEQ ID NO: 142919 - DNA, 1551 bp, Artificial Sequence
  derived and/or modified sequence
atgcccgtgcccgagcggcccgccgccggccccgacagcccccggcctggcactcgtagagcagctcctagagtgttgttcggcgagtggctgctgggagagattagctccggatgttatgagggcctgcagtggttagacgaggcaagaacctgcttccgtgtaccctggaaacacttcgctcggaaagatctgagcgaagccgacgcgcgaattttcaaggcatgggctgtcgcccgaggtaggtggccgcctagctctaggggcgggggaccaccacccgaggccgagacggcggagcgagccggatggaaaaccaacttccgctgtgccctgaggagtaccagaagatttgtcatgcttagggataactcaggggatcctgccgaccctcacaaagtgtacgcgctaagcagggagctctgctggcgagagggaccaggaacggaccagacggaagccgaggcccccgcagcagtgccacctccacaggggggacctccaggcccgttcctggcccatacccatgctggcctgcaagcgcctggtccacttcctgctccagcaggggataagggcgacctactcttacaggccgtgcagcagtcttgtctggccgaccacctgctgactgcgagctggggcgcggacccagtacctaccaaagccccaggcgagggacaggaggggctcccactcactggggcctgtgccggaggccctggtcttcctgcaggggaactgtacgggtgggccgttgaaaccacaccttcgcctggaccgcagccggccgcacttacaacaggagaggccgctgctcccgagtcccctcaccaggccgaaccttacttgtccccctccccatccgcttgtaccgctgtacaggagccttctccgggggctcttgacgtgaccataatgtacaagggtagaaccgtgctgcaaaaagtagtcggacatcccagctgcacattcttatacggcccccctgaccctgccgtgcgggcgactgaccctcaacaggtcgcgtttcccagcccagcagagctgccggaccagaaacagctcagatacactgaagagctcttgcgacatgttgctcctggcttgcacttggaattacggggcccccaactttgggcgagaagaatgggcaagtgcaaagtctactgggaggtagggggacccccggggtccgccagcccatccacgccggcatgcttactgccccggaattgcgatacacccatctttgatttccgagtgtttttccaagaactggtcgaattcagggcacgtcagaggaggggttcgccccggtacacaatttatttaggattcgggcaagatctctccgctggacggcctaaggagaagagtctcgtactggtgaagttagaaccatggttgtgcagggtgcacctcgagggcactcagcgagaaggggtcagctctctggatagcagctcactgagtctgtgcttaagctcagccaatagcctgtacgacgacatagagtgcttcttaatggagctggagcagccggcatag

SEQ ID NO: 142920 - DNA, 1551 bp, Artificial Sequence
  derived and/or modified sequence
atgcccgtgccagagcggccagctgctggccctgattctccaagacctggaaccagaagggctgctcccagagttttgttcggagaatggttgctcggggagatctcttccggatgctacgaagggctgcagtggctagacgaggcgaggacctgcttcagggtcccgtggaagcatttcgccaggaaagatttgagtgaagccgacgccagaattttcaaggcttgggctgtagctaggggccgttggccaccaagttctaggggcggaggtccccctccagaggccgagaccgcggaaagagctggttggaaaaccaattttaggtgtgccctgcggagcacccggagatttgtaatgttacgcgacaactccggcgaccctgccgatcctcataaggtttacgccctctctcgtgaactgtgctggcgtgagggcccagggactgaccaaacggaggccgaagcgcctgctgcggttccccctccccagggaggcccaccaggcccatttttggcacacactcatgcaggcctccaggcccctggcccactgccagctccagctggtgataagggggatctcctattgcaggctgtgcagcagtcctgtctggccgatcatctgctcactgcgagctggggggctgacccggtcccaacaaaggctccaggggaggggcaggaaggcttgcctctgaccggtgcctgtgctggcggtcctgggctgccagctggggaactgtacgggtgggcggtggagacgactccttcgcccggaccccaaccagccgcactgacaacaggcgaggcggcagcacccgagtccccccatcaggccgaaccatacttatctcccagtccatccgcttgtacggctgtgcaggagccctcgcccggagccctcgatgtgaccattatgtacaaaggaaggaccgtccttcagaaggtggtcggtcatccatcctgcacctttttgtacggcccaccagacccagccgtgagggcaaccgacccacagcaggtggcctttcccagccctgccgaactccccgatcagaaacagcttaggtacacagaggagctcctccgtcacgttgcacctgggctccacctggagctgagaggaccccagctgtgggccaggaggatggggaaatgcaaggtttattgggaagttggaggcccaccgggaagcgctagcccatccacccctgcttgcctgctgccacgcaactgtgacaccccgatcttcgacttccgggtgttctttcaggagctggttgagtttagggcccgacagaggagagggtcaccccgatacacaatatacctggggttcggacaggacctaagcgcgggaaggcctaaggagaagtccttggtgctggtgaaacttgagccatggttgtgtagggtccatcttgaggggacccaacgcgagggggtcagctctctggattcatcttctctgagcttatgcctcagttcggccaatagcctatacgatgatatcgagtgttttcttatggagctggagcaacctgcttag

SEQ ID NO: 142921 - DNA, 1551 bp, Artificial Sequence
  derived and/or modified sequence
atgccagtgcctgagaggccagctgcagggcctgacagtccgaggcccggaacacggagagccgctcctagggtgttgtttggcgaatggctcctaggagagatctctagtggatgttatgaaggacttcagtggctggacgaggcgagaacctgtttcagggtgccatggaagcacttcgccagaaaagatctgagcgaggcggatgcgagaatatttaaagcgtgggccgtggctcggggaagatggccccctagttcacgaggtggaggacctccacccgaggcggaaaccgccgagcgagccggatggaagaccaactttagatgtgccctgaggtctacgcgaagattcgtgatgctcagggacaattctggagaccctgcagacccgcacaaggtgtatgctctatctcgggagctttgttggagggaggggcctggtactgaccagactgaggccgaagcgccagcggctgttcccccaccacagggaggaccacctgggccttttctggcccatacacacgctggactccaagctcctgggcctcttcccgcacccgcaggcgacaaaggggatctcctgctgcaggcagtccagcaaagctgcctagctgatcacctgctgaccgcatcttggggtgcggatcctgtcccaacaaaagcacccggtgagggccaggagggtctccctcttactggggcttgtgcagggggtccaggactgcctgccggagaattgtacggctgggccgtggagacaacaccatcaccgggtccccagcccgcagccctgacgacgggcgaagccgcagcacccgagtcccctcaccaggcagagccttatctgtctcctagtccgtcagcctgcaccgcggtccaggagccgtcccccggagccctggacgtgaccattatgtataagggtaggacggtgttgcaaaaagtggtggggcacccctcctgtacctttctgtacggccctccggaccccgcagtgagagccaccgacccccaacaagttgccttccctagccccgcagaactgcccgaccagaaacagctgcggtataccgaagagcttttgcggcacgtggcccctggactgcatctcgaactgcggggtccacagctgtgggcaagacgcatggggaagtgcaaggtctactgggaggttggtggaccgccaggatctgcgagcccaagtactcctgcttgcttactcccacgcaactgtgatactccaatatttgacttcagagtctttttccaggaattagtcgaatttcgggcaagacagcggaggggtagcccgagatatacaatttacctgggctttggccaggacctgagcgccggacggcctaaggagaagagcctcgtactcgtgaaactggagccctggctgtgtcgcgtccatctggaggggacccaaagggagggtgtgtccagtttggatagctcctctctctccttgtgcctgtcgagtgccaactcgctctatgacgatatcgaatgttttttgatggagcttgaacaaccagcctag

SEQ ID NO: 142922 - protein, 310 aa, Artificial Sequence
  derived and/or modified sequence
MRPARHWETRFGARDFGGFQDCFFRDRLMDTARIAVVGAGVVGLSTAVCISKLVPRCSVTIISDKFTPDTTSDVAAGMLIPHTYPDTPIHTQKQWFRETFNHLFAIANSAEAGDAGVHLVSGIKGSGGWTLTRRIEDLWELHPSFDIVVNCSGLGSRQLAGDSKIFPVRGQVLQVQAPWVEHFIRDGSGLTYIYPGTSHVTLGGTRQKGDWNLSPDAENSREILSRCCALEPSLHGACNIREKVGLRPYRPGVRLQTELLARDGQRLPVVHHYGHGSGGISVHWGTALEAARLVSECVHALRTPIPKSNL

SEQ ID NO: 142923 - DNA, 933 bp, Artificial Sequence
  derived and/or modified sequence
atgagacccgccagacactgggagaccagattcggcgccagagacttcggcggcttccaggactgcttcttcagagacagactgatggacaccgccagaatcgccgtggtgggcgccggcgtggtgggcctgagcaccgccgtgtgcatcagcaagctggtgcccagatgcagcgtgaccatcatcagcgacaagttcacccccgacaccaccagcgacgtggccgccggcatgctgatcccccacacctaccccgacacccccatccacacccagaagcagtggttcagagagaccttcaaccacctgttcgccatcgccaacagcgccgaggccggcgacgccggcgtgcacctggtgagcggcatcaagggcagcggcggctggaccctgaccagaagaatcgaggacctgtgggagctgcaccccagcttcgacatcgtggtgaactgcagcggcctgggcagcagacagctggccggcgacagcaagatcttccccgtgagaggccaggtgctgcaggtgcaggccccctgggtggagcacttcatcagagacggcagcggcctgacctacatctaccccggcaccagccacgtgaccctgggcggcaccagacagaagggcgactggaacctgagccccgacgccgagaacagcagagagatcctgagcagatgctgcgccctggagcccagcctgcacggcgcctgcaacatcagagagaaggtgggcctgagaccctacagacccggcgtgagactgcagaccgagctgctggccagagacggccagagactgcccgtggtgcaccactacggccacggcagcggcggcatcagcgtgcactggggcaccgccctggaggccgccagactggtgagcgagtgcgtgcacgccctgagaacccccatccccaagagcaacctgtag

SEQ ID NO: 142924 - DNA, 933 bp, Artificial Sequence
  derived and/or modified sequence
atgcggccagcccggcactgggagacacgattcggtgcccgcgatttcgggggtttccaggactgctttttccgggacagattaatggataccgccaggatcgccgtcgtcggggccggcgtggtgggtctctctactgccgtgtgtatctccaagctggtgcctaggtgttcagtgactattatcagtgacaaatttacaccggataccacaagtgatgtggctgccggcatgctcatcccacacacctaccccgatacccctatccacactcagaaacaatggttcagagagacattcaaccacctgttcgcaatagccaacagtgccgaggccggcgatgccggggttcatcttgtgtctgggatcaaaggctccggaggctggactctaaccagaagaatcgaagatctgtgggagctgcacccgtccttcgacatcgtagtcaattgctcagggctgggcagtcgacagctggccggggactccaaaatcttccctgtcagggggcaggtgctgcaggtgcaggccccctgggtagagcattttatccgagatgggtctggactcacctacatctacccgggaaccagtcacgtgactctgggcggtaccaggcaaaagggggattggaacctgtcacctgacgctgaaaattcccgggaaattctctctcgttgctgtgcactggagccctctctccatggagcatgcaacattcgagagaaggttggattgcggccttacagaccaggtgtgaggcttcagacggaactgctggcacgggacgggcagcgattacccgtagttcatcattacggccatggcagtgggggaatatctgtgcactggggtaccgctctcgaggctgcaagactggtatccgaatgtgttcatgctctgcgcactcctatccctaagtcaaacctgtag

SEQ ID NO: 142925 - DNA, 1953 bp, Artificial Sequence
  derived and/or modified sequence
ctctgtctctcagggcatgagaccagccaggcactgggaaacaaggtttggtgccagagattttggtggcttccaagactgctttttcagagacaggctcatggacacagcacggattgcagttgtcggggcaggtgtggtggggctctccacggctgtgtgcatctccaaactggtgccccgatgctccgttaccatcatttcagacaagtttactccagataccaccagtgatgtggcagccggaatgcttattcctcacacttatccagatacacccattcacacgcagaagcagtggttcagagaaacctttaatcacctctttgcaattgccaattctgcagaagctggagatgctggtgttcatttggtatcagggataaagggaagtggaggctggacactcactcggcgaatagaagacctgtgggaacttcatccgtcctttgacatcgtggtcaactgttcaggccttggaagcagacagcttgcaggagactcaaagattttccctgtaaggggccaagtcctccaagttcaggctccctgggtggagcattttatccgagatggcagtgggctgacatatatttatcctggtacatcccatgtaaccctaggtggaactaggcaaaaaggggactggaatctgtccccggatgcagaaaatagcagagagattctttcccgatgctgtgctctggagccctccctccacggagcctgcaacatcagggagaaggtgggcttgaggccctacaggccaggcgtgcgactgcagacagagctccttgcgcgagatggacagaggctgcctgtagtccaccactatggccatgggagtgggggcatctcagtgcactggggcactgctctggaggccgccaggctggtgagcgagtgtgtccatgccctcaggacccccattcccaagtcaaacctgtagatgacataaaatgacagcaaagagactgagagactgttgatcaaagcacagaacaggttcaaataacttttccactgcatgaaagtttaattagacatttctttgttttcaacattagaagtggtgtaacatgtaagctgagcacggtggcatgcctatagtcccagctacttgagaggctgaggcaggaggattgttgagcccaggagtttgagtgcaatctgggtaacattttttagaggtgccagttcccacctctaaaaaaaacaccaacaacaaaagaaatgatgcaacatgtaggcttacttaggaagtccagcattaatggcatagggcataaagctctattttttgttaaaaatacttcttatagagtaaaatttatttagaactgatgtccaaggacctatgcagatttatatgaatgttggaagctatagagattttgatatcatttggcttataaatccacaggaggagataatgtatggaaaacatttaaatcactgtcaattgcagagctgcctgtgatcttcttaggttatagccaagtcagcaacataattcctctaaataaaattacattgtgctcacacagtgctggattattacatttaattgaagacaaagcatgcttgctcctagtactagcagcaagcttttcctcccctcagctggtaatgatggtaggagacagagatgaagttgcctatgtatgtcatatcaattcaatagctgcctggggtcaaacacctaggggttgtacattccattactgtaaatgattgagagctggtttgtggtatggttggctttgcctaagcatttttgaagatgaacagcatgtgcagccaaagaactaatttgctaattaaggtggaacaatcattctgaatgaaatataatcagagtactccgcagtttgttaagaagtattggggaggaggggaatgtgtctcacaataaaatgagttggaattgttgagttaaatgaatttaacctg

SEQ ID NO: 142926 - DNA, 933 bp, Artificial Sequence
  derived and/or modified sequence
atgaggcctgcccggcactgggagaccaggtttggagcccgggactttggaggcttccaggactgcttcttccgggaccggctgatggacacagccagaattgctgtggtgggcgccggcgtggtgggcctgagcacagctgtgtgcatcagcaagctggtgccccgctgcagcgtgaccatcatcagtgacaagttcaccccagacaccaccagtgatgtggccgccggcatgctgatcccccacacctacccagacacccccatccacacccagaagcagtggttccgggagaccttcaaccacctgtttgccatcgccaacagcgctgaggccggagatgctggggtgcacctggtgtctggcatcaagggcagcggcggctggaccctgaccaggagaattgaggacctgtgggagctgcaccccagctttgatattgtggtgaactgcagcggcctgggcagccggcagctggccggggacagcaagatcttccctgtgcggggccaggtgctgcaggtgcaggccccctgggtggagcacttcatcagagatggcagcggcctgacctacatctacccaggcaccagccacgtgaccctgggcggcacccggcagaagggggactggaacctgagcccagatgctgagaacagccgggagatcctgagccgctgctgtgccctggagcccagcctgcatggagcctgcaacatccgggagaaggtgggcctgcggccctacagacctggggtgcggctgcagacagagctgctggccagagatggccagaggctgcctgtggtgcaccactacggccacggcagcggcggcatctctgtgcactggggcacagccctggaggccgcccggctggtgtctgaatgtgtgcacgccctgcggacccccatccccaagagcaacctgtag

SEQ ID NO: 142927 - DNA, 933 bp, Artificial Sequence
  derived and/or modified sequence
atgcggcccgcccggcactgggagacccggttcggcgcccgggactttggcggatttcaggattgcttttttcgagacagattaatggacacggctaggatcgctgttgtgggagcaggtgtcgtgggcttgtctacagctgtttgcatctctaagctggtaccgcgatgcagcgtcacaattatcagcgataagtttacgcccgacactacttctgacgtggccgccggtatgctgatcccccatacatatcctgatacgcccatacacacccagaaacaatggttcagagaaacctttaaccaccttttcgcgatcgcgaactctgccgaagccggggacgctggggttcatctggttagcggcattaagggtagcggggggtggacccttacacgacgtattgaagatctttgggagctccatccaagtttcgacatagttgttaattgctcaggacttggctcgcggcagctggccggcgacagtaagatctttcccgtgagggggcaagtcctccaagtccaggcaccctgggtggaacatttcatccgggatggatccgggctcacttacatctatccaggtacaagtcacgtgaccctcgggggcacccggcagaaaggagattggaatctgagccccgacgccgagaactcccgggagatcctgtccagatgctgtgccctcgagccatccctacacggagcctgcaacatccgtgaaaaagtgggcctccggccatacaggccgggagttcggcttcagacggaactcttagccagagatggacagcgcctgccagttgtccaccactacgggcatggcagcggcggtatctctgtgcattggggaactgcactggaagctgcacggctggtcagtgaatgcgtacatgccctccgcacgccaatccctaaaagtaatctctag

SEQ ID NO: 142928 - DNA, 933 bp, Artificial Sequence
  derived and/or modified sequence
atgagaccagctagacactgggagacgaggttcggcgcacgggattttggaggatttcaggactgcttctttcgcgaccgactcatggatacggcacgcatcgccgtggtcggggctggcgttgtcggactgagtaccgccgtgtgcattagtaagttggtcccgcgttgctctgtgactatcatatcagataagtttactcccgataccaccagcgacgtggctgccggtatgttaatcccacatacatatcctgacacaccaattcacacacaaaagcagtggtttagagaaacgtttaatcatctgtttgccatcgccaactcagccgaagccggtgacgctggagtgcacctcgtcagcgggatcaagggtagcggcggatggaccctgaccaggagaattgaggacctgtgggagttgcacccctctttcgatattgtcgttaactgtagcggtctcggaagtcggcaactggcaggcgacagcaagatcttccctgtcaggggtcaggtcttacaagtacaggccccttgggtggaacatttcataagggacggctcaggactcacatacatctaccctggaacatcacacgtgacactcggcggtacaaggcagaaaggcgattggaacttgtccccggatgcagaaaatagtcgggaaatcctttccagatgctgcgctttggagcctagcttgcatggggcatgtaacatccgcgaaaaggtgggcctcaggccttatcgacccggagtacggctgcagactgagttgctggctcgcgatgggcagcgactgccagtggtgcaccactacggacacgggtccggcggtatctccgtgcactgggggactgcactagaggcggcaagactggtaagcgagtgtgtacacgccctcagaacaccaattccgaaatccaacctctag

SEQ ID NO: 142929 - protein, 488 aa, Artificial Sequence
  derived and/or modified sequence
MSYPGYPPTGYPPFPGYPPAGQESSFPPSGQYPYPSGFPPMGGGAYPQVPSSGYPGAGGYPAPGGYPAPGGYPGAPQPGGAPSYPGVPPGQGFGVPPGGAGFSGYPQPPSQSYGGGPAQVPLPGGFPGGQMPSQYPGGQPTYPSQINTDSFSSYPVFSPVSLDYSSEPATVTQVTQGTIRPAANFDAIRDAEILRKAMKGFGTDEQAIVDVVANRSNDQRQKIKAAFKTSYGKDLIKDLKSELSGNMEELILALFMPPTYYDAWSLRKAMQGAGTQERVLIEILCTRTNQEIREIVRCYQSEFGRDLEKDIRSDTSGHFERLLVSMCQGNRDENQSINHQMAQEDAQRLYQAGEGRLGTDESCFNMILATRSFPQLRATMEAYSRMANRDLLSSVSREFSGYVESGLKTILQCALNRPAFFAERLYYAMKGAGTDDSTLVRIVVTRSEIDLVQIKQMFAQMYQKTLGTMIAGDTSGDYRRLLLAIVGQ

SEQ ID NO: 142930 - protein, 660 aa, Artificial Sequence
  derived and/or modified sequence
MNPDLRRERDSASFNPELLTHILDGSPEKTRRRREIENMILNDPDFQHEDLNFLTRSQRYEVAVRKSAIMVKKMREFGIADPDEIMWFKNFVHRGRPEPLDLHLGMFLPTLLHQATAEQQERFFMPAWNLEIIGTYAQTEMGHGTHLRGLETTATYDPETQEFILNSPTVTSIKWWPGGLGKTSNHAIVLAQLITKGKCYGLHAFIVPIREIGTHKPLPGITVGDIGPKFGYDEIDNGYLKMDNHRIPRENMLMKYAQVKPDGTYVKPLSNKLTYGTMVFVRSFLVGEAARALSKACTIAIRYSAVRHQSEIKPGEPEPQILDFQTQQYKLFPLLATAYAFQFVGAYMKETYHRINEGIGQGDLSELPELHALTAGLKAFTSWTANTGIEACRMACGGHGYSHCSGLPNIYVNFTPSCTFEGENTVMMLQTARFLMKSYDQVHSGKLVCGMVSYLNDLPSQRIQPQQVAVWPTMVDINSPESLTEAYKLRAARLVEIAAKNLQKEVIHRKSKEVAWNLTSVDLVRASEAHCHYVVVKLFSEKLLKIQDKAIQAVLRSLCLLYSLYGISQNAGDFLQGSIMTEPQITQVNQRVKELLTLIRSDAVALVDAFDFQDVTLGSVLGRYDGNVYENLFEWAKNSPLNKAEVHESYKHLKSLQSKL

SEQ ID NO: 142931 - DNA, 1983 bp, Artificial Sequence
  derived and/or modified sequence
atgaaccctgacctacggcgtgaacgggactcagcttcttttaaccccgagttgctcacgcacatccttgatgggagcccggagaagacaaggcgcaggcgcgaaattgagaacatgattctgaacgatccagacttccaacatgaagacctgaacttcctcacccgatcccagcgctatgaagtcgcggtgcggaagagcgcaatcatggtcaagaagatgagggaatttggaatcgctgacccagacgagattatgtggttcaagaattttgtgcaccggggcaggccagagccgctcgatctgcaccttggcatgtttctgccaacactgctccaccaggctaccgccgagcaacaagaacgattcttcatgcccgcttggaatttagaaattataggaacatacgcccagactgagatgggccacggcacccaccttcggggcctggaaaccactgcaacatacgacccagagacccaggagtttattttaaatagccctaccgtaacaagcatcaagtggtggccaggaggtttgggaaagacaagcaatcacgccatcgtgttggcccagctgattactaaggggaagtgctacggacttcacgcattcatcgtgcctattagggagatcggtacccacaagccgctgcccggaataaccgtcggggatatcgggcccaagtttggatatgacgagattgataacggttacctcaagatggacaaccaccgcatcccaagagagaacatgctgatgaagtacgctcaagtgaagccggatggtacttacgttaaacctctgagtaataaactcacgtacgggaccatggtgtttgtgcggtcctttttggtgggtgaggctgcacgagccctaagcaaggcctgcacgatagcaattaggtactccgcagttaggcaccagagcgaaatcaaacccggggagcctgaacctcagatactggacttccaaacacagcagtacaagctttttcctttactcgcaacagcgtacgcattccagtttgtgggagcctacatgaaggagacataccaccgcatcaatgagggaatcggacagggagacctcagtgaactacccgagctccacgctttgactgctgggctgaaggcattcacttcctggaccgcaaacacgggcatcgaggcgtgtcgaatggcttgcggaggtcatggttacagccactgcagcgggctgcctaatatatatgttaattttactcctagctgtaccttcgagggtgaaaacacagtcatgatgttacagacggctcggttccttatgaaatcttatgaccaggtgcatagcgggaaactggtgtgtgggatggtgtcctatctaaatgatctcccttctcagaggatacagcctcagcaggtggcagtgtggcctacaatggtggatattaattctccagaatcactgacagaagcttataagcttcgcgcagccagactagttgaaatcgccgccaaaaatctccagaaagaagtcatccacaggaagtctaaggaggtggcttggaacctgacatcagtggacctggtaagagcttcagaggcccactgccactacgtggtggtcaaacttttcagcgagaagctattgaaaatccaggacaaggcaatccaggcggttctgcggagcctctgtctgctctactccctgtacggcatctcacagaacgccggggactttctgcaaggttcaattatgacggagccccagatcacacaggttaaccagcgagtcaaagaactccttacactcatccgcagcgatgccgtagctttggttgatgctttcgactttcaggatgtgacattaggtagcgtcttagggcggtacgatggcaacgtctacgaaaatttgttcgaatgggccaaaaactccccactaaacaaggccgaagtccatgagtcttacaagcacctcaagtctctccagtcaaagttgtag

SEQ ID NO: 142932 - DNA, 1983 bp, Artificial Sequence
  derived and/or modified sequence
atgaaccctgatcttcgtagggagagggacagcgcatcattcaatccagaactactcacacacattcttgacgggtcaccagagaaaacaagaagacgccgagaaatcgagaatatgattctgaacgatcctgacttccaacacgaggacctgaattttttgactaggagtcagagatatgaagtggctgtgcgaaaaagcgccattatggtgaagaaaatgcgcgagttcggaatcgctgaccccgatgagatcatgtggtttaagaattttgtacataggggcagacccgaacccctcgatctgcacctcggaatgttcctgccgactctgctgcaccaggctaccgcggaacagcaggagagattttttatgccggcatggaatctggaaattatcggaacctatgctcagaccgagatggggcacggaacacacctgaggggactggagacaaccgcaacatatgatcccgaaacgcaggagttcatcctcaattccccgacagttaccagcattaagtggtggcctggcggccttggaaagacaagcaatcacgccatagtactcgcccaattgattaccaagggaaaatgttacggcctgcacgcctttatcgtacccatccgagaaatcggcacacacaaacctctccccggcatcaccgtaggcgatatcggcccgaagttcggctatgatgagattgataatggatacctaaagatggacaaccacaggattccgcgagaaaacatgctcatgaaatacgctcaggtgaagcccgacggcacttatgtcaaacccctaagcaataagctgacctatggcacaatggtgttcgtgcgaagtttcctcgtgggcgaggcagccagagccctcagtaaggcatgcaccatcgctatcagatacagtgctgtccggcatcagtcagagatcaagcccggggagcctgagccacagattctggacttccaaactcagcagtacaagctgttcccactgttggccacagcatacgccttccagttcgtgggtgcctatatgaaggagacctatcacagaattaatgaggggattggtcagggcgaccttagcgagctgcctgagctccatgctttgactgctggcttgaaagcttttacatcatggaccgccaatacgggaatcgaggcatgtagaatggcatgcggtggacatgggtactcccactgtagcggcttgccaaacatctatgttaactttactccatcgtgtactttcgaaggggagaacacagtgatgatgctccagaccgcgcgctttctcatgaagagctacgatcaggttcacagtggaaaactggtatgtggcatggtatcctatcttaacgatttgccatcccaacggatccagccacagcaggtcgccgtgtggccaactatggtggacattaactcacctgagagtcttactgaagcctacaaactacgcgccgcaaggctcgtggaaattgccgctaaaaatttgcagaaggaggtgatccacagaaaaagcaaagaggtcgcttggaatctgacaagtgtggacctggtgagagcgtctgaggctcactgccactacgttgtcgttaagcttttctctgaaaagctcctcaagattcaggacaaagcaatacaggccgtattgcgttctctctgtctgctttactcactttacgggatcagtcagaacgcgggggacttccttcagggttcaatcatgacagaaccacagatcacccaggttaaccagcgcgtcaaggagttgcttacccttatcagatctgacgccgttgctcttgtcgacgccttcgactttcaggacgttaccttagggagtgtgctgggccgttacgatgggaacgtatatgagaatttattcgagtgggcgaagaatagccctctcaacaaggcggaggtgcacgaatcttacaagcacctcaaaagcttacagagcaaactttag

SEQ ID NO: 142933 - DNA, 1983 bp, Artificial Sequence
  derived and/or modified sequence
atgaacccagacctgcggcgggagcgggacagcgccagcttcaaccctgagctgctgacccacatcctggatggcagccctgagaagaccaggagaagaagagaaattgagaacatgatcctgaatgaccctgacttccagcacgaggacctgaacttcctgaccaggagccagagatatgaggtggccgtgaggaagagcgccatcatggtgaagaagatgagggagtttggaattgctgaccctgatgagatcatgtggttcaagaactttgtgcaccggggccggcctgagcccctggacctgcacctgggcatgttcctgcccaccctgctgcaccaggccacagctgagcagcaggagcgcttcttcatgcctgcctggaacctggagatcatcggcacctacgcccagacagagatgggccacggcacccacctgcggggcctggagaccacagccacctatgaccctgagacccaggagttcatcctgaacagccccaccgtgaccagcatcaagtggtggccaggcggcctgggcaagaccagcaaccacgccatcgtgctggcccagctgatcaccaagggcaagtgctacggcctgcacgccttcatcgtgcccatccgggagatcggcacccacaagcccctgcccggcatcaccgtgggggacatcggccccaagtttggctatgatgaaattgacaatggctacctgaagatggacaaccaccgcatcccccgggagaacatgctgatgaagtatgcccaggtgaagccagatggcacctacgtgaagcccctgagcaacaagctgacctacggcaccatggtgtttgtgcgctccttcctggtgggggaggccgcccgggccctgagcaaggcctgcaccatcgccatccgctacagcgctgtgcgccaccagagcgagatcaagccaggagagcctgagccccagatcctggacttccagacccagcagtacaagctgttccccctgctggccacagcctatgccttccagtttgtgggcgcctacatgaaggagacctaccaccgcatcaatgaaggaattggccagggcgacctgtctgagctgcctgagctgcacgccctgacagctggcctgaaggccttcacctcctggacagccaacacaggaattgaggcctgcaggatggcctgtggcggccacggctacagccactgcagcggcctgcccaacatctacgtgaacttcacccccagctgcacctttgaaggagaaaatacagtgatgatgctgcagacagcccgcttcctgatgaagagctatgaccaggtgcacagcggcaagctggtgtgtggcatggtgtcctacctgaatgacctgcccagccagaggatccagccccagcaggtggccgtgtggcccaccatggtggacatcaacagccctgagagcctgacagaggcctacaagctgcgggccgcccggctggtggagattgctgccaagaacctgcagaaggaggtgatccacaggaagagcaaggaggtggcctggaacctgacctctgtggacctggtgcgggccagcgaggcccactgccactacgtggtggtgaagctgttcagcgagaagctgctgaagatccaggacaaggccatccaggccgtgctgcggagcctgtgcctgctgtacagcctgtatggcatcagccagaatgctggggacttcctgcagggcagcatcatgacagagccccagatcacccaggtgaaccagagggtgaaggagctgctgaccctcatccgcagtgatgctgtggccctggtggatgcctttgacttccaggatgtgaccctgggctctgtgctgggccgctatgatggaaatgtgtatgagaacctgtttgagtgggccaagaacagccccctgaacaaggccgaggtgcatgagagctacaagcacctgaagagcctgcagagcaagctgtag

SEQ ID NO: 142934 - DNA, 1983 bp, Artificial Sequence
  derived and/or modified sequence
atgaaccccgacctgcggcgggagcgggacagcgccagcttcaacccagaactgctcacgcatattctagatgggagccctgaaaaaacgcgccgccggagggagattgagaacatgattctaaatgaccccgatttccagcatgaggatctcaacttcctgacaagatcgcagaggtatgaagttgctgtgcggaaaagtgcaatcatggtaaaaaagatgcgcgagttcgggatagctgaccctgacgagatcatgtggttcaagaattttgtccatcgtggtcggccggagccattggacctccatttagggatgtttctaccaacgttactccaccaggcaactgccgaacaacaggagagattcttcatgcctgcgtggaacctggaaattattggcacctatgcccagacagagatgggtcatggcacacacctcaggggcctggaaactacagctacttatgatccggaaacgcaggagttcatactgaattcccccacagtcacctccatcaagtggtggccaggagggttgggcaaaacttcgaatcatgctatcgtccttgcccagctgattactaagggcaagtgctatggcctgcacgcgttcattgtccccatacgtgagattggcacacacaagccccttcctggcatcactgtgggggatatcggacccaagtttggatatgacgagattgacaatggctacttgaagatggacaaccacaggatacctcgcgagaatatgctgatgaaatacgctcaggtaaagccggacgggacctatgtgaagcctctgtctaataagctgacttacgggacaatggtgtttgttcgtagtttcctcgtgggggaagccgcaagagccctctcgaaagcctgtactatagcaattcgttattcagcggtccggcaccagagcgagatcaaacccggagaacccgagccacagattctggactttcagactcagcaatacaaactgttccctcttctcgccactgcctatgccttccagtttgtaggcgcgtacatgaaagagacgtatcacagaattaatgaaggcattggccagggcgacctgagtgagctgccggagctgcatgccctgactgccggtctgaaggcctttacgtcctggacagcaaacacgggaatcgaggcttgtcggatggcctgtggggggcacggctactcgcactgctccggattgccgaacatttacgtcaattttacaccttcatgtaccttcgagggagaaaacaccgtaatgatgctgcaaacagcaagatttttgatgaagtcttatgaccaggtccactctggtaaactggtgtgcgggatggtttcttacctgaacgatttacctagccagaggatccagcctcagcaggtggcggtgtggcctaccatggtcgacatcaattctcccgagtctctgacagaggcctataaactgcgggcagcgagacttgtcgagattgcggcaaagaacctgcagaaagaagttattcaccgaaaaagcaaggaggtcgcatggaacctgacttccgtggatctggtgcgggcctccgaagcccactgccactacgtggtcgtgaagcttttcagtgagaaattgctcaagatccaggataaggccatccaagccgtgctgaggtcactttgtcttctctacagtttgtacggaattagtcagaatgccggtgacttcctccaagggtccatcatgaccgaacctcagattacacaggtgaaccagcgggtaaaggagctgttaacactgattcgttctgacgcagtagcactcgtggatgcttttgacttccaggacgtcaccttaggctctgtgctcggtcggtatgacgggaatgtgtatgagaacctgtttgaatgggctaagaactcaccattaaacaaagcagaggttcacgaatcctacaaacacctgaagtctctccagagtaagctgtag

SEQ ID NO: 142935 - DNA, 1983 bp, Artificial Sequence
  derived and/or modified sequence
atgaaccccgacctgcggcgggagcgggacagcgccagcttcaaccccgagcttctgacccacatcttggacggatcaccggagaagacacggagaagaagagagattgagaatatgatcctgaatgatcccgacttccaacatgaggatcttaattttctgacaagatcgcagcgctatgaggttgccgtgcgcaagagcgctatcatggtcaaaaagatgcgcgaattcggcatcgccgatcctgacgagattatgtggtttaagaactttgtgcaccgtgggcgcccggaacctctggacctccacctcggaatgttcctgccaaccctcctccaccaggccacagcagagcagcaggagaggtttttcatgcccgcttggaacttagaaatcatcggcacttatgcccagacagagatgggccatgggacacacttacggggactagagaccacggcgacttatgatccagagactcaggagttcattcttaacagccccacagttaccagcatcaaatggtggccaggtggcctcggcaagacatcaaatcacgccattgtcttagcacagctcataacaaaaggtaagtgttatggtttacatgcctttatcgtgcctatcagggaaatcggcacccacaagcccttgcctggtatcaccgtgggcgacatcggacctaagttcgggtatgatgagattgataatggctacctgaagatggacaatcaccggatccccagagaaaacatgctgatgaaatacgcccaggttaagcccgacggcacctatgttaaacctttgagcaacaagctcacttacggaaccatggttttcgtgaggtcttttcttgtgggagaggccgctagagccctatcaaaggcatgcactattgctattcgatacagcgcagtgaggcatcagtccgagataaagccaggagagcccgagccccagatacttgacttccagactcagcagtacaaactcttccctcttcttgcaacagcctacgccttccagtttgtcggcgcctacatgaaggaaacttatcaccggatcaacgaggggatcggccagggggacctctctgagctgcctgaactccatgccctgaccgccggcctgaaagcgtttaccagttggacagcaaacacaggtattgaggcttgccggatggcatgcgggggtcatgggtactctcactgctccggcctgcctaacatctacgttaatttcactccaagctgcaccttcgagggggaaaataccgtcatgatgctgcagacagctcgcttcctgatgaaatcttacgatcaggttcattcaggcaagttggtttgcggcatggtgtcctacctaaatgacttaccttcccagaggatacaaccccagcaggtggccgtttggcccaccatggtggacatcaatagtccagaaagtctcaccgaagcctataagctcagggccgcacgactcgttgagattgccgccaaaaacttgcagaaggaagtgattcaccggaagagtaaagaggtggcctggaatctcacatcagtcgatctcgtgcgcgccagcgaagcacactgccactatgtcgttgtaaaattgttttcggagaaactgctcaagattcaggacaaagccatacaggccgtcctcagaagcctctgtctgctgtactcgctctacgggataagccaaaatgccggcgattttcttcagggatccatcatgaccgaaccccagattacccaggtgaaccaacgggttaaggagttgctgacccttatcaggagtgatgcggttgcactcgtcgacgcttttgacttccaggatgtaacacttggaagtgtgctcggaaggtacgatgggaatgtgtacgagaacctatttgagtgggcgaaaaactccccactgaataaagccgaggtccacgagtcctataagcacctgaaatcgctgcagtccaaactgtag

SEQ ID NO: 142936 - DNA, 1983 bp, Artificial Sequence
  derived and/or modified sequence
atgaatccagatctgcgcagagaaagagattctgctagctttaatcccgagctgttgactcacattctggatggcagcccagagaagaccagacggaggagagagattgaaaacatgatcctcaacgatcccgacttccagcatgaggacttgaattttctcactagatcacagaggtatgaggtggctgtgcggaagagcgctattatggtcaagaaaatgcgagagttcggtatagctgaccccgatgagattatgtggttcaaaaacttcgtgcatcgtggcagaccagagcccctggacctgcatttggggatgtttctgcccaccctgctccatcaagcgaccgctgagcagcaggaacggtttttcatgccggcttggaacctggagatcatcggcacgtatgcacagaccgagatgggccatggtacacacctgcgcggactcgagacaactgcgacgtacgatcccgagacccaggagttcatcctaaatagcccaaccgtgacctcaatcaagtggtggcccggagggctgggaaagacttccaaccacgccatcgtcttggcgcagctgattacgaagggaaagtgctacggactccatgccttcattgtgcccattcgggagattggtacccacaagcccctccccggaattactgttggtgatatcgggccaaagttcggatatgatgaaatcgacaacgggtacttgaaaatggataatcatcgcattcctagagagaatatgctgatgaagtacgcgcaggtgaagcctgacgggacctacgttaaaccactgtccaacaaactgacgtacggaaccatggtgtttgtgagatcctttctggtgggcgaagcagcacgagccctcagtaaagcttgtaccatagccattaggtatagtgcggtaagacatcaatcagagataaaaccaggtgagccagagcctcagatactggattttcaaactcagcagtacaaactgttcccacttctggccactgcctacgcattccagtttgtgggcgcttacatgaaagagacttaccacaggattaacgagggaatcggtcagggcgatctgtccgagttacctgagttgcatgctctgacggcagggctcaaggccttcacatcctggaccgctaatactggcatagaggcctgccgaatggcatgcggaggtcacgggtatagccactgctccgggctccctaacatctatgtaaattttactccaagttgcaccttcgaaggcgaaaatacagttatgatgttacagaccgcaagatttctcatgaaatcctatgatcaggtgcactccgggaagctggtgtgtggcatggtttcttatctgaacgatctgccatcccaacggatccaaccacagcaggtggcagtgtggccgaccatggtggatattaattccccagagagccttaccgaggcttataagctccgcgctgcacggttggtggagatcgccgcaaaaaacctgcaaaaggaggtcattcatcggaagtctaaggaagtggcatggaacctcacatccgttgatctggtgcgtgcctctgaggctcactgtcattatgtggtcgtcaaactgttcagtgagaaactgctaaagattcaggacaaagctattcaggcagtgctcaggagcctgtgcctcttgtattctctttatggcatttcccagaacgccggagacttcctgcagggaagtatcatgacggaaccacagattactcaagtcaaccagcgcgtcaaagagctgcttaccttaatccgctcagatgcggtggctcttgtggacgcgtttgacttccaggatgtcaccctcggatccgtcctgggcagatacgacggtaacgtttacgagaacctctttgagtgggccaaaaattcaccactcaacaaagcagaagtgcatgagagctataaacaccttaagagtctgcagagcaaactgtag

SEQ ID NO: 142937 - DNA, 1983 bp, Artificial Sequence
  derived and/or modified sequence
atgaacccggacctcagacgagagagagacagtgcaagctttaaccctgagctcctgactcacatcttggacgggagccctgagaagactcgtagaaggcgggaaatcgaaaacatgattttaaacgatccagattttcagcacgaagaccttaatttcctaactaggagtcaacggtatgaagtcgcagtacgtaagtcggccatcatggtgaaaaagatgcgggagtttggaatcgcagatccagatgagatcatgtggtttaagaatttcgtccatagaggcaggcctgagcccctggacctgcatctgggcatgttcttacctacgctgctgcaccaggctaccgcggagcagcaggagcgtttttttatgcccgcatggaatcttgagatcataggcacctacgctcagactgaaatgggccacggaactcatctacggggactggaaacaactgctacatatgaccccgagactcaggaattcatcttgaattctcctaccgtcacttccatcaagtggtggcctgggggacttgggaagacctcgaatcatgccatcgtcctggcgcaattgattacgaaaggtaaatgctacggactacacgcatttattgtcccaattcgggaaataggaacacacaaacctctccctggtattaccgttggggacatcggacccaaatttggatacgacgagatcgataacggctatctcaaaatggataaccacaggatccctcgggaaaacatgttgatgaaatacgcccaagtcaaacccgatgggacctacgtgaagcccttatccaacaagttgacgtatggaaccatggtgttcgtaagatcattcctagtgggagaagcagcaagggcgctgtccaaggcttgtactatcgctataaggtatagtgcagtacgccaccaaagtgagattaaacccggtgaacccgagcctcagatcctcgactttcagactcagcagtacaaactatttcctctgctcgctactgcctacgcatttcaatttgtaggcgcttacatgaaggagacttatcatagaattaacgaaggtatcggacagggcgacctcagcgagctgcccgaattacacgccctgaccgcaggactgaaggcctttacttcctggactgctaacaccggtatcgaggcctgtaggatggcatgcggtggccacggttattcccactgttctggtctgcccaatatctatgtgaattttactcccagttgcaccttcgaaggggaaaatacggttatgatgctgcagacagcacgatttctaatgaaatcctacgaccaggtgcacagcggaaaattagtgtgtgggatggtgtcctacctcaatgacctgccgagtcagaggatccagcctcagcaagttgctgtgtggcctacgatggttgatataaactcacctgagtcactgacagaagcctataaactcagagctgccaggctcgttgaaatcgccgcaaagaatttacagaaggaggtgatccacaggaaaagcaaggaggtagcctggaatctcaccagtgtggatctggtgcgcgcaagcgaagcacactgtcactacgtggtggtaaaattattctcagaaaagcttctcaaaatacaggataaagccatacaggccgtcttgagaagcctatgcctgctgtactcactgtacggtatctcacagaatgccggagacttcttgcagggctcaatcatgactgaaccacagattacacaggtgaatcagcgggttaaagaactactgactctgatccggtcagatgcagtggccctggttgacgcatttgacttccaggatgttaccctaggatcagtcctcgggcgatatgacggcaacgtgtatgaaaacctctttgagtgggccaaaaattctccactgaataaggccgaggtgcacgaatcttacaaacacctcaaatcgctccagagcaagctgtag

SEQ ID NO: 142938 - DNA, 1983 bp, Artificial Sequence
  derived and/or modified sequence
atgaaccccgacctgagaagagagagagacagcgccagcttcaaccccgagctgctgacccacatcctggacggcagccccgagaagaccagaagaagaagagagatcgagaacatgatcctgaacgaccccgacttccagcacgaggacctgaacttcctgaccagaagccagagatacgaggtggccgtgagaaagagcgccatcatggtgaagaagatgagagagttcggcatcgccgaccccgacgagatcatgtggttcaagaacttcgtgcacagaggcagacccgagcccctggacctgcacctgggcatgttcctgcccaccctgctgcaccaggccaccgccgagcagcaggagagattcttcatgcccgcctggaacctggagatcatcggcacctacgcccagaccgagatgggccacggcacccacctgagaggcctggagaccaccgccacctacgaccccgagacccaggagttcatcctgaacagccccaccgtgaccagcatcaagtggtggcccggcggcctgggcaagaccagcaaccacgccatcgtgctggcccagctgatcaccaagggcaagtgctacggcctgcacgccttcatcgtgcccatcagagagatcggcacccacaagcccctgcccggcatcaccgtgggcgacatcggccccaagttcggctacgacgagatcgacaacggctacctgaagatggacaaccacagaatccccagagagaacatgctgatgaagtacgcccaggtgaagcccgacggcacctacgtgaagcccctgagcaacaagctgacctacggcaccatggtgttcgtgagaagcttcctggtgggcgaggccgccagagccctgagcaaggcctgcaccatcgccatcagatacagcgccgtgagacaccagagcgagatcaagcccggcgagcccgagccccagatcctggacttccagacccagcagtacaagctgttccccctgctggccaccgcctacgccttccagttcgtgggcgcctacatgaaggagacctaccacagaatcaacgagggcatcggccagggcgacctgagcgagctgcccgagctgcacgccctgaccgccggcctgaaggccttcaccagctggaccgccaacaccggcatcgaggcctgcagaatggcctgcggcggccacggctacagccactgcagcggcctgcccaacatctacgtgaacttcacccccagctgcaccttcgagggcgagaacaccgtgatgatgctgcagaccgccagattcctgatgaagagctacgaccaggtgcacagcggcaagctggtgtgcggcatggtgagctacctgaacgacctgcccagccagagaatccagccccagcaggtggccgtgtggcccaccatggtggacatcaacagccccgagagcctgaccgaggcctacaagctgagagccgccagactggtggagatcgccgccaagaacctgcagaaggaggtgatccacagaaagagcaaggaggtggcctggaacctgaccagcgtggacctggtgagagccagcgaggcccactgccactacgtggtggtgaagctgttcagcgagaagctgctgaagatccaggacaaggccatccaggccgtgctgagaagcctgtgcctgctgtacagcctgtacggcatcagccagaacgccggcgacttcctgcagggcagcatcatgaccgagccccagatcacccaggtgaaccagagagtgaaggagctgctgaccctgatcagaagcgacgccgtggccctggtggacgccttcgacttccaggacgtgaccctgggcagcgtgctgggcagatacgacggcaacgtgtacgagaacctgttcgagtgggccaagaacagccccctgaacaaggccgaggtgcacgagagctacaagcacctgaagagcctgcagagcaagctgtag

SEQ ID NO: 142939 - DNA, 7506 bp, Artificial Sequence
  derived and/or modified sequence
cgaggatccgctcgggagcctcccctggccaggagcaggggattagtctgccccgcgaccggccccagccacgacgcggacatcgccccctctgtctgggccgctgtcactcacgcgccaaagggccacggagaaagaaggggcgggccggggcgggccgggcgagcggaggcggggacttgcgccgtcctgaggctgcctcctagggtccggccggcgctggagctgcggatttagattgtcactgccacctcggtcggtgcttacttcgctgccagctggtcgtcgccatgaacccggacctgcgcagggagcgggattccgccagcttcaacccggagctgcttacacacatcctggacggcagccccgagaaaacccggcgccgccgagagatcgagaacatgatcctgaacgacccagacttccagcatgaggacttgaacttcctcactcgcagccagcgttatgaggtggctgtcaggaaaagtgccatcatggtgaagaagatgagggagtttggcatcgctgaccctgatgaaattatgtggtttaaaaattttgtgcaccgagggcggcctgagcctctggatcttcacttgggcatgttcctgcccaccttgcttcaccaggcaactgcggagcagcaggagcgcttcttcatgcccgcctggaacttggagatcattggcacttatgcccagacagagatgggtcatggaactcaccttcgaggcttggaaaccacagccacgtatgaccctgaaacccaggagttcattctcaacagtcctactgtgacctccattaaatggtggcctggtgggcttggaaagacttcaaatcatgcaatagttcttgcccagctcatcactaaggggaaatgctatggattacatgcctttatcgtacctattcgtgaaatcgggacccataagcctttgccaggaattaccgttggtgacatcggccccaaatttggttatgatgagatagacaatggctacctcaaaatggacaaccatcgtattcccagagaaaacatgctgatgaagtatgcccaggtgaagcctgatggcacatacgtgaaaccgctgagtaacaagctgacttacgggaccatggtgtttgtcaggtccttccttgtgggagaagctgctcgggctctgtctaaggcgtgcaccattgccatccgatacagcgctgtgaggcaccagtctgaaatcaagccaggtgaaccagaaccacagattttggattttcaaacccagcagtataaactctttccactcctggccactgcctatgccttccagtttgtgggcgcatacatgaaggagacctatcaccggattaacgaaggcattggtcaaggggacctgagtgaactgcctgagcttcatgccctcaccgctggactgaaggctttcacctcctggactgcaaacactggcattgaagcatgtcggatggcttgtggtgggcatggctattctcattgcagtggtcttccaaatatttatgtcaatttcaccccaagctgtacctttgagggagaaaacactgtcatgatgctccagacggctaggttcctgatgaaaagttatgatcaggtgcactcaggaaagttggtgtgtggcatggtgtcctatttgaacgacctgcccagtcagcgcatccagccacagcaggtagcagtctggccaaccatggtggatatcaacagccccgaaagcctaaccgaagcatataaactccgtgcagccagattagtagaaattgctgcaaaaaaccttcaaaaagaagtgattcacagaaaaagcaaggaggtagcttggaacctaacttctgttgaccttgttcgagcaagtgaggcacattgccactatgtggtagttaagctcttttcagaaaaactcctcaaaattcaagataaagccattcaagctgtcttaaggagtttatgtctgctgtattctctgtatggaatcagtcagaacgcgggggatttccttcaggggagcatcatgacagagcctcagattacacaagtaaaccagcgtgtaaaggagttactcactctgattcgctcagatgctgttgctttggttgatgcatttgattttcaggatgtgacacttggctctgtgcttggccgctatgatgggaatgtgtatgaaaacttgtttgagtgggctaagaactccccactgaacaaagcagaggtccacgaatcttacaagcacctgaagtcactgcagtccaagctctgaagtgtcacaaggacaagtttaatctgcttcagaaagcgcctgtgtgcaactcaaattttgtggaatctttttcgaattcaaatagctatagagcaaatgataaattgacccctttttataaatggagggaaaaaatgaacagatttcagagattaaatgaaaaaaagcagatgttttaagtgcaattaacactgaaagagacctgttaaaccattcagaaaaagcttaagaaatgcgatatgacttccttttgtaatgctgctgatcccagtagactatgacttttgataattagcagaatttaactactgagtagttgattattttcacattttaattgctaatcactggctatataagtgtttttaagcaaaggtatttttgaagtggtgtagaacccttccaagctttcctgctcagtgttctaccagacttaccctggggcctggcttaaaagcaggattgaagaaaagggactgggggaaggaaacttattggaaaacttgatgcgaatgagtttctgcttggcacagtctctgcctgcttgctctcctttgctgatggattgcatttatcaaactattcatgctagcatttttccaacgagggaacttattccgcacgggcctactgtaggaccattgtctcgtgtaattaggaattttccatttgaaggattgctaaattgtcacagtagtaggaagtatagggaaacctctcagctgtggcactgttgtagctttggagtgcagagtgtaactctgggacaatcagatttcacatattctgtcatcttggcataagccattaaaagcttggagattactgtatttggcattaaaaaaaaatgtcacttaggtcagcactcccagacgtagcacagaaaaaccctttgacacaaaccatgtgttctgatttttggttcagaaaatattgaaactgtgagttgttttttttttaacaactgggaaaaaacaaaaacaaaaaactatagttagaaaaatggaagttccataggttctatttcttactctatgtatggctttgttttcagtctatttctaggagctttctctgaatcgctaattgtcctttcagttgaaatctaatttatacaatcattctatacttaaaggttaaatacatcttaattaattttttcttaaagtcaatgtaagtcactttgttttgtttttttttaatctacgccatatgcctcatgaaaccagctgttctagaatcagtcctgagaatatggcttaattccatggaaacataactcctatcttgggacctgacataatatctatctatcctggggaactggtaatatgagacttataggttacagcagaaatgctacatgttgacaaaagccttaatcgttccactgggagaactaattgataattgtgttaagattgaagattaaccctgtgttaatctcacttgagtctatcctgacagtagttcagattctggaaaatgataaactgacctgctagatgtagaattgtttcaaaattagtgttgaaataccttgttcacagatgaatatctgggcaggatctgagggtgtttggaatgacaccccccaatccagttgcatagatgggatgtctttgcaggtttgaggagatcatcgacctgcagagccccctttgacccagtacctcacgttttatttaaaatctaaatctggggccaggcgtggtggctcacgcctgtaatccaagcactttgggaggccgaagcgggtggatcacctgaggtcaggagtttgagaccatcctggccaacatggtgaaaccccgtctctactgaaaaaaatacaaaaattagctgggcatggtggtagcacgcgcctgtagtcccagctactcgggaggctgaggcaggataatcgcttgaacttggcgggtagaggttgcagtgagccaagatggtgccactacactgcagcctgggtggctgagcgagactccgtctcaaaaaaaaaatctaaatctgacatttgatgctatttttattaatattggaatgttctgtcttgaactttattcaatataatcaagaataaagatagagtaaacgtcactgatttgtactattaagagagaaaaaatatgccacacaactaaacataggtttaaattatgaagaaatttagaatagaggtttattagatttagggaacactaagaacaaaaaaggaaggagtgatacctgcctgagtggacagctgtaaatcagctgtaattactgcagttgtaccaatagttgtgagtggctccagtcactttaggagtccttggaagtacttggtacacatttgttggctgtaccttaaaggaagtggcaagtccagtttgttctctctaccacactagactgccactgacaagtttgggtctgttggattcaaaattttgtaagccattttcacaagtacaaagatacattttaaccttgtcttctccaaaattactgagtaggaattttatttttatctttttgagacagggtatcactgtcacccagactggagtgcagtggtgggatcttggcttactgtgacctctgcctcccgggttcaaatggtcctccctcctcagtctcctgagtagctgggacgacaggcacgtgccaccatgcccagctaatttgttctattttttctgtagagacggggttttgccatgttgcccaggctggtctcagactcctgggctcaagcgatcatttcgcctcagcctcccaaagtgctgagattataggtgtgagccacagcatctggcccagagtgaggagaattaatgagattttttgtgtgtgttagataatattgatttaagcctttttttaaaaagtactctcaaccaaatacaaaattgaaaatgtgaggtttaatagaaatgtgttggctatttgcaatggattttcttcttgcccaagtgtttggagttctactttatgctctgtatttaaaaattagtgacctcaaagcagagttgatgacacaggctttggggccctcatgttcttgtctttagaacatatcactactaagtatcagcttatcttcagaacattacaacattcaccgtgttcatatgctttctgagaagtcaccacttgtaatttcagatcacatacacctgaaggcattttatagttcctaaagttaacatgttagatcttttttttccaccccatgagggtctcactctcacccaggctggaatgcagtggtgtgattgtagcacactttggccaccaactcctgggctcaagtgatcctcctgctttggcctcctctgagaagctgggattactggtgcacaccaccacacctggctaattttttatttttttttatttttggaaatagggtatggctatgttgccttgggcccgtcatgaactcctagcctcaggtgaccctcccacctcaggcctcccaaagggttgggattacaggagtgagctactgcactgggccaacatgttaatttttttttttttttttttgagatggagtctcccaggcgggaatgcaatggtgcgatctcgacttcactgcaatcttcacctcccgggttcgagcgattctcccacctcagcctcctgagtagctgggattacaggcacctgccatcacgctcggctaatttttgtattttgagcagagatggagtttcaccatgttggccaggtgatctgcactcccactccccccacacttcccaaagtgctgggattacaggcataagccacaagccacctcacccagccaacatgttacatcttaattcttggattttcttcactgcagggctttgggtggagaaataaaactcttcaaatgcatgatcttggagatccctgtgaatcaataattctttagacaactgcggctcaaaatccctcctttcccttttccgagttattccatccatcttattagaaaggaagtgaattaggtgtaggtggtctgtaacacctgcacatctttttatacgtgtagagggtatgcctgggatatataggttgtcttcaagcagtagctgctactacagctagagagaggaggagtgccaggaaactgatgacctgagaccaagagtcttgttgatgttctgacttagataaaggttttgatcattttcatgaaataatgcagggaagtcatttctgctgtttctttactactccattcttggaggattagaacaagtcacactgtaattgactaaaacgactttttattttaaaatattgatggtggggttttgcttttttttttttttttttttttgagacgttgtcttgctctttcacccagggtagagtgcagtggcgaaatcttggctcactgcaacctctgcctcccgggttcaagcaattctctgcctcagcctcctgagaagctgggattacagcgcctgccaccatgcctgtctagtttttttgtatttttagtagagacaggggtttcaccaagttggccaggctggtcttgaactcctgacctcgtgatccacccacctcggcctcccaaagtgctgggattacaggcgtgagccaccgtgccgggccagtgtttttaactgtccacacttactaaattttccagtacttcttcctatggttcatgatagtaaacacagaaacatataaggaacattattagagttaccagatgttagctgttgcatatgtgcacattcctagattcaagggtgtttttgccttaaatttaagtgggtcattggttgtcttgggaagatcatggaaaattcgggattttttagaattctgaaccaaaatatgttttgagtgtttcttagtaaatgtgtgatcttccaccttccacattcagactgcggactacacttcataaatgcctttttatttccagttatggattcaactaaatgactgccttgggagcacataattactttgctacctttttccccctttgctgttgtggctcgagtttggttctcacctgagaagatgcattgagcatatgttgttacccagccctggcttaatggtgtcctgtggggtaggggtgggaggacgaggggcacggggccagagcatgtgaatggatcatggttggacagctgtgacctgccagcactgcgggtaagcaaaactacaaaccgttctttcctctgtgacattgaataaaccttaataaaattcataattagcacatact

SEQ ID NO: 142940 - DNA, 7751 bp, Artificial Sequence
  derived and/or modified sequence
aaaaagtgctttattttcccactccccggacgcccagcagggcagtttcttgaccttcggagcccctttcccgaggatccgctcgggagcctcccctggccaggagcaggggattagtctgccccgcgaccggccccagccacgacgcggacatcgccccctctgtctgggccgctgtcactcacgcgccaaagggccacggagaaagaaggggcgggccggggcgggccgggcgagcggaggcggggacttgcgccgtcctgaggctgcctcctagggtccggccggcgctggagctgcggatttagattgtcactgccacctcggtcggtgcttacttcgctgccagctggtcgtcgccatgaacccggacctgcgcagggagcgggattccgccagcttcaacccggagctgcttacacacatcctggacggcagccccgagaaaacccggcgccgccgagagatcggtgagggcggcgggcgagacctccctcctttcccgagaaaagctggagactccctcgatgcggagtcaggggcgctgtggggcctaggccctctggcccagcgttaggggagccgggacccccacttcgaggaacagcctgtgtccctggtggggggatatcgccattccccagagaacatgatcctgaacgacccagacttccagcatgaggacttgaacttcctcactcgcagccagcgttatgaggtggctgtcaggaaaagtgccatcatggtgaagaagatgagggagtttggcatcgctgaccctgatgaaattatgtggtttaaaaattttgtgcaccgagggcggcctgagcctctggatcttcacttgggcatgttcctgcccaccttgcttcaccaggcaactgcggagcagcaggagcgcttcttcatgcccgcctggaacttggagatcattggcacttatgcccagacagagatgggtcatggaactcaccttcgaggcttggaaaccacagccacgtatgaccctgaaacccaggagttcattctcaacagtcctactgtgacctccattaaatggtggcctggtgggcttggaaagacttcaaatcatgcaatagttcttgcccagctcatcactaaggggaaatgctatggattacatgcctttatcgtacctattcgtgaaatcgggacccataagcctttgccaggaattaccgttggtgacatcggccccaaatttggttatgatgagatagacaatggctacctcaaaatggacaaccatcgtattcccagagaaaacatgctgatgaagtatgcccaggtgaagcctgatggcacatacgtgaaaccgctgagtaacaagctgacttacgggaccatggtgtttgtcaggtccttccttgtgggagaagctgctcgggctctgtctaaggcgtgcaccattgccatccgatacagcgctgtgaggcaccagtctgaaatcaagccaggtgaaccagaaccacagattttggattttcaaacccagcagtataaactctttccactcctggccactgcctatgccttccagtttgtgggcgcatacatgaaggagacctatcaccggattaacgaaggcattggtcaaggggacctgagtgaactgcctgagcttcatgccctcaccgctggactgaaggctttcacctcctggactgcaaacactggcattgaagcatgtcggatggcttgtggtgggcatggctattctcattgcagtggtcttccaaatatttatgtcaatttcaccccaagctgtacctttgagggagaaaacactgtcatgatgctccagacggctaggttcctgatgaaaagttatgatcaggtgcactcaggaaagttggtgtgtggcatggtgtcctatttgaacgacctgcccagtcagcgcatccagccacagcaggtagcagtctggccaaccatggtggatatcaacagccccgaaagcctaaccgaagcatataaactccgtgcagccagattagtagaaattgctgcaaaaaaccttcaaaaagaagtgattcacagaaaaagcaaggaggtagcttggaacctaacttctgttgaccttgttcgagcaagtgaggcacattgccactatgtggtagttaagctcttttcagaaaaactcctcaaaattcaagataaagccattcaagctgtcttaaggagtttatgtctgctgtattctctgtatggaatcagtcagaacgcgggggatttccttcaggggagcatcatgacagagcctcagattacacaagtaaaccagcgtgtaaaggagttactcactctgattcgctcagatgctgttgctttggttgatgcatttgattttcaggatgtgacacttggctctgtgcttggccgctatgatgggaatgtgtatgaaaacttgtttgagtgggctaagaactccccactgaacaaagcagaggtccacgaatcttacaagcacctgaagtcactgcagtccaagctctgaagtgtcacaaggacaagtttaatctgcttcagaaagcgcctgtgtgcaactcaaattttgtggaatctttttcgaattcaaatagctatagagcaaatgataaattgacccctttttataaatggagggaaaaaatgaacagatttcagagattaaatgaaaaaaagcagatgttttaagtgcaattaacactgaaagagacctgttaaaccattcagaaaaagcttaagaaatgcgatatgacttccttttgtaatgctgctgatcccagtagactatgacttttgataattagcagaatttaactactgagtagttgattattttcacattttaattgctaatcactggctatataagtgtttttaagcaaaggtatttttgaagtggtgtagaacccttccaagctttcctgctcagtgttctaccagacttaccctggggcctggcttaaaagcaggattgaagaaaagggactgggggaaggaaacttattggaaaacttgatgcgaatgagtttctgcttggcacagtctctgcctgcttgctctcctttgctgatggattgcatttatcaaactattcatgctagcatttttccaacgagggaacttattccgcacgggcctactgtaggaccattgtctcgtgtaattaggaattttccatttgaaggattgctaaattgtcacagtagtaggaagtatagggaaacctctcagctgtggcactgttgtagctttggagtgcagagtgtaactctgggacaatcagatttcacatattctgtcatcttggcataagccattaaaagcttggagattactgtatttggcattaaaaaaaaatgtcacttaggtcagcactcccagacgtagcacagaaaaaccctttgacacaaaccatgtgttctgatttttggttcagaaaatattgaaactgtgagttgttttttttttaacaactgggaaaaaacaaaaacaaaaaactatagttagaaaaatggaagttccataggttctatttcttactctatgtatggctttgttttcagtctatttctaggagctttctctgaatcgctaattgtcctttcagttgaaatctaatttatacaatcattctatacttaaaggttaaatacatcttaattaattttttcttaaagtcaatgtaagtcactttgttttgtttttttttaatctacgccatatgcctcatgaaaccagctgttctagaatcagtcctgagaatatggcttaattccatggaaacataactcctatcttgggacctgacataatatctatctatcctggggaactggtaatatgagacttataggttacagcagaaatgctacatgttgacaaaagccttaatcgttccactgggagaactaattgataattgtgttaagattgaagattaaccctgtgttaatctcacttgagtctatcctgacagtagttcagattctggaaaatgataaactgacctgctagatgtagaattgtttcaaaattagtgttgaaataccttgttcacagatgaatatctgggcaggatctgagggtgtttggaatgacaccccccaatccagttgcatagatgggatgtctttgcaggtttgaggagatcatcgacctgcagagccccctttgacccagtacctcacgttttatttaaaatctaaatctggggccaggcgtggtggctcacgcctgtaatccaagcactttgggaggccgaagcgggtggatcacctgaggtcaggagtttgagaccatcctggccaacatggtgaaaccccgtctctactgaaaaaaatacaaaaattagctgggcatggtggtagcacgcgcctgtagtcccagctactcgggaggctgaggcaggataatcgcttgaacttggcgggtagaggttgcagtgagccaagatggtgccactacactgcagcctgggtggctgagcgagactccgtctcaaaaaaaaaatctaaatctgacatttgatgctatttttattaatattggaatgttctgtcttgaactttattcaatataatcaagaataaagatagagtaaacgtcactgatttgtactattaagagagaaaaaatatgccacacaactaaacataggtttaaattatgaagaaatttagaatagaggtttattagatttagggaacactaagaacaaaaaaggaaggagtgatacctgcctgagtggacagctgtaaatcagctgtaattactgcagttgtaccaatagttgtgagtggctccagtcactttaggagtccttggaagtacttggtacacatttgttggctgtaccttaaaggaagtggcaagtccagtttgttctctctaccacactagactgccactgacaagtttgggtctgttggattcaaaattttgtaagccattttcacaagtacaaagatacattttaaccttgtcttctccaaaattactgagtaggaattttatttttatctttttgagacagggtatcactgtcacccagactggagtgcagtggtgggatcttggcttactgtgacctctgcctcccgggttcaaatggtcctccctcctcagtctcctgagtagctgggacgacaggcacgtgccaccatgcccagctaatttgttctattttttctgtagagacggggttttgccatgttgcccaggctggtctcagactcctgggctcaagcgatcatttcgcctcagcctcccaaagtgctgagattataggtgtgagccacagcatctggcccagagtgaggagaattaatgagattttttgtgtgtgttagataatattgatttaagcctttttttaaaaagtactctcaaccaaatacaaaattgaaaatgtgaggtttaatagaaatgtgttggctatttgcaatggattttcttcttgcccaagtgtttggagttctactttatgctctgtatttaaaaattagtgacctcaaagcagagttgatgacacaggctttggggccctcatgttcttgtctttagaacatatcactactaagtatcagcttatcttcagaacattacaacattcaccgtgttcatatgctttctgagaagtcaccacttgtaatttcagatcacatacacctgaaggcattttatagttcctaaagttaacatgttagatcttttttttccaccccatgagggtctcactctcacccaggctggaatgcagtggtgtgattgtagcacactttggccaccaactcctgggctcaagtgatcctcctgctttggcctcctctgagaagctgggattactggtgcacaccaccacacctggctaattttttatttttttttatttttggaaatagggtatggctatgttgccttgggcccgtcatgaactcctagcctcaggtgaccctcccacctcaggcctcccaaagggttgggattacaggagtgagctactgcactgggccaacatgttaatttttttttttttttttttgagatggagtctcccaggcgggaatgcaatggtgcgatctcgacttcactgcaatcttcacctcccgggttcgagcgattctcccacctcagcctcctgagtagctgggattacaggcacctgccatcacgctcggctaatttttgtattttgagcagagatggagtttcaccatgttggccaggtgatctgcactcccactccccccacacttcccaaagtgctgggattacaggcataagccacaagccacctcacccagccaacatgttacatcttaattcttggattttcttcactgcagggctttgggtggagaaataaaactcttcaaatgcatgatcttggagatccctgtgaatcaataattctttagacaactgcggctcaaaatccctcctttcccttttccgagttattccatccatcttattagaaaggaagtgaattaggtgtaggtggtctgtaacacctgcacatctttttatacgtgtagagggtatgcctgggatatataggttgtcttcaagcagtagctgctactacagctagagagaggaggagtgccaggaaactgatgacctgagaccaagagtcttgttgatgttctgacttagataaaggttttgatcattttcatgaaataatgcagggaagtcatttctgctgtttctttactactccattcttggaggattagaacaagtcacactgtaattgactaaaacgactttttattttaaaatattgatggtggggttttgcttttttttttttttttttttttgagacgttgtcttgctctttcacccagggtagagtgcagtggcgaaatcttggctcactgcaacctctgcctcccgggttcaagcaattctctgcctcagcctcctgagaagctgggattacagcgcctgccaccatgcctgtctagtttttttgtatttttagtagagacaggggtttcaccaagttggccaggctggtcttgaactcctgacctcgtgatccacccacctcggcctcccaaagtgctgggattacaggcgtgagccaccgtgccgggccagtgtttttaactgtccacacttactaaattttccagtacttcttcctatggttcatgatagtaaacacagaaacatataaggaacattattagagttaccagatgttagctgttgcatatgtgcacattcctagattcaagggtgtttttgccttaaatttaagtgggtcattggttgtcttgggaagatcatggaaaattcgggattttttagaattctgaaccaaaatatgttttgagtgtttcttagtaaatgtgtgatcttccaccttccacattcagactgcggactacacttcataaatgcctttttatttccagttatggattcaactaaatgactgccttgggagcacataattactttgctacctttttccccctttgctgttgtggctcgagtttggttctcacctgagaagatgcattgagcatatgttgttacccagccctggcttaatggtgtcctgtggggtaggggtgggaggacgaggggcacggggccagagcatgtgaatggatcatggttggacagctgtgacctgccagcactgcgggtaagcaaaactacaaaccgttctttcctctgtgacattgaataaaccttaataaaattcataattagcacatact

SEQ ID NO: 142941 - DNA, 2772 bp, Artificial Sequence
  derived and/or modified sequence
agattgtcactgccacctcggtcggtgcttacttcgctgccagctggtcgtcgccatgaacccggacctgcgcagggagcgggattccgccagcttcaacccggagctgcttacacacatcctggacggcagccccgagaaaacccggcgccgccgagagatcgagaacatgatcctgaacgacccagacttccagcatgaggacttgaacttcctcactcgcagccagcgttatgaggtggctgtcaggaaaagtgccatcatggtgaagaagatgagggagtttggcatcgctgaccctgatgaaattatgtggtttaaaaattttgtgcaccgagggcggcctgagcctctggatcttcacttgggcatgttcctgcccaccttgcttcaccaggcaactgcggagcagcaggagcgcttcttcatgcccgcctggaacttggagatcattggcacttatgcccagacagagatgggtcatggaactcaccttcgaggcttggaaaccacagccacgtatgaccctgaaacccaggagttcattctcaacagtcctactgtgacctccattaaatggtggcctggtgggcttggaaagacttcaaatcatgcaatagttcttgcccagctcatcactaaggggaaatgctatggattacatgcctttatcgtacctattcgtgaaatcgggacccataagcctttgccaggaattaccgttggtgacatcggccccaaatttggttatgatgagatagacaatggctacctcaaaatggacaaccatcgtattcccagagaaaacatgctgatgaagtatgcccaggtgaagcctgatggcacatacgtgaaaccgctgagtaacaagctgacttacgggaccatggtgtttgtcaggtccttccttgtgggagaagctgctcgggctctgtctaaggcgtgcaccattgccatccgatacagcgctgtgaggcaccagtctgaaatcaagccaggtgaaccagaaccacagattttggattttcaaacccagcagtataaactctttccactcctggccactgcctatgccttccagtttgtgggcgcatacatgaaggagacctatcaccggattaacgaaggcattggtcaaggggacctgagtgaactgcctgagcttcatgccctcaccgctggactgaaggctttcacctcctggactgcaaacactggcattgaagcatgtcggatggcttgtggtgggcatggctattctcattgcagtggtcttccaaatatttatgtcaatttcaccccaagctgtacctttgagggagaaaacactgtcatgatgctccagacggctaggttcctgatgaaaagttatgatcaggtgcactcaggaaagttggtgtgtggcatggtgtcctatttgaacgacctgcccagtcagcgcatccagccacagcaggtagcagtctggccaaccatggtggatatcaacagccccgaaagcctaaccgaagcatataaactccgtgcagccagattagtagaaattgctgcaaaaaaccttcaaaaagaagtgattcacagaaaaagcaaggaggtagcttggaacctaacttctgttgaccttgttcgagcaagtgaggcacattgccactatgtggtagttaagctcttttcagaaaaactcctcaaaattcaagataaagccattcaagctgtcttaaggagtttatgtctgctgtattctctgtatggaatcagtcagaacgcgggggatttccttcaggggagcatcatgacagagcctcagattacacaagtaaaccagcgtgtaaaggagttactcactctgattcgctcagatgctgttgctttggttgatgcatttgattttcaggatgtgacacttggctctgtgcttggccgctatgatgggaatgtgtatgaaaacttgtttgagtgggctaagaactccccactgaacaaagcagaggtccacgaatcttacaagcacctgaagtcactgcagtccaagctctgaagtgtcacaaggacaagtttaatctgcttcagaaagcgcctgtgtgcaactcaaattttgtggaatctttttcgaattcaaatagctatagagcaaatgataaattgacccctttttataaatggagggaaaaaatgaacagatttcagagattaaatgaaaaaaagcagatgttttaagtgcaattaacactgaaagagacctgttaaaccattcagaaaaagcttaagaaatgcgatatgacttccttttgtaatgctgctgatcccagtagactatgacttttgataattagcagaatttaactactgagtagttgattattttcacattttaattgctaatcactggctatataagtgtttttaagcaaaggtatttttgaagtggtgtagaacccttccaagctttcctgctcagtgttctaccagacttaccctggggcctggcttaaaagcaggattgaagaaaacttgatgcgaatgagtttctgcttggcacagtctctgcctgcttgctctcctttgctgatggattgcatttatcaaactattcatgctagcatttttccaacgagggaacttattccgcacgggcctactgtaggaccattgtctcgtgtaattaggaattttccatttgaaggattgctaaattgtcacagtagtaggaagtatagggaaacctctcagctgtggcactgttgtagctttggagtgcagagtgtaactctg

SEQ ID NO: 142942 - protein, 1144 aa, Artificial Sequence
  derived and/or modified sequence
MPRNQGFSEPEYSAEYSAEYSVSLPSDPDRGVGRTHEISVRNSGSCLCLPRFMRLTFVPESLENLYQTYFKRQRHETLLVLVVFAALFDCYVVVMCAVVFSSDKLASLAVAGIGLVLDIILFVLCKKGLLPDRVTRRVLPYVLWLLITAQIFSYLGLNFARAHAASDTVGWQVFFVFSFFITLPLSLSPIVIISVVSCVVHTLVLGVTVAQQQQEELKGMQLLREILANVFLYLCAIAVGIMSYYMADRKHRKAFLEARQSLEVKMNLEEQSQQQENLMLSILPKHVADEMLKDMKKDESQKDQQQFNTMYMYRHENVSILFADIVGFTQLSSACSAQELVKLLNELFARFDKLAAKYHQLRIKILGDCYYCICGLPDYREDHAVCSILMGLAMVEAISYVREKTKTGVDMRVGVHTGTVLGGVLGQKRWQYDVWSTDVTVANKMEAGGIPGRVHISQSTMDCLKGEFDVEPGDGGSRCDYLEEKGIETYLIIASKPEVKKTATQNGLNGSALPNGAPASSKSSSPALIETKEPNGSAHSSGSTSEKPEEQDAQADNPSFPNPRRRLRLQDLADRVVDASEDEHELNQLLNEALLERESAQVVKKRNTFLLSMRFMDPEMETRYSVEKEKQSGAAFSCSCVVLLCTALVEILIDPWLMTNYVTFMVGEILLLILTICSLAAIFPRAFPKKLVAFSTWIDRTRWARNTWAMLAIFILVMANVVDMLSCLQYYTGPSNATAGMETEGSCLENPKYYNYVAVLSLIATIMLVQVSHMVKLTLMLLVAGAVATINLYAWRPVFDEYDHKRFREHDLPMVALEQMQGFNPGLNGTDRLPLVPSKYSMTVMVFLMMLSFYYFSRHVEKLARTLFLWKIEVHDQKERVYEMRRWNEALVTNMLPEHVARHFLGSKKRDEELYSQTYDEIGVMFASLPNFADFYTEESINNGGIECLRFLNEIISDFDSLLDNPKFRVITKIKTIGSTYMAASGVTPDVNTNGFASSNKEDKSERERWQHLADLADFALAMKDTLTNINNQSFNNFMLRIGMNKGGVLAGVIGARKPHYDIWGNTVNVASRMESTGVMGNIQVVEETQVILREYGFRFVRRGPIFVKGKGELLTFFLKGRDKLATFPNGPSVTLPHQVVDNS

SEQ ID NO: 142943 - protein, 1119 aa, Artificial Sequence
  derived and/or modified sequence
MPRNQGFSEPEYSAEYSAEYSVSLPRFMRLTFVPESLENLYQTYFKRQRHETLLVLVVFAALFDCYVVVMCAVVFSSDKLASLAVAGIGLVLDIILFVLCKKGLLPDRVTRRVLPYVLWLLITAQIFSYLGLNFARAHAASDTVGWQVFFVFSFFITLPLSLSPIVIISVVSCVVHTLVLGVTVAQQQQEELKGMQLLREILANVFLYLCAIAVGIMSYYMADRKHRKAFLEARQSLEVKMNLEEQSQQQENLMLSILPKHVADEMLKDMKKDESQKDQQQFNTMYMYRHENVSILFADIVGFTQLSSACSAQELVKLLNELFARFDKLAAKYHQLRIKILGDCYYCICGLPDYREDHAVCSILMGLAMVEAISYVREKTKTGVDMRVGVHTGTVLGGVLGQKRWQYDVWSTDVTVANKMEAGGIPGRVHISQSTMDCLKGEFDVEPGDGGSRCDYLEEKGIETYLIIASKPEVKKTATQNGLNGSALPNGAPASSKSSSPALIETKEPNGSAHSSGSTSEKPEEQDAQADNPSFPNPRRRLRLQDLADRVVDASEDEHELNQLLNEALLERESAQVVKKRNTFLLSMRFMDPEMETRYSVEKEKQSGAAFSCSCVVLLCTALVEILIDPWLMTNYVTFMVGEILLLILTICSLAAIFPRAFPKKLVAFSTWIDRTRWARNTWAMLAIFILVMANVVDMLSCLQYYTGPSNATAGMETEGSCLENPKYYNYVAVLSLIATIMLVQVSHMVKLTLMLLVAGAVATINLYAWRPVFDEYDHKRFREHDLPMVALEQMQGFNPGLNGTDRLPLVPSKYSMTVMVFLMMLSFYYFSRHVEKLARTLFLWKIEVHDQKERVYEMRRWNEALVTNMLPEHVARHFLGSKKRDEELYSQTYDEIGVMFASLPNFADFYTEESINNGGIECLRFLNEIISDFDSLLDNPKFRVITKIKTIGSTYMAASGVTPDVNTNGFASSNKEDKSERERWQHLADLADFALAMKDTLTNINNQSFNNFMLRIGMNKGGVLAGVIGARKPHYDIWGNTVNVASRMESTGVMGNIQVVEETQVILREYGFRFVRRGPIFVKGKGELLTFFLKGRDKLATFPNGPSVTLPHQVVDNS

SEQ ID NO: 142944 - DNA, 3435 bp, Artificial Sequence
  derived and/or modified sequence
atgccacgaaatcaggggtttagcgaacctgagtacagcgccgagtactccgctgaatatagcgtttctctgccctctgatcctgatagaggagtggggagaactcacgagatcagtgttcggaatagcggcagctgcctatgtctgccacgattcatgcgactgactttcgttcctgaaagcctcgagaatctgtaccagacttactttaagagacagcgacacgaaaccctgctagtgctggtggtattcgcagctctgttcgactgctatgtagttgtgatgtgtgctgttgtcttttcctcagataagctcgcctctttagcggtggccggcattgggctcgtgctggatatcatcctgttcgtattatgcaagaaggggctcctccccgaccgagtgaccaggcgagtgctgccttacgttctgtggctgctgatcactgcccagatttttagctaccttggtttgaactttgctcgggcacatgctgcatctgacaccgttgggtggcaagtattcttcgtcttttctttctttataacgctcccccttagcctgtcacccattgtcattatttctgtagtgagttgcgtcgtacacacccttgtactgggggtgacggtcgcgcaacagcagcaggaggaactgaagggtatgcagctcctgcgcgagatcctggccaacgtgttcctatacttatgcgccattgctgtcggaatcatgagctattacatggccgacagaaagcaccgtaaggccttcctggaagcccgacagtctttagaggtcaagatgaacctcgaagagcagagccaacagcaggaaaatctgatgctgtcaattttgcccaaacatgtggccgatgagatgctgaaagatatgaaaaaagatgaaagccaaaaggatcagcagcagttcaacacgatgtatatgtatagacacgaaaacgtatcaattctctttgcagatatagtaggctttacccaactttcttcggcatgcagcgcccaggaattggtgaaattgttgaacgagctgttcgctcggttcgacaaactagccgctaaataccaccagctgagaattaaaattctgggagattgctattactgcatatgtggacttccagattaccgcgaagaccacgcagtgtgctccatcctgatgggccttgcaatggttgaagccatttcttatgtcagggaaaaaaccaagactggagttgatatgagagtaggggtccacacagggaccgtcctgggtggcgtgttggggcagaagaggtggcagtacgacgtgtggtctactgatgtgaccgttgccaacaagatggaggcaggaggcattcctggaagagtccatatcagtcaatctactatggattgcctgaagggagaatttgacgtcgagccgggggatggcgggtctcgttgcgactacctggaggagaagggcattgagacttatcttatcattgcatcaaagccagaagtaaaaaaaactgccacacagaatggactcaacgggagcgctctgcccaatggcgcccctgccagcagcaaatcaagcagtcccgccctcattgagaccaaggaaccgaatgggagtgcccattccagcggcagcacaagcgaaaagcccgaggaacaagatgcacaggccgacaatccatccttcccgaatcccagacggagactcagactgcaggaccttgccgaccgcgtggtggacgcctccgaagatgagcacgaacttaatcagctcctgaacgaagctcttctggagagagagtcggcacaggtggtgaaaaaaaggaataccttcttgctgtctatgagattcatggaccctgagatggagactaggtactctgtggagaaggagaaacagtccggagcggcctttagctgctcgtgcgttgtgctgctgtgtaccgcgctcgtggagatactcatcgatccttggcttatgacaaattatgtgacctttatggtgggcgaaatcctcctcctaattctaacaatttgttcactggccgccatctttcccagagctttccctaagaagctggtggcctttagcacatggatcgatcgcacaaggtgggccagaaatacttgggcaatgttggcaatcttcattcttgtcatggccaacgtcgtcgatatgctatcctgtctgcagtattataccggcccgtctaatgccaccgccggaatggaaaccgagggttcttgcctcgaaaaccctaaatattataactacgtggccgtgctctctctgattgccactattatgttagtgcaggtgagccatatggttaagttgacccttatgctcttagttgccggggctgtagccaccattaacctgtatgcctggagaccagtgttcgacgaatacgatcataagagattccgtgaacacgatttgcccatggtggctttggaacagatgcaggggttcaatcccggacttaacgggaccgatcgcctcccgttggtgccctctaaatacagcatgaccgtaatggtgtttctcatgatgttgtctttctactatttcagccgccacgtcgagaagctcgcccgcacgctgttcctgtggaaaattgaggtgcacgatcagaaagagcgggtatacgagatgaggcgttggaacgaagctctcgtgaccaatatgcttcctgagcacgtggcgcgacactttctgggctctaagaaaagagatgaagaactgtacagtcagacctatgacgaaataggtgttatgtttgcctcgctgcctaattttgcggatttctataccgaggagtctatcaacaatggtggtatcgagtgtctccgcttcctaaacgaaatcatctccgactttgatagtctgctggataaccctaagttcagagtcattactaaaattaagacaatcggaagcacttatatggccgcatcaggggtgaccccagacgtcaataccaatgggtttgcttccagcaataaagaggacaaatccgagagagagcgctggcaacatctcgccgacttagctgattttgccctggccatgaaggacacgctcacaaatatcaacaaccagtcgttcaacaactttatgcttagaataggcatgaacaaaggaggcgtcctcgccggggtgatcggggcgagaaagccccattatgatatttggggcaatactgtgaacgtggctagtcgcatggaatccaccggagtaatgggcaacatccaggtagtcgaggagacacaagtcatactgagggaatatggcttccgatttgtgcgaaggggcccaatcttcgtgaaaggaaagggcgagctgttaaccttttttctcaaaggaagggacaagttagccacctttcctaacggcccgagtgtgacactaccccatcaggtggtcgacaactcctag

SEQ ID NO: 142945 - DNA, 3360 bp, Artificial Sequence
  derived and/or modified sequence
atgccgagaaatcaaggcttctctgaacccgagtattccgccgaatattcggcagaatactcagtctctctcccgcgattcatgcggctcacctttgtaccagaatctctcgagaatctttaccagacatacttcaagaggcagcggcacgaaaccctccttgttctggtcgtgtttgcagcgctatttgactgttatgtggtggtgatgtgtgcagtcgtattctcgagcgataaactggcgtcccttgccgtggccgggatagggctggtgctggatatcatattgtttgttctttgcaagaaaggtctgcttccggatcgagttacccgacgtgtgctgccatacgttctttggttattgataacagcccagatcttttcatacctgggcctgaatttcgctcgtgcccatgctgcaagtgacactgtgggctggcaggtgttctttgtgttttccttcttcattacgctgcctctcagtctgtcaccaattgtgatcatatccgtggtgagttgcgtagttcatacactcgttctcggtgttacggtggcacaacaacaacaggaagaattgaaaggcatgcagctgctacgggaaatcttggctaatgttttcctgtacctgtgcgcaattgctgttgggatcatgagttattatatggcagacaggaaacatcgcaaagcttttctggaagccagacaatctctagaagtaaagatgaacctggaggagcaaagtcagcagcaagaaaatttgatgctgagtatcctacctaagcatgtggccgacgagatgctcaaagatatgaagaaagacgagtctcagaaagatcagcagcaattcaacaccatgtacatgtacaggcatgaaaacgtgtcaattctctttgcagacatcgtcgggtttacccagctctcaagtgcgtgttcagcacaagagcttgtgaagctattaaacgagctgttcgctcgcttcgacaagctcgctgccaagtatcaccagctgagaatcaagattcttggagactgttactactgcatttgtggcttgccagattatcgagaggatcacgcagtttgctccatcttaatgggcctggctatggtggaggctatttcctatgttagggaaaagacgaaaacgggcgtcgacatgcgtgtcggcgtgcacacggggactgtgcttggcggtgtgctgggccaaaagcgttggcaatacgatgtctggtcaaccgatgtaacagtggccaataagatggaggccggaggaatccctggacgggtgcatatcagccagagcactatggactgtctgaagggcgagtttgatgtcgagcccggtgacggcggctcaaggtgcgactatttggaggagaaagggattgagacgtatttgattatagcttcaaaacctgaggtgaagaaaactgctactcagaatggcctgaacggatccgccctgcccaatggagcaccagcctcatccaaaagtagctccccagcgctcatcgagaccaaagagccgaatggctctgcgcattcttccggcagcacaagcgagaagcccgaggagcaagatgcgcaggcggataacccctcctttcctaaccctcggaggcgcttgcgactccaagatctggcggacagggtcgttgatgcatctgaggacgaacacgagctcaaccagctgctgaatgaagctctgcttgaacgcgaaagcgcacaggtcgttaaaaaaagaaacacattcctgttatccatgaggttcatggatcccgaaatggaaactcgatattctgtagaaaaggagaaacagagcggcgcagcatttagctgctcatgtgtggtattactatgcactgcactggtcgagatcctgattgacccgtggctgatgactaattacgtcacctttatggtcggagaaatcctgctattgatccttacaatctgctctctggccgctatatttccacgcgcctttccaaaaaagctggtcgcttttagcacctggattgatcgcacacgctgggcccgcaacacatgggccatgttggcgatctttatccttgtgatggccaacgttgttgatatgctcagttgcctgcagtattacacagggccgtctaatgccactgccggaatggagaccgaagggtcttgcctggaaaatccgaagtactacaattacgtcgctgtactttccctcatcgctaccatcatgctcgtccaggtgtctcacatggtgaagctcacgctcatgttactagtggctggcgccgtcgctactattaacctgtacgcttggagacccgtttttgatgagtacgatcacaaacggtttcgggagcacgatcttccaatggttgcgttggaacagatgcagggcttcaatcccgggttaaatggtaccgacagattacctctggtaccttccaaatatagtatgaccgtcatggtgttcctcatgatgctgagtttttactacttctcccgccatgttgaaaaacttgcaagaaccctgttcctgtggaagatagaagttcatgaccagaaggagcgcgtctatgagatgcggcggtggaacgaggctcttgtgactaatatgctgcctgaacatgttgcccgacattttctgggctcaaagaaacgggacgaggagctgtacagccagacttatgacgagattggtgtaatgttcgcatctctgcccaattttgccgacttctataccgaggagtccattaataacgggggtattgaatgcctccgctttctgaacgaaattatttctgactttgacagcttgctcgacaaccccaagttccgagtgatcaccaaaataaagacgatcgggtcaacatacatggctgcatccggtgtcactccagacgtaaacactaatgggttcgccagctctaataaggaggataaatccgagcgggagaggtggcagcacctcgctgacctggccgacttcgcgctggcaatgaaggacaccctgactaatattaataatcagagctttaataactttatgctgaggatcggcatgaacaagggcggggtacttgccggagtgataggcgcccggaagccccactacgatatttggggtaacaccgttaacgttgcatcccgcatggaatccaccggagtgatggggaatatccaggtggtcgaagaaacacaggtcatcctcagggagtacggttttcggttcgttcgcagggggcccatttttgtcaaaggcaaaggtgagctgctgaccttcttcctgaaaggccgagataagctcgctacctttcccaacggtccaagcgtcaccctcccccaccaagtagtcgacaatagttag

SEQ ID NO: 142946 - DNA, 5050 bp, Artificial Sequence
  derived and/or modified sequence
cgggcctgacggcgggagatcgcgctccggccgggccccgaggcgctgccggggcggcgcggctctgcggggagcagccctcgggcgcgccgagctctcccgccccagcccgcgcggggaccgtcccggagcacgcggtggccgagttcccgcacaggtaaacgcaggggcagggccaggcttccgggggggaagacagcgccccgagcgtgggaagggggccggatcggagcccgagcctccaagggtttggtggaaaaaggaagtaaacagaaggaaggctcaggaatcccccacgatggtcctgatttctttccggcacattttatttacagcttctaaggactgggcctggagggaatttaggtgaggaagtcggggactgagaaagaagagatgacagagagaaaccggttaccagggatggaaaggcggctaggcccttccacaagccagggacaggaaattgagtgtctggcgtggacaggactaagtgtgcctgcggtgggcggtggtgtgagccgggggtggcagggaaggccctgggttgggaggctcttgcagcagagatccttttatgagggttagggcgggtcatggggaaaccgcaaggtaggagggaagaggtgcttctactcagcaatgcccttttcagttctagctgatcagtgctacctgtgctctggaaacccgctctgcgttcctgctggaggtggcctcccctccgccccagacaagaagaggccctcagccctcccccggtctcagagagccctgagaggaggcccagtccagagctcttcctccgttcccagtccacttctctagggccagtagcagacaccagccagtatgccgaggaaccagggcttctccgagcccgaatactcggccgagtactcagccgagtactccgtcagcctgccctccgaccctgaccgcggggtgggccggacccatgaaatctcggtccggaactcgggctcctgcctgtgcctgcctcgcttcatgcggctgactttcgtgccggagtccttggagaacctctaccagacctacttcaaaaggcagcgccacgagaccctgctggtgctggtggtctttgcagccctctttgactgctacgtggtggtcatgtgtgctgtggtcttctccagcgacaagctggcttccctcgccgtggctggaattggactggtgttggacatcatcctcttcgtgctctgcaaaaaggggctgctcccggaccgggtcacccgcagagtgctgccctacgtgctgtggctgctcataaccgcccagatcttctcctacctgggcctgaacttcgcgcgtgcccacgcggctagtgacacggtgggctggcaggtcttctttgtcttctccttcttcatcacgctgcccctcagcctcagccccatcgtgatcatctccgtggtctcctgtgtggtgcacacgttggtcctgggggtcaccgtggcccagcagcagcaggaggagctcaaggggatgcagctgctgcgggagatcctggccaacgtcttcctctacctgtgcgccatcgctgtgggcatcatgtcctactacatggctgaccgcaagcaccgcaaggccttcctggaggcccgccagtcgctggaggtgaagatgaacctggaagagcagagccagcagcaggagaacctcatgctttccatcctgcccaagcacgtggctgacgagatgctgaaagacatgaagaaagacgagagccagaaggaccagcagcagttcaacaccatgtacatgtaccgtcacgagaacgtcagcatcctctttgccgacatcgtgggctttacccagctgtcttctgcctgcagtgcccaggagcttgtgaagctgctcaacgagctctttgcccgctttgacaagctggcagctaaataccaccagctgcggattaagatcctgggcgactgctactactgcatctgcggcttgcccgactaccgggaggaccacgccgtctgctccatcctcatggggctggccatggtggaggccatctcgtatgtgcgggagaagaccaagactggggtggacatgcgtgtgggggtgcacacgggcaccgtgctggggggcgtcctgggccagaagcgctggcagtacgacgtgtggtcgactgatgtcactgtagccaacaagatggaggccggcggcatccctgggcgcgtgcacatctcccagagcaccatggactgcctgaaaggggagtttgatgtggagccaggcgatgggggcagccgctgtgattacctagaagagaagggtattgaaacctacctcatcattgcctccaagccagaggtgaagaaaacagccacccagaatggcctcaatggctcggccctgcccaatggagcaccagcttcctcaaagtccagctcccctgccctcattgagaccaaggagcccaacgggagtgcccacagcagtgggtccacgtcggagaagcccgaggagcaggatgcccaggccgacaacccctcattccccaacccacgccggaggctgcgcctgcaggacctggctgaccgagtggtggatgcctctgaagatgagcacgagctcaaccagctgctcaacgaggccctgcttgagcgagagtccgcccaagtagtaaagaagagaaacaccttcctcttgtccatgcggttcatggaccccgagatggaaacccgctactcggtggagaaggagaagcagagtggggctgccttcagctgctcctgcgtcgtcctgctctgcacggccctggtcgagatactcatcgacccctggctaatgacaaactatgtgaccttcatggtgggggagattctgctcctcatcctgaccatctgctccctggctgccatctttccccgggcctttcctaagaagcttgtggccttctcaacttggattgaccggacccgctgggccaggaacacctgggccatgctcgccatcttcatcctggtgatggcaaatgtcgtggacatgctcagctgtctccagtactacacgggacccagcaatgcaacggcagggatggaaacggagggcagctgcctggagaaccccaagtattacaactatgtggccgtgctgtccctcatcgccaccatcatgctggtgcaggtcagccacatggtgaagctcacgctcatgctgctcgtcgcaggcgccgtggccaccatcaacctctatgcctggcgtcccgtctttgatgaatacgaccacaagcgttttcgggagcacgacttacctatggtggccttagagcagatgcaaggattcaaccctgggctcaatggcactgacaggctgcccctggtgccttccaagtactctatgacggtgatggtgttcctcatgatgctcagcttctactacttctcccgccacgtagaaaaactggcacggacacttttcttgtggaagattgaggtccacgaccagaaggaacgtgtctatgagatgcgacgctggaacgaggccttggtcaccaacatgttgcctgagcacgtggcacgccatttcctggggtccaagaagagagatgaggagctgtatagccagacgtatgatgagattggagtcatgtttgcctccctgcccaactttgctgacttctacacagaggagagcatcaacaatggtggtattgagtgtctgcgtttcctcaatgaaatcatctcagattttgactctctcctggacaatcccaagttccgggtgatcaccaagatcaaaaccattggcagcacgtatatggcggcttcaggagtcacccccgatgtcaacaccaatggctttgccagctccaacaaggaagacaagtccgagagagagcgctggcagcacctggctgacctggccgacttcgcgctggccatgaaggatacgctcaccaacatcaacaaccagtccttcaataacttcatgctgcgcataggcatgaacaaaggcggggttctggctggggtcatcggagcccggaaaccacactacgacatctggggcaatacagtcaatgtagccagcaggatggagtccacgggggtcatgggcaacattcaggtggtagaagaaacccaagtcatcctccgagagtacggcttccgctttgtgaggcgaggccccatctttgtgaaggggaagggggagctgctgaccttcttcttgaaggggcgggataagctagccaccttccccaatggcccctctgtcacactgccccaccaggtggtggacaactcctgaatggcctcgagcctgcaacagtccaaaccggaagggagaatttattttttgaaactgaaggaagtcccgaccttcctggattgaagtgcacactcatggactttaggtttagaaacctcctcagccttcatttgttcgtggatgtgtgagctctgagggtggccctgctattcctgtgtgtgcctgtagtgtccccagcataggggtcttaggcatagggctgaacagtccttccagagccctcgttccaatccctgccgtccttgcccctgaggggccctgaccactgtgagcaggagggtggcagagctgggacaaagctgcctttgccgctgggctttccgggactgtggagggagcacaggcggggaagctccacttcagacagggcttggtggggcaggacatggctcccattttgaagggaggtctccatgtggtccgagtgaggtgagacggccctcgtcctggtgttcctgatcatcttgaaaggttcttctggaactcctgtccccttagtcatgagaacagaaagtgcaatatttcctttcacctggcaggggaggggggatttatttctgaaagaaaaatatataaacagatcttctacatttatatttttaatcttctgttaaatacactttccgatattgccttgccttttgagctcttgctacagtcgcctttgctactgctttaagagaatttacaggtattgataaagaacaagactgttttattaaaagctttattcaacttgaaa

SEQ ID NO: 142947 - DNA, 4325 bp, Artificial Sequence
  derived and/or modified sequence
cttttcagttctagctgatcagtgctacctgtgctctggaaacccgctctgcgttcctgctggaggtggcctcccctccgccccagacaagaagaggccctcagccctcccccggtctcagagagccctgagaggaggcccagtccagagctcttcctccgttcccagtccacttctctagggccagtagcagacaccagccagtatgccgaggaaccagggcttctccgagcccgaatactcggccgagtactcagccgagtactccgtcagcctgcctcgcttcatgcggctgactttcgtgccggagtccttggagaacctctaccagacctacttcaaaaggcagcgccacgagaccctgctggtgctggtggtctttgcagccctctttgactgctacgtggtggtcatgtgtgctgtggtcttctccagcgacaagctggcttccctcgccgtggctggaattggactggtgttggacatcatcctcttcgtgctctgcaaaaaggggctgctcccggaccgggtcacccgcagagtgctgccctacgtgctgtggctgctcataaccgcccagatcttctcctacctgggcctgaacttcgcgcgtgcccacgcggctagtgacacggtgggctggcaggtcttctttgtcttctccttcttcatcacgctgcccctcagcctcagccccatcgtgatcatctccgtggtctcctgtgtggtgcacacgttggtcctgggggtcaccgtggcccagcagcagcaggaggagctcaaggggatgcagctgctgcgggagatcctggccaacgtcttcctctacctgtgcgccatcgctgtgggcatcatgtcctactacatggctgaccgcaagcaccgcaaggccttcctggaggcccgccagtcgctggaggtgaagatgaacctggaagagcagagccagcagcaggagaacctcatgctttccatcctgcccaagcacgtggctgacgagatgctgaaagacatgaagaaagacgagagccagaaggaccagcagcagttcaacaccatgtacatgtaccgtcacgagaacgtcagcatcctctttgccgacatcgtgggctttacccagctgtcttctgcctgcagtgcccaggagcttgtgaagctgctcaacgagctctttgcccgctttgacaagctggcagctaaataccaccagctgcggattaagatcctgggcgactgctactactgcatctgcggcttgcccgactaccgggaggaccacgccgtctgctccatcctcatggggctggccatggtggaggccatctcgtatgtgcgggagaagaccaagactggggtggacatgcgtgtgggggtgcacacgggcaccgtgctggggggcgtcctgggccagaagcgctggcagtacgacgtgtggtcgactgatgtcactgtagccaacaagatggaggccggcggcatccctgggcgcgtgcacatctcccagagcaccatggactgcctgaaaggggagtttgatgtggagccaggcgatgggggcagccgctgtgattacctagaagagaagggtattgaaacctacctcatcattgcctccaagccagaggtgaagaaaacagccacccagaatggcctcaatggctcggccctgcccaatggagcaccagcttcctcaaagtccagctcccctgccctcattgagaccaaggagcccaacgggagtgcccacagcagtgggtccacgtcggagaagcccgaggagcaggatgcccaggccgacaacccctcattccccaacccacgccggaggctgcgcctgcaggacctggctgaccgagtggtggatgcctctgaagatgagcacgagctcaaccagctgctcaacgaggccctgcttgagcgagagtccgcccaagtagtaaagaagagaaacaccttcctcttgtccatgcggttcatggaccccgagatggaaacccgctactcggtggagaaggagaagcagagtggggctgccttcagctgctcctgcgtcgtcctgctctgcacggccctggtcgagatactcatcgacccctggctaatgacaaactatgtgaccttcatggtgggggagattctgctcctcatcctgaccatctgctccctggctgccatctttccccgggcctttcctaagaagcttgtggccttctcaacttggattgaccggacccgctgggccaggaacacctgggccatgctcgccatcttcatcctggtgatggcaaatgtcgtggacatgctcagctgtctccagtactacacgggacccagcaatgcaacggcagggatggaaacggagggcagctgcctggagaaccccaagtattacaactatgtggccgtgctgtccctcatcgccaccatcatgctggtgcaggtcagccacatggtgaagctcacgctcatgctgctcgtcgcaggcgccgtggccaccatcaacctctatgcctggcgtcccgtctttgatgaatacgaccacaagcgttttcgggagcacgacttacctatggtggccttagagcagatgcaaggattcaaccctgggctcaatggcactgacaggctgcccctggtgccttccaagtactctatgacggtgatggtgttcctcatgatgctcagcttctactacttctcccgccacgtagaaaaactggcacggacacttttcttgtggaagattgaggtccacgaccagaaggaacgtgtctatgagatgcgacgctggaacgaggccttggtcaccaacatgttgcctgagcacgtggcacgccatttcctggggtccaagaagagagatgaggagctgtatagccagacgtatgatgagattggagtcatgtttgcctccctgcccaactttgctgacttctacacagaggagagcatcaacaatggtggtattgagtgtctgcgtttcctcaatgaaatcatctcagattttgactctctcctggacaatcccaagttccgggtgatcaccaagatcaaaaccattggcagcacgtatatggcggcttcaggagtcacccccgatgtcaacaccaatggctttgccagctccaacaaggaagacaagtccgagagagagcgctggcagcacctggctgacctggccgacttcgcgctggccatgaaggatacgctcaccaacatcaacaaccagtccttcaataacttcatgctgcgcataggcatgaacaaaggcggggttctggctggggtcatcggagcccggaaaccacactacgacatctggggcaatacagtcaatgtagccagcaggatggagtccacgggggtcatgggcaacattcaggtggtagaagaaacccaagtcatcctccgagagtacggcttccgctttgtgaggcgaggccccatctttgtgaaggggaagggggagctgctgaccttcttcttgaaggggcgggataagctagccaccttccccaatggcccctctgtcacactgccccaccaggtggtggacaactcctgaatggcctcgagcctgcaacagtccaaaccggaagggagaatttattttttgaaactgaaggaagtcccgaccttcctggattgaagtgcacactcatggactttaggtttagaaacctcctcagccttcatttgttcgtggatgtgtgagctctgagggtggccctgctattcctgtgtgtgcctgtagtgtccccagcataggggtcttaggcatagggctgaacagtccttccagagccctcgttccaatccctgccgtccttgcccctgaggggccctgaccactgtgagcaggagggtggcagagctgggacaaagctgcctttgccgctgggctttccgggactgtggagggagcacaggcggggaagctccacttcagacagggcttggtggggcaggacatggctcccattttgaagggaggtctccatgtggtccgagtgaggtgagacggccctcgtcctggtgttcctgatcatcttgaaaggttcttctggaactcctgtccccttagtcatgagaacagaaagtgcaatatttcctttcacctggcaggggaggggggatttatttctgaaagaaaaatatataaacagatcttctacatttatatttttaatcttctgttaaatacactttccgatattgccttgccttttgagctcttgctacagtcgcctttgctactgctttaagagaatttacaggtattgataaagaacaagactgttttattaaaagctttattcaacttg

SEQ ID NO: 142948 - DNA, 3435 bp, Artificial Sequence
  derived and/or modified sequence
atgcccaggaaccagggcttcagcgagcctgagtacagcgctgagtacagcgctgagtacagcgtgtccctgcccagcgaccctgacagaggagtgggccgcacccatgagatctctgtgagaaattctggcagctgcctgtgcctgccccgcttcatgaggctgacctttgtgcctgagagcctggagaacctgtaccagacctacttcaagaggcagagacatgagaccctgctggtgctggtggtgtttgctgccctgtttgactgctacgtggtggtgatgtgtgctgtggtgttcagcagtgacaagctggccagcctggccgtggccggcatcggcctggtgctggacatcatcctgtttgtgctgtgcaagaagggcctgctgcctgacagagtgacccggcgggtgctgccctacgtgctgtggctgctgatcacagcccagatcttctcctacctgggcctgaactttgcccgggcccacgccgccagtgacacagtgggctggcaggtgttctttgtgttctccttcttcatcaccctgcccctgagcctgagccccatcgtcatcatctctgtggtgtcctgtgtggtgcacaccctggtgctgggcgtgacagtggcccagcagcagcaggaggagctgaagggcatgcagctgctgcgggagatcctggccaacgtgttcctgtacctgtgtgccatcgctgtgggcatcatgagctactacatggctgacaggaagcacaggaaggccttcctggaggcccggcagagcctggaggtgaagatgaacctggaggagcagagccagcagcaggagaacctgatgctgagcatcctgcccaagcacgtggctgatgagatgctgaaggacatgaagaaggatgagagccagaaggaccagcagcagttcaacaccatgtacatgtacagacatgaaaatgtgtccatcctgtttgctgacatcgtgggcttcacccagctgagcagcgcctgcagcgcccaggagctggtgaagctgctgaatgagctgtttgccaggtttgacaagctggccgccaagtaccaccagctgcgcatcaagatcctgggggactgctactactgcatctgtggcctgcctgactacagagaagatcatgctgtgtgcagcatcctgatgggcctggccatggtggaggccatctcctatgtgcgggagaagaccaagacaggagtggacatgagggtgggcgtgcacactggaacagtgctgggcggcgtgctgggccagaagcgctggcagtatgatgtgtggagcacagatgtgacagtggccaacaagatggaggccggcggcatccctggccgggtgcacatcagccagagcaccatggactgcctgaagggggagtttgatgtggagcctggagatggcggcagccgctgtgactacctggaggagaagggcatcgagacctacctgatcatcgccagcaagccagaggtgaagaagacagccacccagaatggcctgaatggaagtgccctgcccaatggagccccagccagcagcaagagcagcagccctgccctgattgagaccaaggagcccaatggaagtgcccacagcagcggcagcaccagcgagaagccagaggagcaggatgcccaggccgacaaccccagcttccccaacccccggcggcggctgcggctgcaggacctggccgacagagtggtggatgcctctgaagatgagcacgagctgaaccagctgctgaatgaggccctgctggagcgggagagcgcccaggtggtgaagaagaggaacaccttcctgctgtccatgaggttcatggaccctgagatggagacccgctacagcgtggagaaggagaagcagagcggggccgccttcagctgcagctgtgtggtgctgctgtgcacagccctggtggagatcctgattgacccctggctgatgaccaactacgtgaccttcatggtgggggagatcctgctgctgatcctgaccatctgcagcctggccgccatcttcccccgggccttccccaagaagctggtggccttcagcacctggattgacaggacccgctgggccaggaacacctgggccatgctggccatcttcatcctggtgatggccaacgtggtggacatgctgagctgcctgcagtactacacaggccccagcaatgccacagctggcatggagacagagggcagctgcctggagaaccccaagtactacaactacgtggccgtgctgagcctgattgccaccatcatgctggtgcaggtgagccacatggtgaagctgaccctgatgctgctggtggccggggctgtggccaccatcaacctgtatgcctggaggcctgtgtttgatgaatatgaccacaagcgcttccgggagcatgacctgcccatggtggccctggagcagatgcagggcttcaaccctggcctgaatggaacagaccggctgcccctggtgcccagcaagtacagcatgacagtgatggtgttcctgatgatgctgtccttctactacttcagcagacatgtggagaagctggcccggaccctcttcctgtggaagattgaggtgcatgaccagaaggagcgggtgtatgagatgaggcgctggaatgaggccctggtgaccaacatgctgcctgagcacgtggcccggcacttcctgggcagcaagaagagagatgaggagctgtacagccagacctatgatgaaattggagtgatgtttgccagcctgcccaactttgctgacttctacacagaggagagcatcaacaatggaggcattgaatgtctgcgcttcctgaatgagatcatcagtgactttgacagcctgctggacaaccccaagttccgggtcatcaccaagatcaagaccatcggcagcacctacatggccgccagcggcgtgaccccagatgtgaacaccaacggctttgccagcagcaacaaggaggacaagtctgagcgggagcgctggcagcacctggccgacctggccgactttgccctggccatgaaggacaccctgaccaacatcaacaaccagagcttcaacaacttcatgctgcgcatcggcatgaacaagggcggcgtgctggccggggtcatcggggccaggaagccccactatgacatctggggcaacacagtgaatgtggccagcaggatggagagcactggagtgatgggcaacatccaggtggtggaggagacccaggtgatcctgcgggagtatggcttccgctttgtgcggcggggccccatctttgtgaagggcaaaggagagctgctgaccttcttcctgaagggccgggacaagctggccaccttccccaacggccccagcgtgaccctgccccaccaggtggtggacaacagctag

SEQ ID NO: 142949 - DNA, 3360 bp, Artificial Sequence
  derived and/or modified sequence
atgcccaggaaccagggcttcagcgagcctgagtacagcgctgagtacagcgctgagtacagcgtgtccctgccccgcttcatgaggctgacctttgtgcctgagagcctggagaacctgtaccagacctacttcaagaggcagagacatgagaccctgctggtgctggtggtgtttgctgccctgtttgactgctacgtggtggtgatgtgtgctgtggtgttcagcagtgacaagctggccagcctggccgtggccggcatcggcctggtgctggacatcatcctgtttgtgctgtgcaagaagggcctgctgcctgacagagtgaccaggagagtgctgccctacgtgctgtggctgctgatcacagcccagatcttctcctacctgggcctgaactttgcccgggcccatgctgccagtgacacagtgggctggcaggtgttctttgtgttctccttcttcatcaccctgcccctgagcctgagccccatcgtcatcatctctgtggtgtcctgtgtggtgcacaccctggtgctgggcgtgacagtggcccagcagcagcaggaggagctgaagggcatgcagctgctgcgggagatcctggccaacgtgttcctgtacctgtgtgccatcgctgtgggcatcatgagctactacatggctgacaggaagcacaggaaggccttcctggaggcccggcagagcctggaggtgaagatgaacctggaggagcagagccagcagcaggagaacctgatgctgagcatcctgcccaagcacgtggctgatgagatgctgaaggacatgaagaaggatgagagccagaaggaccagcagcagttcaacaccatgtacatgtacagacatgaaaatgtgtccatcctgtttgctgacatcgtgggcttcacccagctgagcagcgcctgcagcgcccaggagctggtgaagctgctgaatgagctgtttgccaggtttgacaagctggccgccaagtaccaccagctgcgcatcaagatcctgggggactgctactactgcatctgtggcctgcctgactaccgggaggaccatgctgtgtgcagcatcctgatgggcctggccatggtggaggccatctcctatgtgcgggagaagaccaagacaggagtggacatgagggtgggcgtgcacacaggcaccgtgctgggcggcgtgctgggccagaagcgctggcagtatgatgtgtggagcacagatgtgacagtggccaacaagatggaggccggcggcatccctggccgggtgcacatcagccagagcaccatggactgcctgaagggggagtttgatgtggagcctggagatggcggcagccgctgtgactacctggaggagaagggcatcgagacctacctgatcatcgccagcaagccagaggtgaagaagacagccacccagaatggcctgaatggcagcgccctgcccaacggggccccagccagcagcaagagcagcagccctgccctgattgagaccaaggagcccaacggcagcgcccacagcagcggcagcaccagcgagaagccagaggagcaggatgcccaggccgacaaccccagcttccccaacccccggcggcggctgcggctgcaggacctggccgacagagtggtggatgcctctgaagatgaacatgagctgaaccagctgctgaatgaggccctgctggagcgggagagcgcccaggtggtgaagaagaggaacaccttcctgctgtccatgaggttcatggaccctgagatggagacccgctacagcgtggagaaggagaagcagagcggggccgccttcagctgcagctgtgtggtgctgctgtgcacagccctggtggagatcctgattgacccctggctgatgaccaactacgtgaccttcatggtgggggagatcctgctgctgatcctgaccatctgcagcctggccgccatcttcccccgggccttccccaagaagctggtggccttcagcacctggattgacaggacccgctgggccaggaacacctgggccatgctggccatcttcatcctggtgatggccaacgtggtggacatgctgagctgcctgcagtactacacaggccccagcaatgccacagctggcatggagacagagggcagctgcctggagaaccccaagtactacaactacgtggccgtgctgagcctcatcgccaccatcatgctggtgcaggtgagccacatggtgaagctgaccctgatgctgctggtggccggggctgtggccaccatcaacctgtatgcctggaggcctgtgtttgatgaatatgaccacaagcgcttccgggagcatgacctgcccatggtggccctggagcagatgcagggcttcaaccctggcctgaatggaacagaccggctgcccctggtgcccagcaagtacagcatgacagtgatggtgttcctgatgatgctgtccttctactacttcagccgccacgtggagaagctggcccggaccctcttcctgtggaagattgaggtgcatgaccagaaggagcgggtgtatgagatgaggcgctggaatgaggccctggtgaccaacatgctgcctgagcacgtggcccggcacttcctgggcagcaagaagagagatgaggagctgtacagccagacctatgatgaaattggagtgatgtttgccagcctgcccaactttgctgacttctacacagaggagagcatcaacaacggcggcatcgagtgcctgcgcttcctgaatgagatcatcagtgactttgacagcctgctggacaaccccaagttccgggtcatcaccaagatcaagaccatcggcagcacctacatggccgccagcggcgtgaccccagatgtgaacaccaatggatttgccagcagcaacaaggaggacaagtctgagcgggagcgctggcagcacctggccgacctggccgactttgccctggccatgaaggacaccctgaccaacatcaacaaccagagcttcaacaacttcatgctgagaattggcatgaacaagggcggcgtgctggccggcgtgattggagccaggaagccccactatgacatctggggcaacacagtgaatgtggccagcaggatggagagcactggagtgatgggcaacatccaggtggtggaggagacccaggtgatcctgcgggagtatggcttccgctttgtgagaagaggccccatctttgtgaagggcaagggggagctgctgaccttcttcctgaagggccgggacaagctggccaccttccccaacggccccagcgtgaccctgccccaccaggtggtggacaacagctag

SEQ ID NO: 142950 - DNA, 3435 bp, Artificial Sequence
  derived and/or modified sequence
atgccccggaaccagggcttcagcgagcccgagtacagcgccgagtactcagccgaatattcagtctccttaccttcagatccagataggggcgtgggccggactcacgaaatcagcgtgaggaactcagggagctgcctgtgcctgccaaggttcatgagattgacattcgtccctgaatcactggagaacttgtaccaaacttattttaagcggcagcgccatgagacgctcctggtcttagtcgtcttcgccgcactctttgattgttatgttgtggtgatgtgcgcggttgtcttttccagcgataaactggcctccctggccgtggcggggattggtttagtcctcgacatcattctttttgtcctatgcaaaaaggggctactcccagaccgcgtcacacgccgcgtacttccatatgtcttatggctgctgattacagcgcagatattttcttacctgggtctcaatttcgctagggcgcatgctgcgtcagacactgtggggtggcaggtcttcttcgtctttagcttcttcatcacactgccactttctctgtcaccgatcgtcatcatcagcgtggtcagttgcgtggtgcatacgctggtgctgggcgtgaccgtggctcaacagcagcaggaggaattgaagggcatgcagctactgcgcgagatactggccaacgtattcctgtacctgtgtgccatagcagtcgggatcatgtcatattacatggcagaccggaagcaccggaaggccttcctggaggcacggcagagtttggaagtgaaaatgaacctggaggaacagagccagcaacaggagaatctgatgctctccatactgccaaagcacgtggctgatgaaatgcttaaggacatgaagaaggatgagagccagaaggatcagcagcagttcaatactatgtatatgtatcggcacgaaaatgtgtccatattgtttgctgatatcgttggctttactcagctgagcagtgcctgttctgctcaggaattggtgaaactcctcaacgagttgttcgctcgcttcgataaactggccgctaaataccatcagctgcgtattaaaatcttgggagattgttactactgtatttgcggtctgcccgattaccgggaggatcatgcagtgtgttccattctcatggggctggctatggtggaggccataagctatgtgcgggaaaagacaaaaacaggggtggatatgagggtgggggtgcacaccggcactgtcttgggaggcgtgctgggccagaagcggtggcaatacgatgtctggagtacagacgtgaccgtcgccaacaaaatggaagcaggaggtatcccaggcagggtgcatatcagccagtcaaccatggactgccttaagggagaattcgatgtagagcctggggacggaggatcacggtgcgactacctcgaagagaaaggtattgaaacttacctgatcatcgcatcaaaaccagaagtaaaaaagaccgcaacccagaacgggttaaacgggagcgctcttcccaatggagcacctgcgagcagcaaaagcagctctcccgcgctgatcgaaacaaaggaacccaacggatcagcccacagcagcggaagcactagtgaaaagccagaggaacaggacgctcaggctgataacccaagcttcccaaacccccggagacgcctgaggttgcaagatcttgcagacagggttgtggacgcctctgaggatgagcacgaactgaaccaactcctcaacgaagccctgcttgaaagggagagcgcccaagttgtgaagaaacgaaacaccttcctcctgagtatgcgctttatggaccctgaaatggagaccaggtatagcgttgaaaaggagaagcaaagtggcgcagcattctcctgtagctgtgttgtcctactgtgtaccgctttagtggagattttgatcgacccatggttgatgacgaattacgtgacctttatggtgggggagatcctgctcctgatacttacaatctgtagcctagctgctatttttccccgtgccttccccaaaaagttagttgcctttagtacatggatcgaccgtaccagatgggctcggaacacttgggctatgctcgccatctttattctggtgatggctaacgtcgtcgacatgctgtcttgtctgcagtactatacggggccttccaatgctaccgcagggatggagacagaaggatcttgtctggagaacccaaagtattacaattacgtggctgtgctgtctctcattgctacgattatgctggtccaagtttcacacatggtaaagctcacgttgatgctgctcgtggccggagcagtggctacaattaatctttacgcatggaggccagtgttcgacgagtatgatcataagcgattcagagaacacgatttgccaatggtagccctagagcagatgcaaggctttaatcccggtctgaacggcactgatagattgccgttggtgccatcaaaatactccatgactgtgatggttttcctgatgatgctatcgttttactatttctctcggcacgttgaaaaacttgcgcgaactctgttcctatggaagatagaagtacatgaccagaaagaacgggtgtatgaaatgcgtcgttggaatgaagcgctcgttaccaacatgctgccagagcacgtcgcccgccacttcttagggtcaaaaaagcgggatgaggagctctatagccagacttatgacgaaatcggggtcatgttcgcctccctgcccaacttcgctgacttttataccgaggagtcaatcaacaatggcggtatcgagtgcctcaggtttctcaacgagatcatctctgacttcgacagcctactggacaatccaaaattcagggtgatcacaaagatcaaaaccataggctctacctatatggccgctagcggcgttactccggatgttaacacgaacggtttcgcttcatcaaacaaagaggataagtctgaaagagaacggtggcaacacttggccgacctcgcggacttcgctcttgctatgaaggataccctgactaacattaataaccagtctttcaacaatttcatgttgcggattggaatgaataagggtggtgtcttagccggggtgattggggcgagaaagccgcactatgacatttgggggaacaccgtgaacgtggcaagccggatggagagcaccggggtaatggggaacatccaggtggtagaggagactcaagttatcctgcgcgaatacggcttcagattcgttcgtcggggtcccatcttcgtcaaagggaaaggcgaactgttgaccttcttccttaagggtagagataagctggcaacattccctaatggaccatcagtgacactgcctcaccaggtcgttgataattcatag

SEQ ID NO: 142951 - DNA, 3360 bp, Artificial Sequence
  derived and/or modified sequence
atgccccggaaccagggcttcagcgagcccgagtacagcgccgagtactcagctgagtattcagtgtccctgccgaggtttatgcgtctgacgttcgttcccgagtcgcttgagaacttgtaccagacatatttcaagagacagagacatgagacgctgctggttttggtcgtatttgctgcgctgttcgattgttacgtggtcgtgatgtgtgccgtcgtgttttcaagcgataaactcgcaagccttgcggtggcagggatcggtctagtgctggacatcattctcttcgtgctgtgtaaaaagggcctgttgcctgatagggtcacaagacgtgttctaccctatgtcctctggcttctcatcaccgctcagattttcagctatctgggtttgaatttcgctagggcccacgcggcttcggacaccgtggggtggcaggtttttttcgtgttctcattttttatcacattgcctttgagcctcagtccaattgtgatcatctccgttgtgagttgcgttgtgcatactctggtactgggggtgaccgttgcacagcagcaacaggaggagctgaagggcatgcagctgctccgggagatcctagcaaacgtcttcctctacctttgcgctatcgccgtcggcatcatgtcatactatatggccgatcggaagcaccgcaaggcctttctggaggcgaggcaatcccttgaagtgaagatgaacctggaagaacaaagtcagcagcaggaaaatctaatgctctctatcctgccaaaacacgtcgccgacgagatgctgaaggatatgaagaaagacgagagccaaaaggatcagcaacagtttaatacgatgtacatgtaccggcacgaaaacgtgtccatcttgtttgcagatatcgtaggatttacccagctcagctccgcatgttctgcacaggagctagtcaagctgctgaatgaactgttcgctcggtttgacaagctggccgcgaaataccaccagcttcgcattaaaatattgggcgactgctactattgcatctgcggcctgcctgactatcgcgaggatcatgccgtgtgctcgatactgatgggcctcgcaatggtggaagccatctcttacgttcgggaaaagacaaagaccggcgtcgatatgagagttggggtgcataccggaacagtgctcggcggggtcctgggccagaaacggtggcaatacgatgtttggtcaacagacgtgactgtggccaacaagatggaggccggaggtataccgggtagggtccacataagtcagtctaccatggattgtctgaagggcgaattcgacgtggaacccggggacggaggtagccgctgtgactacttggaggagaagggaatcgagacctacttgataatcgcgagtaaacctgaggtcaaaaaaactgcaacacagaacggcttgaacgggagcgctctgcctaatggtgcgcctgcatctagcaaaagtagctctccagcattgatagagactaaggagccgaacgggtctgctcacagtagtggatcaacctccgaaaaacccgaggagcaggacgcccaggcggacaaccccagttttccaaatccccgccggagactcagactccaagacctcgctgatcgcgtcgtggatgcctctgaggacgagcatgaactgaatcagttactgaacgaagcactgcttgagcgcgaatcagcccaggtggtcaagaagcgaaacaccttcctcttgtccatgagattcatggaccccgagatggaaacacgatattcagtggagaaggagaagcagagcggggcagctttctcatgttcctgcgtggtgctactctgtaccgctctcgtggaaatattgattgatccctggctgatgactaactacgtaacctttatggtaggcgagattctgctccttattctgaccatctgctcactcgcagccatcttcccaagagcatttcccaagaagctggtggctttcagcacctggatcgatcgcacacgttgggcccggaatacatgggccatgctggccatatttatcctggtaatggccaacgtcgtggatatgctgagttgcctgcagtactataccggcccatcgaacgctactgccggtatggagacggaggggagttgccttgagaacccaaaatactacaattacgtagcagtcctttccctgatagcaacaattatgctggtgcaggtgtctcacatggtgaagttgacacttatgctgcttgttgccggagctgtggcaactattaatctctacgcttggcgtcccgtctttgacgagtacgatcataaaaggttccgagaacatgacctacccatggtggctttggaacaaatgcaaggatttaacccagggctgaatggaaccgatcgcctacctcttgtgccctctaaatattctatgaccgtgatggtgttcttgatgatgctgtccttttattatttttccaggcacgtggaaaaactggctcggaccctctttctgtggaaaatcgaagtccacgaccagaaagagcgagtatacgagatgcgacggtggaatgaggccctggttacaaatatgcttccggagcatgttgcccgacactttctgggttcaaaaaagcgggatgaagaactttacagccaaacctacgatgagataggggtcatgttcgccagtctgcctaatttcgcagatttttacaccgaggagtccatcaacaatggcggtatcgaatgcctgaggtttctgaatgaaataatttcagactttgatagtctgctggataatcctaagttccgggttatcacaaagattaaaactattgggagcacctatatggcagcaagcggcgttacaccggacgtcaatactaatggtttcgccagcagcaataaggaagataagagcgagcgggagagatggcaacacctggcggacctcgcggacttcgcgcttgcgatgaaggacacactgacaaacattaacaatcagagtttcaataattttatgctgagaataggaatgaacaaggggggggttctcgcaggagtcatcggagctagaaagccgcattacgatatctggggaaataccgtgaatgtggctagccgcatggaaagcacaggggtcatgggtaacatccaggttgtggaggagacgcaggtcatccttagagagtatggattccgttttgtaaggcgtggccccatatttgtgaagggcaagggggagttgcttacgtttttcttgaaaggcagagacaagctcgcaaccttccctaacggcccttctgtcacattgccacaccaagtggtggataactcttag

SEQ ID NO: 142952 - DNA, 3435 bp, Artificial Sequence
  derived and/or modified sequence
atgccccgtaaccagggctttagtgagccagaatacagcgctgaatattctgccgagtacagcgttagtcttcctagtgatccagaccgcggagtgggtaggacacacgagatttccgtcaggaactccggtagctgcctgtgcctgccccgatttatgcggttaacctttgtgcctgagtctctggagaacctgtatcagacctacttcaagagacagcgacacgagactctcctggtgctagtggtatttgccgctttattcgactgctatgtcgtcgtcatgtgcgccgtagtatttagctccgacaagctggctagcttagccgtagcgggaatcggactcgtgctagacatcatcctgttcgtgctctgcaaaaagggtctgctgcctgatagggtgacgcgccgtgttttaccctacgtgctttggctcctgattactgcccagatttttagctatctcggactgaacttcgctcgtgcccacgcagcttctgataccgtgggatggcaagtgtttttcgttttcagcttctttatcaccctgccgctgagcctgagccccatcgtaataatatcagtcgtcagctgcgtggttcatacattggtgctcggggtcacggtggcccagcagcagcaggaagaattgaaaggaatgcaactgctgagggagatactcgccaacgtatttctgtacttgtgcgctatcgccgtgggcatcatgagttattacatggccgatcgtaagcaccggaaagcctttcttgaggctcggcagtccttagaagtcaagatgaacctggaggaacagagtcagcaacaggagaatctgatgctctccatcctgcccaagcatgtagcggatgagatgctgaaggatatgaaaaaagacgagtcccaaaaagaccagcaacagtttaatactatgtatatgtaccggcacgagaatgtgagtatactgtttgctgatatcgtgggtttcactcagctcagctctgcttgcagcgcccaggagctcgtcaaactgcttaatgaactgtttgctcgatttgataagttggctgctaagtaccaccaattgcggatcaaaatcctgggggactgttactactgtatttgcggcttacctgactaccgcgaggaccacgctgtctgctcgatccttatggggctggctatggtggaagccatctcatatgtgcgcgaaaagacgaagaccggtgtggacatgcgagtgggggtccacacgggcacagtgctcggcggtgtcctgggccagaagagatggcagtacgatgtttggagcaccgatgtgactgtcgctaataagatggaggccggtggcatccctgggagggtccacatttcccaatccacaatggactgcctgaagggagaattcgacgtggagcctggtgatgggggtagtaggtgtgactacttggaggaaaaaggtattgagacatacctgatcatcgcctccaagccagaagtaaaaaagacagccactcaaaacgggctcaatggcagtgcactcccaaacggtgcgccagctagctccaaaagctccagtcctgcactcatcgaaactaaggaacccaatggctccgctcatagctctggctcaacctctgagaaaccagaggagcaggacgcccaggccgacaatccctctttccctaaccccaggcgacgactgcgcttgcaagatctcgctgaccgcgtggtagacgcatcagaagacgagcacgagcttaaccagcttctgaatgaagctctgctggagcgcgagtcggcccaggttgtaaagaagaggaatacttttttactgagtatgcggtttatggatccggagatggagacaagatattcagtagaaaaggagaagcaatccggcgctgcgtttagctgctcctgcgttgtgttgctctgcacggctctggtcgaaatacttatagacccgtggttgatgacgaactatgtcacttttatggtcggggagatcctgctgcttatccttaccatttgttctctcgccgctatttttccacgcgctttcccgaaaaaactagtggccttttcgacttggattgatcgaactcggtgggccagaaatacgtgggcgatgctggccatatttatcctggtgatggccaacgtcgtagacatgttatcatgtttgcagtactataccggtccatctaacgcaaccgcaggaatggagactgagggaagctgcctggaaaatcctaagtattacaattacgtagccgtgctgagtctgatcgccaccataatgttagtgcaggtgtcccatatggttaaactgaccttaatgctgctggtggctggcgcagtggccaccataaatctctacgcgtggcggcctgtgttcgatgagtatgaccacaaaagatttcgcgaacatgaccttcccatggtagccctggaacagatgcaggggtttaatcctggactgaatggcactgatagactacccctcgtgccttctaaatactcaatgacggtcatggtgtttctcatgatgctatccttttactacttttctagacatgtggagaaactggcgcgtaccctattcctgtggaagatcgaagtgcatgaccaaaaagagagagtctatgagatgagaagatggaacgaagcccttgtcacgaatatgttgcccgaacatgtcgccagacattttctcgggtccaaaaagcgggatgaggagctttactcgcagacctacgacgagattggggtgatgtttgcttcacttccaaatttcgcagacttttacaccgaggaatctattaacaatggcggaatcgaatgccttagatttctcaacgaaataatttccgattttgactcccttctggacaaccctaaattccgtgtgataacgaaaatcaaaacaatcggtagcacttacatggcggcatcaggagtgaccccagacgtaaacaccaatggcttcgcatcgagcaataaggaggataaatcagaaagggagaggtggcaacatctggctgacctagcagacttcgccctcgctatgaaagatacactgacaaacataaacaaccagtcctttaataatttcatgctgagaataggtatgaacaagggcggagtcctggcgggagtcatcggggcaagaaagccccactacgatatctggggaaataccgtgaatgtggccagcagaatggaatctacaggtgtgatgggcaacattcaggtggtcgaggaaacgcaagtgatcctgagagaatatggcttccgtttcgtgagaagagggccaattttcgtgaaaggaaaaggggagctactgacattctttttaaaggggagagacaaattagcgacttttcctaacggcccttcggtgactctgccccaccaggtggtggacaattcatag

SEQ ID NO: 142953 - DNA, 3360 bp, Artificial Sequence
  derived and/or modified sequence
atgccccgaaatcaggggttttccgagccagaatacagtgcggagtactcggcagagtatagtgttagcctcccccgatttatgagactgaccttcgtgcccgaaagtcttgaaaacctgtatcaaacctacttcaaacggcagcgccatgagacgctgctagtgctggtggtattcgccgctctgtttgattgctacgtggtggttatgtgtgcagtggtgttcagctccgacaagctcgcttcactggcagtggccggaattggtctcgtgctcgacataatcttgtttgtgttatgtaagaaaggcctgcttcccgaccgcgttactagaagagtccttccttatgtgctgtggctgctcataaccgctcagatattctcctacctgggacttaatttcgccagagcacatgcagcaagcgacacagtgggatggcaagtttttttcgtgttttccttttttattactctcccgttatccctgtccccaatagtgattatatcagtggtgtcctgcgttgtgcacaccctcgtgctcggcgtaaccgtggcccagcagcagcaggaggagttgaagggcatgcaactgctgagggaaattctagcaaacgtgttcctctacctttgcgccattgctgtagggatcatgtcttattatatggccgacagaaaacatcgcaaagcttttctggaagcccgtcagagcctagaggttaaaatgaatctagaggagcaatctcagcaacaggaaaacttaatgctgtccattcttcctaagcacgtcgcggacgagatgctcaaggatatgaagaaagatgagagtcagaaagatcagcagcagttcaataccatgtatatgtatcgacacgagaatgtgagtatcctgttcgcagacattgtgggattcacgcagctgagttccgcctgttcagcccaggagctggtcaaattgttgaatgaattatttgccaggttcgacaaactggcagccaaataccaccagctccgaattaaaatcctcggcgattgctattactgtatctgtggcctacctgactatagggaggatcatgcagtctgctcaattcttatgggtcttgccatggtcgaggcaatctcgtatgtacgggagaagacaaagaccggggtcgatatgcgcgtgggagtacacactggcactgtgcttgggggtgttctcggtcagaaacgctggcagtacgacgtgtggagtacagatgttacggtggcaaataaaatggaagccggtggcattccagggagagtacacattagccagagcactatggactgcctgaaaggcgagtttgacgtggagccgggagacggaggcagccggtgcgactacctggaagaaaaaggtattgagacctacctgatcatcgcaagtaagcccgaggtgaagaaaacagcaacccagaacggtttaaatggttccgcgctgccgaacggcgcaccagcctcttccaagagctcatcacccgctctgatagagactaaagagcctaacgggtctgcacattcctccgggagtacaagtgaaaagcccgaggaacaggacgcccaggccgacaatccatctttccctaatcctagaagacgactgagattacaagacctggctgatagagtagtcgacgcttctgaggacgaacacgagctgaatcagctgctaaacgaggccctgctggagcgggaatcagcgcaggtcgtcaagaagagaaacacctttctactgagtatgcggtttatggatccagagatggagacgcgttactcagtagaaaaggagaagcaatcaggtgcggctttctcctgctcatgtgtggtgctgctctgtaccgcattagtggagattcttatcgacccctggctgatgacaaactacgtgacatttatggtaggagaaatactcctactcattcttacgatttgttccctagcggcaatcttccctcgcgcatttcctaagaagttagtcgcattctctacctggatagacagaacgcgttgggcaagaaacacatgggcgatgctcgctatcttcatccttgttatggcgaacgtcgtcgacatgctgtcctgtttgcagtattacaccggccctagcaacgctacggcgggtatggagaccgaggggagctgtttggaaaacccaaaatactacaattacgtcgccgtcctttctctgattgcgactatcatgcttgttcaagtgtcccacatggttaaacttactctgatgctgctggtcgcgggtgcagtagccactatcaatctgtatgcatggaggcctgttttcgatgaatacgatcacaagagatttagggaacacgatttaccgatggtggccctggaacagatgcagggcttcaatcccggattaaatgggacagatcgtctccccctggtgccatctaaatattccatgacggttatggtgttcctcatgatgctcagcttttactactttagcagacatgttgaaaaactagccaggactctgtttctctggaagattgaagtgcatgaccagaaggaaagagtctacgaaatgagaaggtggaatgaggcgctcgtgacaaacatgctccctgagcacgtcgccaggcattttctcggtagcaagaagcgagatgaggagctgtactcgcagacctacgatgagataggagtgatgttcgcctctctgcctaacttcgccgatttttacaccgaggaatccataaacaatggtggaatcgagtgccttcgttttttaaatgagatcatcagtgatttcgattcactgctggataacccaaagttccgggtcataacaaagatcaaaacaattggttccacttatatggccgcatcaggcgtgacgcccgatgtgaataccaacggtttcgcatctagcaataaggaagataaatctgagagggagagatggcagcacttggcggacctcgcggactttgccctggcaatgaaagatacgttaactaatatcaacaaccagagttttaacaattttatgctacggattgggatgaataagggcggagtgctcgcaggcgtgattggagcacgcaaaccccactatgatatatggggaaacaccgttaacgttgccagtaggatggagtctacgggagtgatgggtaatattcaggtcgtggaagaaacacaggtcattctgcgagaatacggatttagattcgttaggcgagggccaatctttgttaaggggaaaggagagctgctcacatttttcctcaaggggagggacaagcttgctacctttcctaatggcccaagtgtcactctaccacaccaagttgtggacaatagttag

SEQ ID NO: 142954 - DNA, 3435 bp, Artificial Sequence
  derived and/or modified sequence
atgcccagaaaccagggcttcagcgagcccgagtacagcgccgagtacagcgccgagtacagcgtgagcctgcccagcgaccccgacagaggcgtgggcagaacccacgagatcagcgtgagaaacagcggcagctgcctgtgcctgcccagattcatgagactgaccttcgtgcccgagagcctggagaacctgtaccagacctacttcaagagacagagacacgagaccctgctggtgctggtggtgttcgccgccctgttcgactgctacgtggtggtgatgtgcgccgtggtgttcagcagcgacaagctggccagcctggccgtggccggcatcggcctggtgctggacatcatcctgttcgtgctgtgcaagaagggcctgctgcccgacagagtgaccagaagagtgctgccctacgtgctgtggctgctgatcaccgcccagatcttcagctacctgggcctgaacttcgccagagcccacgccgccagcgacaccgtgggctggcaggtgttcttcgtgttcagcttcttcatcaccctgcccctgagcctgagccccatcgtgatcatcagcgtggtgagctgcgtggtgcacaccctggtgctgggcgtgaccgtggcccagcagcagcaggaggagctgaagggcatgcagctgctgagagagatcctggccaacgtgttcctgtacctgtgcgccatcgccgtgggcatcatgagctactacatggccgacagaaagcacagaaaggccttcctggaggccagacagagcctggaggtgaagatgaacctggaggagcagagccagcagcaggagaacctgatgctgagcatcctgcccaagcacgtggccgacgagatgctgaaggacatgaagaaggacgagagccagaaggaccagcagcagttcaacaccatgtacatgtacagacacgagaacgtgagcatcctgttcgccgacatcgtgggcttcacccagctgagcagcgcctgcagcgcccaggagctggtgaagctgctgaacgagctgttcgccagattcgacaagctggccgccaagtaccaccagctgagaatcaagatcctgggcgactgctactactgcatctgcggcctgcccgactacagagaggaccacgccgtgtgcagcatcctgatgggcctggccatggtggaggccatcagctacgtgagagagaagaccaagaccggcgtggacatgagagtgggcgtgcacaccggcaccgtgctgggcggcgtgctgggccagaagagatggcagtacgacgtgtggagcaccgacgtgaccgtggccaacaagatggaggccggcggcatccccggcagagtgcacatcagccagagcaccatggactgcctgaagggcgagttcgacgtggagcccggcgacggcggcagcagatgcgactacctggaggagaagggcatcgagacctacctgatcatcgccagcaagcccgaggtgaagaagaccgccacccagaacggcctgaacggcagcgccctgcccaacggcgcccccgccagcagcaagagcagcagccccgccctgatcgagaccaaggagcccaacggcagcgcccacagcagcggcagcaccagcgagaagcccgaggagcaggacgcccaggccgacaaccccagcttccccaaccccagaagaagactgagactgcaggacctggccgacagagtggtggacgccagcgaggacgagcacgagctgaaccagctgctgaacgaggccctgctggagagagagagcgcccaggtggtgaagaagagaaacaccttcctgctgagcatgagattcatggaccccgagatggagaccagatacagcgtggagaaggagaagcagagcggcgccgccttcagctgcagctgcgtggtgctgctgtgcaccgccctggtggagatcctgatcgacccctggctgatgaccaactacgtgaccttcatggtgggcgagatcctgctgctgatcctgaccatctgcagcctggccgccatcttccccagagccttccccaagaagctggtggccttcagcacctggatcgacagaaccagatgggccagaaacacctgggccatgctggccatcttcatcctggtgatggccaacgtggtggacatgctgagctgcctgcagtactacaccggccccagcaacgccaccgccggcatggagaccgagggcagctgcctggagaaccccaagtactacaactacgtggccgtgctgagcctgatcgccaccatcatgctggtgcaggtgagccacatggtgaagctgaccctgatgctgctggtggccggcgccgtggccaccatcaacctgtacgcctggagacccgtgttcgacgagtacgaccacaagagattcagagagcacgacctgcccatggtggccctggagcagatgcagggcttcaaccccggcctgaacggcaccgacagactgcccctggtgcccagcaagtacagcatgaccgtgatggtgttcctgatgatgctgagcttctactacttcagcagacacgtggagaagctggccagaaccctgttcctgtggaagatcgaggtgcacgaccagaaggagagagtgtacgagatgagaagatggaacgaggccctggtgaccaacatgctgcccgagcacgtggccagacacttcctgggcagcaagaagagagacgaggagctgtacagccagacctacgacgagatcggcgtgatgttcgccagcctgcccaacttcgccgacttctacaccgaggagagcatcaacaacggcggcatcgagtgcctgagattcctgaacgagatcatcagcgacttcgacagcctgctggacaaccccaagttcagagtgatcaccaagatcaagaccatcggcagcacctacatggccgccagcggcgtgacccccgacgtgaacaccaacggcttcgccagcagcaacaaggaggacaagagcgagagagagagatggcagcacctggccgacctggccgacttcgccctggccatgaaggacaccctgaccaacatcaacaaccagagcttcaacaacttcatgctgagaatcggcatgaacaagggcggcgtgctggccggcgtgatcggcgccagaaagccccactacgacatctggggcaacaccgtgaacgtggccagcagaatggagagcaccggcgtgatgggcaacatccaggtggtggaggagacccaggtgatcctgagagagtacggcttcagattcgtgagaagaggccccatcttcgtgaagggcaagggcgagctgctgaccttcttcctgaagggcagagacaagctggccaccttccccaacggccccagcgtgaccctgccccaccaggtggtggacaacagctag

SEQ ID NO: 142955 - DNA, 3360 bp, Artificial Sequence
  derived and/or modified sequence
atgcccagaaaccagggcttcagcgagcccgagtacagcgccgagtacagcgccgagtacagcgtgagcctgcccagattcatgagactgaccttcgtgcccgagagcctggagaacctgtaccagacctacttcaagagacagagacacgagaccctgctggtgctggtggtgttcgccgccctgttcgactgctacgtggtggtgatgtgcgccgtggtgttcagcagcgacaagctggccagcctggccgtggccggcatcggcctggtgctggacatcatcctgttcgtgctgtgcaagaagggcctgctgcccgacagagtgaccagaagagtgctgccctacgtgctgtggctgctgatcaccgcccagatcttcagctacctgggcctgaacttcgccagagcccacgccgccagcgacaccgtgggctggcaggtgttcttcgtgttcagcttcttcatcaccctgcccctgagcctgagccccatcgtgatcatcagcgtggtgagctgcgtggtgcacaccctggtgctgggcgtgaccgtggcccagcagcagcaggaggagctgaagggcatgcagctgctgagagagatcctggccaacgtgttcctgtacctgtgcgccatcgccgtgggcatcatgagctactacatggccgacagaaagcacagaaaggccttcctggaggccagacagagcctggaggtgaagatgaacctggaggagcagagccagcagcaggagaacctgatgctgagcatcctgcccaagcacgtggccgacgagatgctgaaggacatgaagaaggacgagagccagaaggaccagcagcagttcaacaccatgtacatgtacagacacgagaacgtgagcatcctgttcgccgacatcgtgggcttcacccagctgagcagcgcctgcagcgcccaggagctggtgaagctgctgaacgagctgttcgccagattcgacaagctggccgccaagtaccaccagctgagaatcaagatcctgggcgactgctactactgcatctgcggcctgcccgactacagagaggaccacgccgtgtgcagcatcctgatgggcctggccatggtggaggccatcagctacgtgagagagaagaccaagaccggcgtggacatgagagtgggcgtgcacaccggcaccgtgctgggcggcgtgctgggccagaagagatggcagtacgacgtgtggagcaccgacgtgaccgtggccaacaagatggaggccggcggcatccccggcagagtgcacatcagccagagcaccatggactgcctgaagggcgagttcgacgtggagcccggcgacggcggcagcagatgcgactacctggaggagaagggcatcgagacctacctgatcatcgccagcaagcccgaggtgaagaagaccgccacccagaacggcctgaacggcagcgccctgcccaacggcgcccccgccagcagcaagagcagcagccccgccctgatcgagaccaaggagcccaacggcagcgcccacagcagcggcagcaccagcgagaagcccgaggagcaggacgcccaggccgacaaccccagcttccccaaccccagaagaagactgagactgcaggacctggccgacagagtggtggacgccagcgaggacgagcacgagctgaaccagctgctgaacgaggccctgctggagagagagagcgcccaggtggtgaagaagagaaacaccttcctgctgagcatgagattcatggaccccgagatggagaccagatacagcgtggagaaggagaagcagagcggcgccgccttcagctgcagctgcgtggtgctgctgtgcaccgccctggtggagatcctgatcgacccctggctgatgaccaactacgtgaccttcatggtgggcgagatcctgctgctgatcctgaccatctgcagcctggccgccatcttccccagagccttccccaagaagctggtggccttcagcacctggatcgacagaaccagatgggccagaaacacctgggccatgctggccatcttcatcctggtgatggccaacgtggtggacatgctgagctgcctgcagtactacaccggccccagcaacgccaccgccggcatggagaccgagggcagctgcctggagaaccccaagtactacaactacgtggccgtgctgagcctgatcgccaccatcatgctggtgcaggtgagccacatggtgaagctgaccctgatgctgctggtggccggcgccgtggccaccatcaacctgtacgcctggagacccgtgttcgacgagtacgaccacaagagattcagagagcacgacctgcccatggtggccctggagcagatgcagggcttcaaccccggcctgaacggcaccgacagactgcccctggtgcccagcaagtacagcatgaccgtgatggtgttcctgatgatgctgagcttctactacttcagcagacacgtggagaagctggccagaaccctgttcctgtggaagatcgaggtgcacgaccagaaggagagagtgtacgagatgagaagatggaacgaggccctggtgaccaacatgctgcccgagcacgtggccagacacttcctgggcagcaagaagagagacgaggagctgtacagccagacctacgacgagatcggcgtgatgttcgccagcctgcccaacttcgccgacttctacaccgaggagagcatcaacaacggcggcatcgagtgcctgagattcctgaacgagatcatcagcgacttcgacagcctgctggacaaccccaagttcagagtgatcaccaagatcaagaccatcggcagcacctacatggccgccagcggcgtgacccccgacgtgaacaccaacggcttcgccagcagcaacaaggaggacaagagcgagagagagagatggcagcacctggccgacctggccgacttcgccctggccatgaaggacaccctgaccaacatcaacaaccagagcttcaacaacttcatgctgagaatcggcatgaacaagggcggcgtgctggccggcgtgatcggcgccagaaagccccactacgacatctggggcaacaccgtgaacgtggccagcagaatggagagcaccggcgtgatgggcaacatccaggtggtggaggagacccaggtgatcctgagagagtacggcttcagattcgtgagaagaggccccatcttcgtgaagggcaagggcgagctgctgaccttcttcctgaagggcagagacaagctggccaccttccccaacggccccagcgtgaccctgccccaccaggtggtggacaacagctag

SEQ ID NO: 142956 - protein, 196 aa, Artificial Sequence
  derived and/or modified sequence
MAAIRKKLVVVGDGACGKTCLLIVFSKDEFPEVYVPTVFENYVADIEVDGKQVELALWDTAGQEDYDRLRPLSYPDTDVILMCFSVDSPDSLENIPEKWVPEVKHFCPNVPIILVANKKDLRSDEHVRTELARMKQEPVRTDDGRAMAVRIQAYDYLECSAKTKEGVREVFETATRAALQKRYGSQNGCINCCKVL

SEQ ID NO: 142957 - DNA, 591 bp, Artificial Sequence
  derived and/or modified sequence
atggccgccatcagaaagaagctggtggtggtgggcgacggcgcctgcggcaagacctgcctgctgatcgtgttcagcaaggacgagttccccgaggtgtacgtgcccaccgtgttcgagaactacgtggccgacatcgaggtggacggcaagcaggtggagctggccctgtgggacaccgccggccaggaggactacgacagactgagacccctgagctaccccgacaccgacgtgatcctgatgtgcttcagcgtggacagccccgacagcctggagaacatccccgagaagtgggtgcccgaggtgaagcacttctgccccaacgtgcccatcatcctggtggccaacaagaaggacctgagaagcgacgagcacgtgagaaccgagctggccagaatgaagcaggagcccgtgagaaccgacgacggcagagccatggccgtgagaatccaggcctacgactacctggagtgcagcgccaagaccaaggagggcgtgagagaggtgttcgagaccgccaccagagccgccctgcagaagagatacggcagccagaacggctgcatcaactgctgcaaggtgctgtag

SEQ ID NO: 142958 - DNA, 591 bp, Artificial Sequence
  derived and/or modified sequence
atggctgccattcgcaaaaagctcgtcgtggtgggggatggtgcgtgtggcaagacttgccttcttatcgtgttctcgaaagacgagttccccgaggtgtatgtgccgaccgtattcgagaactatgtggccgatatcgaagtagatgggaaacaggtggaactagctctttgggacacagctggccaagaagattatgaccgcctgcgcccattgtcttacccagatacagacgtgatcctgatgtgttttagcgtagatagtcccgattcgctagagaatatccccgagaagtgggtcccggaggtgaagcacttctgcccaaacgttccaatcatactggtagcgaataagaaggaccttcggtcagacgaacacgtgcgaacagagctagcccggatgaagcaagagcccgtacgtacagacgatggacgagcgatggctgtgcgcatccaggcctacgactatctagagtgtagcgcaaagactaaggagggcgtgcgtgaagtcttcgagaccgcaacccgcgctgcgcttcagaagaggtatggttctcaaaatggctgtatcaattgttgcaaggtgctgtag

SEQ ID NO: 142959 - DNA, 591 bp, Artificial Sequence
  derived and/or modified sequence
atggccgccatcaggaagaagctggtggtggtgggagatggagcctgtgggaagacctgcctgctgattgtgttcagcaaggatgagttccctgaggtgtatgtgcccaccgtgtttgagaactacgtggccgacatcgaggtggatggcaagcaggtggagctggccctgtgggacacagctggccaggaggactatgaccggctgcggcccctgagctacccagacacagatgtgatcctgatgtgcttctctgtggacagcccagacagcctggagaacatccctgagaagtgggtgcctgaggtgaagcacttctgccccaacgtgcccatcatcctggtggccaacaagaaggacctgcggagtgatgagcacgtgaggacagagctggccaggatgaagcaggagcctgtgaggacagatgatggccgggccatggctgtgcgcatccaggcctatgactacctggagtgcagcgccaagaccaaggagggcgtgcgggaggtgtttgaaacagccaccagggctgccctgcagaagagatatggcagccagaatggctgcatcaactgctgcaaggtgctgtag

SEQ ID NO: 142960 - DNA, 591 bp, Artificial Sequence
  derived and/or modified sequence
atggccgccatccggaagaagctggtggtggtgggcgacggcgcctgcggcaagacgtgcctcctcatcgtgttttcaaaggatgaatttccagaagtgtacgtacccacagtgttcgagaactacgtggcagacatcgaggtggatgggaagcaggtggagctcgcactctgggacactgcaggacaggaagactacgataggctccgtcctctgtcataccccgataccgacgtgatcctgatgtgcttcagtgtggattcaccagactcccttgagaacatccccgagaaatgggttcctgaagttaaacacttctgcccaaacgtgcctatcatcctcgtggctaacaaaaaagatctgaggagcgatgagcacgtccggaccgagctggcccggatgaaacaggagcccgtgaggactgacgatggccgcgcaatggccgtccgcatacaggcatatgattacctggagtgtagcgcaaagaccaaagagggcgtgcgcgaagtgtttgagaccgcaactagggcggccctccagaaacggtacggttctcagaatggttgtattaactgctgcaaggtgctgtag

SEQ ID NO: 142961 - DNA, 591 bp, Artificial Sequence
  derived and/or modified sequence
atggctgccatccgtaagaaattggtcgttgtaggtgatggggcatgtggaaagacctgccttctgattgtcttctctaaagatgagtttcccgaggtttacgtgcccactgtgttcgagaactatgttgctgatatcgaggtggatggtaagcaagtagagttagctttgtgggacaccgctggacaggaagattatgatcgtttaaggcctctcagttaccctgatactgatgtgatccttatgtgcttcagcgtagattcacccgattcactggagaacatacccgagaagtgggtgccggaagttaagcacttctgcccaaacgtccctatcattctggtggccaacaaaaaagacctgcgatccgacgaacacgtgcgcactgaactggccagaatgaagcaggagccagtgaggaccgatgatggcagggccatggctgtgcgtatccaagcatacgattatctggaatgtagcgctaaaaccaaggagggcgttcgagaggtgttcgaaacggccaccagggctgcgctgcagaaaagatacgggtcacaaaatggctgcattaattgttgcaaggtgctgtag

SEQ ID NO: 142962 - DNA, 2366 bp, Artificial Sequence
  derived and/or modified sequence
atctgccaccgcagtctggttggagctgttgtcttgtatgctcagcgaggcccggagagacccgggagagagctaggccgagtccaccgcccgagtctgctgcccgagcccgcgttacgcacaaagccgccgatccccggcctggggtgagcagagcgaccaccgcccgggagcagcgcggcgagacgcacggtgcgccctatgcccccgcgcccccaccgcccccgccgcggcagccgaagcgcagcgagagaacgcgccaccgcggggcccgggtgcagctagcgaccctctcgccacctgcgcgcagcccgaggtgagcagtgagcggcgagcgggagggcagcgaggcgttcgcgggccccctcctgctgcccgggcccggcccgctcatggcggccatccgcaagaagctggtggtggtgggcgacggcgcgtgtggcaagacgtgcctgctgatcgtgttcagtaaggacgagttccccgaggtgtacgtgcccaccgtcttcgagaactatgtggccgacattgaggtggacggcaagcaggtggagctggcgctgtgggacacggcgggccaggaggactacgaccgcctgcggccgctctcctacccggacaccgacgtcattctcatgtgcttctcggtggacagcccggactcgctggagaacatccccgagaagtgggtccccgaggtgaagcacttctgtcccaatgtgcccatcatcctggtggccaacaaaaaagacctgcgcagcgacgagcatgtccgcacagagctggcccgcatgaagcaggaacccgtgcgcacggatgacggccgcgccatggccgtgcgcatccaagcctacgactacctcgagtgctctgccaagaccaaggaaggcgtgcgcgaggtcttcgagacggccacgcgcgccgcgctgcagaagcgctacggctcccagaacggctgcatcaactgctgcaaggtgctatgagggccgcgcccgtcgcgcctgcccctgccggcacggctccccctcctggaccagtcccccgcgagcccggagaaggggagacccgtgtcccacaaggaccccaccggcctgcctggcatctgtctgctgacgcctctggcttgcgccaggacttggcgtgggcaccgggcgcccccatcccagtgtctgtgtgcgtccagctgtgttgcacaggcctgggctccccactgagtgccaagggtcccctgagcatgcttttctgaagagccgggcctcagagtgtgtggctgtgtgtctgttcgactcccctcgccccattttcaccccacccccgcctctgatccccgggggcgagattggcgcgggagtgtggccgcgccccatcagatgttcgcccttcaccagcgggagcttgatatcccttgtctgtaacatagaccccgggtactgcgggaggggagggctgctggggaggatggggggatgttatataaatatagatataattttattttcggagctaagatggtgttatttaagggtggtgatgggtgagcgctctggcccaggctgggccagactcccgcccaagcatgaacaggacttgaccatctttccaacccctggggaagacatttgcaactgacttggggaggacacagcttcagcacagcctctcctgcgggccagcccgctgcgaaccctccaccagctaccggagggaggagggaggatgcgctgtggggttgtttttgccataagcgaactttgtgcctgtcctagaagtgaaaattgttcagtccaagaaactgatgttatttgatttatttaaaggctaaaatttgtttttttattctttgcacaattgtttcattgtttgacacttaatgcactcgtcatttgcatacgacagtagcattctgaccacacttgtacgctgtaacctcatctacttctgatgtttttaaaaaatgacttttaacaaggagagggaaaagaaacccactaaattttgctttgtttccttgaagaatgtggcaacactgttttgtgattttatttgtgcaggtcatgcacacagttttgataaagggcagtaacaagtattggggcctattttttttttttccacaaggcattctctaaagctatgtgaaattttctctgcacctctgtacagagaatacacctgcccctgtatatccttttttcccctcccctccctcccagtggtacttctactaaattgttgtcttgttttttattttttaaataaactgacaaatgacaaaatggtgagcttatgatgtttacataaaagttctataagctgtgtatacagttttttatgtaaaatattaaaagactatgatgatgacattt

SEQ ID NO: 142963 - protein, 418 aa, Artificial Sequence
  derived and/or modified sequence
MGDKGTRVFKKASPNGKLTVYLGKRDFVDHIDLVDPVDGVVLVDPEYLKERRVYVTLTCAFRYGREDLDVLGLTFRKDLFVANVQSFPPAPEDKKPLTRLQERLIKKLGEHAYPFTFEIPPNLPCSVTLQPGPEDTGKACGVDYEVKAFCAENLEEKIHKRNSVRLVIRKVQYAPERPGPQPTAETTRQFLMSDKPLHLEASLDKEIYYHGEPISVNVHVTNNTNKTVKKIKISVRQYADICLFNTAQYKCPVAMEEADDTVAPSSTFCKVYTLTPFLANNREKRGLALDGKLKHEDTNLASSTLLREGANREILGIIVSYKVKVKLVVSRGGLLRGLCFSDVAVELPFTLMHPKPKEEPPHREVPENETPVDTNLIELDTNDDDIVFEDFARQRLKGMKDDKEEEEDGTGSPQLNNR

SEQ ID NO: 142964 - protein, 418 aa, Artificial Sequence
  derived and/or modified sequence
MGDKGTRVFKKASPNGKLTVYLGKRDFVDHIDLVDPVDGVVLVDPEYLKERRVYVTLTCAFRYGREDLDVLGLTFRKDLFVANVQSFPPAPEDKKPLTRLQERLIKKLGEHAYPFTFEIPPNLPCSVTLQPGPEDTGKACGVDYEVKAFCAENLEEKIHKRNSVRLVIRKVQYAPERPGPQPTAETTRQFLMSDKPLHLEASLDKEIYYHGEPISVNVHVTNNTNKTVKKIKISVRQYADICLFNTAQYKCPVAMEEADDTVAPSSTFCKVYTLTPFLANNREKRGLALDGKLKHEDTNLASSTLLREGANREILGIIVSYKVKVKLVVSRGGLLGDLASSDVAVELPFTLMHPKPKEEPPHREVPENETPVDTNLIELDTNDDDIVFEDFARQRLKGMKDDKEEEEDGTGSPQLNNR

SEQ ID NO: 142965 - DNA, 1257 bp, Artificial Sequence
  derived and/or modified sequence
atgggagacaagggaacccgggtattcaagaaggcaagcccaaacggaaaactcacagtgtatctgggcaagcgggatttcgtggaccacattgacttggtcgaccccgtggacggtgtcgttctcgtcgatccagagtatctgaaggaaagacgggtctacgtaacattgacttgtgcatttcggtacggacgggaagatctggatgtgctcggcctgacttttcgtaaggacctgtttgtggcaaatgtccagtctttcccccccgctcctgaagataaaaagcccttgacacgtcttcaggagagactgatcaagaaactcggtgagcatgcctacccatttacctttgaaatacctcctaatctgccatgttccgtcacactccaacccggccctgaggatactggtaaggcctgtggagtggattacgaggtgaaggctttctgtgccgagaacctggaagagaaaatccacaagaggaacagcgtccgcctcgtgatcagaaaagttcagtatgcaccagagaggcctggcccccaacccaccgccgagactacacgacagtttctcatgtcagataagcccttgcatcttgaggcctccctggacaaagagatctattatcatggggagcctataagtgttaacgtgcacgtgactaacaatacaaacaaaaccgtgaagaagattaaaatcagtgtgcggcaatacgccgatatctgcctgtttaacaccgctcagtacaagtgtccggtcgctatggaggaagcagacgatacagtggcccctagttccacattttgcaaagtttatacactcacaccctttctagccaacaaccgcgaaaagcgaggcttggcgctcgatggaaagctgaaacatgaagatacaaacttggcaagttcaacactgctccgagagggggcgaatcgcgaaatccttggaattatagtgtcctacaaagtgaaggtcaaactggtggtctcccggggaggacttctgcgcgggctgtgcttttctgacgttgctgtggagttgcccttcactctgatgcatcctaagcctaaggaggaacccccacacagggaggtgcctgagaatgagaccccagtggatactaaccttatcgagctcgatacaaacgatgatgacatagtttttgaggatttcgctcgccagcggctgaaggggatgaaggatgacaaagaagaagaggaagatgggacaggctcgccgcagcttaataatcggtag

SEQ ID NO: 142966 - DNA, 1257 bp, Artificial Sequence
  derived and/or modified sequence
atgggggacaaagggaccagagtatttaaaaaagcttccccaaatggcaagctgacagtctacctgggcaagagagactttgttgatcatatcgatctggtcgatccagttgacggcgtggttctggtggatccagagtacctcaaggagcgcagggtctacgtcaccctcacttgtgccttcagatacggccgcgaagatctcgatgtcctaggattaactttcaggaaggatttattcgtggcgaatgtgcaatccttcccaccagcccccgaggataaaaaaccattgactaggctgcaggagcggctaatcaaaaaacttggggagcatgcctatccatttacattcgaaattcctccaaatcttccctgttcagttactctccagccagggcccgaggacaccggaaaagcatgcggtgtggactatgaagtcaaggccttttgcgccgaaaacctggaggagaaaattcataagaggaattctgttcgtctcgtgatacgcaaggtgcaatacgcaccggagcgcccaggccctcagcctacagccgagacaaccagacagttcctgatgtcagacaaacctctccatcttgaagcctctctagacaaggagatctactatcacggagagccaatctccgtgaacgtgcacgtcaccaataatacaaataaaaccgtaaagaagatcaagatcagcgtccgacagtatgccgacatatgtctgttcaataccgcccagtacaaatgcccagtggccatggaggaagccgatgatactgttgctccttccagcacattttgcaaggtgtatactcttaccccttttctggcaaataatagggagaaacgcggcctggctcttgacggtaaactcaagcacgaggacacaaatttggcaagctctacactacttagggagggagcaaatcgcgagatcttaggcatcatagtttcatataaggtgaaagtcaagttggtcgtgtcccgaggcggcctattgggcgacctggctagctctgatgtcgccgttgaactgccttttaccttaatgcatcctaaaccgaaggaggaaccaccacaccgtgaagtgccggaaaatgagaccccagtcgataccaatttaatcgaactggatactaacgacgacgacatagtctttgaagattttgcgagacagcggcttaagggaatgaaggacgataaagaggaggaggaagatggtacaggctcccctcagctgaataatcgctag

SEQ ID NO: 142967 - DNA, 1257 bp, Artificial Sequence
  derived and/or modified sequence
atgggagacaagggcaccagggtcttcaagaaggccagccccaacgggaagctgactgtgtacctgggcaagagggactttgtggaccacatcgacctggtggaccctgtggatggagtggtgctggtggaccctgagtacctgaaggagaggagagtgtatgtgaccctgacctgtgccttccgctatggccgggaggacctggatgtgctgggcctgaccttcaggaaggacctgtttgtggccaacgtgcagagcttccccccagcccctgaggacaagaagcccctgacccggctgcaggagcggctcatcaagaagctgggggagcacgcctaccccttcacctttgagatcccccccaacctgccctgcagcgtgaccctgcagcccggccctgaggacaccgggaaggcctgtggggtggactatgaggtgaaggccttctgtgccgagaacctggaggagaagatccacaagagaaattctgtgcggctggtgatcaggaaggtgcagtatgcccctgagcggcccggcccccagcccacagctgagaccacccggcagttcctgatgtctgacaagcccctgcacctggaggccagcctggacaaggagatctactaccacggggagcccatctctgtgaatgtgcacgtgaccaacaacaccaacaagacagtgaagaagatcaagatctctgtgcggcagtatgctgacatctgcctcttcaacacagcccagtacaagtgccctgtggccatggaggaggctgatgacacagtggcccccagcagcaccttctgcaaggtgtacaccctgacccccttcctggccaacaaccgggagaagaggggcctggccctggatggcaagctgaagcatgaggacaccaacctggccagcagcaccctgctgcgggagggcgccaaccgggagatcctgggcatcatcgtgtcctacaaggtgaaggtgaagctggtggtgtcccggggcggcctgctgcggggcctgtgcttcagtgatgtggccgtggagctgcccttcaccctgatgcaccccaagcccaaggaggagcccccccaccgggaggtgcctgaaaatgagacccctgtggacaccaacctgattgagctggacaccaatgatgatgacatcgtgtttgaagattttgcccggcagaggctgaagggcatgaaggatgacaaggaggaggaggaggatggcaccggcagcccccagctgaacaacagatag

SEQ ID NO: 142968 - DNA, 1257 bp, Artificial Sequence
  derived and/or modified sequence
atgggagacaagggcaccagggtcttcaagaaggccagccccaacgggaagctgactgtgtacctgggcaagagggactttgtggaccacatcgacctggtggaccctgtggatggagtggtgctggtggaccctgagtacctgaaggagaggagagtgtatgtgaccctgacctgtgccttccgctatggccgggaggacctggatgtgctgggcctgaccttcaggaaggacctgtttgtggccaacgtgcagagcttccccccagcccctgaggacaagaagcccctgacccggctgcaggagcggctcatcaagaagctgggggagcacgcctaccccttcacctttgagatcccccccaacctgccctgcagcgtgaccctgcagcccggccctgaggacaccgggaaggcctgtggggtggactatgaggtgaaggccttctgtgccgagaacctggaggagaagatccacaagagaaattctgtgcggctggtgatcaggaaggtgcagtatgcccctgagcggcccggcccccagcccacagctgagaccacccggcagttcctgatgtctgacaagcccctgcacctggaggccagcctggacaaggagatctactaccacggggagcccatctctgtgaatgtgcacgtgaccaacaacaccaacaagacagtgaagaagatcaagatctctgtgcggcagtatgctgacatctgcctcttcaacacagcccagtacaagtgccctgtggccatggaggaggctgatgacacagtggcccccagcagcaccttctgcaaggtgtacaccctgacccccttcctggccaacaaccgggagaagaggggcctggccctggatggcaagctgaagcatgaggacaccaacctggccagcagcaccctgctgcgggagggcgccaaccgggagatcctgggcatcatcgtgtcctacaaggtgaaggtgaagctggtggtgtcccggggcggcctgctgggggacctggccagcagtgatgtggccgtggagctgcccttcaccctgatgcaccccaagcccaaggaggagcccccccaccgggaggtgcctgaaaatgagacccctgtggacaccaacctgattgagctggacaccaatgatgatgacatcgtgtttgaagattttgcccggcagaggctgaagggcatgaaggatgacaaggaggaggaggaggatggcaccggcagcccccagctgaacaacagatag

SEQ ID NO: 142969 - DNA, 1257 bp, Artificial Sequence
  derived and/or modified sequence
atgggcgacaagggcacccgggtgttcaagaaggccagccccaacggaaaactgacagtttacctcggaaagagggacttcgtggatcacatcgatcttgttgatccggtagatggtgttgttctagtggatccagaatatctgaaagagaggagagtttatgtgaccttgacgtgtgctttccgatatgggcgcgaagacctggatgtgcttgggcttacctttaggaaggatcttttcgttgctaacgtgcagagtttccctccagctcccgaggacaaaaaacccctgactcgactccaggagcgactaataaaaaaattaggtgagcatgcctacccttttacctttgagatcccccccaatctgccatgctcggttactttgcaacctggcccagaggataccggaaaagcctgtggtgtagattacgaagtgaaagctttctgcgccgagaacttggaagaaaagatccacaagcggaactccgtccgtctggttatcaggaaggttcagtacgctccagagcgcccagggccccaaccaacagcggaaaccaccagacagtttctgatgtcggataagcccctgcatctggaagcatccctggataaggaaatttattaccacggtgagccaatttcagttaacgtgcacgttacaaataataccaataaaacagtcaagaagattaagatctctgtgcggcagtacgcagatatttgtttgttcaatacagctcagtataaatgcccagttgcaatggaggaggcagacgataccgtagccccgtcatcgactttctgcaaagtgtacacattaacccctttcctggccaataatagagagaagagaggcctcgccctcgacggcaaactgaagcacgaagataccaacttagccagctccacactgttgcgggagggagcaaacagggaaatactgggaataatcgtctcatacaaagtgaaagtcaagctcgtagtgtcccggggcggactgctgcgaggtctgtgtttctctgacgtggcagtggagctccctttcactctgatgcaccccaagcccaaggaggaacctcctcatagggaggtgccagagaacgagacccctgtcgatactaacttgatcgagctggacactaacgacgacgatatcgtgttcgaggatttcgctcggcagcgtctgaagggcatgaaggatgataaagaggaagaggaggatggtaccggcagcccacaactcaacaacagatag

SEQ ID NO: 142970 - DNA, 1257 bp, Artificial Sequence
  derived and/or modified sequence
atgggcgacaagggcacccgggtgttcaagaaggccagccccaacggtaaactgactgtgtacttgggaaaacgggatttcgtggaccatatagacttggtcgacccagttgatggagtggtgctggtagatcccgagtatctgaaggagcgaagggtgtacgttactcttacatgcgcgttcaggtacgggcgcgaagacttagatgtgctgggtctcactttcagaaaagacctgtttgtggccaatgtgcaatcttttccaccagccccagaggataaaaagccgctcacgagattacaggaaagactaattaagaagctgggggaacacgcttatccctttaccttcgagatacctcccaatctgccctgcagcgtaacactgcagcctggaccggaggataccggaaaggcctgtggggtggattacgaggtgaaggcgttctgtgccgagaacctggaggagaaaatccataaacgaaattcagtgagactcgtgatcagaaaggtgcagtatgcgccggagcggcccggaccacagcctacagctgaaactacgcggcaatttttgatgagcgataaacccctgcatctcgaggcttctctggacaaggaaatctattatcacggcgagcctatcagcgtaaatgtgcacgtgaccaataataccaataaaacggttaaaaagataaagatatctgtacgacagtacgccgatatctgcctgttcaacactgctcagtacaaatgcccggtggctatggaggaggccgatgataccgttgccccttcttccaccttttgtaaagtatataccctgacccctttcctggcgaataacagggagaaaagaggcctggctttggacggtaaattgaaacacgaggatactaacctggcaagcagtactctgttgcgagaaggagcgaacagggaaatcctgggcatcatcgtgtcatacaaagttaaggtcaagctggtggtgtcacgcggggggctgctgggggatctggctagcagtgatgttgcagtggaactcccattcacgctgatgcacccaaagcccaaggaggagcccccccacagagaagtgcccgagaacgaaactcccgtggacaccaacctgattgaactcgataccaatgatgacgatattgtgttcgaagacttcgcgaggcaaaggctgaaggggatgaaagatgacaaggaagaagaagaggatggcacgggtagtcctcaactgaataacagatag

SEQ ID NO: 142971 - DNA, 1257 bp, Artificial Sequence
  derived and/or modified sequence
atgggggataagggcaccagagtgtttaagaaagcaagcccaaacggtaaactgaccgtgtatctcggaaaacgagattttgtggaccacattgacctggtagatcccgttgacggagtggtgttggtagatcctgagtatttaaaggagagaagagtttatgtgacattgacgtgcgcatttagatatggccgagaagacctcgacgttttaggccttacttttcgaaaagacttgtttgtcgcaaacgtgcaaagttttcctccggctcctgaagataaaaaaccacttacacgtttgcaagagcggctcattaagaaactgggagagcacgcttatccttttacttttgaaataccccctaacctcccttgcagcgtaacactgcaacccggacctgaagacactggtaaagcttgcggcgtcgattatgaggttaaagcattttgtgcagaaaatctagaggagaaaattcataagaggaactcggtaaggctcgtgatacgaaaagtccagtatgctcccgaacgacctggacctcagcctaccgcggaaaccaccagacaattcctgatgagcgacaaacccctccacctcgaagcctcacttgacaaggaaatctactaccatggagagcccataagtgttaatgtgcacgtcacaaacaataccaataaaactgttaaaaaaatcaaaatcagtgtgaggcagtacgcagacatatgcctgtttaatactgctcaatacaaatgtcccgtggcaatggaggaagccgacgacacagtggccccaagtagcactttttgtaaggtttacaccctcacacccttcttggccaacaacagagagaagcgcggattggccctggacggtaaactcaaacatgaagacaccaacctcgcatcgtctactctgctgcgggagggagcgaaccgggagattcttggcattattgtctcttacaaggtgaaagtaaaactagttgtgtccaggggcggactcctgagaggactgtgcttttctgatgtagcggtcgagctcccctttacgttaatgcatccaaaacctaaggaagagcccccacacagagaggttccggagaacgagactccagtcgacactaatctgatcgagttggataccaatgacgatgacattgtgttcgaggattttgccagacaaagactgaaaggtatgaaggatgacaaagaggaggaggaggatggaactggctctccacagctcaacaataggtag

SEQ ID NO: 142972 - DNA, 1257 bp, Artificial Sequence
  derived and/or modified sequence
atgggagacaaaggcacccgcgtttttaagaaggcatcacccaacggcaagctgacagtttacctcggaaagcgcgattttgtcgatcacatagacctggtagacccggtggacggagtggtgttggtggaccccgaatatttgaaggaaaggcgcgtgtacgtgaccttgacatgcgccttcagatatggtcgggaggatcttgacgtgctgggactcaccttcagaaaggacttatttgtcgctaacgtccagtcctttccgccagccccagaggacaaaaaacctctgacaaggctacaggagaggctgattaagaaattaggcgaacacgcatacccctttactttcgagatccctccaaacctgccttgttccgttactctgcagcctggacctgaagatacagggaaagcctgtggagtggactatgaagtgaaggctttttgcgcggagaaccttgaggaaaagatccacaaaaggaactctgttagactggtaatacggaaggtgcagtatgcgcctgagcgccctgggccacagcccactgcagaaaccacacgccagttcctgatgtcagacaaacctctgcacctcgaagcctctctggataaagagatttattaccacggcgagcctattagcgtgaacgtgcacgtgactaacaataccaacaaaacagttaaaaaaatcaaaatctctgtccgccaatacgcagacatctgtttattcaacacagcccagtacaagtgtcctgtggccatggaggaagcagatgacacagtcgcacccagctcaactttctgcaaagtgtataccttgacaccatttctggccaacaatagggagaaaagaggcctcgcactggacggtaagctaaaacacgaggatacgaacctggccagtagtacccttctgcgggagggtgccaacagagaaatcctgggaatcatcgtttcttataaagtgaaggtgaaactcgttgtatcacgcggagggctgcttggcgatctggccagcagcgatgtggcagtagaactgccattcaccctcatgcacccgaagcccaaagaagagccaccccacagggaggtcccagaaaatgaaaccccggttgataccaatctgattgaacttgatacaaatgatgacgatatagtatttgaggattttgccaggcagaggctgaaaggaatgaaagatgataaggaagaggaggaggacggcacaggatccccccagctaaacaacaggtag

SEQ ID NO: 142973 - DNA, 2204 bp, Artificial Sequence
  derived and/or modified sequence
accccgcgcggttccacgcccctggccgcggcccgggcgctgcgctgctcgacgcggcgggcggcgggcggggaccgggggcgggggcggcggcggcggccgggagagcggaggaggcggagcagggagccgggagcgggctggcccgcgctcctcctgctggctggggattttccagcctgggcgctgacgccgcggacctccctgcgaccgtcgcggaccatgggcgacaaagggacccgagtgttcaagaaggccagtccaaatggaaagctcaccgtctacctgggaaagcgggactttgtggaccacatcgacctcgtggaccctgtggatggtgtggtcctggtggatcctgagtatctcaaagagcggagagtctatgtgacgctgacctgcgccttccgctatggccgggaggacctggatgtcctgggcctgacctttcgcaaggacctgtttgtggccaacgtacagtcgttcccaccggcccccgaggacaagaagcccctgacgcggctgcaggaacgcctcatcaagaagctgggcgagcacgcttaccctttcacctttgagatccctccaaaccttccatgttctgtgacactgcagccggggcccgaagacacggggaaggcttgcggtgtggactatgaagtcaaagccttctgcgcggagaatttggaggagaagatccacaagcggaattctgtgcgtctggtcatccggaaggttcagtatgccccagagaggcctggcccccagcccacagccgagaccaccaggcagttcctcatgtcggacaagcccttgcacctagaagcctctctggataaggagatctattaccatggagaacccatcagcgtcaacgtccacgtcaccaacaacaccaacaagacggtgaagaagatcaagatctcagtgcgccagtatgcagacatctgccttttcaacacagctcagtacaagtgccctgttgccatggaagaggctgatgacactgtggcacccagctcgacgttctgcaaggtctacacactgacccccttcctagccaataaccgagagaagcggggcctcgccttggacgggaagctcaagcacgaagacacgaacttggcctctagcaccctgttgagggaaggtgccaaccgtgagatcctggggatcattgtttcctacaaagtgaaagtgaagctggtggtgtctcggggcggccttctcaggggtctctgtttcagcgacgtggccgtggaactgcccttcaccctaatgcaccccaagcccaaagaggaacccccgcatcgggaagttccagagaacgagacgccagtagataccaatctcatagaacttgacacaaatgatgacgacattgtatttgaggactttgctcgccagagactgaaaggcatgaaggatgacaaggaggaagaggaggatggtaccggctctccacagctcaacaacagatagacgggccggccctgcctccacgtggctccggctccactctcgtgcactcggatgcttactcgtcttcttcctgttctggtttcttttcccctttgttcttccagtttctaccagggggccccgtgggcttccagatcacggtgatgaacctctggcctcaggattggccccacatcaccacgccaacaggaccacagcgcactggctccaccccatctctgccatctccactcccctccttttcatgctgtctcccagaaaagctgccagggctctggccttggaattggacttgagatggggagcagacaggggaggatggggaatgtgggacacggtgtggtgggcatgagggcttggaggggtggggatgagggctcaagacacgagagaagatgtccacggtcccaggtggttaacaaagttctggcagctaaaagatgaccgcgttgaaggccacctccttctggctgggaggggcagaactgtggacagattctcaatgcctttttgaagttctgacccaccaaagaccttctgccttcaccctcctccccacctgatgtccctctgtgtctgatagtgatgttggtgaaagttcgtagaccccaggagtagagaaaagcaactggactgactttcttaccagcagttacctagactgaggcaagctgtgtggactcacccaagtatatttcagtactgtcaggctgtgacatcttagc

SEQ ID NO: 142974 - DNA, 3336 bp, Artificial Sequence
  derived and/or modified sequence
gggagccgggagcgggctggcccgcgctcctcctgctggctggggattttccagcctgggcgctgacgccgcggacctccctgcgaccgtcgcggaccatgggcgacaaagggacccgagtgttcaagaaggccagtccaaatggaaagctcaccgtctacctgggaaagcgggactttgtggaccacatcgacctcgtggaccctgtggatggtgtggtcctggtggatcctgagtatctcaaagagcggagagtctatgtgacgctgacctgcgccttccgctatggccgggaggacctggatgtcctgggcctgacctttcgcaaggacctgtttgtggccaacgtacagtcgttcccaccggcccccgaggacaagaagcccctgacgcggctgcaggaacgcctcatcaagaagctgggcgagcacgcttaccctttcacctttgagatccctccaaaccttccatgttctgtgacactgcagccggggcccgaagacacggggaaggcttgcggtgtggactatgaagtcaaagccttctgcgcggagaatttggaggagaagatccacaagcggaattctgtgcgtctggtcatccggaaggttcagtatgccccagagaggcctggcccccagcccacagccgagaccaccaggcagttcctcatgtcggacaagcccttgcacctagaagcctctctggataaggagatctattaccatggagaacccatcagcgtcaacgtccacgtcaccaacaacaccaacaagacggtgaagaagatcaagatctcagtgcgccagtatgcagacatctgccttttcaacacagctcagtacaagtgccctgttgccatggaagaggctgatgacactgtggcacccagctcgacgttctgcaaggtctacacactgacccccttcctagccaataaccgagagaagcggggcctcgccttggacgggaagctcaagcacgaagacacgaacttggcctctagcaccctgttgagggaaggtgccaaccgtgagatcctggggatcattgtttcctacaaagtgaaagtgaagctggtggtgtctcggggcggcctgttgggagatcttgcatccagcgacgtggccgtggaactgcccttcaccctaatgcaccccaagcccaaagaggaacccccgcatcgggaagttccagagaacgagacgccagtagataccaatctcatagaacttgacacaaatgatgacgacattgtatttgaggactttgctcgccagagactgaaaggcatgaaggatgacaaggaggaagaggaggatggtaccggctctccacagctcaacaacagatagacgggccggccctgcctccacgtggctccggctccactctcgtgcactcggatgcttactcgtcttcttcctgttctggtttcttttcccctttgttcttccagtttctaccagggggccccgtgggcttccagatcacggtgatgaacctctggcctcaggattggccccacatcaccacgccaacaggaccacagcgcactggctccaccccatctctgccatctccactcccctccttttcatgctgtctcccagaaaagctgccagggctctggccttggaattggacttgagatggggagcagacaggggaggatggggaatgtgggacacggtgtggtgggcatgagggcttggaggggtggggatgagggctcaagacacgagagaagatgtccacggtcccaggtggttaacaaagttctggcagctaaaagatgaccgcgttgaaggccacctccttctggctgggaggggcagaactgtggacagattctcaatgcctttttgaagttctgacccaccaaagaccttctgccttcaccctcctccccacctgatgtccctctgtgtctgatagtgatgttggtgaaagttcgtagaccccaggagtagagaaaagcaactggactgactttcttaccagcagttacctagactgaggcaagctgtgtggactcacccaagtatatttcagtactgtcaggctgtgacatcttagctaccttgtatttcaagtgcatggccctgtctagagatatgcacagagagaaaagcagagggagggagggagggggtcttcagcaagcaccagcccccagcagagtgagctgaagctcctgaggagggttcccgaaggggggcgctcagagatgggggcagggggcggggagaggagagtctgccttatgtcccttccttgtggacttcacatggtcatgcaggaagtgaggatgggtgtccagcgggggccgaggccactagtatcctcctgcttccccctgccattctccagggctggactgaccctatggactgggagagagtgcctgaggccaccatgccacagtcaaagggggtcctatctcagaaggtggcagcatccactgagatatcctcacccgaagggaaggaggctgctgggtagcaaataagccccttcttttcttggtgagttgatgacctccaatagctcccagtgtcatgggtacccagtacgcattagctggtgttgggttgattgagacctggggcagttcctggggcaagaagccagatgggagatgagatagaaagtgttaggagttatcctctttgcctggcctttgagaataacttactgtgtgactttgggcaagttccttccccactctgggcctcagtttctcacttgggaaagcaaggagtttgaccagatgatcacaatgggccttcctagctctggccaccaagaatttgtgaacattagagctcctggtctggtgggtagagccagagctgctgactggtctctctgcctccagaggggatttattggacctcagaggtggcagggccctatggagcaccaactgccctcaaccccaccctgtgcccaagactgggaagggattgatgtcaggctgtggccataggtagcatgagttgcccaaggagggacagagcatatctttgctgaggcttggctgaggggcttatgatagggcttgcagtacctcacagccccctgtgggcacagacaccctgaggtttacccaggcaaatatattgattagcaggacaagggctctctcctcagtttctgctcccttccatctctctcccatacttgtctgaaaagggagacaaaaaatcttatacaagtggcatctcaatcctttccagtccagcacctcctggggcaggcagtgtgacttatttcctgtggtgaaatcacctgtttcacaagcctggcagcgcgacttctgagtctcatgac

SEQ ID NO: 142975 - DNA, 1257 bp, Artificial Sequence
  derived and/or modified sequence
atgggcgacaagggcaccagagtgttcaagaaggccagccccaacggcaagctgaccgtgtacctgggcaagagagacttcgtggaccacatcgacctggtggaccccgtggacggcgtggtgctggtggaccccgagtacctgaaggagagaagagtgtacgtgaccctgacctgcgccttcagatacggcagagaggacctggacgtgctgggcctgaccttcagaaaggacctgttcgtggccaacgtgcagagcttcccccccgcccccgaggacaagaagcccctgaccagactgcaggagagactgatcaagaagctgggcgagcacgcctaccccttcaccttcgagatcccccccaacctgccctgcagcgtgaccctgcagcccggccccgaggacaccggcaaggcctgcggcgtggactacgaggtgaaggccttctgcgccgagaacctggaggagaagatccacaagagaaacagcgtgagactggtgatcagaaaggtgcagtacgcccccgagagacccggcccccagcccaccgccgagaccaccagacagttcctgatgagcgacaagcccctgcacctggaggccagcctggacaaggagatctactaccacggcgagcccatcagcgtgaacgtgcacgtgaccaacaacaccaacaagaccgtgaagaagatcaagatcagcgtgagacagtacgccgacatctgcctgttcaacaccgcccagtacaagtgccccgtggccatggaggaggccgacgacaccgtggcccccagcagcaccttctgcaaggtgtacaccctgacccccttcctggccaacaacagagagaagagaggcctggccctggacggcaagctgaagcacgaggacaccaacctggccagcagcaccctgctgagagagggcgccaacagagagatcctgggcatcatcgtgagctacaaggtgaaggtgaagctggtggtgagcagaggcggcctgctgagaggcctgtgcttcagcgacgtggccgtggagctgcccttcaccctgatgcaccccaagcccaaggaggagcccccccacagagaggtgcccgagaacgagacccccgtggacaccaacctgatcgagctggacaccaacgacgacgacatcgtgttcgaggacttcgccagacagagactgaagggcatgaaggacgacaaggaggaggaggaggacggcaccggcagcccccagctgaacaacagatag

SEQ ID NO: 142976 - DNA, 1257 bp, Artificial Sequence
  derived and/or modified sequence
atgggcgacaagggcaccagagtgttcaagaaggccagccccaacggcaagctgaccgtgtacctgggcaagagagacttcgtggaccacatcgacctggtggaccccgtggacggcgtggtgctggtggaccccgagtacctgaaggagagaagagtgtacgtgaccctgacctgcgccttcagatacggcagagaggacctggacgtgctgggcctgaccttcagaaaggacctgttcgtggccaacgtgcagagcttcccccccgcccccgaggacaagaagcccctgaccagactgcaggagagactgatcaagaagctgggcgagcacgcctaccccttcaccttcgagatcccccccaacctgccctgcagcgtgaccctgcagcccggccccgaggacaccggcaaggcctgcggcgtggactacgaggtgaaggccttctgcgccgagaacctggaggagaagatccacaagagaaacagcgtgagactggtgatcagaaaggtgcagtacgcccccgagagacccggcccccagcccaccgccgagaccaccagacagttcctgatgagcgacaagcccctgcacctggaggccagcctggacaaggagatctactaccacggcgagcccatcagcgtgaacgtgcacgtgaccaacaacaccaacaagaccgtgaagaagatcaagatcagcgtgagacagtacgccgacatctgcctgttcaacaccgcccagtacaagtgccccgtggccatggaggaggccgacgacaccgtggcccccagcagcaccttctgcaaggtgtacaccctgacccccttcctggccaacaacagagagaagagaggcctggccctggacggcaagctgaagcacgaggacaccaacctggccagcagcaccctgctgagagagggcgccaacagagagatcctgggcatcatcgtgagctacaaggtgaaggtgaagctggtggtgagcagaggcggcctgctgggcgacctggccagcagcgacgtggccgtggagctgcccttcaccctgatgcaccccaagcccaaggaggagcccccccacagagaggtgcccgagaacgagacccccgtggacaccaacctgatcgagctggacaccaacgacgacgacatcgtgttcgaggacttcgccagacagagactgaagggcatgaaggacgacaaggaggaggaggaggacggcaccggcagcccccagctgaacaacagatag

SEQ ID NO: 142977 - DNA, 1773 bp, Artificial Sequence
  derived and/or modified sequence
atgcggccaaggagacctctggtgtttatgtctctcgtttgcgccttgcttaatacatgtcaggctcaccgagtgcacgatgacaaacctaacatagtgttgatcatggtggatgatttaggtattggcgatttagggtgttacggtaacgacaccatgcgcacccctcatattgaccgcttggcccgagaaggcgtgagactgacgcagcacatcagcgccgcctctctgtgttctccctccagatctgctttcctgacaggtcgataccctataaggagtggaatggtatcttctggaaatcgacgcgtgattcagaatctggctgtgcccgctggtttgcctttgaacgagactacgctggctgcgctgttgaaaaagcaaggatacagcactggattgattggcaaatggcaccaggggcttaactgcgacagccggtccgatcagtgccatcacccttacaattatggctttgactactactacggaatgccctttaccctggtagatagttgttggcccgatccatcgaggaacacagaactggcatttgagagccagctgtggctgtgcgtgcagctggtcgcgatcgccatcttgaccctcacatttggtaaactgtctgggtgggtctcggtgccctggctgctgatctttagcatgattctgtttatattcctgctcggctatgcatggttctcatcacatacctccccactctattgggactgtcttcttatgcgaggtcatgagatcaccgagcagccaatgaaagctgagagggctggctccataatggtgaaggaggcgataagctttcttgaacggcacagtaaggagacctttctcttgttcttttcctttttgcacgtacacacccctctgcctacaaccgacgatttcaccggaacatccaaacacggactgtacggcgacaatgtcgaggagatggatagcatggttggtaagatcctggacgccattgacgacttcggcttgcgaaataataccctcgtgtattttacaagtgaccacgggggccacctggaggcaaggcgaggacacgcccaactgggcggatggaacgggatctacaaagggggcaaaggcatggggggatgggagggaggcatacgagtcccggggatcgtgcgttggccgggcaaggttccagcaggcagactgataaaagagccgacaagtttaatggatattctgccaacagtcgcatccgtgagcggcggctcccttccacaggatagggtcattgatgggcgggacctcatgcccctactccagggaaacgtcagacatagcgagcacgagtttctctttcattattgcgggtcctatctccatgcagttagatggatacctaaagatgatagcgggtcagtttggaaggcgcattatgtgacccctgttttccagcccccagcctccggaggctgttatgtgaccagcctgtgtagatgttttggagagcaagtgacttaccacaatccaccactactgttcgacctgtctcgggaccctagtgaatcaacccctctgactccagccactgagcctctgcacgatttcgtgataaaaaaagtggcaaacgctcttaaggagcatcaagagactatcgtgcccgtcacataccagctaagcgagcttaatcaggggaggacctggctcaagccatgctgcggggtgtttcccttttgcctgtgcgacaaggaagaggaggtcagtcagccacgaggccccaatgaaaagcggtag

SEQ ID NO: 142978 - DNA, 1773 bp, Artificial Sequence
  derived and/or modified sequence
atgcgcccacgtcgcccactggtgtttatgagcctggtgtgcgcactgctaaatacctgccaggcccacagggtccatgacgataaaccaaatatcgtgctcataatggtcgacgacctaggcatcggagacttgggttgttacggcaatgacaccatgcgcacgcctcatattgaccgacttgcacgcgagggagtaagactcacccagcacatcagcgccgcctccctgtgcagccctagtagatctgccttcctgaccggacgataccctatacgctctggtatggtaagctcaggaaataggagagtcatccaaaatttggcggttcccgccggattgcccctgaatgaaaccacactcgccgctctgcttaaaaagcagggatacagtacgggtcttataggcaaatggcatcagggcctgaattgtgattctagatcggatcaatgccaccacccttataactatggctttgattactattatggtatgccatttacactcgttgactcatgctggccagatcccagtcgcaataccgaattggccttcgaatcacagctctggctgtgcgtccagcttgtggccattgctatactgacactcacattcggcaaactatctggctgggttagtgtcccttggctgttgattttctcaatgatcttgtttatctttctcctgggctatgcttggtttagttctcacacctcgccattatactgggactgtcttctgatgcggggccatgagattaccgaacaaccaatgaaggccgaaagagccggaagcatcatggttaaggaggcgatttccttcctcgagcggcatagcaaggaaacctttctcctgttttttagcttcctacacgtccacaccccgcttcctaccacagatgacttcactggcacttctaaacatggactctatggtgataacgttgaagaaatggattcaatggtgggtaaaatactagacgccattgacgactttgggttgcgaaacaatacgctcgtttactttacttctgaccacggtggtcacctggaggcgaggcgtgggcatgcccagctgggagggtggaatggaatatacaaagggggcaagggcatgggcggctgggaaggcgggatccgtgtacccgggatcgtccgatggccaggcaaggtacccgcgggcagactgatcaaggaaccaacaagtctgatggatatcctgccaaccgtggcctccgtttcaggcgggtcccttccccaggaccgcgtaatagatggacgagatcttatgcccctgctgcagggtaacgtgcggcactccgagcatgagttcctgttccactattgcggcagttatttgcacgccgtacggtggatccccaaagacgactctggaagtgtgtggaaggcacattacgttacgcccgtcttccaaccccccgcaagtggcgggtgttacgttaccagcctctgtcgctgttttggtgagcaggtcacctaccacaaccccccgttacttttcgatctctcgagggacccatcggagtccacccctctgacacccgccacagagccactgcacgatttcgtaatcaagaaagtggcaaacgcgctgaaggagcatcaagaaaccatcgtccctgtgacttatcagctcagcgagctgaaccaggggagaacatggctgaagccatgttgcggcgtttttcccttctgcctgtgtgataaggaggaggaggtctcacaaccaagaggacccaatgaaaaacggtag

SEQ ID NO: 142979 - DNA, 1773 bp, Artificial Sequence
  derived and/or modified sequence
atgaggcctcgtcggcctttggtgtttatgtcattagtttgtgctctgcttaatacctgtcaggctcatcgggtgcacgatgataagccaaacattgtgcttatcatggtggacgacctgggtatcggtgacctaggttgttatggaaatgatactatgcggactccccatatcgatcgacttgcaagggagggcgtgcggcttacccaacacatatctgcagcctccttgtgctcacccagtcggtcggctttccttacagggaggtatccaataaggagcggcatggtcagcagtgggaaccggcgggtgattcagaatctcgccgtacccgctggcctgcctttgaatgagacaacgttggccgctctgcttaaaaagcagggatactctacaggattgattggaaaatggcaccagggcctcaactgcgatagtagaagcgaccagtgtcatcacccctataattatggctttgattactattacggtatgcctttcaccctggtggactcttgctggcctgacccctcccgtaatactgagctggcttttgaatcgcaactatggctatgtgtgcagctggttgccattgccatcctgaccttgacattcggtaagctctcagggtgggtcagcgttccttggctgctcatattctctatgatcctgtttattttcctgttaggttatgcgtggttttcatcccatacgagtccattgtactgggactgcctgctgatgcgcgggcacgaaattaccgagcaacccatgaaggcagagcgagcagggagcattatggtaaaagaggccatctcgtttctggaacggcatagcaaggagacgtttctcctgttctttagctttcttcacgttcatacccccttgccgaccacagacgattttaccggtactagcaagcatggcctttatggggataacgtggaggaaatggactctatggttggcaagatattggatgcaatagatgatttcggccttcggaacaacacactggtctattttacctccgaccatggtggacacctggaagcaagacggggacatgctcagcttggaggctggaacgggatatataaggggggcaaaggaatgggaggctgggagggcgggatccgggttcctggaatcgtccggtggcccggaaaggttcccgctggacggctgatcaaggaacctacctcactgatggacattctcccaactgttgcgtcagtgagtggaggatcgttgccacaggaccgggtaatcgacggtagagacctgatgccactgctgcaagggaacgtccgacactccgagcacgagttccttttccactattgcgggtcctacttgcacgcagttcggtggatccccaaggacgattcagggtcagtgtggaaggcccattatgtaactccagtcttccaaccgcccgcttccggtgggtgctatgtgacttccctgtgccgttgcttcggcgaacaggtcacctaccacaacccacctcttttattcgacctgtctcgcgacccttccgaaagcacgccgctgaccccagctaccgaacctctgcatgatttcgttataaaaaaggtggcgaacgccctgaaggaacatcaagaaactatcgtgccagtgacctatcagctgtccgaattaaaccaggggcgcacatggctgaaaccatgttgtggcgtttttcccttttgtctgtgcgacaaagaggaggaggtgtctcagcctaggggccctaacgagaagaggtag

SEQ ID NO: 142980 - DNA, 1773 bp, Artificial Sequence
  derived and/or modified sequence
atgaggccccggcggcccctggtgttcatgagcctggtgtgtgccctgctgaacacctgccaggcccaccgggtgcatgatgacaagcccaacatcgtgctgatcatggtggatgacctgggcatcggggacctgggctgctatggaaatgacaccatgaggaccccccacatcgaccggctggcccgggagggcgtgcggctgacccagcacatctctgctgccagcctgtgcagccccagccgcagcgccttcctgaccggccgctaccccatccgcagcggcatggtgagcagcggcaacagaagagtcatccagaacctggccgtgcctgctggcctgcccctgaatgagaccaccctggccgccctgctgaagaagcagggctacagcacaggcctgattggcaagtggcaccagggcctgaactgtgacagcagaagtgaccagtgccaccacccctacaactacggctttgactactactacggcatgcccttcaccctggtggacagctgctggccagaccccagcaggaacacagagctggcctttgagagccagctgtggctgtgtgtgcagctggtggccatcgccatcctgaccctgaccttcggcaagctgagcggctgggtgtctgtgccctggctgctgatcttctccatgatcctcttcatcttcctgctgggctacgcctggttcagcagccacaccagccccctgtactgggactgcctgctgatgaggggccacgagatcacagagcagcccatgaaggccgagagagctggcagcatcatggtgaaggaggccatctccttcctggagcggcacagcaaggagaccttcctgctcttcttctccttcctgcacgtgcacacccccctgcccaccacagatgacttcaccggcaccagcaagcacggcctgtatggagacaacgtggaggagatggacagcatggtgggcaagatcctggatgccattgatgactttggcctgaggaacaacaccctggtgtacttcaccagtgaccacggcggccacctggaggcccggcggggccacgcccagctgggcggctggaatggcatctacaagggcggcaagggcatgggcggctgggagggcggcatccgggtgcccggcatcgtgcgctggccaggcaaggtgcctgctggccgcctcatcaaggagcccaccagcctgatggacatcctgcccaccgtggcctctgtgtctgggggcagcctgccccaggacagagtgattgatggccgggacctgatgcccctgctgcagggcaatgtgcgccacagcgagcacgagttcctgttccactactgcggcagctacctgcatgctgtgcgctggatccccaaggatgacagcggctctgtgtggaaggcccactacgtgacccctgtgttccagcccccagccagcggcggctgctacgtgaccagcctgtgccgctgcttcggggagcaggtgacctaccacaacccccccctgctgtttgacctgagccgggaccccagcgagagcacccccctgaccccagccacagagcccctgcatgactttgtgatcaagaaggtggccaatgccctgaaggagcaccaggagaccatcgtgcctgtgacctaccagctgtctgagctgaaccagggccgcacctggctgaagccctgctgcggggtcttccccttctgcctgtgtgacaaggaggaggaggtgtcccagccccggggccccaatgagaagaggtag

SEQ ID NO: 142981 - DNA, 1773 bp, Artificial Sequence
  derived and/or modified sequence
atgcggccccggcggcccctggtgttcatgagcctggtgtgcgccctactcaacacctgccaggcccatcgcgttcatgatgacaagcccaatatcgtgctgatcatggtagacgacctgggcatcggggatctgggctgttatggtaatgacacaatgaggaccccccatatcgaccgcctcgctagggagggtgtccggcttacccagcacatcagcgctgcttcgctgtgttctccatcccgctccgccttcctaaccggacgctatcctataagatctgggatggtgtcatcggggaaccggcgtgtgatacagaaccttgcggtgcccgctgggctgccgctgaatgaaaccaccctggctgcattactgaagaagcaggggtattccaccggcctgattggcaaatggcatcagggactgaattgcgacagccgtagcgatcaatgccaccatccttataactatggatttgactactattacggaatgccctttacgctggtagactcatgctggcctgaccccagcagaaacactgagctagctttcgagtcccagctttggttgtgcgtccagttagtggccatcgctattctgacactcacattcggcaagctgtccggttgggtgagcgtgccatggcttctgattttttcgatgatcctctttattttcctccttggctatgcctggtttagttcccacacatcaccgctgtactgggactgtctcctcatgaggggccatgaaattaccgaacagccaatgaaggcggagcgcgctgggagtataatggtgaaagaagctatcagttttttggaacgacactctaaggagactttcctactttttttctcttttctgcacgtgcatacacccctgccaacaacagacgactttactggaacaagtaaacacggcctctacggggacaacgtggaggagatggatagcatggttggtaagattttagacgctatcgacgacttcggcctgcggaataatacgttggtatattttaccagtgaccacggaggacacttagaggcacggcgaggccatgcccagcttggtggttggaatggcatttacaagggcgggaaaggaatgggcgggtgggaggggggcatcagagtccccgggattgtgagatggccaggcaaggtgcctgcaggtaggttgattaaggagccaaccagcctgatggatatcttgcctacggtcgccagcgttagtggcgggagtctgcctcaggaccgggtaatagatggccgcgacctgatgccattgctgcaaggcaatgtccgccactctgagcatgaattcttgtttcactactgcgggtcttacctgcacgccgtccgctggatcccaaaggatgacagtggttccgtttggaaagctcattacgttacccccgtgttccagcctccggcctctggaggatgctacgtgaccagcttgtgcagatgtttcggcgaacaggtgacctaccataatcctccattactgttcgatctctcacgcgacccctccgagtcaactccactgaccccagctaccgaaccactccatgatttcgtaatcaaaaaggttgccaatgctcttaaagagcaccaagaaaccatcgtgccagtgacctatcagttgtccgaactaaaccagggtcgaacgtggctgaagccatgctgcggggtctttcccttctgtctgtgcgacaaagaggaagaggtgtcacagccgcgtggccctaacgaaaaacgctag

SEQ ID NO: 142982 - DNA, 1773 bp, Artificial Sequence
  derived and/or modified sequence
atgcggccccggcggcccctggtgttcatgagcctggtgtgcgcccttttaaacacctgtcaagcccaccgcgtgcacgacgataagcctaatatcgtgctgatcatggtggacgatttggggatcggggatctgggctgctacggcaatgacaccatgcggactccacatatcgatagactagcgagagagggcgtgcgtttaacacagcacatctcagctgcatctctgtgcagcccttcacgcagcgctttcctgaccggcagatacccaattaggtcaggcatggtgtcatctggaaatcgcagagtgattcagaacttggccgtgcccgcaggactccctctgaatgaaacaacgctggccgccctcctgaagaaacaggggtattctactggacttattggtaaatggcaccaagggctgaattgcgatagccggtctgaccagtgccaccacccctacaattatggctttgactactactacgggatgcctttcaccctggtcgatagttgctggcctgatcccagccgcaacacagaacttgcatttgagagtcaactgtggctctgcgtccagctggtggcgatcgccatactgaccctcaccttcggaaagctgagcgggtgggtgagtgtcccatggctgttgatcttctcaatgatcctatttatttttttactcgggtacgcatggttttcatctcacacctctcctctctattgggactgccttttgatgaggggccacgagatcactgaacaacctatgaaggctgagagggccggaagcataatggtaaaggaagcgatttcattcttagagaggcattccaaagagacctttcttctgtttttctctttcctccacgtccacacaccgctgccgacaaccgatgatttcacgggcacgtcaaagcatggactctacggggataacgtggaggagatggattccatggtgggcaagattcttgatgcaattgatgactttggcttacgcaacaataccctagtgtactttactagcgaccacggcggccacctggaggcaagaaggggccacgcccagctaggagggtggaacggcatctataaaggtggcaagggtatgggggggtgggaaggcgggatccgggtgcccggcattgtgcgttggcctggtaaagtgccagctggacggctgattaaggaacctacctctctgatggatattcttccaacagttgccagcgtgtcaggggggagtctgccccaagatagagtcatagacggtcgggacttaatgcctctcctgcaaggtaacgtgcgtcactcagagcatgagtttctcttccactactgcggctcctacctgcacgcagtgcggtggatccccaaggacgactctggctctgtctggaaggcccactacgtgactcctgtcttccagcctccggcttcaggaggatgctacgtgacctcactgtgtcgttgttttggcgaacaagtgacatatcataaccctccgctgctgttcgacctttcaagagacccctccgaatcaacgcctttaacgccagccacggaaccactgcacgacttcgtgataaaaaaagttgccaatgctctcaaagagcatcaggaaaccattgttccagtcacatatcagctgagtgaactgaatcagggaaggacctggctgaaaccgtgctgtggagtgtttccgttttgcttgtgtgataaggaggaggaggtcagccagccccggggacccaatgagaagaggtag

SEQ ID NO: 142983 - DNA, 1773 bp, Artificial Sequence
  derived and/or modified sequence
atgcggccccggcggcccctggtgttcatgagcctggtgtgcgccttgcttaatacctgtcaggctcaccgggtgcatgatgataaacctaatattgtgctgatcatggtagatgacctgggcataggcgatctgggctgttacgggaatgacactatgaggacccctcatatcgatcgcctggcccgcgagggtgtgaggctaacccagcatatctccgccgcctcattgtgttcacctagtcgcagcgctttcttgaccggaagatacccaatcagatctggcatggtttcaagcggaaacaggcgcgttattcaaaaccttgccgttccagcaggcctgccactcaacgagaccaccctcgccgccctattaaagaaacagggctattcaactgggctgattggtaaatggcatcagggcttgaactgcgattcccgcagcgaccagtgccaccatccatacaactacggtttcgattactattatggcatgccattcaccctggtggattcatgctggcctgatccttccaggaataccgaactggccttcgagagccagttgtggctctgcgtgcaacttgttgctatcgctatcctaacactgacctttgggaaactgagcggatgggtatctgtgccctggctactgatcttctcaatgatcctcttcatctttctgctgggatacgcttggttttcttctcacacaagtcccctttattgggattgcctgcttatgcgaggtcacgaaatcaccgagcagccgatgaaagcagagcgcgcgggcagtatcatggtcaaagaagccattagttttctagaaagacattcgaaagagacgttcctgctcttcttttccttcctccacgtccacacgcccctgccgacaaccgatgactttacaggcaccagtaagcatgggctttacggagataacgttgaggagatggacagcatggtcggaaagatcttggatgcaattgacgacttcggattgcgaaacaatactctggtatacttcacctccgatcacggcggtcacctggaggctagaaggggtcacgcccaactcggcggatggaatggtatctacaagggcggcaaagggatgggaggttgggagggggggatccgcgttcctgggatcgtgagatggcctgggaaggtgccagccggcagactcattaaggaacctacaagtctgatggacatcctgcccaccgtcgccagtgttagtgggggttccctgccacaggatcgtgtcatcgacgggcgtgatctcatgccgctcctacaggggaatgtacggcatagtgagcatgagtttcttttccattattgcgggtcctacttgcatgccgtgaggtggattcccaaagacgattctggctcagtctggaaggctcactacgtgactcccgtttttcagccgcctgcctcaggtggctgttatgtgaccagtctgtgccggtgcttcggtgagcaggttacataccataacccaccactcctgttcgacctttctagggacccaagtgagagtacacccctgaccccagctacagagcccttgcacgacttcgtgatcaagaaggttgccaacgccctgaaggagcaccaggaaactatcgtccctgtcacataccagttgtctgagttgaatcagggccggacatggctcaaaccatgttgcggagtgttcccattttgtttgtgtgataaggaggaggaggtgtcccaacctcgaggacccaacgagaagagatag

SEQ ID NO: 142984 - DNA, 1773 bp, Artificial Sequence
  derived and/or modified sequence
atgcggccacggaggcccctcgtgtttatgtctcttgtatgtgccttgcttaatacatgccaggcacatcgagtgcacgatgacaagcctaatatcgtcctgattatggttgacgatctcggtattggggacctaggctgttacgggaacgataccatgaggacaccccacatcgaccggctggccagagaaggagtgcgattgacacagcatatctccgctgcctcactatgctcaccatcgcgatcagcctttctgactgggagatacccaatcaggagcggaatggttagtagcggaaacaggagggttatccagaaccttgccgtgcccgctggactgcccctgaacgagactacccttgctgctcttctgaagaaacagggatactccactggcctgatcggtaagtggcatcaaggactcaattgtgattctcgttccgaccagtgccatcatccatacaattatggatttgattattattatgggatgcctttcacattggtggacagctgctggcccgaccctagcaggaacacagaactagcattcgagtctcaactctggctgtgtgtgcaattagtggccattgccattttaaccttgaccttcgggaagctctcaggctgggtgtccgttccttggctgctaatctttagcatgatactgttcatatttctcctgggatacgcatggttcagcagccacacatcccctctctattgggattgcctcctgatgaggggccatgagatcactgaacaacccatgaaggctgaacgcgcagggtcaatcatggtgaaggaggctatctcctttctggagcggcactctaaggaaacattcctcctgtttttttcttttctccatgtgcatacgcccctccccacaaccgacgacttcactgggacgtccaaacacgggctctatggcgacaatgtggaggagatggacagtatggtcggcaagatcttggatgccattgatgatttcggcctgcggaacaacactttagtttattttacctcggaccacggcggtcacctggaggcaagacgcggacacgcacagcttggtggttggaacggaatttacaaaggcggaaaaggaatgggtggctgggaaggcggtattcgggttcctggcattgtgcgatggcctggtaaggtgcctgccggtcgcctcataaaagaacccacatctctaatggacatccttcccaccgtggcatccgtatcgggaggttccctccctcaggaccgcgtaattgacggcagggatctgatgccgctgctccagggcaatgtccgccactcagagcatgagttcttgtttcattactgcggatcctacctgcacgccgtcaggtggataccaaaggacgactctggaagcgtgtggaaggcccattatgtcactcctgtgttccagcctcctgcctcaggcggttgctatgttacgtctctgtgtaggtgtttcggcgaacaggtcacttatcacaacccaccacttctattcgatctgtccagagacccgtcagaaagcactcccctgactcctgccacagaacccctgcatgactttgtgattaagaaggtagccaatgccctcaaagagcatcaggagacgattgtccccgtaacctaccagctctccgagctaaatcagggtcgaacatggctcaaaccctgctgtggcgtctttccattttgtctctgtgacaaagaagaagaagtgtcacaaccaagaggaccaaatgaaaaacggtag

SEQ ID NO: 142985 - DNA, 1773 bp, Artificial Sequence
  derived and/or modified sequence
atgagacctcggcgacctctggttttcatgtctctcgtctgcgctttgttgaacacttgccaggcccaccgcgttcacgatgataagcctaacatcgttctgatcatggttgacgatcttggaattggggatctggggtgctatggcaacgacaccatgaggacgccacatatcgacaggctggcccgagagggagttcggctgacccagcatatttcagccgcatcactgtgtagcccctcacggtcggcatttctcaccgggcgttatccgataaggtcaggcatggtgagctcgggcaatagacgggtgattcaaaaccttgctgtaccagctggactccctctgaacgagacaaccttagcagccctgcttaaaaagcaagggtacagcacagggctcattggcaaatggcaccaggggcttaattgcgacagcaggtcagaccaatgccatcacccttacaactatggatttgactattactacggtatgccattcacattggtggattcttgctggcctgacccaagccgaaataccgagctagcctttgaatcccagctgtggctgtgcgtccaactggtggctattgctattctcaccttgacctttggtaaactcagcgggtgggtcagcgtcccttggctgctgatattctcaatgatcttgttcatttttctgctgggatacgcctggttctcctctcacacaagccccctctactgggattgcttactgatgcggggacacgagatcaccgaacagcccatgaaagcggaaagagccggaagcatcatggtgaaggaagcaattagtttcttagaacgccacagtaaagagacatttttgctgttcttttcctttctgcacgtgcatacgcctctccctacaactgatgattttaccggtactagcaagcatggcctgtacggagataatgttgaagagatggattcaatggtaggaaaaatcctggacgctatcgacgacttcggcctgcgaaacaacaccctggtgtactttacttcggatcacggtggacatctggaggctagacgaggtcacgctcagcttggcggatggaatggcatttataagggtgggaagggtatgggcggttgggagggcggaatccgagtgcctggcatcgttagatggcccggtaaagtgccagctggccgactgattaaagaacctaccagcctcatggacattcttcctaccgtggcaagcgttagcggcggtagcctaccgcaggaccgcgtgattgacggccgagatttaatgccgcttttgcagggcaatgtgagacactcggagcacgagtttctgtttcattactgtggctcctatcttcatgccgtcaggtggattccaaaagatgacagtggctctgtatggaaggcccactacgtcacaccagtgtttcagccaccagcctctggagggtgttatgttactagcctgtgtcggtgctttggtgaacaggtgacttaccataatccaccccttcttttcgacctttcaagggacccctccgaaagtacgcctctgactccagccacggagcccctccatgactttgtgattaaaaaggtggccaacgccctgaaagagcatcaggagaccattgttcccgtcacataccagctctctgaacttaaccagggtagaacctggctgaagccctgttgtggcgtcttccctttctgtctgtgtgacaaggaggaggaggtaagtcagccaaggggccctaatgagaagagatag

SEQ ID NO: 142986 - DNA, 1773 bp, Artificial Sequence
  derived and/or modified sequence
atgcgccctaggcgtcctctggtttttatgagtcttgtatgcgccctcctcaacacttgtcaagcacatcgggtacatgatgacaaaccaaatatcgtactgatcatggtggatgacctggggataggcgacctcggctgttatggcaacgataccatgcgcaccccacatattgatcgcttagcccgtgagggagtgcgtctgactcagcatatcagcgctgcctcactgtgctccccttccaggtccgcattcctgaccggcaggtaccctatccggagtggcatggtcagttccggcaatcgcagagtcatccaaaatctggccgtgcccgcaggtcttccactgaacgagacaaccctggcagcgcttctgaaaaagcagggctatagcactgggttgatagggaaatggcaccagggtctcaattgcgattcccggagcgatcaatgtcaccacccgtacaactacggcttcgactattattacgggatgcctttcaccttagtggattcatgctggcccgacccttctaggaatactgagttggctttcgaatcacagctgtggctgtgtgtgcagctggtcgccattgccatcctcactttaacatttgggaagttaagcggctgggtttccgtcccctggctcctcatctttagcatgatcctgttcatcttcctattgggctatgcgtggttttcctctcataccagccctctgtattgggactgtctgctgatgaggggacacgaaataaccgagcagcctatgaaagcagaaagggccggaagtattatggtgaaagaggccatctcttttcttgaacggcatagcaaggaaacattccttttattcttctcctttctccacgtccatacgccactccctaccacggacgactttactgggaccagtaagcacggcctgtatggagacaatgttgaagagatggactccatggtcggcaaaatcctggacgctatcgatgacttcggcctcagaaacaataccctcgtgtattttacctccgaccatggagggcacctcgaggccaggcgaggccatgcccagctcggagggtggaacgggatctacaagggaggaaaaggtatggggggatgggaaggaggcattcgtgtgccaggaattgtgaggtggcctggaaaagtccctgctggtagacttatcaaagaacctaccagtcttatggatattctgcccacggtagcttccgtttctggcggaagcttgccacaagaccgcgtcattgatgggagagacctaatgccgctcttgcaggggaacgtgcggcactctgagcacgagtttctgtttcactactgtggtagctacctgcatgcagtgcggtggattcctaaggacgacagcgggtctgtgtggaaggcccattacgttacccctgtgttccagccacctgcctccggcggatgctatgtgacctcactgtgccgatgtttcggagaacaggtaacttaccataacccgccactcctttttgatctgagtcgggatccaagcgaatcgactcccttaacacccgctaccgagccactccacgacttcgtcattaaaaaggttgcgaacgccctgaaggagcaccaagagacaattgtccccgttacatatcagttgtctgaactgaatcagggacggacttggctgaaaccatgttgcggcgtatttcctttttgcttgtgcgataaggaagaggaggtatctcagccgagaggtccgaatgagaagcgctag

SEQ ID NO: 142987 - DNA, 1923 bp, Artificial Sequence
  derived and/or modified sequence
atgaggccaaggagacccttggtcttcatgtctttggtgtgtgcactcttgaacacatgccaggcacacagggtgcatgacgacaagcctaatattgtcctaatcatggttgatgacctgggtattggagatctgggctgctacggcaatgacaccatgaggacgcctcacatcgaccgccttgccagggaaggcgtgcgactgactcagcacatctctgccgcctccctctgcagcccaagccggtccgcgttcttgacgggaagataccccatccgatcaggtatggtttctagtggtaatagacgtgtcatccaaaatcttgcagtccccgcaggcctccctcttaatgagacaacacttgcagccttgctaaagaagcaaggatacagcacggggcttataggcaaatggcaccaaggcttgaactgcgactcccgaagtgaccagtgccaccatccatataattatgggtttgactactactatggcatgccgttcactctcgttgacagctgctggccggacccctctcgtaacacggaattagcctttgagagtcagctctggctctgtgtgcagctagttgccattgccatcctcaccctaacctttgggaagctgagcggctgggtctctgttccctggctcctgatcttctccatgattctgtttattttcctcttgggctatgcttggttctccagccacacgtcccctttatactgggactgcctcctcatgcgggggcacgagatcacggagcagcccatgaaggctgaacgagctggatccattatggtgaaggaagcgatttcctttttagaaaggcacagtaaggaaactttccttctctttttctcctttcttcacgtgcacacacctctccccaccacggacgatttcactggcaccagcaagcatggcttgtatggggataatgtggaagagatggactccatggtgggcaagattcttgatgctatcgatgattttggcctaaggaacaacacccttgtctactttacatcagatcacggagggcatttggaagctaggcgagggcatgcccaacttggtggatggaatggaatatacaaaggtggaaaaggcatggggggctgggaaggtggaatccgcgtcccaggaattgtccgatggcctggaaaggtaccagctggacggttgattaaggaacctacaagtttaatggatattttaccaactgtcgcatcagtgtcaggaggaagtctccctcaggacagggtcattgacggccgagacctcatgcccttgctgcagggcaacgtcaggcactcggagcatgaatttcttttccactactgtggctcctacctgcacgccgtgcggtggatccccaaggacgacagtgggtcagtttggaaggctcactatgtgaccccggtattccagccaccagcttctggtggctgctatgtcacctcattatgcagatgtttcggagaacaggttacctaccacaacccccctctgctcttcgatctctccagggacccctcagagtccacacccctgacacctgccacagagcccctccatgattttgtgattaaaaaggtggccaacgccctgaaggaacaccaggaaaccatcgtgcctgtgacctaccaactctcagaactgaatcagggcaggacgtggctgaagccttgctgtggggtgttcccattttgtctgtgtgacaaggaagaggaagtctctcagcctcggggtcctaacgagaagagataattacaatcaggctaccagaggaagcctttggtcctaacgagaagagataattacaatcaggctaccaaaggaagcactaactttggtgctttcaagttggcaaggagtgcatttaatagtcaataaattcatctaccattccagattatt

SEQ ID NO: 142988 - DNA, 1773 bp, Artificial Sequence
  derived and/or modified sequence
atgagacccagaagacccctggtgttcatgagcctggtgtgcgccctgctgaacacctgccaggcccacagagtgcacgacgacaagcccaacatcgtgctgatcatggtggacgacctgggcatcggcgacctgggctgctacggcaacgacaccatgagaaccccccacatcgacagactggccagagagggcgtgagactgacccagcacatcagcgccgccagcctgtgcagccccagcagaagcgccttcctgaccggcagataccccatcagaagcggcatggtgagcagcggcaacagaagagtgatccagaacctggccgtgcccgccggcctgcccctgaacgagaccaccctggccgccctgctgaagaagcagggctacagcaccggcctgatcggcaagtggcaccagggcctgaactgcgacagcagaagcgaccagtgccaccacccctacaactacggcttcgactactactacggcatgcccttcaccctggtggacagctgctggcccgaccccagcagaaacaccgagctggccttcgagagccagctgtggctgtgcgtgcagctggtggccatcgccatcctgaccctgaccttcggcaagctgagcggctgggtgagcgtgccctggctgctgatcttcagcatgatcctgttcatcttcctgctgggctacgcctggttcagcagccacaccagccccctgtactgggactgcctgctgatgagaggccacgagatcaccgagcagcccatgaaggccgagagagccggcagcatcatggtgaaggaggccatcagcttcctggagagacacagcaaggagaccttcctgctgttcttcagcttcctgcacgtgcacacccccctgcccaccaccgacgacttcaccggcaccagcaagcacggcctgtacggcgacaacgtggaggagatggacagcatggtgggcaagatcctggacgccatcgacgacttcggcctgagaaacaacaccctggtgtacttcaccagcgaccacggcggccacctggaggccagaagaggccacgcccagctgggcggctggaacggcatctacaagggcggcaagggcatgggcggctgggagggcggcatcagagtgcccggcatcgtgagatggcccggcaaggtgcccgccggcagactgatcaaggagcccaccagcctgatggacatcctgcccaccgtggccagcgtgagcggcggcagcctgccccaggacagagtgatcgacggcagagacctgatgcccctgctgcagggcaacgtgagacacagcgagcacgagttcctgttccactactgcggcagctacctgcacgccgtgagatggatccccaaggacgacagcggcagcgtgtggaaggcccactacgtgacccccgtgttccagccccccgccagcggcggctgctacgtgaccagcctgtgcagatgcttcggcgagcaggtgacctaccacaacccccccctgctgttcgacctgagcagagaccccagcgagagcacccccctgacccccgccaccgagcccctgcacgacttcgtgatcaagaaggtggccaacgccctgaaggagcaccaggagaccatcgtgcccgtgacctaccagctgagcgagctgaaccagggcagaacctggctgaagccctgctgcggcgtgttccccttctgcctgtgcgacaaggaggaggaggtgagccagcccagaggccccaacgagaagagatag

SEQ ID NO: 142989 - protein, 345 aa, Artificial Sequence
  derived and/or modified sequence
MGSSEDQAYRLLNDYANGFMVSQVLFAACELGVFDLLAEAPGPLDVAAVAAGVRASAHGTELLLDICVSLKLLKVETRGGKAFYRNTELSSDYLTTVSPTSQCSMLKYMGRTSYRCWGHLADAVREGRNQYLETFGVPAEELFTAIYRSEGERLQFMQALQEVWSVNGRSVLTAFDLSVFPLMCDLGGGAGALAKECMSLYPGCKITVFDIPEVVWTAKQHFSFQEEEQIDFQEGDFFKDPLPEADLYILARVLHDWADGKCSHLLERIYHTCKPGGGILVIESLLDEDRRGPLLTQLYSLNMLVQTEGQERTPTHYHMLLSSAGFRDFQFKKTGAIYDAILARK

SEQ ID NO: 142990 - protein, 373 aa, Artificial Sequence
  derived and/or modified sequence
MGSSEDQAYRLLNDYANGFMVSQVLFAACELGVFDLLAEAPGPLDVAAVAAGVRASAHGTELLLDICVSLKLLKVETRGGKAFYRNTELSSDYLTTVSPTSQCSMLKYMGRTSYRCWGHLADAVREGRNQYLETFGVPAEELFTAIYRSEGERLQFMQALQEVWSVNGRSVLTAFDLSVFPLMCDLGGTWIKLETIILSKLSQGQKTKHRVFSLIGGAGALAKECMSLYPGCKITVFDIPEVVWTAKQHFSFQEEEQIDFQEGDFFKDPLPEADLYILARVLHDWADGKCSHLLERIYHTCKPGGGILVIESLLDEDRRGPLLTQLYSLNMLVQTEGQERTPTHYHMLLSSAGFRDFQFKKTGAIYDAILARK

SEQ ID NO: 142991 - protein, 124 aa, Artificial Sequence
  derived and/or modified sequence
DCRLTSVCLPCVPGDFFKDPLPEADLYILARVLHDWADGKCSHLLERIYHTCKPGGGILVIESLLDEDRRGPLLTQLYSLNMLVQTEGQERTPTHYHMLLSSAGFRDFQFKKTGAIYDAILARK

SEQ ID NO: 142992 - DNA, 1038 bp, Artificial Sequence
  derived and/or modified sequence
atgggatcttccgaggaccaggcctatcgccttctaaacgactacgctaacggcttcatggtgtcacaggtcctgtttgcagcctgtgagctaggcgtgtttgatttgctggcagaggctccaggtcctctggatgtggccgctgtagcggcgggtgtgcgggccagcgctcacggcacggaattgctgttggacatttgcgtgagcctgaaacttcttaaggtggaaacccgcgggggaaaggctttttatcggaataccgagctctcttctgattacctaaccactgtctccccaacttcccaatgcagcatgctcaaatatatgggacgcacaagctatcgctgttgggggcacttggcagacgcagtacgcgaaggacggaaccagtacctggagacctttggggtccccgcagaagagctctttactgcaatatacagatccgaaggggaaaggcttcagttcatgcaggctttgcaggaagtctggtcagtcaacggccggtccgtgctcaccgctttcgacttgagcgtcttccccctgatgtgtgatctgggaggaggcgccggggccctcgccaaggagtgcatgagtctctacccagggtgtaaaataacagttttcgacattccggaggtggtgtggaccgcaaagcagcacttctcgtttcaggaggaagagcaaattgactttcaggagggcgatttctttaaggatcctttgccagaggccgatttatatatcctcgcacgggtacttcacgactgggccgacggaaagtgttctcacctgctggagcggatctaccatacttgcaagccgggaggaggaatattagttattgagtctctccttgatgaagatcggaggggacccctgttaacacagctgtacagcctgaacatgcttgttcagacggagggtcaggaaaggaccccaacccactatcatatgctgcttagctctgcgggatttcgcgactttcagtttaagaagacaggcgcgatatacgatgctatcttagcccgtaaatag

SEQ ID NO: 142993 - DNA, 1122 bp, Artificial Sequence
  derived and/or modified sequence
atgggctcttctgaggatcaggcctatcggctgttgaacgactacgctaatggatttatggtgagccaggtcctgttcgccgcttgcgagctgggtgtctttgacttactcgccgaggctccagggcccctggatgtggcagccgttgcagcaggagtaagagccagcgcgcacggtacggagctcctgctggatatttgtgtgtccctgaagctgctgaaagtggaaacaagagggggcaaggctttttataggaacacagagttgtcctcagattatctaaccactgtttcgcctacatctcagtgctccatgctgaagtacatgggacggacatcatatcgatgttggggccatctcgccgatgccgtgcgagaaggtagaaaccaatacttagaaacatttggcgttcctgcagaagaactcttcacagccatttacagatcagagggcgaaagactacaatttatgcaggccctacaggaggtatggagtgtaaacggtcgctcagttcttaccgcttttgatctgagcgttttcccgctgatgtgtgacctgggtgggacctggataaaattggagacgattatcttaagcaagctgtcgcagggccagaaaaccaaacatagggttttcagcttgattggaggtgcaggcgccctcgccaaggagtgtatgagcttgtaccctggatgcaaaatcacagtgttcgacattccagaggtagtgtggacagccaaacagcactttagttttcaagaagaagagcagatagattttcaagaaggggacttcttcaaggacccacttcctgaggctgacctgtacattcttgctcgagtgctccacgactgggccgacggaaaatgtagccacttgctcgagcggatatatcacacttgcaaacctggtggcggaattttggtaatcgaaagcctgctggacgaagatcgtagaggacctctccttacacagttatactcccttaacatgctcgttcagaccgagggacaggaacgaacaccaacccactatcacatgctcctgtcctccgcgggatttcgcgactttcagttcaaaaagacaggagccatatacgatgctatccttgctcggaagtag

SEQ ID NO: 142994 - DNA, 1038 bp, Artificial Sequence
  derived and/or modified sequence
atgggcagcagcgaggaccaggcctaccgcctgctgaatgactatgccaacggcttcatggtgtcccaggtgctgtttgctgcctgtgagctgggcgtgtttgacctgctggccgaggcccctggccccctggatgtggccgctgtggccgccggcgtgcgggccagcgcccacggcacagagctgctgctggacatctgtgtgtccctgaagctgctgaaggtggagacccggggcggcaaggccttctacagaaacacagagctgagcagtgactacctgaccaccgtgagccccaccagccagtgcagcatgctgaagtacatgggccgcaccagctaccgctgctggggccacctggctgatgctgtgcgggagggcaggaaccagtacctggagacctttggagtgcctgctgaggagctgttcaccgccatctacagaagtgaaggagagcggctgcagttcatgcaggccctgcaggaggtgtggagcgtgaatggccgctctgtgctgacagcctttgacctgagcgtcttccccctgatgtgtgacctgggcggcggggccggggccctggccaaggagtgcatgagcctgtacccaggctgcaagatcaccgtgtttgacatccctgaggtggtgtggacagccaagcagcacttctccttccaggaggaggagcagattgacttccaggagggggacttcttcaaggaccccctgcctgaggccgacctgtacatcctggcccgggtgctgcatgactgggcagatggcaagtgcagccacctgctggagcgcatctaccacacctgcaagccaggcggcggcatcctggtgattgagagcctgctggatgaggaccggcggggccccctgctgacccagctgtacagcctgaacatgctggtgcagacagagggccaggagaggacccccacccactaccacatgctgctgagcagcgctggcttccgggacttccagttcaagaagacaggagccatctatgatgccatcctggccaggaagtag

SEQ ID NO: 142995 - DNA, 1122 bp, Artificial Sequence
  derived and/or modified sequence
atgggcagcagcgaggaccaggcctaccgcctgctgaatgactatgccaacggcttcatggtgtcccaggtgctgtttgctgcctgtgagctgggcgtgtttgacctgctggccgaggcccctggccccctggatgtggccgctgtggccgccggcgtgcgggccagcgcccacggcacagagctgctgctggacatctgtgtgtccctgaagctgctgaaggtggagacccggggcggcaaggccttctacagaaacacagagctgagcagtgactacctgaccaccgtgagccccaccagccagtgcagcatgctgaagtacatgggccgcaccagctaccgctgctggggccacctggctgatgctgtgcgggagggcaggaaccagtacctggagacctttggagtgcctgctgaggagctgttcaccgccatctacagaagtgaaggagagcggctgcagttcatgcaggccctgcaggaggtgtggagcgtgaatggccgctctgtgctgacagcctttgacctgagcgtcttccccctgatgtgtgacctgggcggcacctggatcaagctggagaccatcatcctgagcaagctgagccagggccagaagaccaagcacagggtcttcagcctgattggaggagctggggccctggccaaggagtgcatgagcctgtacccaggctgcaagatcaccgtgtttgacatccctgaggtggtgtggacagccaagcagcacttctccttccaggaggaggagcagattgacttccaggagggggacttcttcaaggaccccctgcctgaggccgacctgtacatcctggcccgggtgctgcatgactgggcagatggcaagtgcagccacctgctggagcgcatctaccacacctgcaagccaggcggcggcatcctggtgattgagagcctgctggatgaggaccggcggggccccctgctgacccagctgtacagcctgaacatgctggtgcagacagagggccaggagaggacccccacccactaccacatgctgctgagcagcgctggcttccgggacttccagttcaagaagacaggagccatctatgatgccatcctggccaggaagtag

SEQ ID NO: 142996 - DNA, 1038 bp, Artificial Sequence
  derived and/or modified sequence
atgggcagcagcgaggaccaggcctaccggctgctgaacgactacgccaacgggtttatggtatcacaagtcctcttcgccgcatgtgagctcggagtgttcgacctactcgctgaagctccaggccctctcgatgtcgcagccgtggccgcaggtgtacgggcgagtgcgcacggcacagaattgctgttggatatctgcgtgagccttaagttactgaaagtcgaaactcggggggggaaggccttctacagaaatactgagttaagttccgattacctcacgaccgtctcacctacctctcaatgctcaatgctgaagtacatgggacgtacctcctaccggtgttggggacatctggcagatgccgtgagggaaggccgtaatcaatacctcgagactttcggcgttcccgctgaggagctgttcaccgctatctataggagcgaaggtgagcggcttcagttcatgcaggcactgcaggaggtctggagtgtcaatggacgttctgtgctgaccgctttcgacctcagtgtgtttcctttgatgtgcgatctcggtgggggggctggtgcgctagccaaggagtgtatgtctctttaccccgggtgtaaaattacagtttttgacattcctgaggtggtgtggaccgcgaagcagcatttctccttccaggaggaggaacagatcgacttccaagaaggagatttcttcaaggatcccctgccggaggccgacctctacatcctggctcgggttctgcacgattgggctgacggcaagtgttctcacctgctggagagaatttaccacacttgcaagccaggtggaggaatcttggtaattgagtcactactggatgaggacagacgcggaccactgctcacccagttatatagtttaaatatgctggtgcagacagagggccaggagcgtacaccgacccactatcacatgcttctgtcgtctgcgggcttcagagatttccagttcaagaaaactggtgccatctacgatgctatcttggcccgcaaatag

SEQ ID NO: 142997 - DNA, 1122 bp, Artificial Sequence
  derived and/or modified sequence
atgggcagcagcgaggaccaggcctaccggctgctgaacgactacgcaaacgggttcatggtgtctcaagtactctttgccgcatgtgagctgggtgttttcgacctgcttgccgaggctcctggcccgttggacgtggctgctgtggccgcgggagtgcgagcctccgcacatggcactgagcttctactcgatatctgtgtttctcttaaattgctgaaggtcgagactcgaggcggcaaagctttttaccgaaacacggagctatcatctgactacctgacaaccgtgtcccctacctctcagtgttccatgctgaagtacatgggaagaacatcgtataggtgttggggtcacctggccgacgccgtgcgggaggggaggaatcaatacctggaaaccttcggagtgcccgcggaagagttgttcactgctatctaccggtctgagggtgaacggctacagttcatgcaagcactgcaggaagtttggtcagtaaatggaagatccgttctcacggcattcgatctgtccgttttcccacttatgtgcgatctgggggggacctggattaagcttgagacgattattctctcaaagctgagtcaggggcagaaaaccaagcaccgcgtgttttcactgatcggaggtgctggagccttagctaaggagtgcatgtccctttatccaggctgcaagataacggtttttgacattcccgaagtggtgtggactgcaaagcaacatttctcatttcaggaggaagaacagattgatttccaggaaggagatttcttcaaagatccactgcccgaagctgatctctacatcctggctagggtgcttcatgactgggcggatggcaagtgttctcacttgctggagcgcatctaccatacatgcaaacctgggggtggcatcctcgtgatcgaatctctgctcgacgaggaccggaggggtccactgctgacgcaactatactccctgaatatgctggttcagaccgaaggacaggaacgcacacccacgcattaccacatgcttctgagctctgccgggttcagggattttcaattcaaaaagacaggagccatttacgacgcaatactggctaggaagtag

SEQ ID NO: 142998 - DNA, 1038 bp, Artificial Sequence
  derived and/or modified sequence
atgggctcttccgaggaccaggcctacagattactcaatgactatgccaacgggttcatggtgtcacaggttctgtttgctgcgtgtgagctaggcgtttttgatctgctggcagaggccccagggcctctagatgtcgcagcagttgccgcaggcgtgcgggcatccgcacacgggacagaattgctgctggatatctgcgtctcactgaagttactgaaggtggagacgaggggcggaaaggcattctaccgaaacacggagctctcttcagattatttaacaaccgtgtcccctacatcacagtgttctatgctgaagtacatgggtagaacatcctatcgatgctggggccacctcgctgatgccgtgagagaagggcgaaaccaatacctggaaacattcggcgtccccgcagaggagctgttcaccgccatctaccgcagtgaaggcgagcggctgcagtttatgcaggctttacaagaagtgtggagcgttaacggcagatcggtactcactgccttcgacctttccgtgttccctctgatgtgcgaccttggaggcggagcaggggcactggctaaggagtgtatgtccctgtaccccggatgcaagatcacagtatttgatattcccgaagtcgtgtggaccgccaaacaacactttagcttccaggaggaggagcagatcgacttccaggaaggagactttttcaaagaccccttgccagaggctgatctttacatcctggccagggtgctccacgactgggccgatggtaagtgctcacacttgctggagaggatctaccatacctgcaaacctggcggaggcatcctggtcattgaatcactcctggacgaggaccgacgtggccctttgctcactcaactgtactcactcaatatgttagttcagacagaaggtcaggagagaactcctacccattaccacatgctccttagctctgccggattccgggacttccagtttaagaagaccggagctatctacgatgctattctggcgaggaaatag

SEQ ID NO: 142999 - DNA, 1122 bp, Artificial Sequence
  derived and/or modified sequence
atgggcagctccgaagatcaagcctaccgtctcttaaatgactacgccaacggcttcatggtgtctcaggtgctgtttgccgcatgcgagctcggcgtgtttgacctcttggctgaggctccgggacctcttgatgtggccgcagtcgccgctggtgtccgggctagcgcgcacggtacggagctccttctagacatctgcgtgtccctgaaactgcttaaggtggagacccgtgggggtaaggcattttatcggaacaccgagctaagttccgactacctcactacggtatcacccacctcacagtgctctatgcttaagtacatggggaggaccagctacagatgctggggccacctggccgatgctgtgcgggagggcaggaatcagtatctcgaaacctttggcgtgccagccgaggagttgttcaccgcgatctataggagcgagggagaaagacttcagttcatgcaggcgctccaggaggtgtggtctgttaatggccgttctgttctcaccgcatttgacctcagcgtgttcccgctgatgtgtgacttgggtggaacctggattaaattagaaacaatcattctgtcaaagctgtcccaggggcagaagactaaacatagggtgttttccctgattggaggagctggtgccttagctaaggagtgtatgtcactgtatccgggttgcaagattaccgttttcgatatccctgaggtggtatggaccgcaaagcagcactttagcttccaggaggaagagcagatcgattttcaggagggtgatttctttaaggaccccctgccggaagccgacctatacatcttagccagagtgctgcacgattgggcggacgggaagtgttcgcacctcctggaaagaatttatcacacctgtaagccaggtggagggatcttggtaatagagtccttactagacgaagatcggagaggacctctcctaacgcagttatatagcctcaacatgcttgtgcagacagagggccaggagaggaccccaacacactaccatatgctactgtcatccgccggattcagagatttccagttcaaaaagaccggcgctatctatgacgcaatccttgcgcgaaagtag

SEQ ID NO: 143000 - DNA, 1087 bp, Artificial Sequence
  derived and/or modified sequence
agaggctccggaagccacggctggattggagacaagatgggatcctcagaggaccaggcctatcgcctccttaatgactacgccaacggcttcatggtgtcccaggttctcttcgccgcctgcgagctgggcgtgtttgaccttctcgccgaggccccagggcccctggacgtggcggcagtggctgcaggtgtgagggccagcgcccatgggacagagctcctgctggacatctgtgtgtccctgaagctgctgaaagtggagacgaggggaggaaaagctttctatcgaaacacagagctgtccagcgactacctgaccacggtcagcccgacgtcacaatgcagcatgctgaagtacatgggcaggaccagctaccggtgctggggccacctggcagacgccgtgagagaaggaaggaaccagtacctggagacgtttggcgttcccgctgaagagctttttacggccatctacaggtccgagggcgagcggctacagttcatgcaagctctgcaggaggtctggagcgtcaacgggagaagcgtgctgaccgcctttgacctgtcagtgttcccacttatgtgtgaccttggtggtggggctggagctctggctaaggaatgcatgtctctgtaccctggatgtaagatcaccgtttttgacatcccagaagtggtgtggacggcaaagcagcacttctcattccaggaggaagaacagattgacttccaggaaggggatttcttcaaagaccctcttccggaagctgatctgtacatcctggccagggtcctccatgactgggcagacggaaagtgctcacacctgctggagaggatctaccacacttgcaagccaggtggtggcattctggtaattgaaagcctcctggatgaagacaggcgaggtcctctgctcacgcagctctactctctgaacatgcttgtgcagacggaagggcaggagaggacccccacccactaccacatgctcctctcttctgctggcttcagagacttccagtttaagaaaacaggagccatttatgatgccattttagccaggaaataactgtttcttgtga

SEQ ID NO: 143001 - DNA, 1388 bp, Artificial Sequence
  derived and/or modified sequence
cacacgctttgtgatcccctaatacggttaatgcaaatttctagagtgatccgtctttgtttgagtactgggcaggcagcagggagagtcaggcagcagctgtgagcgggtggctcttccccaccttgccagcaggctctgtgctccttgaagcaagcgctccagaggctccggaagccacggctggattggagacaagatgggatcctcagaggaccaggcctatcgcctccttaatgactacgccaacggcttcatggtgtcccaggttctcttcgccgcctgcgagctgggcgtgtttgaccttctcgccgaggccccagggcccctggacgtggcggcagtggctgcaggtgtgagggccagcgcccatgggacagagctcctgctggacatctgtgtgtccctgaagctgctgaaagtggagacgaggggaggaaaagctttctatcgaaacacagagctgtccagcgactacctgaccacggtcagcccgacgtcacaatgcagcatgctgaagtacatgggcaggaccagctaccggtgctggggccacctggcagacgccgtgagagaaggaaggaaccagtacctggagacgtttggcgttcccgctgaagagctttttacggccatctacaggtccgagggcgagcggctacagttcatgcaagctctgcaggaggtctggagcgtcaacgggagaagcgtgctgaccgcctttgacctgtcagtgttcccacttatgtgtgaccttggtgggacatggataaagctggaaaccatcattctcagcaaactatcgcaaggacagaaaaccaaacaccgcgtgttctcactcataggtggggctggagctctggctaaggaatgcatgtctctgtaccctggatgtaagatcaccgtttttgacatcccagaagtggtgtggacggcaaagcagcacttctcattccaggaggaagaacagattgacttccaggaaggggatttcttcaaagaccctcttccggaagctgatctgtacatcctggccagggtcctccatgactgggcagacggaaagtgctcacacctgctggagaggatctaccacacttgcaagccaggtggtggcattctggtaattgaaagcctcctggatgaagacaggcgaggtcctctgctcacgcagctctactctctgaacatgcttgtgcagacggaagggcaggagaggacccccacccactaccacatgctcctctcttctgctggcttcagagacttccagtttaagaaaacaggagccatttatgatgccattttagccaggaaataactgtttcttgtgacctggaactaacgtcaaagcacacaagacataataataaagacatgtacctcca

SEQ ID NO: 143002 - DNA, 1038 bp, Artificial Sequence
  derived and/or modified sequence
atgggcagcagcgaggaccaggcctacagactgctgaacgactacgccaacggcttcatggtgagccaggtgctgttcgccgcctgcgagctgggcgtgttcgacctgctggccgaggcccccggccccctggacgtggccgccgtggccgccggcgtgagagccagcgcccacggcaccgagctgctgctggacatctgcgtgagcctgaagctgctgaaggtggagaccagaggcggcaaggccttctacagaaacaccgagctgagcagcgactacctgaccaccgtgagccccaccagccagtgcagcatgctgaagtacatgggcagaaccagctacagatgctggggccacctggccgacgccgtgagagagggcagaaaccagtacctggagaccttcggcgtgcccgccgaggagctgttcaccgccatctacagaagcgagggcgagagactgcagttcatgcaggccctgcaggaggtgtggagcgtgaacggcagaagcgtgctgaccgccttcgacctgagcgtgttccccctgatgtgcgacctgggcggcggcgccggcgccctggccaaggagtgcatgagcctgtaccccggctgcaagatcaccgtgttcgacatccccgaggtggtgtggaccgccaagcagcacttcagcttccaggaggaggagcagatcgacttccaggagggcgacttcttcaaggaccccctgcccgaggccgacctgtacatcctggccagagtgctgcacgactgggccgacggcaagtgcagccacctgctggagagaatctaccacacctgcaagcccggcggcggcatcctggtgatcgagagcctgctggacgaggacagaagaggccccctgctgacccagctgtacagcctgaacatgctggtgcagaccgagggccaggagagaacccccacccactaccacatgctgctgagcagcgccggcttcagagacttccagttcaagaagaccggcgccatctacgacgccatcctggccagaaagtag

SEQ ID NO: 143003 - DNA, 1122 bp, Artificial Sequence
  derived and/or modified sequence
atgggcagcagcgaggaccaggcctacagactgctgaacgactacgccaacggcttcatggtgagccaggtgctgttcgccgcctgcgagctgggcgtgttcgacctgctggccgaggcccccggccccctggacgtggccgccgtggccgccggcgtgagagccagcgcccacggcaccgagctgctgctggacatctgcgtgagcctgaagctgctgaaggtggagaccagaggcggcaaggccttctacagaaacaccgagctgagcagcgactacctgaccaccgtgagccccaccagccagtgcagcatgctgaagtacatgggcagaaccagctacagatgctggggccacctggccgacgccgtgagagagggcagaaaccagtacctggagaccttcggcgtgcccgccgaggagctgttcaccgccatctacagaagcgagggcgagagactgcagttcatgcaggccctgcaggaggtgtggagcgtgaacggcagaagcgtgctgaccgccttcgacctgagcgtgttccccctgatgtgcgacctgggcggcacctggatcaagctggagaccatcatcctgagcaagctgagccagggccagaagaccaagcacagagtgttcagcctgatcggcggcgccggcgccctggccaaggagtgcatgagcctgtaccccggctgcaagatcaccgtgttcgacatccccgaggtggtgtggaccgccaagcagcacttcagcttccaggaggaggagcagatcgacttccaggagggcgacttcttcaaggaccccctgcccgaggccgacctgtacatcctggccagagtgctgcacgactgggccgacggcaagtgcagccacctgctggagagaatctaccacacctgcaagcccggcggcggcatcctggtgatcgagagcctgctggacgaggacagaagaggccccctgctgacccagctgtacagcctgaacatgctggtgcagaccgagggccaggagagaacccccacccactaccacatgctgctgagcagcgccggcttcagagacttccagttcaagaagaccggcgccatctacgacgccatcctggccagaaagtag

SEQ ID NO: 143004 - protein, 592 aa, Artificial Sequence
  derived and/or modified sequence
MAPGQLALFSVSDKTGLVEFARNLTALGLNLVASGGTAKALRDAGLAVRDVSELTGFPEMLGGRVKTLHPAVHAGILARNIPEDNADMARLDFNLIRVVACNLYPFVKTVASPGVTVEEAVEQIDIGGVTLLRAAAKNHARVTVVCEPEDYVVVSTEMQSSESKDTSLETRRQLALKAFTHTAQYDEAISDYFRKQYSKGVSQMPLRYGMNPHQTPAQLYTLQPKLPITVLNGAPGFINLCDALNAWQLVKELKEALGIPAAASFKHVSPAGAAVGIPLSEDEAKVCMVYDLYKTLTPISAAYARARGADRMSSFGDFVALSDVCDVPTAKIISREVSDGIIAPGYEEEALTILSKKKNGNYCVLQMDQSYKPDENEVRTLFGLHLSQKRNNGVVDKSLFSNVVTKNKDLPESALRDLIVATIAVKYTQSNSVCYAKNGQVIGIGAGQQSRIHCTRLAGDKANYWWLRHHPQVLSMKFKTGVKRAEISNAIDQYVTGTIGEDEDLIKWKALFEEVPELLTEAEKKEWVEKLTEVSISSDAFFPFRDNVDRAKRSGVAYIAAPSGSAADKVVIEACDELGIILAHTNLRLFHH

SEQ ID NO: 143005 - protein, 533 aa, Artificial Sequence
  derived and/or modified sequence
MLGGRVKTLHPAVHAGILARNIPEDNADMARLDFNLIRVVACNLYPFVKTVASPGVTVEEAVEQIDIGGVTLLRAAAKNHARVTVVCEPEDYVVVSTEMQSSESKDTSLETRRQLALKAFTHTAQYDEAISDYFRKQYSKGVSQMPLRYGMNPHQTPAQLYTLQPKLPITVLNGAPGFINLCDALNAWQLVKELKEALGIPAAASFKHVSPAGAAVGIPLSEDEAKVCMVYDLYKTLTPISAAYARARGADRMSSFGDFVALSDVCDVPTAKIISREVSDGIIAPGYEEEALTILSKKKNGNYCVLQMDQSYKPDENEVRTLFGLHLSQKRNNGVVDKSLFSNVVTKNKDLPESALRDLIVATIAVKYTQSNSVCYAKNGQVIGIGAGQQSRIHCTRLAGDKANYWWLRHHPQVLSMKFKTGVKRAEISNAIDQYVTGTIGEDEDLIKWKALFEEVPELLTEAEKKEWVEKLTEVSISSDAFFPFRDNVDRAKRSGVAYIAAPSGSAADKVVIEACDELGIILAHTNLRLFHH

SEQ ID NO: 143006 - DNA, 1779 bp, Artificial Sequence
  derived and/or modified sequence
atggctccaggccagctcgccctgttctccgtgtcagacaagaccggtctggtggaattcgcccggaacttaaccgccctgggcctgaaccttgtggcttctgggggaacagcgaaggctctccgtgatgccgggctggctgtgagggatgtctctgaactgactggattcccagaaatgctaggcgggagagtgaaaactctccaccccgcggtgcacgcgggcatcttggcacggaatatcccagaggacaacgcagatatggccaggctagactttaacttaattcgggtggtcgcctgtaatctttatccattcgtcaaaacagtcgcaagccctggtgtgactgtggaggaggctgttgaacagattgatatcggtggagtgaccctgttgagggctgccgcgaaaaatcacgccagggtcactgtcgtgtgcgagccagaggactatgtcgtggtttcaactgagatgcaaagtagcgagagcaaggacacatcccttgaaacccgacggcagttggccctgaaggccttcacacatacagcccaatacgatgaggcaatcagtgactacttccgtaagcagtattccaagggagtaagtcaaatgccactgagatacggcatgaaccctcaccagacgcctgcccaactttacacactgcagccaaaactaccgatcaccgttctgaatggtgctccgggctttattaacctctgtgacgctctgaatgcctggcagttggttaaggagctaaaggaggcactgggaatcccggccgccgcctcttttaaacacgtgagtcctgccggcgccgccgtcggtattcctctgagcgaggatgaggcgaaggtctgtatggtgtacgacctgtacaagaccctcacccccatcagtgcggcctatgctagagccagaggtgccgaccgaatgtcctctttcggggactttgtcgcgctctccgatgtatgcgacgtgccgacggctaagattatatcgcgcgaggttagcgatggcatcattgctccaggatacgaagaagaagcactgaccatattgtcaaagaagaagaatggcaactactgcgtcctgcaaatggatcagtcctataagccagatgagaacgaggtgagaacactctttgggctacacctgagtcagaagagaaataacggtgtggttgacaaaagcctttttagcaacgtcgtcaccaaaaacaaggatcttccagagagcgctctgagggatctcatagtggcgacgatcgcagtgaagtacacccagtcaaattccgtctgttacgctaagaatgggcaagttataggaattggggccgggcaacagtcacggatccattgcacacggcttgcaggtgacaaagcaaactattggtggctgcggcaccatccccaggtcctctccatgaagtttaagactggggtgaagcgcgccgagataagcaacgccatcgatcaatacgttaccggcaccattggagaagatgaggatctgatcaagtggaaagcccttttcgaggaggtgcccgagctcctaactgaggcagagaaaaaggaatgggtggaaaagcttaccgaagtgtccatttccagcgacgccttcttcccatttcgggataatgtcgatagagcaaagcggtcaggagttgcttatatcgcagcaccctctggctctgccgccgacaaggtggtcatcgaggcctgcgacgagctagggattattctcgcccacaccaaccttcgtcttttccatcactag

SEQ ID NO: 143007 - DNA, 1602 bp, Artificial Sequence
  derived and/or modified sequence
atgctgggaggacgggtcaagactttgcaccctgccgtgcacgctgggatcctggccaggaacattcctgaagacaacgccgatatggcgaggctggattttaacctgatacgcgtcgtggcttgcaatctgtacccgttcgtcaagaccgtggcgagtccaggtgtaaccgtcgaggaggccgtagaacagatcgacatcggcggtgtcacccttcttagggcagccgccaaaaatcatgccagagttacagtggtttgcgagcccgaggattatgttgtcgtttcgacggaaatgcagtcctccgaaagcaaagatacatccctggagacccgacggcagcttgccctcaaagcatttacacacacagcacaatatgacgaggcgattagcgactactttagaaaacagtactctaaaggcgtcagtcagatgccccttcgctatggcatgaatccacaccagactccagcccagctgtataccctccaaccaaaactccctatcaccgtgctgaatggcgctccaggcttcatcaatctgtgtgacgctctgaacgcatggcagttggtaaaggagcttaaggaggcactggggatcccagccgccgcctcctttaagcacgtttctcccgccggagccgctgttggcattcctctcagtgaagacgaagctaaagtctgcatggtttacgacctgtacaagaccctcacacctatcagtgctgcctatgcaagggccaggggtgccgacaggatgtcatccttcggagacttcgtggccttatcggatgtgtgtgatgtgccaactgcgaaaattatatctagagaggtgtctgacgggatcattgcacccgggtacgaggaagaggctttaaccatactgtcaaagaagaagaacgggaattattgcgttctgcaaatggatcagagttacaagcccgatgagaatgaggtgcggaccctgtttggtttgcatctgtcccagaagagaaacaacggtgtggtagataagagtctgtttagtaatgtagtcactaagaataaagatctcccagagtctgcccttagagatctgatcgtggcaactattgccgtgaaatacactcagtccaatagcgtgtgttatgcgaaaaatggccaggtcataggtataggagctggccagcagagccgtatccactgtactaggctggccggtgacaaggcaaactactggtggctcaggcaccaccctcaggttctcagcatgaagttcaaaacaggggtgaaacgcgctgaaatatccaacgcaatcgaccagtacgttaccggaacaattggcgaggacgaggaccttatcaagtggaaagctttgtttgaggaggttcctgaacttttgactgaggccgaaaagaaggaatgggtcgagaaactcacagaggttagcatcagctccgatgctttttttccttttcgcgataacgtcgatcgggccaaacggagcggggtggcctatatcgccgcccctagtggcagtgctgcggacaaggtcgtcatcgaggcttgcgacgagctgggaattattctggcccatacgaatctgcgattatttcaccactag

SEQ ID NO: 143008 - DNA, 1779 bp, Artificial Sequence
  derived and/or modified sequence
atggcccctggccagctggccctcttctctgtgtctgacaagacaggcctggtggagtttgccaggaacctgacagccctgggcctgaacctggtggccagcggcggcacagccaaggccctgagagatgctggcctggccgtgagagatgtgtctgagctgaccggcttccctgagatgctgggcggccgggtgaagaccctgcaccctgctgtgcacgccggcatcctggccaggaacatcccagaagataatgctgacatggcccggctggacttcaacctgatccgggtggtggcctgcaacctgtacccctttgtgaagacagtggccagccctggggtgacagtggaggaggccgtggagcagattgacatcggcggcgtgaccctgctgcgggctgctgccaagaaccacgcccgggtgacagtggtgtgtgagccagaagattatgtggtggtgtccacagagatgcagagcagcgagagcaaggacaccagcctggagacccggcggcagctggccctgaaggccttcacccacacagcccagtatgatgaggccatcagtgactacttcaggaagcagtacagcaaaggagtgtcccagatgcccctgcgctatggcatgaacccccaccagaccccagcccagctgtacaccctgcagcccaagctgcccatcaccgtgctgaatggagcccctggcttcatcaacctgtgtgatgccctgaatgcctggcagctggtgaaggagctgaaggaggccctgggcatcccagctgctgccagcttcaagcacgtgtccccagctggagctgctgtgggcatccccctgtctgaagatgaggccaaggtgtgcatggtgtatgacctgtacaagaccctgacccccatctctgctgcctatgcccgggcccggggagctgacaggatgagcagctttggagactttgtggccctgagtgatgtgtgtgatgtgcccacagccaagatcatcagccgggaggtgtctgatggcatcatcgcccctggctatgaggaggaggccctgaccatcctgagcaagaagaagaatggaaactactgtgtgctgcagatggaccagagctacaagccagatgaaaatgaggtgaggaccctgtttggcctgcacctgagccagaagaggaacaacggggtggtggacaagagcctcttcagcaatgtggtgaccaagaacaaggacctgcctgagagcgccctgcgggacctgattgtggccaccatcgctgtgaagtacacccagagcaacagcgtgtgctacgccaagaatggccaggtgattggcatcggggccggccagcagagccgcatccactgcacccggctggccggggacaaggccaactactggtggctgcggcaccacccccaggtgctgtccatgaagttcaagacaggagtgaagagagctgagatcagcaatgccatcgaccagtatgtgacaggcaccatcggagaagatgaagatctcatcaagtggaaggccctgtttgaggaggtgcctgagctgctgacagaggccgagaagaaggagtgggtggagaagctgacagaggtgtccatcagcagtgatgccttcttccccttccgggacaacgtggaccgggccaagagaagtggagtggcctacatcgccgcccccagcggcagcgctgctgacaaggtggtgattgaggcctgtgatgagctgggcatcatcctggcccacaccaacctgcggctcttccaccactag

SEQ ID NO: 143009 - DNA, 1602 bp, Artificial Sequence
  derived and/or modified sequence
atgctgggcggccgggtgaagaccctgcaccctgctgtgcatgctggcatcctggccaggaacatccctgaggacaatgctgacatggcccggctggacttcaacctgatccgggtggtggcctgcaacctgtacccctttgtgaagacagtggccagccctggggtgacagtggaggaggccgtggagcagattgatattggaggagtgaccctgctgcgggccgccgccaagaaccacgcccgggtgacagtggtgtgtgagcctgaggactatgtggtggtgtccacagagatgcagagcagcgagagcaaggacaccagcctggagacccggcggcagctggccctgaaggccttcacccacacagcccagtatgatgaggccatcagtgactacttcaggaagcagtacagcaagggcgtgtcccagatgcccctgcgctatggcatgaacccccaccagaccccagcccagctgtacaccctgcagcccaagctgcccatcaccgtgctgaatggagcccctggcttcatcaacctgtgtgatgccctgaatgcctggcagctggtgaaggagctgaaggaggccctgggcatcccagctgctgccagcttcaagcacgtgtccccagctggagctgctgtgggcatccccctgtctgaagatgaggccaaggtgtgcatggtgtatgacctgtacaagaccctgacccccatctctgctgcctatgcccgggcccggggagctgacaggatgagcagctttggagactttgtggccctgagtgatgtgtgtgatgtgcccacagccaagatcatcagccgggaggtgtctgatggcatcatcgcccctggctatgaggaggaggccctgaccatcctgagcaagaagaagaatggaaactactgtgtgctgcagatggaccagagctacaagccagatgaaaatgaggtgaggaccctgtttggcctgcacctgagccagaagagaaataatggagtggtggacaagagcctcttcagcaatgtggtgaccaagaacaaggacctgcctgagagcgccctgcgggacctgattgtggccaccatcgctgtgaagtacacccagagcaacagcgtgtgctacgccaagaatggccaggtgattggaattggagctggccagcagagccgcatccactgcacccggctggccggggacaaggccaactactggtggctgcggcaccacccccaggtgctgtccatgaagttcaagacaggagtgaagagagctgagatcagcaatgccatcgaccagtatgtgacaggcaccatcggggaggatgaggacctgatcaagtggaaggccctgtttgaggaggtgcctgagctgctgacagaagctgagaagaaggagtgggtggagaagctgacagaggtgtccatcagcagtgatgccttcttccccttccgggacaacgtggaccgggccaagaggtctggagtggcctacatcgccgcccccagcggcagcgctgctgacaaggtggtgattgaggcctgtgatgagctgggcatcatcctggcccacaccaacctgcggctcttccaccactag

SEQ ID NO: 143010 - DNA, 1779 bp, Artificial Sequence
  derived and/or modified sequence
atggcccccggccagctggccctgttcagcgtgagcgacaagaccgggctggttgagtttgcgaggaacctgaccgctcttgggctgaacctggtggccagcggcggaactgctaaagccctgcgtgatgccggtctcgccgtccgggacgtaagcgagctcacaggcttcccggaaatgctgggagggagggtgaaaaccttgcatcctgccgttcatgcgggcatcctggccagaaatatccccgaagacaacgcagatatggcaagactggatttcaatctgatccgggtcgtggcatgcaatttgtacccctttgtgaaaacagtggcatctcccggcgtgacggtggaggaagccgtggagcagatcgacattgggggggtcacattgctgcgggcagctgccaaaaatcatgcacgggttaccgtggtttgcgaacctgaagactatgtggttgtcagcactgagatgcagtcatccgagtctaaagatacctcacttgaaacacgcagacaactcgctctgaaggccttcacacacacggcccagtatgacgaggccatctcagactattttaggaagcagtactcaaagggggtgagtcagatgcctctccgctatggaatgaatccccaccagacaccagcccagctgtacactctccagcccaagttgcccattaccgtcttgaacggcgcacccggattcataaacctctgcgatgctctgaacgcctggcagttggtcaaggagcttaaagaagcactcggaatcccggccgctgcttcctttaaacacgtttcaccggcaggcgccgccgttgggatccccctgagtgaagatgaggccaaagtttgcatggtgtacgacttgtataaaacactgacacctatcagcgcggcctacgcccgcgctcgcggagctgaccgcatgtcctcctttggggattttgtcgccctatccgacgtttgtgacgttcccaccgctaagataatctcccgggaggtcagtgacggcataatcgcccccggctacgaggaagaagcactgacaatcctgtctaagaaaaagaacgggaattattgcgttttgcaaatggaccaatcttataaacctgatgagaatgaggtgcgtacactgttcggactgcacctgagtcagaagcggaataacggtgtcgtggataagtctcttttttctaacgtcgttactaagaataaggacctccctgagagcgcccttcgagacctgattgtggctaccatcgctgtgaagtatacccagtcaaatagtgtgtgctatgccaagaacggtcaggtgattggtatcggggccggtcagcagtcaagaattcactgcacccgactggctggggacaaggccaactactggtggcttagacaccacccacaagttctcagcatgaagtttaagaccggggtgaaacgagccgaaattagtaatgctatcgaccagtacgtgacaggaacaattggagaggacgaagatttaattaaatggaaggcgctgtttgaggaggtgcccgagctgctaactgaggctgagaaaaaagaatgggtggaaaagctgactgaggtctcaatatcctccgatgccttctttccatttcgcgataacgtggatcgcgccaagcgctcaggggtggcctacattgccgccccatctggttccgccgctgataaggtcgtgattgaagcttgcgatgagctgggcattattttggcacataccaacctacgccttttccatcattag

SEQ ID NO: 143011 - DNA, 1602 bp, Artificial Sequence
  derived and/or modified sequence
atgctgggcggccgggtgaagaccctgcaccccgccgtgcacgccggtatcttagctcgcaacattcccgaggacaatgccgatatggcccgtctggatttcaatctcatccgcgtcgtggcctgcaacctttacccgttcgttaagactgtagcctcccctggcgttactgtcgaagaagctgttgagcagatcgatattgggggcgtcacgctgctccgtgctgccgcaaaaaaccatgcccgtgtgaccgtcgtgtgcgagccagaagactacgtggttgtgagcacagagatgcagtcatccgagtctaaagatacgtctttggagacgcgccggcagctggctctgaaagccttcacacatacggcacaatacgatgaagccatctcagattactttcgcaagcaatatagcaagggcgtgtcccagatgccacttcggtatggaatgaacccgcaccagacccctgcccagctgtataccctccagccaaaactgccaatcaccgtgctgaatggggcacctggctttatcaacctgtgcgacgcactgaacgcgtggcagctggttaaggagcttaaggaagccttgggaatacctgctgccgcaagcttcaagcacgtatcacctgccggagccgccgttggcatcccgttgagcgaggatgaagccaaagtttgcatggtttacgatctttacaagacccttacccctatctccgccgcatacgctagggctcgcggtgcggacaggatgtcttctttcggcgattttgtggcactcagcgacgtatgtgatgttcctaccgcaaagattatctctcgcgaagtatccgatggaattatagcgcctggatacgaggaggaagctctcacgattctcagtaaaaaaaagaatggcaactattgcgtcttacaaatggatcagtcttataaaccagacgaaaatgaggtaaggaccctgtttgggctccatctcagccagaaaaggaacaacggagtggtcgataagtcattgttttcaaacgtcgttacaaagaacaaagacttgcctgaaagcgcactgcgggacctgatcgtggccacaatcgccgttaaatatacccagtccaactctgtgtgttatgctaagaacggccaagtcattggtataggggcgggacagcaaagccgaattcattgtacccggctagctggcgacaaagctaactattggtggttgcgtcaccaccctcaggtcctgtccatgaaattcaaaacaggggttaagcgggccgagatcagcaacgccattgaccagtatgtgaccggtaccatcggggaagatgaagacctaatcaaatggaaggctctctttgaagaagtccctgaactgctcacggaagctgagaagaaggagtgggtcgagaagctgactgaggtgagtatctcctctgatgctttttttccctttcgcgacaacgtggatagggctaagcgttctggggtggcatatattgccgcaccatcagggtcagccgcagataaggtggtgattgaggcttgtgacgaactgggtatcatcttagcccatactaaccttcggctgtttcatcactag

SEQ ID NO: 143012 - DNA, 1779 bp, Artificial Sequence
  derived and/or modified sequence
atggcacctgggcagctggctctcttttctgtgagtgacaaaacaggcctcgtggagtttgcaaggaatctcaccgcactgggccttaatttggtcgcaagcggaggtaccgccaaagctttgagagatgccggtctggcagttcgggatgtgagcgagctgaccggtttccctgaaatgctggggggacgcgtgaagaccctgcaccccgctgtgcacgcaggcatattggctcggaatattccagaggacaatgcagatatggcacggctagattttaacttgatcagagtggtggcctgtaatctgtacccattcgtaaagacggtggcgagcccgggtgtgactgtggaggaagcagtggagcagatcgatatcggaggcgtcacgttactacgcgcagcagccaagaatcacgcccgtgtgacggtcgtttgcgaacccgaggattacgtcgtggtcagtactgaaatgcagagttccgagtccaaggacacttcactggagacccggaggcaactcgcgctcaaagcgttcacgcacaccgcccaatacgacgaagcaatttccgattacttccgaaagcagtactcaaagggcgtgtcccagatgcccctcaggtacggtatgaatccccatcagacgcctgcccaactgtatactctgcagcccaagcttcctatcactgtgctgaatggcgctccaggcttcattaatctgtgtgatgccctgaatgcctggcagctcgtgaaagagctcaaggaggctcttggtattcctgcagccgcatccttcaagcacgtctcccccgcaggggcagctgtgggtattccactatctgaggatgaggctaaggtgtgcatggtctacgacctttacaagacacttaccccaataagcgcagcatacgcgagggctaggggagctgaccgtatgtccagtttcggcgatttcgtggctttgtcagatgtgtgcgacgtgcctaccgcgaagataatatcccgggaagtcagcgatggtatcatcgcacccggttacgaggaggaagcactgaccatactgagcaagaagaaaaacggcaattactgtgtgctgcagatggaccagagctacaagccggacgaaaacgaggtccgcactctcttcgggttgcatctgagtcaaaagcggaataatggtgtcgtcgataagtccctgttttcaaacgtggtcaccaaaaacaaagatctccctgagtccgctttaagggacctgattgttgcaacaatagccgtaaagtatacacagtcgaattctgtctgctacgccaaaaatgggcaagtgatcggaattggcgctggccagcaaagtagaatccactgtactcggttggctggggacaaggccaattactggtggttacgccatcatccacaagtcttaagcatgaagtttaagactggtgtgaaacgggctgaaatttccaacgctattgatcagtatgtgaccgggaccatcggtgaagacgaagatctgatcaaatggaaagctctctttgaagaggtgcccgagctgttaactgaggccgaaaaaaaggagtgggtggaaaaacttaccgaggtctccatcagctctgacgcattttttcccttcagagacaacgtggatagagctaaaaggagcggggtagcctacatcgccgctccgtccggcagcgcggcagacaaagtcgtgatcgaggcctgcgacgagcttggcattattctggcacacaccaacctgcggctttttcaccactag

SEQ ID NO: 143013 - DNA, 1602 bp, Artificial Sequence
  derived and/or modified sequence
atgctgggcggtcgggtaaagaccctgcaccccgcagtccacgcagggatcctggcgaggaacatccctgaagacaacgccgatatggctagactggattttaaccttatcagggttgttgcatgtaacttgtacccattcgttaagaccgtcgcttctccaggtgtcaccgtcgaggaagcagtcgagcagatcgatattgggggagtaacccttctccgggcagccgcaaaaaatcatgcacgggtgactgtggtctgtgaaccagaggactacgttgtcgtctccactgagatgcagtcttccgaatctaaggacacaagcctcgaaactaggcgtcagttggcgctgaaagccttcacccacacagcccagtacgacgaggccattagcgactactttcgaaaacagtatagcaagggtgtgagccagatgccgctcagatatgggatgaacccacatcagacacctgcccagttgtacacgctgcaacctaagttaccaatcacagtgctgaatggcgcacccggttttattaacctgtgtgacgctctgaatgcttggcagttagttaaagagctgaaggaggctctgggcattcctgccgcagcatcctttaaacacgtgagtcccgctggagcggctgtgggaatacccctgtctgaggacgaggccaaggtgtgtatggtatatgatctgtacaaaactctaacaccaatatctgccgcttacgccagagctcgcggagccgacaggatgagttccttcggagacttcgtggccctgagtgacgtctgtgacgtacctaccgctaagattataagtagagaggttagcgacggaattatagcccctggctacgaggaggaggcgctcactatcctctccaaaaaaaagaacggaaactactgcgtgctccagatggaccaaagttataagccagacgagaatgaggtgcggaccctatttgggctgcacctgtctcagaaacgcaataacggagtagttgacaagagtctgtttagtaatgtagtcacaaaaaataaagacttgcccgaaagcgcgctgagagatctgattgtcgccactattgcagtgaaatatacccagagtaatagtgtgtgctacgctaaaaatggacaggtcatcggtattggggctgggcagcagagtcgtatccactgtacgcgcctggccggagataaggctaattattggtggctacgccatcaccctcaggttctaagcatgaagtttaaaaccggtgtgaaaagggccgagatttccaatgcaattgaccagtacgtaacaggaacaattggagaagacgaggatttgataaagtggaaggccctgtttgaggaagtgccagagctgctgaccgaagccgaaaagaaggaatgggttgagaagctgaccgaggtttccatatcttctgatgcgttttttccttttagagataacgtggacagagctaagcgcagtggcgtggcttatattgccgcaccgagcggatctgccgcagacaaggttgtgatcgaagcttgcgacgagcttggtatcattctcgcgcatacaaacctgcgcctgttccaccactag

SEQ ID NO: 143014 - DNA, 2213 bp, Artificial Sequence
  derived and/or modified sequence
actttggggtcgtgggcagatcgctggctcccacgcctggacttcgggatcgcaggcaggatcccttccagcccaagcactccgcccaggcgcgccaggcagagccccaccccatcccgccgttcccttcagccccggggcgcggatcttgcatctgaaactgagcagagcagggcgccgggcagggccggcgggccacgtgataagcccggaaacagctccgccccctcgcttcctgagccgccacatcccggcagccctcctacctgcgcacgtggtgccgccgctgctgcctcccgctcgccctgaacccagtgcctgcagccatggctcccggccagctcgccttatttagtgtctctgacaaaaccggccttgtggaatttgcaagaaacctgaccgctcttggtttgaatctggtcgcttccggagggactgcaaaagctctcagggatgctggtctggcagtcagagatgtctctgagttgacgggatttcctgaaatgttggggggacgtgtgaaaactttgcatcctgcagtccatgctggaatcctagctcgtaatattccagaagataatgctgacatggccagacttgatttcaatcttataagagttgttgcctgcaatctctatccctttgtaaagacagtggcttctccaggtgtaactgttgaggaggctgtggagcaaattgacattggtggagtaaccttactgagagctgcagccaaaaaccacgctcgagtgacagtggtgtgtgaaccagaggactatgtggtggtgtccacggagatgcagagctccgagagtaaggacacctccttggagactagacgccagttagccttgaaggcattcactcatacggcacaatatgatgaagcaatttcagattatttcaggaaacagtacagcaaaggcgtatctcagatgcccttgagatatggaatgaacccacatcagacccctgcccagctgtacacactgcagcccaagcttcccatcacagttctaaatggagcccctggatttataaacttgtgcgatgctttgaacgcctggcagctggtgaaggaactcaaggaggctttaggtattccagccgctgcctctttcaaacatgtcagcccagcaggtgctgctgttggaattccactcagtgaagatgaggccaaagtctgcatggtttatgatctctataaaaccctcacacccatctcagcggcatatgcaagagcaagaggggctgataggatgtcttcatttggtgattttgttgcattgtccgatgtttgtgatgtaccaactgcaaaaattatttccagagaagtatctgatggtataattgccccaggatatgaagaagaagccttgacaatactttccaaaaagaaaaatggaaactattgtgtccttcagatggaccaatcttacaaaccagatgaaaatgaagttcgaactctctttggtcttcatttaagccagaagagaaataatggtgtcgtcgacaagtcattatttagcaatgttgttaccaaaaataaagatttgccagagtctgccctccgagacctcatcgtagccaccattgctgtcaagtacactcagtctaactctgtgtgctacgccaagaacgggcaggttatcggcattggagcaggacagcagtctcgtatacactgcactcgccttgcaggagataaggcaaactattggtggcttagacaccatccacaagtgctttcgatgaagtttaaaacaggagtgaagagagcagaaatctccaatgccatcgatcaatatgtgactggaaccattggcgaggatgaagatttgataaagtggaaggcactgtttgaggaagtccctgagttactcactgaggcagagaagaaggaatgggttgagaaactgactgaagtttctatcagctctgatgccttcttccctttccgagataacgtagacagagctaaaaggagtggtgtggcgtacattgcggctccctccggttctgctgctgacaaagttgtgattgaggcctgcgacgaactgggaatcatcctcgctcatacgaaccttcggctcttccaccactgattttaccacacactgttttttggcttgcttatgtgtaggtgaacagtcacgcctgaaactttgaggataactttttaaaaaaataaaacagtatctcttaatcactgg

SEQ ID NO: 143015 - DNA, 2187 bp, Artificial Sequence
  derived and/or modified sequence
agccctcctacctgcgcacgtggtgccgccgctgctgcctcccgctcgccctgaacccagtgcctgcagccatggctcccggccagctcggtgaggccctagcggagcggcgcggtctgcgtcctcgcctgcggccccccacgctcccgccttggcggcggccggcgggacccggcactgcaggggcggcgctgcgggattgaaagccagcgtccccgctccccggccgggccgcagcctgcgtggggcccgccttagagcagctcgcgggtgtaagacctggggaggcccggaccaggcctgcgaacgcagggtccagccttatttagtgtctctgacaaaaccggccttgtggaatttgcaagaaacctgaccgctcttggtttgaatctggtcgcttccggagggactgcaaaagctctcagggatgctggtctggcagtcagagatgtctctgagttgacgggatttcctgaaatgttggggggacgtgtgaaaactttgcatcctgcagtccatgctggaatcctagctcgtaatattccagaagataatgctgacatggccagacttgatttcaatcttataagagttgttgcctgcaatctctatccctttgtaaagacagtggcttctccaggtgtaactgttgaggaggctgtggagcaaattgacattggtggagtaaccttactgagagctgcagccaaaaaccacgctcgagtgacagtggtgtgtgaaccagaggactatgtggtggtgtccacggagatgcagagctccgagagtaaggacacctccttggagactagacgccagttagccttgaaggcattcactcatacggcacaatatgatgaagcaatttcagattatttcaggaaacagtacagcaaaggcgtatctcagatgcccttgagatatggaatgaacccacatcagacccctgcccagctgtacacactgcagcccaagcttcccatcacagttctaaatggagcccctggatttataaacttgtgcgatgctttgaacgcctggcagctggtgaaggaactcaaggaggctttaggtattccagccgctgcctctttcaaacatgtcagcccagcaggtgctgctgttggaattccactcagtgaagatgaggccaaagtctgcatggtttatgatctctataaaaccctcacacccatctcagcggcatatgcaagagcaagaggggctgataggatgtcttcatttggtgattttgttgcattgtccgatgtttgtgatgtaccaactgcaaaaattatttccagagaagtatctgatggtataattgccccaggatatgaagaagaagccttgacaatactttccaaaaagaaaaatggaaactattgtgtccttcagatggaccaatcttacaaaccagatgaaaatgaagttcgaactctctttggtcttcatttaagccagaagagaaataatggtgtcgtcgacaagtcattatttagcaatgttgttaccaaaaataaagatttgccagagtctgccctccgagacctcatcgtagccaccattgctgtcaagtacactcagtctaactctgtgtgctacgccaagaacgggcaggttatcggcattggagcaggacagcagtctcgtatacactgcactcgccttgcaggagataaggcaaactattggtggcttagacaccatccacaagtgctttcgatgaagtttaaaacaggagtgaagagagcagaaatctccaatgccatcgatcaatatgtgactggaaccattggcgaggatgaagatttgataaagtggaaggcactgtttgaggaagtccctgagttactcactgaggcagagaagaaggaatgggttgagaaactgactgaagtttctatcagctctgatgccttcttccctttccgagataacgtagacagagctaaaaggagtggtgtggcgtacattgcggctccctccggttctgctgctgacaaagttgtgattgaggcctgcgacgaactgggaatcatcctcgctcatacgaaccttcggctcttccaccactgattttaccacacactgttttttggcttgcttatgtgtaggtgaacagtcacgcctgaaactttgaggataactttttaaaaaaataaaacagtatctcttaatcactgg

SEQ ID NO: 143016 - DNA, 1779 bp, Artificial Sequence
  derived and/or modified sequence
atggcccccggccagctggccctgttcagcgtgagcgacaagaccggcctggtggagttcgccagaaacctgaccgccctgggcctgaacctggtggccagcggcggcaccgccaaggccctgagagacgccggcctggccgtgagagacgtgagcgagctgaccggcttccccgagatgctgggcggcagagtgaagaccctgcaccccgccgtgcacgccggcatcctggccagaaacatccccgaggacaacgccgacatggccagactggacttcaacctgatcagagtggtggcctgcaacctgtaccccttcgtgaagaccgtggccagccccggcgtgaccgtggaggaggccgtggagcagatcgacatcggcggcgtgaccctgctgagagccgccgccaagaaccacgccagagtgaccgtggtgtgcgagcccgaggactacgtggtggtgagcaccgagatgcagagcagcgagagcaaggacaccagcctggagaccagaagacagctggccctgaaggccttcacccacaccgcccagtacgacgaggccatcagcgactacttcagaaagcagtacagcaagggcgtgagccagatgcccctgagatacggcatgaacccccaccagacccccgcccagctgtacaccctgcagcccaagctgcccatcaccgtgctgaacggcgcccccggcttcatcaacctgtgcgacgccctgaacgcctggcagctggtgaaggagctgaaggaggccctgggcatccccgccgccgccagcttcaagcacgtgagccccgccggcgccgccgtgggcatccccctgagcgaggacgaggccaaggtgtgcatggtgtacgacctgtacaagaccctgacccccatcagcgccgcctacgccagagccagaggcgccgacagaatgagcagcttcggcgacttcgtggccctgagcgacgtgtgcgacgtgcccaccgccaagatcatcagcagagaggtgagcgacggcatcatcgcccccggctacgaggaggaggccctgaccatcctgagcaagaagaagaacggcaactactgcgtgctgcagatggaccagagctacaagcccgacgagaacgaggtgagaaccctgttcggcctgcacctgagccagaagagaaacaacggcgtggtggacaagagcctgttcagcaacgtggtgaccaagaacaaggacctgcccgagagcgccctgagagacctgatcgtggccaccatcgccgtgaagtacacccagagcaacagcgtgtgctacgccaagaacggccaggtgatcggcatcggcgccggccagcagagcagaatccactgcaccagactggccggcgacaaggccaactactggtggctgagacaccacccccaggtgctgagcatgaagttcaagaccggcgtgaagagagccgagatcagcaacgccatcgaccagtacgtgaccggcaccatcggcgaggacgaggacctgatcaagtggaaggccctgttcgaggaggtgcccgagctgctgaccgaggccgagaagaaggagtgggtggagaagctgaccgaggtgagcatcagcagcgacgccttcttccccttcagagacaacgtggacagagccaagagaagcggcgtggcctacatcgccgcccccagcggcagcgccgccgacaaggtggtgatcgaggcctgcgacgagctgggcatcatcctggcccacaccaacctgagactgttccaccactag

SEQ ID NO: 143017 - DNA, 1602 bp, Artificial Sequence
  derived and/or modified sequence
atgctgggcggcagagtgaagaccctgcaccccgccgtgcacgccggcatcctggccagaaacatccccgaggacaacgccgacatggccagactggacttcaacctgatcagagtggtggcctgcaacctgtaccccttcgtgaagaccgtggccagccccggcgtgaccgtggaggaggccgtggagcagatcgacatcggcggcgtgaccctgctgagagccgccgccaagaaccacgccagagtgaccgtggtgtgcgagcccgaggactacgtggtggtgagcaccgagatgcagagcagcgagagcaaggacaccagcctggagaccagaagacagctggccctgaaggccttcacccacaccgcccagtacgacgaggccatcagcgactacttcagaaagcagtacagcaagggcgtgagccagatgcccctgagatacggcatgaacccccaccagacccccgcccagctgtacaccctgcagcccaagctgcccatcaccgtgctgaacggcgcccccggcttcatcaacctgtgcgacgccctgaacgcctggcagctggtgaaggagctgaaggaggccctgggcatccccgccgccgccagcttcaagcacgtgagccccgccggcgccgccgtgggcatccccctgagcgaggacgaggccaaggtgtgcatggtgtacgacctgtacaagaccctgacccccatcagcgccgcctacgccagagccagaggcgccgacagaatgagcagcttcggcgacttcgtggccctgagcgacgtgtgcgacgtgcccaccgccaagatcatcagcagagaggtgagcgacggcatcatcgcccccggctacgaggaggaggccctgaccatcctgagcaagaagaagaacggcaactactgcgtgctgcagatggaccagagctacaagcccgacgagaacgaggtgagaaccctgttcggcctgcacctgagccagaagagaaacaacggcgtggtggacaagagcctgttcagcaacgtggtgaccaagaacaaggacctgcccgagagcgccctgagagacctgatcgtggccaccatcgccgtgaagtacacccagagcaacagcgtgtgctacgccaagaacggccaggtgatcggcatcggcgccggccagcagagcagaatccactgcaccagactggccggcgacaaggccaactactggtggctgagacaccacccccaggtgctgagcatgaagttcaagaccggcgtgaagagagccgagatcagcaacgccatcgaccagtacgtgaccggcaccatcggcgaggacgaggacctgatcaagtggaaggccctgttcgaggaggtgcccgagctgctgaccgaggccgagaagaaggagtgggtggagaagctgaccgaggtgagcatcagcagcgacgccttcttccccttcagagacaacgtggacagagccaagagaagcggcgtggcctacatcgccgcccccagcggcagcgccgccgacaaggtggtgatcgaggcctgcgacgagctgggcatcatcctggcccacaccaacctgagactgttccaccactag

SEQ ID NO: 143018 - protein, 68 aa, Artificial Sequence
  derived and/or modified sequence
MPKHEFSVDMTCGGCAEAVSRVLNKLGGVKYDIDLPNKKVCIESEHSMDTLLATLKKTGKTVSYLGLE

SEQ ID NO: 143019 - DNA, 207 bp, Artificial Sequence
  derived and/or modified sequence
atgcccaagcacgaattctcagtcgatatgacctgtggtggttgcgccgaagccgtgtccagggtgctgaacaagctgggaggtgtaaagtatgatattgacttgcctaataaaaaggtgtgcatcgaatctgagcactctatggacactctgttggctaccctgaagaagaccgggaagaccgtttcctatctgggcctggaatag

SEQ ID NO: 143020 - DNA, 207 bp, Artificial Sequence
  derived and/or modified sequence
atgcctaagcacgagttctctgttgacatgacatgtggaggctgtgccgaggcggtctcccgtgtcttaaataaacttggaggtgtgaagtatgacatagacctgccaaacaagaaagtttgtatcgagtctgagcattccatggacacgctgctcgctacactcaaaaagactggcaaaacggtgagttacctggggctggagtag

SEQ ID NO: 143021 - DNA, 207 bp, Artificial Sequence
  derived and/or modified sequence
atgccaaaacacgagtttagtgttgatatgacttgcggtgggtgcgcggaggcggtgtcccgggtcctgaacaagctcgggggcgtaaaatatgatatagaccttccaaacaagaaggtttgcatcgaaagtgagcacagcatggacacgcttttggcgaccctgaagaaaacaggtaagaccgtgtcctacttggggctcgagtag

SEQ ID NO: 143022 - DNA, 207 bp, Artificial Sequence
  derived and/or modified sequence
atgcccaagcatgagttctctgtggacatgacctgtggcggctgtgccgaggccgtgtcccgggtgctgaacaagctgggcggcgtgaagtatgacatcgacctgcccaacaagaaggtgtgcatcgagagcgagcacagcatggacaccctgctggccaccctgaagaagacaggcaagacagtgtcctacctgggcctggagtag

SEQ ID NO: 143023 - DNA, 207 bp, Artificial Sequence
  derived and/or modified sequence
atgcccaagcacgagttcagcgtggacatgacctgcggcggctgcgcggaagccgtttcccgagtgctgaataagttagggggcgtgaaatacgatatcgatctcccaaataaaaaagtttgcatcgaatcagaacactcaatggacacactactggctaccttaaagaagactggtaagactgtgtcctacctcggcctggaatag

SEQ ID NO: 143024 - DNA, 207 bp, Artificial Sequence
  derived and/or modified sequence
atgcccaagcacgagttcagcgtggacatgacctgcggcggctgcgccgaagccgtctctagagttctgaataagctgggaggagttaagtatgatatcgacctccccaacaagaaagtgtgcatcgaatcagagcactctatggataccctgctcgctacactgaagaagacaggcaagacagtgagctatctgggactcgagtag

SEQ ID NO: 143025 - DNA, 207 bp, Artificial Sequence
  derived and/or modified sequence
atgcccaagcacgagttcagcgtggacatgacctgcggcggctgcgctgaggccgtaagcagagtcttgaataagctgggcggggtgaagtatgacatcgatctgccaaataagaaggtgtgtatagaaagtgaacatagcatggatactcttctggccaccttgaagaagaccgggaaaaccgtcagttaccttgggctcgaatag

SEQ ID NO: 143026 - DNA, 207 bp, Artificial Sequence
  derived and/or modified sequence
atgccgaagcatgagttctccgtcgacatgacctgtgggggatgtgcggaggccgtgtctagagtgttgaataaactgggaggggtgaagtatgatatcgacctccctaacaaaaaggtttgtattgagagcgaacattctatggataccttgctggcaacacttaagaaaaccggaaagaccgtatcatacctgggcctcgaatag

SEQ ID NO: 143027 - DNA, 207 bp, Artificial Sequence
  derived and/or modified sequence
atgcctaaacatgaattctctgtcgacatgacgtgcggcggatgtgcagaggcagtttcaagggtgcttaataaactcgggggagtgaaatatgacatagaccttcccaacaaaaaggtttgtatcgagtctgagcatagtatggacaccctgttggccaccctgaagaagacagggaagacagtaagctatttgggcctggaatag

SEQ ID NO: 143028 - DNA, 207 bp, Artificial Sequence
  derived and/or modified sequence
atgccaaaacacgagtttagcgttgacatgacatgtggcggttgcgcggaggccgtgtctcgggtcttaaataaactgggaggcgtcaaatatgacatcgatcttccgaacaaaaaagtttgcatcgagtcagaacacagtatggacacactgttagctacactgaaaaagactggcaagaccgtatcttatctcgggctcgaatag

SEQ ID NO: 143029 - DNA, 488 bp, Artificial Sequence
  derived and/or modified sequence
gcgcactctcggaagcgcagccgaacccgccctccgaatccagagaggcgctgctgacaccgccgccacaccgccgccacaccgccgctgcctcagtcatgccgaagcacgagttctctgtggacatgacctgtggaggctgtgctgaagctgtctctcgggtcctcaataagcttggaggagttaagtatgacattgacctgcccaacaagaaggtctgcattgaatctgagcacagcatggacactctgcttgcaaccctgaagaaaacaggaaagactgtttcctaccttggccttgagtagcaggggcctggtccccacagcccacaggatggaccaaagggggcaggatgctgatcctcccgctggcttccagacagacctgggacttggcagtcatgccgggtgatggtgttcctgcggagaccctcagttgtcctattccttcctagcttccctgcaataaaatcaagctgcttttgttgg

SEQ ID NO: 143030 - DNA, 591 bp, Artificial Sequence
  derived and/or modified sequence
ctctagtgcgcactctcggaagcgcagccgaacccgccctccgaatccagagaggcgctgctgacaccgccgccacaccgccgccacaccgccgctgcctcagtcatgccgaagcacgagttctctgtggacatgacctgtggaggctgtgctgaagctgtctctcgggtcctcaataagcttggaggagttaagtatgacattgacctgcccaacaagaaggtctgcattgaatctgagcacagcatggacactctgcttgcaaccctgaagaaaacaggaaagactgtttcctaccttggccttgagtagcaggggcctggtccccacagcccacaggatggaccaaagggggcaggtgggtaaggccccagcacttgctgaacaaacctacagctcacacctctcatcagagcgaacaccttggcctttgagagcttgagtggagcgggagagccctctgggttcttttcaatccactgtccaccttctttggagtggttacaaatattttattattgtctaatgcaaatcacaagttcagggaattcttacagaccctgtgagtggacagagcactgtgtaatgtct

SEQ ID NO: 143031 - DNA, 749 bp, Artificial Sequence
  derived and/or modified sequence
gcaaaaccgaaggcgcttctgcgacgcgcggaccgcaagactccaatcagactttagtgctgcccccaccctaaacgaaagcctccttctggtccgaaccgactggatcccttggccaggggaggaaaaggccgggtgaccacgggcccggcccgcagaaaggaggcggcgcggccggcagggatcaggactggagggggcggagcctccctcgcggccgggcccggagtgggaggggcctccgggaccaggcctctagtgcgcactctcggaagcgcagccgaacccgccctccgaatccagagaggcgctgctgacaccgccgccacaccgccgccacaccgccgctgcctcagtcatgccgaagcacgagttctctgtggacatgacctgtggaggctgtgctgaagctgtctctcgggtcctcaataagcttggaggagttaagtatgacattgacctgcccaacaagaaggtctgcattgaatctgagcacagcatggacactctgcttgcaaccctgaagaaaacaggaaagactgtttcctaccttggccttgagtagcaggggcctggtccccacagcccacaggatggaccaaagggggcaggatgctgatcctcccgctggcttccagacagacctgggacttggcagtcatgccgggtgatggtgttcctgcggagaccctcagttgtcctattccttcctagcttccctgcaataaaatcaagctgcttttgttgga

SEQ ID NO: 143032 - DNA, 207 bp, Artificial Sequence
  derived and/or modified sequence
atgcccaagcacgagttcagcgtggacatgacctgcggcggctgcgccgaggccgtgagcagagtgctgaacaagctgggcggcgtgaagtacgacatcgacctgcccaacaagaaggtgtgcatcgagagcgagcacagcatggacaccctgctggccaccctgaagaagaccggcaagaccgtgagctacctgggcctggagtag

SEQ ID NO: 143033 - protein, 101 aa, Artificial Sequence
  derived and/or modified sequence
MSRSVALAVLALLSLSGLEAIQRTPKIQVYSRHPAENGKSNFLNCYVSGFHPSDIEVDLLKNGERIEKVEHSDLSFSKDWSFYLLYYTEFTPTEKMSMPAV

SEQ ID NO: 143034 - protein, 119 aa, Artificial Sequence
  derived and/or modified sequence
MSRSVALAVLALLSLSGLEAIQRTPKIQVYSRHPAENGKSNFLNCYVSGFHPSDIEVDLLKNGERIEKVEHSDLSFSKDWSFYLLYYTEFTPTEKDEYACRVNHVTLSQPKIVKWDRDM

SEQ ID NO: 143035 - DNA, 306 bp, Artificial Sequence
  derived and/or modified sequence
atgtcgcggtccgtggcactcgctgtgctcgccctcctcagcctgtctggccttgaagcaattcaaagaacccctaaaatccaggtgtactctagacatccagcagagaacggtaagtccaatttccttaactgttacgtgtccggattccatccgagtgacatcgaggtggatctgttaaagaacggtgaacgcatagaaaaggtagagcactcggacctgtctttctcaaaggactggtctttttacctgctctactacactgagtttacaccaaccgaaaagatgtccatgcctgcagtctag

SEQ ID NO: 143036 - DNA, 360 bp, Artificial Sequence
  derived and/or modified sequence
atgagccggagcgtggccctggctgtcttggccttactctcattatccggcctggaagctattcagaggacacccaagattcaagtgtatagccgccacccagcggagaatgggaaaagtaacttcttgaactgctatgtaagcggctttcatccttctgacattgaggtggatttgctgaagaatggggagcgtattgaaaaggtagaacattctgacctgtccttctcaaaagactggtccttctacctcctctactacacagagttcaccccaactgaaaaggacgaatatgcatgccgagtgaaccacgtcacactcagtcaacccaagatcgtgaaatgggaccgcgatatgtag

SEQ ID NO: 143037 - DNA, 360 bp, Artificial Sequence
  derived and/or modified sequence
atgagccggtcggtcgcactcgctgttctggcgctgctctcactgtctgggttggaggccatacagaggacgcctaagatccaggtgtactccaggcatccagctgagaacgggaagtctaacttcctcaattgttacgtcagtggattccatccatctgacatcgaggtggatctgctgaaaaacggagagcggattgaaaaggtggaacacagcgatctctctttctcgaaggattggtcattctacctactctactacaccgagtttactcccactgaaaaagatgaatatgcatgtagggtgaatcatgtcacactctcgcagccaaagatagtgaaatgggacagggatatgtag

SEQ ID NO: 143038 - DNA, 360 bp, Artificial Sequence
  derived and/or modified sequence
atgagtcggtccgtggcgctcgccgtcctggctcttctttccctgagcggactcgaggccatccagcgcacaccgaagattcaggtatactcccgtcaccctgccgagaacggcaagagcaattttctgaactgttacgtgtctggattccatcctagcgacattgaagtggacttattgaaaaacggagaaagaatcgagaaggtggagcactccgatctttctttctcaaaggactggtctttctacctgctgtattatactgaatttacacctaccgaaaaggacgaatacgcttgtagagtcaatcacgtcaccctcagccagcccaagatcgtcaagtgggaccgcgacatgtag

SEQ ID NO: 143039 - DNA, 306 bp, Artificial Sequence
  derived and/or modified sequence
atgagccgctctgtggccctggccgtgctggccctgctgagcctgagcggcctggaggccatccagaggacccccaagatccaggtgtacagccgccacccagcagaaaatggcaagagcaacttcctgaactgctacgtgtctggcttccaccccagcgacatcgaggtggacctgctgaagaatggagagcgcatcgagaaggtggagcacagcgacctgtccttcagcaaggactggagcttctacctgctgtactacacagagttcacccccacagagaagatgtccatgcctgctgtgtag

SEQ ID NO: 143040 - DNA, 360 bp, Artificial Sequence
  derived and/or modified sequence
atgagccgctctgtggccctggccgtgctggccctgctgagcctgagcggcctggaggccatccagaggacccccaagatccaggtgtacagccgccacccagcagaaaatggcaagagcaacttcctgaactgctacgtgtctggcttccaccccagcgacatcgaggtggacctgctgaagaatggagagcgcatcgagaaggtggagcacagcgacctgtccttcagcaaggactggagcttctacctgctgtactacacagagttcacccccacagagaaggatgaatatgcctgccgggtgaaccacgtgaccctgagccagcccaagatcgtgaagtgggaccgggacatgtag

SEQ ID NO: 143041 - DNA, 306 bp, Artificial Sequence
  derived and/or modified sequence
atgagccggagcgtggccctggccgtgctggccctgctgagcctgagtggcctggaagccatacagcgaactccgaagatccaggtttattctcggcaccccgccgagaatgggaaatcaaactttctgaactgctacgtgtccggattccacccgtctgacatcgaggtagacttgttaaaaaacggagaaaggatcgagaaagtagagcactcagatctttctttctctaaagattggtcattttacctgctttactacacagagtttacccctactgaaaaaatgtccatgccagcagtctag

SEQ ID NO: 143042 - DNA, 360 bp, Artificial Sequence
  derived and/or modified sequence
atgagccggagcgtggccctggccgtgctggccctgctgagcctgagcggcctagaggcaattcaacggacaccaaaaatacaagtgtattcccggcatcccgccgaaaatgggaaaagtaattttctgaactgttacgtgtcaggctttcacccaagtgacatcgaagtcgacttgctcaagaatggtgaacggatagaaaaggtggaacatagcgatttaagtttctcaaaggactggagcttttacctgctatactacacagaatttacccctacagaaaaggatgagtacgcatgccgtgttaatcatgtaactctctcccaacctaaaatcgtcaagtgggacagagatatgtag

SEQ ID NO: 143043 - DNA, 360 bp, Artificial Sequence
  derived and/or modified sequence
atgagccggagcgtggccctggccgtgctggccctgctgagcctgtcagggctggaagctatccaacggacccccaagatacaggtgtattcacgccatcccgccgaaaacggaaagtccaatttcctgaactgctacgtgtccgggttccacccttccgatatcgaggtcgacctcctgaagaacggcgagcgcattgaaaaagttgaacactctgacctctctttcagcaaagactggtctttctaccttttgtactatacagagttcactcctactgaaaaagacgaatacgcttgtcgggttaatcatgttacacttagccagcccaagatagtgaagtgggacagagacatgtag

SEQ ID NO: 143044 - DNA, 360 bp, Artificial Sequence
  derived and/or modified sequence
atgagccggagcgtggccctggccgtgctggccctgctgagcctgagcgggctagaggccatccagaggacccctaagatacaggtctatagtagacatcctgccgaaaatggcaagtcaaatttcctgaactgttatgtgagcggctttcatcctagtgacattgaggtggacctgctcaagaacggagaacggattgaaaaagtagaacacagcgatctctccttctccaaggactggtccttctacctcctttactacaccgaatttacaccaaccgaaaaggatgagtatgcttgtagagtgaaccacgttactctgtcccaaccaaagatagtcaaatgggacagggacatgtag

SEQ ID NO: 143045 - DNA, 306 bp, Artificial Sequence
  derived and/or modified sequence
atgagcaggagtgtcgccttggccgttcttgcactgctttctctgtctggactcgaagccattcaacgaacaccaaaaattcaggtgtacagccgtcaccctgccgaaaacggtaagagcaactttctcaactgttacgtgtcaggattccatccatctgacatcgaagtggatctcttaaagaatggagaacgaattgagaaggtggaacactcagatctcagtttctccaaggactggtcattctacctgctctattacacagagtttacgcccacagagaaaatgagcatgcccgctgtttag

SEQ ID NO: 143046 - DNA, 360 bp, Artificial Sequence
  derived and/or modified sequence
atgtcccgctctgtcgcactggcggttctcgccctcttgagtctgtccggactggaagctatccagaggacgccaaagatacaggtctactcccgacatcccgcagagaacgggaagagtaacttcctcaattgctacgtgagtggctttcacccctcagacatcgaggtagacctgctcaagaatggagagaggattgagaaagtcgaacacagtgacctgtccttctccaaggactggagcttctaccttctgtattatacagagtttacacccacagagaaagacgagtatgcttgtagggtcaaccacgtgacactttcacagcccaagattgtgaaatgggatcgcgacatgtag

SEQ ID NO: 143047 - DNA, 360 bp, Artificial Sequence
  derived and/or modified sequence
atgagccgttctgtggcattagccgtccttgcattgctctctttgtcaggcctagaagcaatccagcggacacccaagatccaagtttactcaagacaccccgctgaaaatgggaaaagcaacttcctgaactgctatgtgtccggcttccacccctctgacatagaagtggacctgctgaaaaacggcgagcgtatagagaaagtagagcactcagacctcagcttctccaaggactggagtttttacctactttactacacggaatttactcctacagagaaggatgagtatgcgtgtcgggtcaatcacgtgactctatcccagcccaagatagtgaaatgggatagagacatgtag

SEQ ID NO: 143048 - DNA, 360 bp, Artificial Sequence
  derived and/or modified sequence
atgtctcgatcggtggcgttggcggtgctggctctgctgagcctttcaggcctcgaggccattcagcggaccccgaaaattcaggtgtactcacggcatccagccgaaaacgggaagtcaaacttcctcaactgttacgtttctggcttccatccgtcagacatagaagttgacctgctaaagaatggggagcggatcgaaaaggttgaacatagcgatctgagcttctccaaggattggtctttttacctgttatattacaccgagtttacccccacagaaaaagatgaatacgcttgccgcgtgaatcacgtgaccctgtcccagccaaagatcgtgaagtgggacagggacatgtag

SEQ ID NO: 143049 - DNA, 306 bp, Artificial Sequence
  derived and/or modified sequence
atgtcccgatccgttgccctcgctgtcctcgcccttttatctttgagcggacttgaagccattcagcgaacccctaaaatccaggtatactctaggcacccggccgagaacgggaagtccaattttctgaattgctatgtcagtggttttcacccttctgacattgaggttgacctgctgaagaatggcgaacgcatcgagaaggtcgagcactctgatttaagcttttcaaaagactggtccttttatctgctgtactatactgagtttactccaactgaaaaaatgtccatgccagcggtgtag

SEQ ID NO: 143050 - DNA, 360 bp, Artificial Sequence
  derived and/or modified sequence
atgagccgctctgtggccctcgccgtacttgccctcctttctctgagtgggctcgaggcgatccagcgaaccccaaagatacaagtctattccagacatcccgcagagaacggtaaatctaattttctaaactgttacgtctctggctttcacccctctgatattgaggtagatttgcttaaaaatggagaacgtattgaaaaagttgaacattcagacctatcgttcagtaaagactggtctttttacttgttatattataccgagtttacaccaactgagaaggacgagtatgcatgtcgagtcaaccacgtaactttaagtcagccaaaaatcgtgaaatgggacagagacatgtag

SEQ ID NO: 143051 - DNA, 360 bp, Artificial Sequence
  derived and/or modified sequence
atgtcacggtctgtagcactcgcagtgttggcccttctgagcttatctggtcttgaagctattcagcgcacgccaaaaatacaggtgtacagtcgacatcctgctgagaatggcaaaagcaattttctgaactgctacgtgtctggcttccacccatcagatatagaagtcgatcttctcaagaacggcgaaagaatagagaaggtggagcacagtgatctatctttttccaaggattggtctttttacttgctttactatacagaatttaccccaacagaaaaggacgagtatgcatgcagagtaaaccatgtcaccctgagccagccaaagatcgtgaaatgggatcgggacatgtag

SEQ ID NO: 143052 - DNA, 360 bp, Artificial Sequence
  derived and/or modified sequence
atgagccgctccgtcgcactcgccgtcctggcccttcttagtttgtctggtttggaggctatccaaaggacccccaagatccaagtttacagtcgccaccctgctgagaatggaaagagcaatttcctcaattgctacgtttcaggctttcatccttccgatatcgaggtcgatctactcaaaaatggggaacggattgaaaaggtggagcacagcgacctgtctttttcaaaggactggtccttttacctgttatactataccgaatttactccaaccgagaaagatgagtatgcatgtcgggtcaaccacgtaacactgtctcagccaaaaatcgtcaaatgggatcgggatatgtag

SEQ ID NO: 143053 - DNA, 360 bp, Artificial Sequence
  derived and/or modified sequence
atgtcacgctctgttgccctggccgtattggccctcctctccctctccggcctggaagccatacaacgaactccgaagattcaagtctacagtcgtcatccagcagagaacgggaagtccaattttctgaattgctatgtctctgggttccacccctccgatatcgaggtggaccttcttaaaaatggggaacggatcgaaaaagtggaacattctgacctgtcattctctaaagactggagcttttatttactgtactacactgaattcacacccacggaaaaggacgagtatgcttgccgagtcaaccacgtaactttaagtcagccaaaaatcgtgaaatgggacagagacatgtag

SEQ ID NO: 143054 - DNA, 360 bp, Artificial Sequence
  derived and/or modified sequence
atgagtcgaagtgtcgccttggcggtgctggctttactatcactctctggcctcgaagccattcagagaaccccgaagatccaggtttattcgaggcacccagccgagaatggaaaaagcaattttctgaattgttacgtgagtggatttcatccttccgatatagaggtagatttgctgaaaaatggggaaagaattgaaaaggtcgagcactcagatctcagtttttctaaggactggtctttctacttactttactacacagagtttacccctaccgaaaaagatgaatatgcatgcagagttaaccacgttaccttaagtcaacctaagatcgttaaatgggacagagatatgtag

SEQ ID NO: 143055 - DNA, 360 bp, Artificial Sequence
  derived and/or modified sequence
atgtcacgctccgttgcactcgcagtccttgcattgctgagcctgtccggcttagaggcaattcaacgaacgcccaaaatccaggtctatagccgacatcctgccgagaacggaaagagtaattttttaaattgttacgtgagtgggttccacccttccgatattgaagtggatctgctcaagaatggagaacgcatcgaaaaggtcgaacattctgacctgagtttctctaaggactggtcgttttaccttttgtattacactgagtttacccccactgagaaagacgagtacgcttgccgggtaaatcatgtaacactgagtcagccaaagatcgtcaaatgggacagagatatgtag

SEQ ID NO: 143056 - DNA, 433 bp, Artificial Sequence
  derived and/or modified sequence
tgaagctgacagcattcgggccgagatgtctcgctccgtggccttagctgtgctcgcgctactctctctttctggcctggaggctatccagcgtactccaaagattcaggtttactcacgtcatccagcagagaatggaaagtcaaatttcctgaattgctatgtgtctgggtttcatccatccgacattgaagttgacttactgaagaatggagagagaattgaaaaagtggagcattcagacttgtctttcagcaaggactggtctttctatctcttgtactacactgaattcacccccactgaaaaaatgagtatgcctgccgtgtgaaccatgtgactttgtcacagcccaagatagttaagtgggatcgagacatgtaagcagcatcatggaggtttgaagatgccgcatttggattggatgaattcc

SEQ ID NO: 143057 - DNA, 1715 bp, Artificial Sequence
  derived and/or modified sequence
gcacgcgtttaatataagtggaggcgtcgcgctggcgggcattcctgaagctgacagcattcgggccgagatgtctcgctccgtggccttagctgtgctcgcgctactctctctttctggcctggaggctatccagcgtactccaaagattcaggtttactcacgtcatccagcagagaatggaaagtcaaatttcctgaattgctatgtgtctgggtttcatccatccgacattgaagttgacttactgaagaatggagagagaattgaaaaagtggagcattcagacttgtctttcagcaaggactggtctttctatctcttgtactacactgaattcacccccactgaaaaagatgagtatgcctgccgtgtgaaccatgtgactttgtcacagcccaagatagttaagtgggatcgagacatgtaagcagcatcatggaggtttgaagatgccgcatttggattggatgaattccaaattctgcttgcttgctttttaatattgatatgcttatacacttacactttatgcacaaaatgtagggttataataatgttaacatggacatgatcttctttataattctactttgagtgctgtctccatgtttgatgtatctgagcaggttgctccacaggtagctctaggagggctggcaacttagaggtggggagcagagaattctcttatccaacatcaacatcttggtcagatttgaactcttcaatctcttgcactcaaagcttgttaagatagttaagcgtgcataagttaacttccaatttacatactctgcttagaatttgggggaaaatttagaaatataattgacaggattattggaaatttgttataatgaatgaaacattttgtcatataagattcatatttacttcttatacatttgataaagtaaggcatggttgtggttaatctggtttatttttgttccacaagttaaataaatcataaaacttgatgtgttatctcttatatctcactcccactattacccctttattttcaaacagggaaacagtcttcaagttccacttggtaaaaaatgtgaaccccttgtatatagagtttggctcacagtgtaaagggcctcagtgattcacattttccagattaggaatctgatgctcaaagaagttaaatggcatagttggggtgacacagctgtctagtgggaggccagccttctatattttagccagcgttctttcctgcgggccaggtcatgaggagtatgcagactctaagagggagcaaaagtatctgaaggatttaatattttagcaaggaatagatatacaatcatcccttggtctccctgggggattggtttcaggaccccttcttggacaccaaatctatggatatttaagtcccttctataaaatggtatagtatttgcatataacctatccacatcctcctgtatactttaaatcatttctagattacttgtaatacctaatacaatgtaaatgctatgcaaatagttgttattgtttaaggaataatgacaagaaaaaaaagtctgtacatgctcagtaaagacacaaccatccctttttttccccagtgtttttgatccatggtttgctgaatccacagatgtggagcccctggatacggaaggcccgctgtactttgaatgacaaataacagatttaaaattttcaaggcatagttttatacctga

SEQ ID NO: 143058 - DNA, 1081 bp, Artificial Sequence
  derived and/or modified sequence
gggcattcctgaagctgacagcattcgggccgagatgtctcgctccgtggccttagctgtgctcgcgctactctctctttctggcctggaggctatccagcgtactccaaagattcaggtttactcacgtcatccagcagagaatggaaagtcaaatttcctgaattgctatgtgtctgggtttcatccatccgacattgaagttgacttactgaagaatggagagagaattgaaaaagtggagcattcagacttgtctttcagcaaggactggtctttctatctcttgtactacactgaattcacccccactgaaaaagatgagtatgcctgccgtgtgaaccatgtgactttgtcacagcccaagatagttaagtgggatcgagacatgtaagcagcatcatggaggtaagtttttgaccttgagaaaatgtttttgtttcactgtcctgaggactatttatagacagctctaacatgataaccctcactatgtggagaacattgacagagtaacattttagcagggaaagaagaatcctacagggtcatgttcccttctcctgtggagtggcatgaagaaggtgtatggccccaggtatggccatattactgaccctctacagagagggcaaaggaactgccagtatggtattgcaggataaaggcaggtggttacccacattacctgcaaggctttgatctttcttctgccatttccacattggacatctctgctgaggagagaaaatgaaccactcttttcctttgtataatgttgttttattcttcagacagaagagaggagttatacagctctgcagacatcccattcctgtatggggactgtgtttgcctcttagaggttcccaggccactagaggagataaagggaaacagattgttataacttgatataatgatactataatagatgtaactacaaggagctccagaagcaagagagagggaggaacttggacttctctgcatctttagttggagtccaaaggcttttcaatgaaattctactgcccagggtacattgatgctgaaaccccattcaaatctcctgttatat

SEQ ID NO: 143059 - DNA, 604 bp, Artificial Sequence
  derived and/or modified sequence
tggcgggcattcctgaagctgacagcattcgggccgagatgtctcgctccgtggccttagctgtgctcgcgctactctctctttctggcctggaggctatccagcgtactccaaagattcaggtttactcacgtcatccagcagagaatggaaagtcaaatttcctgaattgctatgtgtctgggtttcatccatccgacattgaagttgacttactgaagaatggagagagaattgaaaaagtggagcattcagacttgtctttcagcaaggactggtctttctatctcttgtactacactgaattcacccccactgaaaaagatgagtatgcctgccgtgtgaaccatgtgactttgtcacagcccaagatagttaagtgggatcgagacatgtaagcagcatcatggaggtttgaagatgccgcatttggattggatgaattccaaattctgcttgcttgctttttaatattgatatgcttatacacttacactttatgcacaaaattgtttttgatccatggtttgctgaatccacagatgtggagcccctggatacggaaggcccgctgtactttgaatgacaaataacagatttaaaa

SEQ ID NO: 143060 - DNA, 306 bp, Artificial Sequence
  derived and/or modified sequence
atgagcagaagcgtggccctggccgtgctggccctgctgagcctgagcggcctggaggccatccagagaacccccaagatccaggtgtacagcagacaccccgccgagaacggcaagagcaacttcctgaactgctacgtgagcggcttccaccccagcgacatcgaggtggacctgctgaagaacggcgagagaatcgagaaggtggagcacagcgacctgagcttcagcaaggactggagcttctacctgctgtactacaccgagttcacccccaccgagaagatgagcatgcccgccgtgtag

SEQ ID NO: 143061 - DNA, 360 bp, Artificial Sequence
  derived and/or modified sequence
atgagcagaagcgtggccctggccgtgctggccctgctgagcctgagcggcctggaggccatccagagaacccccaagatccaggtgtacagcagacaccccgccgagaacggcaagagcaacttcctgaactgctacgtgagcggcttccaccccagcgacatcgaggtggacctgctgaagaacggcgagagaatcgagaaggtggagcacagcgacctgagcttcagcaaggactggagcttctacctgctgtactacaccgagttcacccccaccgagaaggacgagtacgcctgcagagtgaaccacgtgaccctgagccagcccaagatcgtgaagtgggacagagacatgtag

SEQ ID NO: 143062 - RNA, 306 nt, Artificial Sequence
  derived and/or modified sequence
augucccgauccguugcccucgcuguccucgcccuuuuaucuuugagcggacuugaagccauucagcgaaccccuaaaauccagguauacucuaggcacccggccgagaacgggaaguccaauuuucugaauugcuaugucagugguuuucacccuucugacauugagguugaccugcugaagaauggcgaacgcaucgagaaggucgagcacucugauuuaagcuuuucaaaagacugguccuuuuaucugcuguacuauacugaguuuacuccaacugaaaaaauguccaugccagcgguguag

SEQ ID NO: 143063 - protein, 175 aa, Artificial Sequence
  derived and/or modified sequence
MTDCEFGYIYRLAQDYLQCVLQIPQPGSGPSKTSRVLQNVAFSVQKEVEKNLKSCLDNVNVVSVDTARTLFNQVMEKEFEDGIINWGRIVTIFAFEGILIKKLLRQQIAPDVDTYKEISYFVAEFIMNNTGEWIRQNGGWENGFVKKFEPKSGWMTFLEVTGKICEMLSLLKQYC

SEQ ID NO: 143064 - DNA, 528 bp, Artificial Sequence
  derived and/or modified sequence
atgacagactgcgagtttgggtacatttatcgcttagctcaagattatttgcagtgtgtgcttcagattccacagccaggcagcgggcccagtaaaactagccgggtcctccagaatgtggccttctccgtgcagaaggaagtggaaaagaatcttaaatcttgtctcgataacgtgaatgttgtatcggtagatacggctagaacccttttcaaccaggtgatggagaaggaatttgaagatgggataatcaattggggccggatagttaccatcttcgctttcgagggaattctgattaaaaagttgcttaggcagcagattgcccccgacgtcgatacctataaagagatcagctattttgttgcagagtttattatgaataatacaggtgaatggatccggcagaacgggggctgggagaacgggttcgtgaaaaaattcgaaccaaaatcgggatggatgacattcctagaggtcacaggcaaaatatgtgagatgctgagccttctaaagcagtactgctag

SEQ ID NO: 143065 - DNA, 528 bp, Artificial Sequence
  derived and/or modified sequence
atgacagactgtgaatttggctacatctaccgcctggcccaggactacctgcagtgtgtgctgcagatcccccagcccggcagcggccccagcaagaccagccgggtgctgcagaatgtggccttctctgtgcagaaggaggtggagaagaacctgaagagctgcctggacaacgtgaatgtggtgtctgtggacacagcccggaccctcttcaaccaggtgatggagaaggagtttgaagatggcatcatcaactggggcagaattgtgaccatctttgcctttgagggcatcctgatcaagaagctgctgcggcagcagatcgccccagatgtggacacctacaaggagatctcctactttgtggccgagttcatcatgaacaacacaggagagtggatccggcagaatggaggctgggagaatggatttgtgaagaagtttgagcccaagagcggctggatgaccttcctggaggtgacaggcaagatctgtgagatgctgagcctgctgaagcagtactgctag

SEQ ID NO: 143066 - DNA, 528 bp, Artificial Sequence
  derived and/or modified sequence
atgaccgactgcgagttcggctacatctaccggctggcccaggactacttgcagtgtgtgctacagatcccacaacctgggtctgggccttccaagaccagtcgcgttctccaaaatgtggctttctctgtgcaaaaggaggtcgaaaagaacctaaagtcatgcttggacaatgtaaatgttgtgtctgtggataccgcccgtacgctgtttaaccaagtgatggagaaagagttcgaagacggaattattaattggggtaggattgttacaatcttcgcctttgagggtattctcatcaagaaattgctgaggcagcaaatcgcacctgatgttgacacgtataaagagatctcctattttgtggccgaatttatcatgaataatactggagaatggatccgccagaatggaggatgggaaaatggctttgtaaagaagtttgaaccaaagagcggctggatgaccttccttgaagtcacagggaagatctgtgaaatgctctctctcctgaagcagtactgctag

SEQ ID NO: 143067 - DNA, 528 bp, Artificial Sequence
  derived and/or modified sequence
atgaccgactgcgagtttggctatatctatcgattggcccaggactacctccagtgcgtcctgcagatcccacagcctgggtccggccctagtaaaacctccagagtgttgcagaacgtggccttttcagtacagaaagaggtggagaaaaacctgaaatcctgcctggataacgtgaacgtggtgtctgtagacactgcacgcaccctctttaatcaggtaatggaaaaggaattcgaagacggtattatcaactggggacggatcgtcaccatttttgcctttgagggaatactcatcaaaaaactactgcgacagcagattgccccagacgtcgacacgtacaaagagataagctattttgttgccgagttcataatgaataacacaggagagtggatcaggcaaaatggtgggtgggaaaacggctttgtgaagaagtttgaaccaaagtcaggctggatgacatttctggaggttactggtaagatttgtgaaatgctgtcgctgttgaagcagtactgctag

SEQ ID NO: 143068 - DNA, 1033 bp, Artificial Sequence
  derived and/or modified sequence
gcaatctacaaggattctaatttctccacatcctgcatttaagacttgcaaagctgaattaatcacaggatgaggaagtggcttctctgaaacattttcctctttcacattttaaactttctctttcatacatgacatgaaacacagcctacgcacgaaagtgactaggaggaaggatattataaagtgatgcaaacagaaattccaccagcctccatgtatcatcatgtgtcataactcagtcaagctcagtgagcattctcagcacattgcctcaacagcttcaaggtgagccagctcaagactttgctctccaccaggcagaagatgacagactgtgaatttggatatatttacaggctggctcaggactatctgcagtgcgtcctacagataccacaacctggatcaggtccaagcaaaacgtccagagtgctacaaaatgttgcgttctcagtccaaaaagaagtggaaaagaatctgaagtcatgcttggacaatgttaatgttgtgtccgtagacactgccagaacactattcaaccaagtgatggaaaaggagtttgaagacggcatcattaactggggaagaattgtaaccatatttgcatttgaaggtattctcatcaagaaacttctacgacagcaaattgccccggatgtggatacctataaggagatttcatattttgttgcggagttcataatgaataacacaggagaatggataaggcaaaacggaggctgggaaaatggctttgtaaagaagtttgaacctaaatctggctggatgacttttctagaagttacaggaaagatctgtgaaatgctatctctcctgaagcaatactgttgaccagaaaggacactccatattgtgaaaccggcctaatttttctgactgatatggaaacgattgccaacacatacttctacttttaaataaacaactttgatgatgtaacttgaccttccagagttatggaaattttgtccccatgtaatgaataaattgtatgtatttttctctatat

SEQ ID NO: 143069 - DNA, 528 bp, Artificial Sequence
  derived and/or modified sequence
atgaccgactgcgagttcggctacatctacagactggcccaggactacctgcagtgcgtgctgcagatcccccagcccggcagcggccccagcaagaccagcagagtgctgcagaacgtggccttcagcgtgcagaaggaggtggagaagaacctgaagagctgcctggacaacgtgaacgtggtgagcgtggacaccgccagaaccctgttcaaccaggtgatggagaaggagttcgaggacggcatcatcaactggggcagaatcgtgaccatcttcgccttcgagggcatcctgatcaagaagctgctgagacagcagatcgcccccgacgtggacacctacaaggagatcagctacttcgtggccgagttcatcatgaacaacaccggcgagtggatcagacagaacggcggctgggagaacggcttcgtgaagaagttcgagcccaagagcggctggatgaccttcctggaggtgaccggcaagatctgcgagatgctgagcctgctgaagcagtactgctag

SEQ ID NO: 143070 - protein, 193 aa, Artificial Sequence
  derived and/or modified sequence
MATPASAPDTRALVADFVGYKLRQKGYVCGAGPGEGPAADPLHQAMRAAGDEFETRFRRTFSDLAAQLHVTPGSAQQRFTQVSDELFQGGPNWGRLVAFFVFGAALCAESVNKEMEPLVGQVQEWMVAYLETQLADWIHSSGGWAEFTALYGDGALEEARRLREGNWASVRTVLTGAVALGALVTVGAFFASK

SEQ ID NO: 143071 - protein, 149 aa, Artificial Sequence
  derived and/or modified sequence
MATPASAPDTRALVADFVGYKLRQKGYVCGAGPGEGPAADPLHQAMRAAGDEFETRFRRTFSDLAAQLHVTPGSAQQRFTQVSDELFQGGPNWGRLVAFFVFGAALCAESVNKEMEPLVGQVQEWMVAYLETQLADWIHSSGGWAEFTA

SEQ ID NO: 143072 - DNA, 582 bp, Artificial Sequence
  derived and/or modified sequence
atggcaacacccgcctcggcccctgacactcgggctctcgtcgcagatttcgtcggatataaactcaggcagaaggggtacgtatgtggcgccgggcctggcgagggtccagctgccgacccactgcaccaggccatgagagccgccggcgacgagttcgagacacgctttcggcggacattcagtgatctggcggcacagctgcatgtgacccccggttcagcccaacaacggttcacacaggtctcagatgagctgtttcagggcggcccgaattggggccgcctcgtggctttcttcgtgttcggagcagcactgtgcgccgaatcagtgaacaaagaaatggagcccctggtagggcaggttcaagagtggatggtcgcctacttagaaactcaactggctgactggattcattcttcaggcggctgggccgagttcactgccctgtatggcgacggggctctcgaggaagctcgtaggctcagggaaggtaactgggccagcgttcgaaccgtcctgaccggggcggtggccttgggcgccctggtcacagtaggagcatttttcgcttctaagtag

SEQ ID NO: 143073 - DNA, 156 bp, Artificial Sequence
  derived and/or modified sequence
atggctacgcctgccagtgcccccgatactcgagctcttgttgccgactttgtgggctataaattgaggcagaagggttacgtatgcggtgctggaccaggggagggcccagccgctgacccgctgcaccaagccatgcgcgccgccggcgattag

SEQ ID NO: 143074 - DNA, 219 bp, Artificial Sequence
  derived and/or modified sequence
atggcaacccccgcatccgcccccgacacaagagctctggttgccgacttcgtgggatacaaactgcgccagaaggggtatgtctgtggcgctggcccaggtgagggacctgcggcagatccactgcatcaggccatgagggccgccggtgatgagttcgaaacgcgatttagacgcaccttcagcgaccttgctgctcagctgcacgtaacaccctag

SEQ ID NO: 143075 - DNA, 450 bp, Artificial Sequence
  derived and/or modified sequence
atggctacccccgctagcgcacccgatactcgggcattagtcgcagattttgtggggtacaagctgagacagaaaggttatgtgtgcggcgcagggcctggagaagggccagctgcagatcccctgcatcaggccatgagggccgctggagatgagttcgagactcggtttcgtcgcacttttagtgacctagcagctcagctgcatgtgacccctggcagcgcccaacaacgctttactcaggtcagtgacgagctcttccaaggcggccccaattggggccgcttggttgcctttttcgtctttggggccgctctgtgtgctgaaagcgtgaacaaggagatggaaccactagtcggtcaggtgcaggagtggatggtcgcatatcttgagacacaactcgccgactggattcactcaagtggcggatgggcagaattcactgcctag

SEQ ID NO: 143076 - DNA, 435 bp, Artificial Sequence
  derived and/or modified sequence
atggccacccccgcctcagcacccgacacacgtgcactggtggccgacttcgtgggttacaagctccggcagaagggttacgtgtgtggtgccgggcctggcgaaggccccgctgcagatccccttcaccaagccatgagagccgctggtgacgagttcgagacacgctttcgacggactttttccgacctggccgctcagttacatgtcactccagggtccgcccaacagcgattcacacaggtaagcgacgagctttttcagggcggaccaaactggggccgtctggttgcgttcttcgtcttcggagccgccctgtgcgcggagtcagtaaataaggaaatggagccactggttggtcaggtacaggaatggatggtggcctatctggagacccagctggcggactggatccactcttcaggcggctggtag

SEQ ID NO: 143077 - DNA, 582 bp, Artificial Sequence
  derived and/or modified sequence
atggccaccccagccagcgccccagacacccgggccctggtggccgactttgtgggctacaagctgcggcagaagggctacgtgtgtggggccggccctggagagggccctgctgctgaccccctgcaccaggccatgagagctgctggagatgaatttgagacccgcttccggaggaccttcagtgacctggccgcccagctgcacgtgaccccaggcagcgcccagcagcgcttcacccaggtgtctgatgagctgttccagggcggccccaactggggccgcctggtggccttctttgtgtttggagctgccctgtgtgccgagagcgtgaacaaggagatggagcccctggtgggccaggtgcaggagtggatggtggcctacctggagacccagctggccgactggatccacagcagcggcggctgggccgagttcaccgccctgtatggagatggagccctggaggaggcccggcggctgcgggagggcaactgggcctctgtgaggacagtgctgactggagctgtggccctgggcgccctggtgacagtgggcgccttctttgccagcaagtag

SEQ ID NO: 143078 - DNA, 156 bp, Artificial Sequence
  derived and/or modified sequence
atggccaccccagccagcgccccagacacccgggccctggtggccgactttgtgggctacaagctgcggcagaagggctacgtgtgtggggccggccctggagagggccctgctgctgaccccctgcaccaggccatgagagctgctggggactag

SEQ ID NO: 143079 - DNA, 219 bp, Artificial Sequence
  derived and/or modified sequence
atggccaccccagccagcgccccagacacccgggccctggtggccgactttgtgggctacaagctgcggcagaagggctacgtgtgtggggccggccctggagagggccctgctgctgaccccctgcaccaggccatgagagctgctggagatgaatttgagacccgcttccggaggaccttcagtgacctggccgcccagctgcacgtgaccccctag

SEQ ID NO: 143080 - DNA, 450 bp, Artificial Sequence
  derived and/or modified sequence
atggccaccccagccagcgccccagacacccgggccctggtggccgactttgtgggctacaagctgcggcagaagggctacgtgtgtggggccggccctggagagggccctgctgctgaccccctgcaccaggccatgagagctgctggagatgaatttgagacccgcttccggaggaccttcagtgacctggccgcccagctgcacgtgaccccaggcagcgcccagcagcgcttcacccaggtgtctgatgagctgttccagggcggccccaactggggccgcctggtggccttctttgtgtttggagctgccctgtgtgccgagagcgtgaacaaggagatggagcccctggtgggccaggtgcaggagtggatggtggcctacctggagacccagctggccgactggatccacagcagcggcggctgggccgagttcaccgcctag

SEQ ID NO: 143081 - DNA, 435 bp, Artificial Sequence
  derived and/or modified sequence
atggccaccccagccagcgccccagacacccgggccctggtggccgactttgtgggctacaagctgcggcagaagggctacgtgtgtggggccggccctggagagggccctgctgctgaccccctgcaccaggccatgagagctgctggagatgaatttgagacccgcttccggaggaccttcagtgacctggccgcccagctgcacgtgaccccaggcagcgcccagcagcgcttcacccaggtgtctgatgagctgttccagggcggccccaactggggccgcctggtggccttctttgtgtttggagctgccctgtgtgccgagagcgtgaacaaggagatggagcccctggtgggccaggtgcaggagtggatggtggcctacctggagacccagctggccgactggatccacagcagcggcggctggtag

SEQ ID NO: 143082 - DNA, 582 bp, Artificial Sequence
  derived and/or modified sequence
atggccacccccgccagcgcccccgacacccgggccctggtggccgattttgtggggtataagctgcggcagaaggggtacgtgtgcggtgctggtcccggagagggtcccgctgctgaccccctgcaccaggcaatgcgagccgcaggtgatgaattcgagactcgattccgccgcactttctctgacttagccgcacaacttcacgtgacgccaggcagcgcccagcaacgctttacccaggtgagcgacgagctgttccaagggggacctaactggggaagactagttgccttttttgtgttcggtgccgctttgtgtgctgagtccgtaaataaagagatggagccattggtgggacaagtccaggaatggatggtggcttatcttgagacccagctggccgattggatccactcgagtggcggctgggctgaatttacagcgctttatggtgacggtgccctggaggaagcccgacggctcagggaggggaattgggcctctgttagaacagtactcaccggggccgtcgccctgggcgcacttgttactgtgggagccttcttcgcttcgaagtag

SEQ ID NO: 143083 - DNA, 156 bp, Artificial Sequence
  derived and/or modified sequence
atggccacccccgccagcgcccccgacacccgggccctggtggccgatttcgtcggctacaagctcaggcagaagggatacgtgtgtggggcagggccaggagaagggcctgccgctgatccattgcaccaggctatgcgagccgccggagactag

SEQ ID NO: 143084 - DNA, 219 bp, Artificial Sequence
  derived and/or modified sequence
atggccacccccgccagcgcccccgacacccgggccctggtggccgactttgttggatacaagttgagacagaagggttacgtgtgtggtgccggccctggagaaggcccggcggccgatcccctgcatcaggctatgcgggcggccggagatgagttcgagacccgcttccgtcggacatttagcgatcttgcggcccagctgcacgttaccccctag

SEQ ID NO: 143085 - DNA, 450 bp, Artificial Sequence
  derived and/or modified sequence
atggccacccccgccagcgcccccgacacccgggccctggtggccgactttgtggggtataaacttcggcagaaagggtacgtatgcggggccggccccggcgaaggtccagccgcggaccctctccaccaggccatgagagccgccggcgacgaattcgagacccgattcagacggaccttttcagacttagctgcgcagcttcacgttaccccaggctcagcacagcaacgatttacgcaagtcagtgacgagctttttcagggcggccctaactggggtagactggttgcatttttcgtgttcggcgcagccctgtgcgctgaaagcgtgaacaaggagatggaaccccttgtaggccaggtgcaggagtggatggtcgcatatctcgagactcagctggccgactggatccacagctctggggggtgggctgagtttacagcatag

SEQ ID NO: 143086 - DNA, 435 bp, Artificial Sequence
  derived and/or modified sequence
atggccacccccgccagcgcccccgacacccgggccctggtggccgatttcgtaggatacaagctgcggcagaagggttatgtctgtggcgcgggacccggagagggccccgctgccgatcccctgcatcaggcaatgcgcgccgccggagatgagtttgagacccgcttccggcgcactttttctgatctggctgcccaactgcacgtcacccccgggagtgctcaacagaggtttactcaggtttctgacgagttattccagggcggacccaactggggacgcctagtggcgttcttcgtgtttggcgccgcattatgtgccgagtccgtgaacaaggaaatggaaccactcgtgggtcaagtccaggagtggatggtggcctaccttgagactcagcttgccgactggattcactctagtggcggctggtag

SEQ ID NO: 143087 - DNA, 582 bp, Artificial Sequence
  derived and/or modified sequence
atggcaactccagcgtccgcccctgatacccgcgctctggtcgccgattttgtgggatacaagctacgtcagaaaggatacgtttgtggcgctgggccaggtgagggcccagctgccgacccactgcaccaggcaatgcgggctgccggagacgagtttgagacccgattccgtagaacattcagtgacctggccgcacaactgcatgtgacacccggtagcgcccagcagagattcacccaggtaagcgacgaactttttcaaggaggacccaactgggggcgactggtagcgttcttcgtctttggcgctgccctgtgtgcggaatcggttaataaggagatggaacctctggtcgggcaggttcaggagtggatggtggcataccttgagactcagctggcggattggatccactcctccgggggttgggccgagtttaccgccttatacggggacggagccttggaagaagcgcgaagactgagagaggggaactgggcatcagtaaggacggtcctgacaggcgctgtcgccttaggcgcattggttactgtgggggcatttttcgcctcaaaatag

SEQ ID NO: 143088 - DNA, 156 bp, Artificial Sequence
  derived and/or modified sequence
atggcaacacctgcgtcggcccctgatacgagagcactggtcgcagattttgttgggtataaactgcgtcagaagggatatgtctgcggtgcaggaccaggggagggtccggctgctgacccactgcaccaggccatgagggctgctggcgattag

SEQ ID NO: 143089 - DNA, 219 bp, Artificial Sequence
  derived and/or modified sequence
atggccacacctgcctcggccccagatacgagggcactcgttgcggatttcgtgggatataagctgcgccagaagggctacgtctgcggcgcaggacctggggaagggcctgcagccgatccactgcaccaggccatgcgggcagcaggggacgaatttgagacgagattccgccgtactttttctgatctggccgctcagctgcacgtaacaccatag

SEQ ID NO: 143090 - DNA, 450 bp, Artificial Sequence
  derived and/or modified sequence
atggctactcccgcatcagcccctgacaccagagctctcgtcgccgacttcgtcggatataagctccgacagaaaggctatgtctgtggcgctgggccaggtgaggggcctgctgcagatcctcttcaccaggcaatgagggcagcgggagacgagtttgagacacggtttagacggactttttccgatttagcagcccagctacatgtcacccccggttccgcccagcagagattcacccaggtttctgatgagctatttcaggggggaccaaattggggcaggctcgtggcgttctttgtctttggcgcagccctctgtgcagagagcgtgaacaaagaaatggagccactcgtagggcaggtacaggaatggatggtggcatacttggagacccagctggcggactggattcattcttcaggcggatgggcagaatttacagcctag

SEQ ID NO: 143091 - DNA, 435 bp, Artificial Sequence
  derived and/or modified sequence
atggctacacctgcttccgcccctgacactcgcgctctagtcgccgactttgtaggatacaaactgcgccagaagggctacgtgtgtggagccggaccgggtgaaggcccagccgctgatccactccaccaggccatgcgcgctgccggagacgagtttgaaacaaggttccgccgtacattttctgatctcgcggctcagctccacgtgacccctggaagcgctcagcagagattcacccaggtaagcgacgaattgttccagggcggaccaaattgggggaggctcgtggctttctttgtgttcggcgctgctctgtgtgccgaaagcgtgaataaagaaatggaaccccttgtgggacaggtccaagaatggatggtcgcctatttggagactcagttggctgactggatacattcctcagggggttggtag

SEQ ID NO: 143092 - DNA, 3605 bp, Artificial Sequence
  derived and/or modified sequence
atcacccggcgccgggccctccctctgcccccccctttctcctccctccttccttccctcccttcctccctctctccctccctcccagctcctgcaccaggaaacggcccggatcccggcagcggcctgacccggctccacgctggccaggaggatgaaaggccccagctgggggctccttgccaccagtgctgtgtcttaagagctgccatcccggctggccgcccggatggcgaccccagcctcggccccagacacacgggctctggtggcagactttgtaggttataagctgaggcagaagggttatgtctgtggagctggccccggggagggcccagcagctgacccgctgcaccaagccatgcgggcagctggagatgagttcgagacccgcttccggcgcaccttctctgatctggcggctcagctgcatgtgaccccaggctcagcccaacaacgcttcacccaggtctccgatgaactttttcaagggggccccaactggggccgccttgtagccttctttgtctttggggctgcactgtgtgctgagagtgtcaacaaggagatggaaccactggtgggacaagtgcaggagtggatggtggcctacctggagacgcagctggctgactggatccacagcagtgggggctgggcggagttcacagctctatacggggacggggccctggaggaggcgcggcgtctgcgggaggggaactgggcatcagtgaggacagtgctgacgggggccgtggcactgggggccctggtaactgtaggggccttttttgctagcaagtgaaagtccagggccaggtggggctaggtgtggctgggggccaggagagcaggaacagaacagagaaatgcccttggaagaagtggagttggtggatgggtgggcatggaacaggatgggcagagaaagggtagtgtgtgagggagctgagtaggccaggtaggcgattggaagagtgagcaggacacagaggggaggggaatgttttggcaagtttaggggcacaggagatgtagtcgttccagggctgggggaggtgggagggatcacgcctataggtgtgggcacatgaaacgacctggaacttgcttcacagccctgaggaaggtggacttacataagcagctgtattccattagatgagtgggatttagggaacgcagaaggcacatccctttggaatggaagcttaggggttctcaggtgatagggagaggtggctgttaacagtgggctgcttggacacgcgtgtgcatgtgcacgcatgctggtgtgcatgctgggctgcctggcaaatctggtggtgatgggattcctcaaggagaaaacattccctcttgcaatggcaagaactaggggcagttctctgtccctcctcccaacccctcctttcccctgcccttgtcctgatgcctcaaggcttagagagaaacattgtatccagaccgagggctctgctgcttctttccagaaagtgattggcaaggctttggagagaagagcagttctgcagctggccttgttccttcatcatcccccttccttgtgcattatgcacttgctgctgcctcctgggctctgatagaagggcagggctgttgagcctggatgggtggaggcttaggtagccggacctgcctgccaccctcctctcccactcaggcacaatggtgcctaaagtgtttccaatctctgggacctctgtacccaaactgaaactctaaattggggccctaactaattttccttttgaggttgtgggcataagtgctgatctagaatacagtctgggtcccacactgtgtctcagtgagactgttgatgccttgagatgaccatttcagatctgaatcccatgggtgtgagggtgatgggtactccaggactggcctatgctgtgttgtgggctttggttcggctttatcaggggccaggcatatgggttctagagtacctaccatgacctagaagcatttatgatttatttgaagccacactgtttgcatgggtgttacttgtctgtacctcagagtctgaggatgttaactttggaactcgcagtcctctagaacagcttcagattatggctttttcttttgaggaagaaattattcactccagatgcatgccctgagccagacctcactgctgcactttccaaggtgctaagattgctgctctccaatgctaactttctgacacagtgctctagaaccctgcctgtggtcctgagcactgatcaccttagctagaccatggttgactcttcttggagattttcacttggtcctagaatgtggcaacgtagttgtgctcgccagaacgtgggaccaaattggcctcaggtgttgagtccagacttctgcttttgagagagggctgcactttttcatggtatttctaggggaggtggtaggctgcatgtgccacttggtcttgttgtgagtatgctgacaccagaaactcagagccagcttgtggcaagcagttggggtggggggtctctgacttgctcaggacaaactaggccagtggttttcaaactgcttggcagagccctgaagtttcctaggggttgcctcaggagtccttggggagatgaagggggtggggagctgagcaggctgggcaatttgccctcaaacagaacagctccccttgtagctgtcttacatattggggttcagggtaagattttatttgcattaaggggtttgctgctgaaaaaaagttggaaaaccactgactagaccatcggctccaaattggagtctgtgcttccttccccaggtatggagcacactcttcaccctaccctctaccacaggacacatatccctgttagcattccccgggacctttagccaagaggagctgcagggaccatggccaggttaccaaaatgccctgctctgaagccttgacacctgggtggaaagagaggctgttttctgaaagggtaaagggcttggtctggattcccagaagcatagcttagatgggaccacagtgggcaattttgacctgtcctgcccttcttagcttgaagggaaaccccagagactcttctgtcagggaaaactagggactctcttctagagccatatagttccttgggattagctcttggccaagaaggctgagtatggttcccaatttttaaatccatttcattttttaaaaaataagggaaataaatgtaattgccatttttcaaagattaagtaggaggagaggggtttcttgctctccagagcccaaagggacaaatagggactttgtttaggccaaggaaggagcggaagtagggcaactcggtcctgcgattattaatcccactccccacttattctagggcacacaaacactattttacttttttaaaatcataaaacggcagaacagatttggttagtttagaagaaaagaaagctctataaatataaatctatattcctgtatttttatttaataatttataaataccaagttcatttgacttttatttttgtgtaatatgtaatgatcgtattaaaaacaataaataaagcccagaagtttaatgagaaggactgaa

SEQ ID NO: 143093 - DNA, 548 bp, Artificial Sequence
  derived and/or modified sequence
gatccacatggtacatgacattcttcctgttttcttcacaagacaaggatgatgtttaaatgggcatttgtttgcggaatgacttggagagttcctctctttcagccatcttttctcaaagactaaggctgtggacaggatgggcatgaagactgtcaaggagcccgagtgagggaagcagaccaaccatggtcttggagaaaagaaaatagggtttccatcccttctggagggagaaggaatagcagagatgaacatgaatgaagaaggaaacaaatggaaataaacaaaatgaagggctccacgctggccaggaggatgaaaggccccagctgggggctccttgccaccagtgctgtgtcttaagagctgccatcccggctggccgcccggatggcgaccccagcctcggccccagacacacgggctctggtggcagactttgtaggttataagctgaggcagaagggttatgtctgtggagctggccccggggagggcccagcagctgacccgctgcaccaagccatgcgggcagctggagatga

SEQ ID NO: 143094 - DNA, 545 bp, Artificial Sequence
  derived and/or modified sequence
agctgggcctttgggctgcactagggggaaccgggaatagagatggtgtcggcaggaagcccttggccttgggtttcccgggaggacagtcattaaacatggattcggccacacagctggtagagcgttgggggcaggggcctaggcccagagctgcaaccctagcccttcccaggccagaacctgatccctggccttcccctcctggttctgatctccccctcccctttccagggctccacgctggccaggaggatgaaaggccccagctgggggctccttgccaccagtgctgtgtcttaagagctgccatcccggctggccgcccggatggcgaccccagcctcggccccagacacacgggctctggtggcagactttgtaggttataagctgaggcagaagggttatgtctgtggagctggccccggggagggcccagcagctgacccgctgcaccaagccatgcgggcagctggagatgagttcgagacccgcttccggcgcaccttctctgatctggcggctcagctgcatgtgacccc

SEQ ID NO: 143095 - DNA, 631 bp, Artificial Sequence
  derived and/or modified sequence
aggaaacggcccggatcccggcagcggcctgacccgtgagatccctaacctggcaggcgggcggggttggagactggctgaggtggggggctccacgctggccaggaggatgaaaggccccagctgggggctccttgccaccagtgctgtgtcttaagagctgccatcccggctggccgcccggatggcgaccccagcctcggccccagacacacgggctctggtggcagactttgtaggttataagctgaggcagaagggttatgtctgtggagctggccccggggagggcccagcagctgacccgctgcaccaagccatgcgggcagctggagatgagttcgagacccgcttccggcgcaccttctctgatctggcggctcagctgcatgtgaccccaggctcagcccaacaacgcttcacccaggtctccgatgaactttttcaagggggccccaactggggccgccttgtagccttctttgtctttggggctgcactgtgtgctgagagtgtcaacaaggagatggaaccactggtgggacaagtgcaggagtggatggtggcctacctggagacgcagctggctgactggatccacagcagtgggggctgggcggagttcacagct

SEQ ID NO: 143096 - DNA, 596 bp, Artificial Sequence
  derived and/or modified sequence
atcccggcagcggcctgacccgtgagatccctaacctggcaggcgggcggggttggagactggctgagggctccacgctggccaggaggatgaaaggccccagctgggggctccttgccaccagtgctgtgtcttaagagctgccatcccggctggccgcccggatggcgaccccagcctcggccccagacacacgggctctggtggcagactttgtaggttataagctgaggcagaagggttatgtctgtggagctggccccggggagggcccagcagctgacccgctgcaccaagccatgcgggcagctggagatgagttcgagacccgcttccggcgcaccttctctgatctggcggctcagctgcatgtgaccccaggctcagcccaacaacgcttcacccaggtctccgatgaactttttcaagggggccccaactggggccgccttgtagccttctttgtctttggggctgcactgtgtgctgagagtgtcaacaaggagatggaaccactggtgggacaagtgcaggagtggatggtggcctacctggagacgcagctggctgactggatccacagcagtgggggctgg

SEQ ID NO: 143097 - DNA, 582 bp, Artificial Sequence
  derived and/or modified sequence
atggccacccccgccagcgcccccgacaccagagccctggtggccgacttcgtgggctacaagctgagacagaagggctacgtgtgcggcgccggccccggcgagggccccgccgccgaccccctgcaccaggccatgagagccgccggcgacgagttcgagaccagattcagaagaaccttcagcgacctggccgcccagctgcacgtgacccccggcagcgcccagcagagattcacccaggtgagcgacgagctgttccagggcggccccaactggggcagactggtggccttcttcgtgttcggcgccgccctgtgcgccgagagcgtgaacaaggagatggagcccctggtgggccaggtgcaggagtggatggtggcctacctggagacccagctggccgactggatccacagcagcggcggctgggccgagttcaccgccctgtacggcgacggcgccctggaggaggccagaagactgagagagggcaactgggccagcgtgagaaccgtgctgaccggcgccgtggccctgggcgccctggtgaccgtgggcgccttcttcgccagcaagtag

SEQ ID NO: 143098 - DNA, 156 bp, Artificial Sequence
  derived and/or modified sequence
atggccacccccgccagcgcccccgacaccagagccctggtggccgacttcgtgggctacaagctgagacagaagggctacgtgtgcggcgccggccccggcgagggccccgccgccgaccccctgcaccaggccatgagagccgccggcgactag

SEQ ID NO: 143099 - DNA, 219 bp, Artificial Sequence
  derived and/or modified sequence
atggccacccccgccagcgcccccgacaccagagccctggtggccgacttcgtgggctacaagctgagacagaagggctacgtgtgcggcgccggccccggcgagggccccgccgccgaccccctgcaccaggccatgagagccgccggcgacgagttcgagaccagattcagaagaaccttcagcgacctggccgcccagctgcacgtgaccccctag

SEQ ID NO: 143100 - DNA, 450 bp, Artificial Sequence
  derived and/or modified sequence
atggccacccccgccagcgcccccgacaccagagccctggtggccgacttcgtgggctacaagctgagacagaagggctacgtgtgcggcgccggccccggcgagggccccgccgccgaccccctgcaccaggccatgagagccgccggcgacgagttcgagaccagattcagaagaaccttcagcgacctggccgcccagctgcacgtgacccccggcagcgcccagcagagattcacccaggtgagcgacgagctgttccagggcggccccaactggggcagactggtggccttcttcgtgttcggcgccgccctgtgcgccgagagcgtgaacaaggagatggagcccctggtgggccaggtgcaggagtggatggtggcctacctggagacccagctggccgactggatccacagcagcggcggctgggccgagttcaccgcctag

SEQ ID NO: 143101 - DNA, 435 bp, Artificial Sequence
  derived and/or modified sequence
atggccacccccgccagcgcccccgacaccagagccctggtggccgacttcgtgggctacaagctgagacagaagggctacgtgtgcggcgccggccccggcgagggccccgccgccgaccccctgcaccaggccatgagagccgccggcgacgagttcgagaccagattcagaagaaccttcagcgacctggccgcccagctgcacgtgacccccggcagcgcccagcagagattcacccaggtgagcgacgagctgttccagggcggccccaactggggcagactggtggccttcttcgtgttcggcgccgccctgtgcgccgagagcgtgaacaaggagatggagcccctggtgggccaggtgcaggagtggatggtggcctacctggagacccagctggccgactggatccacagcagcggcggctggtag

SEQ ID NO: 143102 - protein, 194 aa, Artificial Sequence
  derived and/or modified sequence
MSQNGAPGMQEESLQGSWVELHFSNNGNGGSVPASVSIYNGDMEKILLDAQHESGRSSSKSSHCDSPPRSQTPQDTNRASETDTHSIGEKNSSQSEEDDIERRKEVESILKKNSDWIWDWSSRPENIPPKEFLFKHPKRTATLSMRNTSVMKKGGIFSAEFLKVFLPSLLLSHLLAIGLGIYIGRRLTTSTSTF

SEQ ID NO: 143103 - protein, 180 aa, Artificial Sequence
  derived and/or modified sequence
MSQNGAPGMQEESLQGSWVELHFSNNGNGGSVPASVSIYNGDMEKILLDAQHESGRSSSKSSHCDSPPRSQTPQDTNRASETDTHSIGEKNSSQSEEDDIERRKEVESILKKNSDWIWDWSSRPENIPPKEFLFKHPKRTATLSMRNTSVMKKGGIFSAEFLKVFLPSLLLSHLLAIGLG

SEQ ID NO: 143104 - DNA, 585 bp, Artificial Sequence
  derived and/or modified sequence
atgtctcagaacggcgcacctggtatgcaggaggagtcactacaaggttcctgggttgagttgcatttcagcaataacggcaacggaggctcggtgccagcatcagtttcgatttacaatggagatatggaaaagattctgctcgatgcccagcatgaaagcgggcgtagctcatccaaatcctcccactgtgactcaccaccgcggagccagacgccccaagatacaaaccgcgctagcgaaactgacacccactcaattggggaaaaaaacagcagccaatccgaagaggatgatattgaacggagaaaagaagttgagtcgatactgaagaagaattctgactggatctgggactggtcatcccggcctgagaatattcctcctaaggaattcctgtttaaacacccaaagagaaccgcaaccttgtccatgcgcaacacctccgttatgaagaaaggcggcatattcagcgcagagttcctaaaagtctttttaccttcccttctgctgagccacctgctcgctattggtctgggaatctacatcggcaggcgcctgactactagcacaagcactttttag

SEQ ID NO: 143105 - DNA, 543 bp, Artificial Sequence
  derived and/or modified sequence
atgtcacaaaatggtgctccagggatgcaagaagagtccctccagggctcttgggtggagctccatttctcaaataacggcaacggaggctcggtgcctgcctctgtgtctatatacaacggcgacatggagaaaatcctcctggacgcgcagcacgaaagcggcaggagttcctctaagtcctcccactgtgattcccccccacggtcccagactcctcaagatacgaatcgcgccagcgaaactgatactcatagcattggcgagaagaactcctcccaaagtgaagaagatgacatcgaaaggagaaaggaggtcgagtcgatcttgaaaaagaattccgactggatttgggactggtcttctcgcccagagaacattccgccgaaggaatttttatttaagcaccccaagaggactgccactttgagcatgagaaatacgtctgtgatgaagaaaggggggatcttttcagccgaatttctcaaagtttttctcccttcattactgttgtcccatctcctggctatcggcctggggtag

SEQ ID NO: 143106 - DNA, 585 bp, Artificial Sequence
  derived and/or modified sequence
atgagccagaatggagcccctggcatgcaggaggagagcctgcagggctcctgggtggagctgcacttcagcaacaatggaaatggaggctctgtgcctgcctctgtgtccatctacaacggggacatggagaagatcctgctggatgcccagcacgagagcggccgcagcagcagcaagagcagccactgtgacagccccccaagaagccagaccccccaggacaccaacagagccagcgagacagacacccacagcattggagagaagaacagcagccagagtgaagaagatgacatcgagaggaggaaggaggtggagagcatcctgaagaagaacagcgactggatctgggactggagcagcaggcctgagaacatcccccccaaggagttcctgttcaagcaccccaagaggacagccaccctgtccatgaggaacacctctgtgatgaagaagggcggcatcttctctgctgagttcctgaaggtgttcctgcccagcctgctgctgagccacctgctggccatcggcctgggcatctacatcggccgccgcctgaccaccagcaccagcaccttctag

SEQ ID NO: 143107 - DNA, 543 bp, Artificial Sequence
  derived and/or modified sequence
atgagccagaatggagcccctggcatgcaggaggagagcctgcagggctcctgggtggagctgcacttcagcaacaatggaaatggaggctctgtgcctgcctctgtgtccatctacaacggggacatggagaagatcctgctggatgcccagcacgagagcggccgcagcagcagcaagagcagccactgtgacagccccccaagaagccagaccccccaggacaccaacagagccagcgagacagacacccacagcattggagagaagaacagcagccagagtgaagaagatgacatcgagaggaggaaggaggtggagagcatcctgaagaagaacagcgactggatctgggactggagcagcaggcctgagaacatcccccccaaggagttcctgttcaagcaccccaagaggacagccaccctgtccatgaggaacacctctgtgatgaagaagggcggcatcttctctgctgagttcctgaaggtgttcctgcccagcctgctgctgagccacctgctggccatcggcctgggctag

SEQ ID NO: 143108 - DNA, 585 bp, Artificial Sequence
  derived and/or modified sequence
atgagccagaacggcgcccccggcatgcaggaggagagcctgcagggatcgtgggtcgagttacacttcagcaacaacggtaacggcggcagtgtgccagcgagcgtgtcgatctacaacggagatatggagaagattttgcttgatgcccagcatgagtccggaagatctagcagtaagtcttcacactgcgacagtccgccacgctcacaaaccccacaggatactaaccgcgcatctgagactgacacccattctattggagagaaaaattcaagtcagtcagaggaggacgatatagaaagaaggaaagaagtagagagcatccttaaaaaaaactcagactggatttgggactggtcatcccggcccgagaatattcccccaaaggaattcctattcaagcaccctaaacggaccgcaaccctcagtatgcggaacacaagcgtcatgaagaaaggtggtatcttttcagcagaattcttaaaagtgtttctcccatcactgctgctcagtcatctgctggcaattggcctgggtatatacatcggccgtcggcttacaacatccacctctacgttttag

SEQ ID NO: 143109 - DNA, 543 bp, Artificial Sequence
  derived and/or modified sequence
atgagccagaacggcgcccccggcatgcaggaggagagcctgcagggttcttgggttgagctacacttcagcaataatggaaacggaggatcagttcccgcctccgtctccatctacaacggagatatggaaaagattctcctggacgcacaacacgaaagtggacgctcaagcagcaaatcttctcactgtgactctccccctagatcgcagaccccacaggacaccaatagggcgtctgagaccgatactcatagcattggagaaaagaattctagccagtctgaggaagatgacattgagcgccgtaaggaagtcgagagcattttaaaaaagaacagtgactggatctgggactggagctccaggcccgaaaatatcccacctaaagagttcctgtttaaacatccaaagagaactgctactctgtctatgcggaacacatctgtcatgaagaaggggggtattttcagtgcagagtttctgaaagtattcctccctagtttactcctatctcacctccttgcaattggactgggatag

SEQ ID NO: 143110 - DNA, 585 bp, Artificial Sequence
  derived and/or modified sequence
atgtcccaaaatggcgctcccggaatgcaggaggagtcacttcagggttcctgggtggagctccatttctccaacaacggcaatggaggtagtgtgccagcgtccgtctccatttataacggggatatggagaaaatcctgctggacgcgcagcatgagagcggcagaagtagttccaagagttcccattgtgactccccacctaggtcccaaaccccccaagacaccaatcgcgcatcagagactgacacccactccatcggtgagaaaaatagcagccagtctgaggaggatgacatagagcggagaaaagaggttgaaagcatacttaaaaaaaactccgactggatatgggattggtcctcccgcccagagaatatccctcccaaagagttcctgttcaaacatcccaagcgtacagccacgctgtctatgagaaatacctcagtgatgaagaaggggggaatcttcagtgccgagtttctcaaggttttcctgccatctctgctcctctcacacctcctcgcgattggacttggcatctatatcgggaggagactcactacctcaacatcaaccttctag

SEQ ID NO: 143111 - DNA, 543 bp, Artificial Sequence
  derived and/or modified sequence
atgtctcagaatggggctccaggaatgcaagaggagtccttgcaaggatcttgggtggagcttcatttctccaataacggcaatggaggatcagtgcctgcctccgtgagtatttataatggggacatggagaaaatcctcttagacgcccagcatgagagcggcaggtcaagcagcaaaagtagccactgtgactctcctccgagatcacagacgcctcaggatactaatcgagcgtccgagaccgacacacattctatcggtgaaaaaaatagctcacagagcgaagaggacgacatcgagcgcagaaaggaagtggaatctatcctcaaaaagaattctgactggatttgggactggagctccagacctgagaacatccccccaaaggaattcctgttcaaacatcctaagcgaacagctactctgtccatgagaaatacatctgtcatgaagaagggcggaatcttttcggctgagtttctcaaagtgtttctgccgtctttactgttgtcccatctgttggccatagggctgggctag

SEQ ID NO: 143112 - DNA, 1160 bp, Artificial Sequence
  derived and/or modified sequence
ctccgctcagtccgggagcgcagctgggccgcggcgctccgacctccgctttcccaccgcccgcagctgaagcacatcccgcagcccggcgcggactccgatcgccgcagttgccctctggcgccatgtcgcagaacggagcgcccgggatgcaggaggagagcctgcagggctcctgggtagaactgcacttcagcaataatgggaacgggggcagcgttccagcctcggtttctatttataatggagacatggaaaaaatactgctggacgcacagcatgagtctggacggagtagctccaagagctctcactgtgacagcccacctcgctcgcagacaccacaagataccaacagagcttctgaaacagatacccatagcattggagagaaaaacagctcacagtctgaggaagatgatattgaaagaaggaaagaagttgaaagcatcttgaagaaaaactcagattggatatgggattggtcaagtcggccggaaaatattccccccaaggagttcctctttaaacacccgaagcgcacggccaccctcagcatgaggaacacgagcgtcatgaagaaagggggcatattctctgcagaatttctgaaagttttccttccatctctgctgctctctcatttgctggccatcggattggggatctatattggaaggcgtctgacaacctccaccagcaccttttgatgaagaactggagtctgacttggttcgttagtggattacttctgagcttgcaacatagctcactgaagagctgttagatcctggggtggccacgtcacttgtgtttatttgttctgtaaatgctgcgttcctaatttagtaaaataaaagaatagacactaaaatcatgttgatctataattacacctatgggatcaataagcatgtcagactgattaatgtctactgtgaaaatttggtagtaaattttcatttgatattagatataaatatctgaatataaataattttaatatactagtcatgatgtgtgttgtattttaaaaattatctgcaaccttaattcagctgaagtactttatatttcaaaagaatgaataacattgataataaaatcgctactttaaggggtttgtccaaaataaatattgtggccttatatatcacact

SEQ ID NO: 143113 - DNA, 1607 bp, Artificial Sequence
  derived and/or modified sequence
agtccgggagcgcagctgggccgcggcgctccgacctccgctttcccaccgcccgcagctgaagcacatcccgcagcccggcgcggactccgatcgccgcagttgccctctggcgccatgtcgcagaacggagcgcccgggatgcaggaggagagcctgcagggctcctgggtagaactgcacttcagcaataatgggaacgggggcagcgttccagcctcggtttctatttataatggagacatggaaaaaatactgctggacgcacagcatgagtctggacggagtagctccaagagctctcactgtgacagcccacctcgctcgcagacaccacaagataccaacagagcttctgaaacagatacccatagcattggagagaaaaacagctcacagtctgaggaagatgatattgaaagaaggaaagaagttgaaagcatcttgaagaaaaactcagattggatatgggattggtcaagtcggccggaaaatattccccccaaggagttcctctttaaacacccgaagcgcacggccaccctcagcatgaggaacacgagcgtcatgaagaaagggggcatattctctgcagaatttctgaaagttttccttccatctctgctgctctctcatttgctggccatcggattggggtaggtgatgtgactgtgtgactcctgtcatggcatgtcgtggggcgattctgggttgcagtgatttattcgtaacctgtttcctgaagtccagatcatcagttacagcttggtgcattttcacaaacacccacgtagtcactgttcaggtccagaaaccaccagcctgcagcccccaaaggccccagcacaggcgccctgtggtgctgctgtctggcctgacgagtctgcctgttgctcactgaatataaacggagtcaaagcagggcttcttaggtctgacctctttgtcctgtgtgtaggtgaaagcagtctcatttctgtgtagtactgtggcgggaatgcacccagctctgctgtaggtggagggtctcagttacctgctgtacttcctccagacaggactgttgttctagtaactctcagcaatgaaggaaccaatgcagtctccgactttactggcttgagtttcgctcttgttgcccaggctgagtgcaggggcgtgatctcggctcactgcagcctctgcctcctgggttcaagcgactctcctgcctcagcctcctgggtagctgggattacaggtgcccaccaccaggcctggctaatttttgtatttttaatagagacggggcttcgccacgttgcccaggctgatctcgaactcaagggatggctcacctcggcctccaaagtgctgggattacaggcgtgagccaccgcgcctggcctttcctggctgcttatactcactcaccctgcagaaaacacagagaccaggcaggcgccgctgtgggttctgaagagcgttcgccgcagcggtggtgaagagccagagcgggaagccaaaacggctcctcctcgggctggtcccagcctctcagcggggaggagggctctagtcctggcgtgcagacagtgttctgtggctgccgtgtgttggacagactg

SEQ ID NO: 143114 - DNA, 585 bp, Artificial Sequence
  derived and/or modified sequence
atgagccagaacggcgcccccggcatgcaggaggagagcctgcagggcagctgggtggagctgcacttcagcaacaacggcaacggcggcagcgtgcccgccagcgtgagcatctacaacggcgacatggagaagatcctgctggacgcccagcacgagagcggcagaagcagcagcaagagcagccactgcgacagcccccccagaagccagaccccccaggacaccaacagagccagcgagaccgacacccacagcatcggcgagaagaacagcagccagagcgaggaggacgacatcgagagaagaaaggaggtggagagcatcctgaagaagaacagcgactggatctgggactggagcagcagacccgagaacatcccccccaaggagttcctgttcaagcaccccaagagaaccgccaccctgagcatgagaaacaccagcgtgatgaagaagggcggcatcttcagcgccgagttcctgaaggtgttcctgcccagcctgctgctgagccacctgctggccatcggcctgggcatctacatcggcagaagactgaccaccagcaccagcaccttctag

SEQ ID NO: 143115 - DNA, 543 bp, Artificial Sequence
  derived and/or modified sequence
atgagccagaacggcgcccccggcatgcaggaggagagcctgcagggcagctgggtggagctgcacttcagcaacaacggcaacggcggcagcgtgcccgccagcgtgagcatctacaacggcgacatggagaagatcctgctggacgcccagcacgagagcggcagaagcagcagcaagagcagccactgcgacagcccccccagaagccagaccccccaggacaccaacagagccagcgagaccgacacccacagcatcggcgagaagaacagcagccagagcgaggaggacgacatcgagagaagaaaggaggtggagagcatcctgaagaagaacagcgactggatctgggactggagcagcagacccgagaacatcccccccaaggagttcctgttcaagcaccccaagagaaccgccaccctgagcatgagaaacaccagcgtgatgaagaagggcggcatcttcagcgccgagttcctgaaggtgttcctgcccagcctgctgctgagccacctgctggccatcggcctgggctag

SEQ ID NO: 143116 - protein, 437 aa, Artificial Sequence
  derived and/or modified sequence
MPKFKAARGVGGQEKHAPLADQILAGNAVRAGVREKRRGRGTGEAEEEYVGPRLSRRILQQARQQQEELEAEHGTGDKPAAPRERTTRLGPRMPQDGSDDEDEEWPTLEKAATMTAAGHHAEVVVDPEDERAIEMFMNKNPPARRTLADIIMEKLTEKQTEVETVMSEVSGFPMPQLDPRVLEVYRGVREVLSKYRSGKLPKAFKIIPALSNWEQILYVTEPEAWTAAAMYQATRIFASNLKERMAQRFYNLVLLPRVRDDVAEYKRLNFHLYMALKKALFKPGAWFKGILIPLCESGTCTLREAIIVGSIITKCSIPVLHSSAAMLKIAEMEYSGANSIFLRLLLDKKYALPYRVLDALVFHFLGFRTEKRELPVLWHQCLLTLVQRYKADLATDQKEALLELLRLQPHPQLSPEIRRELQSAVPRDVEDVPITVE

SEQ ID NO: 143117 - DNA, 1314 bp, Artificial Sequence
  derived and/or modified sequence
atgcccaagttcaaggccgccagaggcgtgggcggccaggagaagcacgcccccctggccgaccagatcctggccggcaacgccgtgagagccggcgtgagagagaagagaagaggcagaggcaccggcgaggccgaggaggagtacgtgggccccagactgagcagaagaatcctgcagcaggccagacagcagcaggaggagctggaggccgagcacggcaccggcgacaagcccgccgcccccagagagagaaccaccagactgggccccagaatgccccaggacggcagcgacgacgaggacgaggagtggcccaccctggagaaggccgccaccatgaccgccgccggccaccacgccgaggtggtggtggaccccgaggacgagagagccatcgagatgttcatgaacaagaacccccccgccagaagaaccctggccgacatcatcatggagaagctgaccgagaagcagaccgaggtggagaccgtgatgagcgaggtgagcggcttccccatgccccagctggaccccagagtgctggaggtgtacagaggcgtgagagaggtgctgagcaagtacagaagcggcaagctgcccaaggccttcaagatcatccccgccctgagcaactgggagcagatcctgtacgtgaccgagcccgaggcctggaccgccgccgccatgtaccaggccaccagaatcttcgccagcaacctgaaggagagaatggcccagagattctacaacctggtgctgctgcccagagtgagagacgacgtggccgagtacaagagactgaacttccacctgtacatggccctgaagaaggccctgttcaagcccggcgcctggttcaagggcatcctgatccccctgtgcgagagcggcacctgcaccctgagagaggccatcatcgtgggcagcatcatcaccaagtgcagcatccccgtgctgcacagcagcgccgccatgctgaagatcgccgagatggagtacagcggcgccaacagcatcttcctgagactgctgctggacaagaagtacgccctgccctacagagtgctggacgccctggtgttccacttcctgggcttcagaaccgagaagagagagctgcccgtgctgtggcaccagtgcctgctgaccctggtgcagagatacaaggccgacctggccaccgaccagaaggaggccctgctggagctgctgagactgcagccccacccccagctgagccccgagatcagaagagagctgcagagcgccgtgcccagagacgtggaggacgtgcccatcaccgtggagtag

SEQ ID NO: 143118 - DNA, 1314 bp, Artificial Sequence
  derived and/or modified sequence
atgcctaaatttaaggctgcaaggggcgtgggagggcaggagaagcacgcccctcttgccgaccagattctcgctggcaacgccgtgcgggcaggtgtccgcgaaaagcgtcgaggaaggggtaccggcgaggctgaagaggagtatgtcggccctagactcagccgtaggatcctgcagcaagcgaggcagcagcaagaagagttagaggccgaacacggcacaggagacaaacccgctgcccccagagaacgtaccacacgcctcggaccacgaatgccccaagacggaagcgacgatgaagacgaagagtggcctacgctggagaaggcggccacaatgactgccgccggacaccatgccgaagtcgtggtggatcccgaggatgagagagccatcgagatgttcatgaataagaacccccctgcccgccggacactcgccgatatcatcatggaaaaactcactgagaagcaaacagaggtggaaactgtaatgagtgaggtgtctgggtttcccatgccccagctggatcctcgggttctcgaagtgtaccgcggcgtccgcgaggtgctgtctaaatatcggagtggcaagttgccaaaagcatttaaaatcatacccgctctctccaattgggaacagatattatacgtcacagagcccgaggcgtggaccgctgctgctatgtaccaggccaccagaatcttcgcaagcaatttaaaggaacgcatggcgcaaagattttacaacctggtactgctccctcgggtccgcgatgatgttgctgagtacaaacgtctgaatttccacctctatatggccttgaaaaaggccctgtttaagcccggggcttggttcaaaggtatactgatcccactgtgcgagtccggcacctgcactcttagggaggccatcattgtgggaagcatcataacaaaatgttctatccccgttctccattccagtgccgcaatgttaaaaattgctgagatggaatacagcggggccaacagcatcttcctgcggctgcttttggataagaagtatgcgctgccctacagggtgctggacgcattggttttccattttcttggtttcagaacagagaagcgggagcttcccgtgctatggcatcagtgcctcctgacacttgtccagaggtacaaggctgatcttgctacagatcagaaagaagccctgctggagctgctccggctccaaccgcacccacaactgagcccggagatccgaagggagctgcaaagcgcggtcccacgggacgtcgaagatgtcccaatcacggtggagtag

SEQ ID NO: 143119 - DNA, 1314 bp, Artificial Sequence
  derived and/or modified sequence
atgcccaagttcaaggccgcccggggcgtgggcggccaggagaagcacgcccccctggccgaccagatcctggccggaaatgctgtgcgggccggcgtgcgggagaagagaagaggccggggcaccggggaggccgaggaggagtatgtgggcccccggctgagccgccgcatcctgcagcaggcccggcagcagcaggaggagctggaggccgagcacggcactggagacaagccagctgccccccgggagaggaccacccggctgggccccaggatgccccaggacggcagtgatgatgaagatgaggagtggcccaccctggagaaggccgccaccatgacagctgctggccaccacgccgaggtggtggtggaccctgaagatgagcgggccatcgagatgttcatgaacaagaaccccccagcccggaggaccctggccgacatcatcatggagaagctgacagagaagcagacagaggtggagaccgtgatgtctgaggtgtctggcttccccatgccccagctggacccccgggtgctggaggtgtacagaggagtgcgggaggtgctgagcaagtacagaagtggcaagctgcccaaggccttcaagatcatcccagccctgagcaactgggagcagatcctgtatgtgacagagcctgaggcctggacagctgctgccatgtaccaggccacccgcatctttgccagcaacctgaaggagaggatggcccagcgcttctacaacctggtgctgctgccccgggtgagagatgatgtggccgagtacaagaggctgaacttccacctgtacatggccctgaagaaggccctcttcaagccaggggcctggttcaagggcatcctgatccccctgtgtgagagcggcacctgcaccctgcgggaggccatcatcgtgggcagcatcatcaccaagtgcagcatccctgtgctgcacagcagcgctgccatgctgaagattgctgagatggagtacagcggggccaacagcatcttcctgcggctgctgctggacaagaagtatgccctgccctacagagtgctggatgccctggtgttccacttcctgggcttcagaacagagaagcgggagctgcctgtgctgtggcaccagtgcctgctgaccctggtgcagcgctacaaggctgacctggccacagaccagaaggaggccctgctggagctgctgcggctgcagccccacccccagctgagccctgagatccggcgggagctgcagagcgctgtgcccagagatgtggaggatgtgcccatcaccgtggagtag

SEQ ID NO: 143120 - DNA, 1314 bp, Artificial Sequence
  derived and/or modified sequence
atgcccaagttcaaggccgcccggggcgtgggcggccaggagaagcatgcacccctcgccgatcagatcctcgccgggaatgccgtgagggcaggagtgagggaaaaacgtagagggaggggtacaggcgaggctgaagaggagtacgtcgggccccgactgtccagaaggattctccagcaggcccgccagcaacaggaagaactggaggcagagcacggaaccggcgacaaacccgctgctccccgcgaacgcacgactcgcttgggtcccaggatgccccaggacggtagcgatgacgaagatgaagaatggcccactctcgaaaaggctgccactatgaccgctgctggacatcacgcagaggtggttgtcgatccagaagatgaaagggcgatcgagatgttcatgaacaagaatccgcctgctaggcgcacgttagctgacattattatggagaagctgactgaaaagcaaacagaagtggagaccgtgatgtccgaggtttccgggtttcctatgccacagttagacccacgcgtgctggaagtatatcgtggagtgagagaggttttgagcaaatacagaagtggaaaacttcccaaggcgttcaaaatcatccctgcgctttcaaactgggaacagattctgtacgtgactgaacccgaggcctggaccgctgccgccatgtatcaagccaccagaatctttgctagcaatcttaaggagaggatggcgcagagattctacaacctggttctactcccacgggtgcgagacgacgtggcagagtataagcgactgaactttcatctctatatggctttgaagaaagcactgtttaagcccggtgcctggttcaaagggattttgatcccactgtgcgagagtggaacatgtacacttagggaggctataatcgttggatctatcatcacaaagtgcagcattcctgttctacacagcagcgccgctatgctgaagatagccgagatggaatattccggcgccaattccatctttcttcgcttgctgctggataagaaatatgcactcccttatagggtgctagacgccctcgtgttccatttcctgggttttcgaactgaaaagagggagctcccagtgctgtggcatcaatgcctgttaaccctggtgcagcgctataaggcggacctcgctactgatcagaaggaggcactgctggagttattgcgcctgcaaccccacccccaacttagcccagagatccgaagagaacttcagagcgccgtccccagagatgttgaagacgttcccattacagtggagtag

SEQ ID NO: 143121 - DNA, 1314 bp, Artificial Sequence
  derived and/or modified sequence
atgcccaaattcaaggcagcacgtggggtcgggggtcaggaaaagcatgcaccgttggccgaccagatattagctggaaacgccgtcagggctggcgtgagagaaaagcgcaggggaaggggaacaggggaggcggaggaagagtacgtggggcctcgcttaagtcgtagaattctgcagcaggctcgacagcagcaggaagagcttgaagccgagcacggaacaggggataagcccgctgctccacgggagcgcaccacgaggctgggtcccaggatgccgcaggatggaagtgacgatgaggacgaagaatggcctacactggagaaagccgctaccatgaccgccgcaggccatcatgcagaggtcgtggtggatcctgaggacgagagagcgatcgaaatgtttatgaacaaaaatccaccagccagaaggaccttggctgatatcattatggagaaattgacagagaagcagactgaggtcgagaccgtgatgtctgaagtttctggctttccaatgcctcaactcgaccccagggtgttggaagtttaccggggagtgcgagaggtgttgagtaaatataggtcaggtaagctcccaaaggcatttaaaatcatcccagctttatctaattgggaacagatcctctatgtgaccgaaccagaagcttggacagcggcagccatgtaccaggccacaaggatatttgctagcaatctgaaggaaagaatggcccagaggttctacaatttggtcttattgccaagagttagggatgatgtggccgagtataaaagactaaacttccacctttacatggccctcaaaaaggccctattcaagccaggagcctggtttaaggggattctaatccccctgtgcgagagcggcacctgcacactaagggaggccatcatagtgggctctattatcactaagtgttcaatcccggtcctccattcctcggctgccatgctgaaaatagccgagatggaatacagtggcgcaaactcaatcttcctccgtctactgttggataagaagtacgccctgccatatagagtcctggacgccctggtgtttcacttcctgggctttcgaacagagaagcgggagctgccagtcctgtggcatcaatgtcttctgacactcgtgcagagatataaagctgacttggccaccgatcaaaaagaagcgctgctggagctactcaggttgcagccacacccccagctttccccagaaatccgccgagagctgcagtcagctgtaccacgtgatgtagaagatgtgcctatcactgtcgagtag

SEQ ID NO: 143122 - DNA, 2029 bp, Artificial Sequence
  derived and/or modified sequence
tctcggcacccctcggtgacgcctccactgacatcatctgcggattcccgccccgaggtttctaaatccagacattcccgtttggctgagcactctaggcctacatccatgaagctaggagagcgacactcaaagactgcactattgagagaagctaacgttaaaggcagtgaatatattcgggagtccagctccggaacccgggagctcttttagtgggaggggcggcgctgatggcgcttctggcctccgaatgctagggggcgctgtgatcgccgggcggcctcttgggcgctgggagtccaccgcgcaagcgcatcctggcctttcttcagtccccacgtgcgatccttcccggcaactttttcgagaaaaatgcccaaattcaaggcggcccgtggggtggggggtcaggaaaaacatgcgcccctggccgatcagatcctggctgggaatgcggtgcgggcgggggtccgggagaagcggcggggtcgcgggacaggagaagcggaggaagagtatgtggggccccggctgagccgacggattttgcagcaagcacggcagcaacaggaggaactcgaggccgagcatgggactggggacaagcccgcggcgccgcgggaacgcaccacgcggctgggtccaagaatgcctcaggatggatcagatgacgaggacgaggagtggcccaccctggagaaggctgccacaatgacagcagcgggccatcatgcagaggtggttgtggaccctgaggatgagcgtgccatagagatgttcatgaacaagaaccctcctgccaggcgcaccctggctgacatcatcatggagaagctgactgagaagcagacagaggttgagacagtcatgtcagaggtgtcgggcttccctatgccccagctggacccccgggtcctagaagtgtacaggggggtccgggaggtattatctaagtaccgcagtggaaaactgcccaaggcatttaagatcatccctgcactctccaactgggagcaaatcctctacgtcacagagccggaggcctggactgcagctgccatgtaccaggccaccaggatttttgcctctaacctgaaggaacgcatggcccagcgcttctacaaccttgtcctgctccctcgagtacgagatgacgttgctgaatacaaacgactcaacttccatctctacatggctctcaagaaggcccttttcaaacctggagcctggttcaaagggatcctgattccactgtgcgagtctggcacttgtaccctccgggaagccatcattgtgggtagcatcatcaccaagtgctccatccctgtgttgcactccagtgcggccatgctgaaaattgctgagatggaatacagcggtgccaacagcatcttcctgcgactgctgctggataagaagtatgcactgccttaccgggtgctggatgccctagtcttccacttcctggggttccggacagagaagcgtgaactgcctgtgctgtggcaccagtgcctcctgactttggtccagcgctacaaggccgacttggccacagaccagaaagaggccctcttagaactgctccggctgcagccccatccacagctatcgcccgaaatcaggcgtgagcttcagagtgcagtcccccgcgatgtggaagatgttcccatcaccgtggagtgaggaaaacagtcagctgtcctggccaaaggggtttggaaggacaccaagacccccgttggtgactgaagatgacactgagctttaatggctgaagacccagatcagggcagtgacagatcacagggacatctgtggctcccagtccaggacaggaaggactgagggtctggctggttccctcttccattctaggcccttatccctgtttagttctgagagccaacttgagataccatatgctagcattcccagtccccagctggggcttggtgtgagtactttttctatggctattgtgtcaggtcactgtggataaaggcaaagacagatatttattgaa

SEQ ID NO: 143123 - protein, 482 aa, Artificial Sequence
  derived and/or modified sequence
MASFSAETNSTDLLSQPWNEPPVILSMVILSLTFLLGLPGNGLVLWVAGLKMQRTVNTIWFLHLTLADLLCCLSLPFSLAHLALQGQWPYGRFLCKLIPSIIVLNMFASVFLLTAISLDRCLVVFKPIWCQNHRNVGMACSICGCIWVVAFVMCIPVFVYREIFTTDNHNRCGYKFGLSSSLDYPDFYGDPLENRSLENIVQPPGEMNDRLDPSSFQTNDHPWTVPTVFQPQTFQRPSADSLPRGSARLTSQNLYSNVFKPADVVSPKIPSGFPIEDHETSPLDNSDAFLSTHLKLFPSASSNSFYESELPQGFQDYYNLGQFTDDDQVPTPLVAITITRLVVGFLLPSVIMIACYSFIVFRMQRGRFAKSQSKTFRVAVVVVAVFLVCWTPYHIFGVLSLLTDPETPLGKTLMSWDHVCIALASANSCFNPFLYALLGKDFRKKARQSIQGILEAAFSEELTRSTHCPSNNVISERNSTTV

SEQ ID NO: 143124 - protein, 146 aa, Artificial Sequence
  derived and/or modified sequence
MASFSAETNSTDLLSQPWNEPPVILSMVILSLTFLLGLPGNGLVLWVAGLKMQRTVNTIWFLHLTLADLLCCLSLPFSLAHLALQGQWPYGRFLCKLIPSIIVLNMFASVFLLTAISLDRCLVVFKPIWCQNHRNVGMACSICGCI

SEQ ID NO: 143125 - DNA, 2088 bp, Artificial Sequence
  derived and/or modified sequence
ctgtgaggtcagatagtggtctagagcataagacttaacttattgccggaaacagagagagaacagaagaagagaaagctcagcaaattttcttgccatacttcatgacttcactgtggctaagtgtggggaccagacaggactcgtggagacatccaggtgctgaagccttcagctactgtctcagttttttgaagtttagcaatggcgtctttctctgctgagaccaattcaactgacctactctcacagccatggaatgagcccccagtaattctctccatggtcattctcagccttacttttttactgggattgccaggcaatgggctggtgctgtgggtggctggcctgaagatgcagcggacagtgaacacaatttggttcctccacctcaccttggcggacctcctctgctgcctctccttgcccttctcgctggctcacttggctctccagggacagtggccctacggcaggttcctatgcaagctcatcccctccatcattgtcctcaacatgtttgccagtgtcttcctgcttactgccattagcctggatcgctgtcttgtggtattcaagccaatctggtgtcagaatcatcgcaatgtagggatggcctgctctatctgtggatgtatctgggtggtggcttttgtgatgtgcattcctgtgttcgtgtaccgggaaatcttcactacagacaaccataatagatgtggctacaaatttggtctctccagctcattagattatccagacttttatggagatccactagaaaacaggtctcttgaaaacattgttcagccgcctggagaaatgaatgataggttagatccttcctctttccaaacaaatgatcatccttggacagtccccactgtcttccaacctcaaacatttcaaagaccttctgcagattcactccctaggggttctgctaggttaacaagtcaaaatctgtattctaatgtatttaaacctgctgatgtggtctcacctaaaatccccagtgggtttcctattgaagatcacgaaaccagcccactggataactctgatgcttttctctctactcatttaaagctgttccctagcgcttctagcaattccttctacgagtctgagctaccacaaggtttccaggattattacaatttaggccaattcacagatgacgatcaagtgccaacacccctcgtggcaataacgatcactaggctagtggtgggtttcctgctgccctctgttatcatgatagcctgttacagcttcattgtcttccgaatgcaaaggggccgcttcgccaagtctcagagcaaaacctttcgagtggccgtggtggtggtggctgtctttcttgtctgctggactccataccacatttttggagtcctgtcattgcttactgacccagaaactcccttggggaaaactctgatgtcctgggatcatgtatgcattgctctagcatctgccaatagttgctttaatcccttcctttatgccctcttggggaaagattttaggaagaaagcaaggcagtccattcagggaattctggaggcagccttcagtgaggagctcacacgttccacccactgtccctcaaacaatgtcatttcagaaagaaatagtacaactgtgtgaaaatgtggagcagccaacaagcaggggctcttaggcaatcacatagtgaaagtttataagaggatgaagtgatatggtgagcagcggacttcaaaaactgtcaaagaatcaatccagcggttctcaaacggtacacagactattgacatcagcatcacctagaaacttgttagaaatgcaaattctcaagccgcatcccagacttgctgaatcggaatctctgggggttgggacccagcaagggcacttaacaaaccctcgtttctgattaatgctaaatgtaagaatcattgtaaacattagttctatttctatcccaaactaagctatgtgaaataagagaagctactttgtttttaaatgatgttgaatatttgtcgatatttccatcattaaatttttccttagcattgtctaagtcttccagattccatt

SEQ ID NO: 143126 - DNA, 567 bp, Artificial Sequence
  derived and/or modified sequence
agacaggactcgtggagacatccaggtgctgaagccttcagctactgtctcagttttttggtaagaaaacctagacctacctgatgacttgtgcttagcctgttttgctcattatagaagtttagcaatggcgtctttctctgctgagaccaattcaactgacctactctcacagccatggaatgagcccccagtaattctctccatggtcattctcagccttacttttttactgggattgccaggcaatgggctggtgctgtgggtggctggcctgaagatgcagcggacagtgaacacaatttggttcctccacctcaccttggcggacctcctctgctgcctctccttgcccttctcgctggctcacttggctctccagggacagtggccctacggcaggttcctatgcaagctcatcccctccatcattgtcctcaacatgtttgccagtgtcttcctgcttactgccattagcctggatcgctgtcttgtggtattcaagccaatctggtgtcagaatcatcgcaatgtagggatggcctgctctatctgtggatgtatctg

SEQ ID NO: 143127 - DNA, 1449 bp, Artificial Sequence
  derived and/or modified sequence
atggccagcttcagcgccgagaccaacagcaccgacctgctgagccagccctggaacgagccccccgtgatcctgagcatggtgatcctgagcctgaccttcctgctgggcctgcccggcaacggcctggtgctgtgggtggccggcctgaagatgcagagaaccgtgaacaccatctggttcctgcacctgaccctggccgacctgctgtgctgcctgagcctgcccttcagcctggcccacctggccctgcagggccagtggccctacggcagattcctgtgcaagctgatccccagcatcatcgtgctgaacatgttcgccagcgtgttcctgctgaccgccatcagcctggacagatgcctggtggtgttcaagcccatctggtgccagaaccacagaaacgtgggcatggcctgcagcatctgcggctgcatctgggtggtggccttcgtgatgtgcatccccgtgttcgtgtacagagagatcttcaccaccgacaaccacaacagatgcggctacaagttcggcctgagcagcagcctggactaccccgacttctacggcgaccccctggagaacagaagcctggagaacatcgtgcagccccccggcgagatgaacgacagactggaccccagcagcttccagaccaacgaccacccctggaccgtgcccaccgtgttccagccccagaccttccagagacccagcgccgacagcctgcccagaggcagcgccagactgaccagccagaacctgtacagcaacgtgttcaagcccgccgacgtggtgagccccaagatccccagcggcttccccatcgaggaccacgagaccagccccctggacaacagcgacgccttcctgagcacccacctgaagctgttccccagcgccagcagcaacagcttctacgagagcgagctgccccagggcttccaggactactacaacctgggccagttcaccgacgacgaccaggtgcccacccccctggtggccatcaccatcaccagactggtggtgggcttcctgctgcccagcgtgatcatgatcgcctgctacagcttcatcgtgttcagaatgcagagaggcagattcgccaagagccagagcaagaccttcagagtggccgtggtggtggtggccgtgttcctggtgtgctggaccccctaccacatcttcggcgtgctgagcctgctgaccgaccccgagacccccctgggcaagaccctgatgagctgggaccacgtgtgcatcgccctggccagcgccaacagctgcttcaaccccttcctgtacgccctgctgggcaaggacttcagaaagaaggccagacagagcatccagggcatcctggaggccgccttcagcgaggagctgaccagaagcacccactgccccagcaacaacgtgatcagcgagagaaacagcaccaccgtgtag

SEQ ID NO: 143128 - DNA, 441 bp, Artificial Sequence
  derived and/or modified sequence
atggccagcttcagcgccgagaccaacagcaccgacctgctgagccagccctggaacgagccccccgtgatcctgagcatggtgatcctgagcctgaccttcctgctgggcctgcccggcaacggcctggtgctgtgggtggccggcctgaagatgcagagaaccgtgaacaccatctggttcctgcacctgaccctggccgacctgctgtgctgcctgagcctgcccttcagcctggcccacctggccctgcagggccagtggccctacggcagattcctgtgcaagctgatccccagcatcatcgtgctgaacatgttcgccagcgtgttcctgctgaccgccatcagcctggacagatgcctggtggtgttcaagcccatctggtgccagaaccacagaaacgtgggcatggcctgcagcatctgcggctgcatctag

SEQ ID NO: 143129 - DNA, 1449 bp, Artificial Sequence
  derived and/or modified sequence
atggctagcttcagcgcggagactaattctacagacctcttgtctcagccttggaacgagcctcctgtgatcctttcaatggtgatcctgtctctgaccttcctcttaggcttgcccgggaatgggctggtgttatgggtcgctggcctgaagatgcaacggacggtaaacacaatttggtttctgcacttgactctggctgatctgttgtgctgcctgagccttccctttagtctagcccatctggccctccaaggccagtggccttacggaagattcctttgtaaattgatcccttcaattatcgtgctgaatatgtttgcgtcagtgttcttgctgacggcgatctctctcgaccggtgcctcgtggtttttaaacccatctggtgccagaatcacagaaatgttggcatggcgtgctcaatatgtggttgcatatgggtggtcgcctttgtgatgtgcattccggtgttcgtataccgcgaaatttttacaaccgataaccataaccgatgcgggtataagttcgggctgagctcttctctggattatcctgacttctacggggatcctttggaaaacagatccctcgagaacatagtgcaacctcctggggagatgaatgataggttggatccttcaagctttcagaccaacgatcacccctggacagtgccaaccgtgttccagccccagacatttcagaggccttcagctgactccctgcctcggggctctgctaggcttaccagtcagaatctgtactctaacgtttttaagccagctgacgtggtctcacctaagattccttcgggcttcccaatcgaagatcatgaaaccagccctttggacaactcagacgccttcctctcaacccatctcaagctattcccctctgccagtagtaacagcttctatgaatcagaactgcctcagggttttcaggactactataacctcggccagttcactgatgacgaccaggtccctacccctttagtggctatcaccatcacaaggttagtcgtcggcttcctgcttcccagcgtgatcatgatcgcttgttactctttcattgtgtttagaatgcagaggggaaggtttgcgaaatctcagtctaagacctttagggtggccgtggtcgttgtcgccgtattccttgtgtgctggactccctatcatatctttggtgtgctgagtctgcttactgaccccgagactccgcttggtaagacgctgatgtcttgggaccacgtttgtattgcactagcatcggcaaattcatgctttaatcctttcctttatgccctgctgggcaaagactttcgcaagaaagctcgtcagagtatccaaggcatcctcgaagccgcctttagcgaggagctgaccaggtctacacattgcccctcaaataacgtcatcagcgaaagaaacagcaccaccgtttag

SEQ ID NO: 143130 - DNA, 441 bp, Artificial Sequence
  derived and/or modified sequence
atggctagcttctctgccgaaactaactcgactgatctactcagccagccttggaatgaacctcccgtgatcctctccatggttatcttatctttaaccttcctgcttggcctccccggcaatgggctcgtactctgggtcgccggtttgaagatgcaacgcacggtgaacacgatttggtttctgcacctcaccttggccgatctgctgtgctgcctgtcattgcccttctccctggctcacctcgcattacagggacagtggccttacggacggttcctgtgcaaactgatccccagcatcattgttctgaacatgtttgcaagtgtatttctgttgacagccatttccctggatcggtgcttggtcgtttttaaaccaatttggtgccaaaaccaccgtaacgtcgggatggcatgcagcatctgtggctgtatctag

SEQ ID NO: 143131 - DNA, 1449 bp, Artificial Sequence
  derived and/or modified sequence
atggccagcttctctgctgagaccaacagcacagacctgctgagccagccctggaatgaacctcctgtgatcctgtccatggtgatcctgagcctgaccttcctgctgggcctgcctggaaatggcctggtgctgtgggtggccggcctgaagatgcagaggacagtgaacaccatctggttcctgcacctgaccctggccgacctgctgtgctgcctgagcctgcccttcagcctggcccacctggccctgcagggccagtggccctacggccgcttcctgtgcaagctgatccccagcatcatcgtgctgaacatgtttgcctctgtgttcctgctgacagccatcagcctggaccgctgcctggtggtgttcaagcccatctggtgccagaaccacagaaatgtgggcatggcctgcagcatctgtggctgcatctgggtggtggcctttgtgatgtgcatccctgtgtttgtgtaccgggagatcttcaccacagacaaccacaacagatgtggctacaagtttggcctgagcagcagcctggactacccagacttctacggggaccccctggagaacagaagcctggagaacatcgtgcagcccccaggagagatgaatgaccggctggaccccagcagcttccagaccaatgaccacccctggacagtgcccaccgtcttccagccccagaccttccagaggcccagcgctgacagcctgccccggggcagcgcccggctgaccagccagaacctgtacagcaatgtgttcaagccagcagatgtggtgagccccaagatccccagcggcttccccatcgaggaccacgagaccagccccctggacaacagtgatgccttcctgagcacccacctgaagctgttccccagcgccagcagcaacagcttctatgagagcgagctgccccagggcttccaggactactacaacctgggccagttcacagatgatgaccaggtgcccacccccctggtggccatcaccatcacccggctggtggtgggcttcctgctgcccagcgtcatcatgattgcctgctacagcttcatcgtgttcaggatgcagaggggccgctttgccaagagccagagcaagaccttccgggtggccgtggtggtggtggccgtgttcctggtgtgctggaccccctaccacatcttcggcgtgctgagcctgctgacagatcctgagacccccctgggcaagaccctgatgtcctgggaccacgtgtgcatcgccctggccagcgccaacagctgcttcaaccccttcctgtatgccctgctgggcaaggacttcaggaagaaggcccggcagagcatccagggcatcctggaggccgccttcagcgaggagctgaccaggagcacccactgccccagcaacaacgtcatcagcgagaggaacagcaccaccgtgtag

SEQ ID NO: 143132 - DNA, 441 bp, Artificial Sequence
  derived and/or modified sequence
atggccagcttctctgctgagaccaacagcacagacctgctgagccagccctggaatgaacctcctgtgatcctgtccatggtgatcctgagcctgaccttcctgctgggcctgcctggaaatggcctggtgctgtgggtggccggcctgaagatgcagaggacagtgaacaccatctggttcctgcacctgaccctggccgacctgctgtgctgcctgagcctgcccttcagcctggcccacctggccctgcagggccagtggccctacggccgcttcctgtgcaagctgatccccagcatcatcgtgctgaacatgtttgcctctgtgttcctgctgacagccatcagcctggaccgctgcctggtggtgttcaagcccatctggtgccagaaccacagaaatgtgggcatggcctgcagcatctgtggctgcatctag

SEQ ID NO: 143133 - DNA, 1449 bp, Artificial Sequence
  derived and/or modified sequence
atggccagcttcagcgccgagaccaacagcaccgacctgctgagccagccctggaacgagcctccagtaattttgtcaatggtaatccttagtcttaccttccttcttggactacccggcaatggtctcgtgctctgggtcgccggccttaagatgcagcgcaccgtaaataccatctggtttctccacctgaccctcgcagatctgttgtgttgcctctctctgcctttttcactggcccacctggccctccaagggcagtggccctacggacggttcctttgtaagctaatcccctctattatagtacttaacatgttcgccagtgtgtttctgttgacagccattagcctggaccgctgtctggtggtgtttaagccaatatggtgtcagaatcataggaacgtgggcatggcatgctcgatctgtggctgtatttgggtggtcgcatttgtcatgtgtattccggtgttcgtgtatcgggagatttttacaaccgacaaccataatcggtgcggctacaagttcggtctgagctcctcactggattatccggacttttacggcgatcctcttgagaatagatctctggagaacatcgtgcagccacccggggaaatgaatgaccgcctggatccttcaagttttcagactaacgatcacccatggacagtccccacagtcttccagccccagacctttcagaggccttcggctgattctctgcccaggggctccgcccggttaaccagtcaaaatctttatagtaatgtcttcaaacccgctgatgtggttagtcccaagattcccagcgggttccctatcgaagatcacgaaacgagccctcttgataattcagatgccttcctctcaacacatctgaagttgttcccctcagcttcctcaaactcattttacgagagtgaactaccccagggtttccaggattattacaatttagggcagttcactgacgatgatcaggttcctacccccttggtcgcaattacgatcactcgattggtggtgggatttttgcttcctagcgtgatcatgatcgcatgctactccttcattgtgtttcggatgcagcgcgggaggtttgctaaatctcagagcaaaacgtttcgcgtggcggttgtcgtcgtagcagtgtttcttgtgtgctggaccccgtaccacatatttggggtcctgagcctgctgacagatccggagactcccctgggcaaaacattgatgtcgtgggatcacgtgtgcattgcgctcgcctcagccaatagctgcttcaacccttttctttatgcactgctaggcaaagactttcgcaagaaggctcggcagagcattcagggaatcctggaggctgccttcagtgaagaactcacacgctcaacccactgtccaagcaataatgtgatcagcgaacgtaattctaccacggtgtag

SEQ ID NO: 143134 - DNA, 441 bp, Artificial Sequence
  derived and/or modified sequence
atggccagcttcagcgccgagaccaacagcaccgacctgctgagccagccatggaacgagcccccagtgatcttgtctatggtcatcctctccctgacatttcttttaggcctgccagggaatggccttgtactttgggtggccggcctcaagatgcagcgcaccgtcaatacaatttggttcctccatcttactctggcagacttactgtgctgcctgagtctgccattctccctggcacaccttgctctgcaaggccagtggccctatggaagattcctctgtaagctgataccatctattatcgtgcttaacatgtttgcttcggtgtttctgctgaccgccattagtcttgatcgctgtttagtagtgttcaagccgatatggtgtcagaatcaccgaaatgtaggcatggcctgctctatctgtggctgcatctag

SEQ ID NO: 143135 - DNA, 1449 bp, Artificial Sequence
  derived and/or modified sequence
atggccagcttctcggctgaaacaaattctactgacctgttgtctcagccgtggaatgagcccccagtgatcctatcaatggtgatcctttcactgaccttcctcctaggactgcccggaaatggcctcgttctttgggtggcgggactaaaaatgcagcgcacggtgaacacaatctggttcttacacctcacacttgccgacctcctctgctgtttgtccctcccgttctcccttgcgcatcttgctctccagggacaatggccatatgggaggtttttgtgtaagcttatcccgagcattatagttctgaatatgttcgctagcgtgtttctgctgacagcaatatcgctggataggtgcttagtggtgtttaagcccatttggtgtcagaatcatcggaacgtggggatggcttgttctatatgtggttgcatatgggtggttgcatttgtgatgtgcattccagtgttcgtgtatcgtgagatctttaccacagacaatcacaatcggtgtggttataagttcggtctctcaagttccttggactatccagacttttatggcgaccccctggagaatagatcactcgagaatatagtgcagccaccgggtgaaatgaatgatagactcgaccccagtagctttcagacaaatgaccatccgtggaccgtaccaaccgttttccagccccaaacattccaaaggccttcagctgactctttaccccgaggttccgcccgtctaacctcccagaacctgtattccaacgtgttcaaaccggctgacgttgtcagtccgaagatccctagtggatttccaatcgaggatcatgagacctccccactcgacaattccgacgcttttctgtctacccacctgaaattgtttccctcagcctcttccaattctttctacgaatctgagcttcctcaaggatttcaagactattacaacttagggcaatttactgatgacgaccaagttccaacccctctggtggcaattaccatcactcgtctggtggttgggttcctgctgccttcggttatcatgatcgcctgctacagcttcatcgttttccgaatgcagaggggaagatttgccaagagccagagcaaaacctttcgcgttgccgtggtcgtagtggccgtatttttggtttgttggacaccgtatcacatcttcggagttctttctctgctgaccgacccagagacacccctcggaaagacactgatgagctgggaccacgtttgtatcgcactggcaagtgccaatagctgtttcaacccttttttatatgccctgctgggaaaagactttcggaaaaaagctcgccagtctatacaaggcatcctggaggccgctttttccgaagagctgaccagatccacacattgcccatccaacaacgtcatatccgaaagaaattcaacaaccgtgtag

SEQ ID NO: 143136 - DNA, 441 bp, Artificial Sequence
  derived and/or modified sequence
atggcatccttcagtgccgagaccaactcaacggacctcctgtcacaaccgtggaatgagcccccagttatcctttctatggtgatcttatcactgacttttctcctcggattacccggaaacggattagtcctgtgggtggctggcttgaagatgcagaggactgttaacaccatctggttcttacacctaactctggcagacctactttgctgtctgtctttacccttttctctcgcccacctggcactgcagggccagtggccgtatggcagattcttgtgtaagttgatacctagtatcatcgtgcttaacatgtttgcatccgtgttcctcctgacggccatctctctggacaggtgccttgttgttttcaaacctatctggtgccaaaaccacaggaatgttggaatggcttgcagtatctgcgggtgtatctag

SEQ ID NO: 143137 - protein, 97 aa, Artificial Sequence
  derived and/or modified sequence
MFSCVKPYEDQNYSALRRDCRRRKVLFEDPLFPATDDSLYYKGTPGPAVRWKRPKGICEDPRLFVDGISSHDLHQGQVGNCWFVAACSSLASRESLW

SEQ ID NO: 143138 - DNA, 294 bp, Artificial Sequence
  derived and/or modified sequence
atgttttcctgcgttaagccatacgaagaccagaactatagcgcgctgagaagggattgcaggagacggaaagtcctgttcgaggaccccctatttcctgctacagatgacagcctgtactacaaagggacaccgggtcccgcagtgcgctggaaaaggccgaagggtatctgtgaagatcctaggctgttcgtggatggaatctcctcccacgatttgcaccaagggcaggtaggaaactgctggtttgtggccgcatgtagctctctagcctcccgggagtccttatggtag

SEQ ID NO: 143139 - DNA, 294 bp, Artificial Sequence
  derived and/or modified sequence
atgttcagctgtgtgaagccctatgaggaccagaactacagcgccctgcggcgggactgcagaagaaggaaggtgctgtttgaggaccccctcttccctgccacagatgacagcctgtactacaagggcaccccaggccctgctgtgcgctggaagaggcccaagggcatctgtgaggacccccggctgtttgtggatggcatcagcagccatgacctgcaccagggccaggtgggcaactgctggtttgtggccgcctgcagcagcctggccagccgggagagcctgtggtag

SEQ ID NO: 143140 - DNA, 294 bp, Artificial Sequence
  derived and/or modified sequence
atgttcagctgcgtgaagccctacgaggaccagaactacagcgccctgcggcgcgattgtaggcgacgaaaagttctattcgaagacccactcttccctgctacagacgactcattgtactacaaaggtacgccgggacctgctgtacggtggaagagacctaagggcatctgtgaagaccccagactgttcgttgatgggatctccagccatgacctccaccagggacaggtgggcaattgctggttcgttgccgcttgttcctcgctggctagcagagaatcactttggtag

SEQ ID NO: 143141 - DNA, 294 bp, Artificial Sequence
  derived and/or modified sequence
atgttctcctgcgtgaaaccgtacgaagaccagaattactcggcgcttcgtcgggactgtcgtcggaggaaggtcctcttcgaggaccccctgttcccggctacagatgatagcttatactataaggggacccccggaccagcggtgaggtggaagagacctaaagggatctgcgaagatccaagactgttcgtagacggaatatctagccatgacttgcatcagggtcaagttggaaattgctggttcgtggcagcctgttcctctctagccagcagagagtctctctggtag

SEQ ID NO: 143142 - DNA, 294 bp, Artificial Sequence
  derived and/or modified sequence
atgttcagctgcgtgaagccctacgaggaccagaactacagcgccctgagaagagactgcagaagaagaaaggtgctgttcgaggaccccctgttccccgccaccgacgacagcctgtactacaagggcacccccggccccgccgtgagatggaagagacccaagggcatctgcgaggaccccagactgttcgtggacggcatcagcagccacgacctgcaccagggccaggtgggcaactgctggttcgtggccgcctgcagcagcctggccagcagagagagcctgtggtag

SEQ ID NO: 143143 - protein, 290 aa, Artificial Sequence
  derived and/or modified sequence
MADLSFIEDTVAFPEKEEDEEEEEEGVEWGYEEGVEWGLVFPDANGEYQSPINLNSREARYDPSLLDVRLSPNYVVCRDCEVTNDGHTIQVILKSKSVLSGGPLPQGHEFELYEVRFHWGRENQRGSEHTVNFKAFPMELHLIHWNSTLFGSIDEAVGKPHGIAIIALFVQIGKEHVGLKAVTEILQDIQYKGKSKTIPCFNPNTLLPDPLLRDYWVYEGSLTIPPCSEGVTWILFRYPLTISQLQIEEFRRLRTHVKGAELVEGCDGILGDNFRPTQPLSDRVIRAAFQ

SEQ ID NO: 143144 - DNA, 873 bp, Artificial Sequence
  derived and/or modified sequence
atggccgacttaagcttcatcgaggacacagtggcttttccagaaaaggaagaagacgaagaagaagaggaggaaggcgtggagtggggctatgaggagggggtggagtggggacttgtgtttcccgacgccaatggggagtaccagtcacccattaacctaaattcacgcgaagctcgttacgatccatccctgctggatgtcaggctgagtcctaattatgtggtctgccgggactgtgaagtaaccaatgatggccacactatacaggtgattctgaaaagcaagtctgtgctatcaggcgggccacttcctcaaggccacgagtttgaattgtatgaggtgcggttccactgggggcgtgagaatcagcggggttcagaacacacggttaattttaaggcctttccaatggagcttcacctcattcattggaactcaacactttttggttccatcgacgaggcagtaggaaagcctcatggaatcgccatcatcgcactgtttgtccagataggcaaagagcacgttggcttgaaggctgtgaccgaaatattgcaagatatccagtataaagggaaatccaagactatcccctgcttcaaccctaacacgctgctccctgaccccctgctgcgtgactattgggtatatgagggcagcctgacaattcccccgtgcagtgaaggtgtaacttggattctgttcagatatcctttgaccatctcccaacttcaaattgaagagtttaggaggctgcgtacccacgtaaagggcgccgagttggtagagggttgcgacggaattttgggggataacttcaggcctacccagcccttgagcgaccgggtgattcgtgcagcctttcagtag

SEQ ID NO: 143145 - DNA, 873 bp, Artificial Sequence
  derived and/or modified sequence
atggctgacctgtccttcatcgaggacacagtggccttccctgagaaggaggaggatgaggaggaggaggaggagggcgtggagtggggctatgaggagggcgtggagtggggcctggtgtttcctgatgccaatggagagtaccagagccccatcaacctgaacagccgggaggcccgctatgaccccagcctgctggatgtgcggctgagccccaactacgtggtgtgccgggactgtgaggtgaccaatgatggccacaccatccaggtgatcctgaagagcaagtctgtgctgagcggcggccccctgccccagggccacgagtttgagctgtatgaggtgcgcttccactggggccgggagaaccagaggggcagcgagcacacagtgaacttcaaggccttccccatggagctgcacctgatccactggaacagcaccctgtttggcagcattgatgaggccgtgggcaagccccatggaattgccatcatcgccctgtttgtgcagatcggcaaggagcacgtgggcctgaaggctgtgacagagatcctgcaggacatccagtacaagggcaagagcaagaccatcccctgcttcaaccccaacaccctgctgcctgaccccctgctgcgggactactgggtgtatgagggcagcctgaccatccccccctgcagcgagggcgtgacctggatcctcttccgctaccccctgaccatcagccagctgcagatcgaggagttccggcggctgcggacccacgtgaagggagctgagctggtggagggctgtgatggcatcctgggggacaacttccggcccacccagcccctgagtgacagagtcatccgggccgccttccagtag

SEQ ID NO: 143146 - DNA, 873 bp, Artificial Sequence
  derived and/or modified sequence
atggccgacctgagcttcatcgaggacaccgtggccttccccgagaaggaggaggacgaggaggaagaggaagaaggcgtggaatggggctacgaggagggcgtggaatgggggttagtcttccctgacgctaacggggagtatcagagccccatcaacctcaactccagagaagcgagatacgacccatccttgcttgacgtccggctgtcccccaattacgttgtttgccgggactgcgaagtcacgaatgatgggcacacaattcaggtcatcctgaagtccaaatctgtcctgtctggaggtcctctcccacagggacacgagttcgagttgtacgaagtgagatttcactggggtagagaaaaccagcggggcagcgaacacacagtcaatttcaaggcttttccaatggaattgcatctaattcactggaacagtactctattcgggagtattgatgaggccgtcggcaaaccccacggaattgccattatcgctctgttcgtgcagatcggcaaggaacacgtgggcttgaaagctgtgacggagatcctgcaagacattcagtacaagggaaagtcaaaaaccattccctgtttcaaccccaacacactgttgccggatcctctgctcagagactactgggtatacgaaggatccctgacaattcctccatgttcagaaggtgtgacttggattctcttccggtacccattgactattagccagcttcagatcgaagagtttcgccggcttcgcacacacgtgaagggcgcggaattagtggaaggttgtgacggtatactgggtgataatttcaggcctactcagccactctcggacagagtcataagagcggccttccagtag

SEQ ID NO: 143147 - DNA, 873 bp, Artificial Sequence
  derived and/or modified sequence
atggctgacttgtcattcatcgaagacacagtagccttccctgagaaagaggaggatgaggaagaggaagaggagggggttgagtggggatacgaagagggtgtggagtggggtctggtgttccctgatgctaacggagagtaccagtcacccattaacctcaactcgcgcgaggcccgatatgatccatcactgctggatgtcaggctatcacccaattacgttgtctgccgagactgcgaggtcaccaatgatgggcacacaattcaggtgatcctcaaatccaaaagcgtcttaagtgggggtccactcccacagggccatgagtttgagttgtacgaagtgagatttcactggggcagggaaaaccaaaggggctccgaacacaccgtgaactttaaggcctttcccatggagctacacttaatacactggaactctaccttatttggcagcattgatgaggctgtcggcaaaccccacggcatcgctattatagctctattcgtgcaaatcggcaaagagcacgttggtttaaaagccgtgactgagatcctgcaggacatccaatacaagggcaaatcaaagactatcccctgttttaatcctaacaccttgctccccgatccgcttttaagggattattgggtctacgagggaagcctgacaatccctccgtgcagcgagggagtgacatggattctgtttcgctatcctttgacaatatcccagctgcagatcgaagaatttagacgcttgagaactcatgtgaagggcgcagagctggtggaagggtgcgacggaatcctgggggataacttccgtccgacccaacctttgtcggatcgagtaatccgggctgcatttcagtag

SEQ ID NO: 143148 - DNA, 3812 bp, Artificial Sequence
  derived and/or modified sequence
cgctcgctccccaggccacagccgctccctcgctctgctggggcctccggacgcgcttcccacgcgggtctctggaacactcggtccgaacgcacgcctgcttgcactcacactgcggttcacacccggaggcgctctcgcactcacactgccgctcacgcgtgctcacactcccccacgcgcgctccgctccggctccagccccgcgcccagcgaaggcgcaggcactgctgccgagagcgccgaggggccccgcggccttcccatggcggacctgagcttcatcgaagataccgtcgccttccccgagaaggaagaggatgaggaggaagaagaggagggtgtggagtggggctacgaggaaggtgttgagtggggtctggtgtttcctgatgctaatggggaataccagtctcctattaacctaaactcaagagaggctaggtatgacccctcgctgttggatgtccgcctctccccaaattatgtggtgtgccgagactgtgaagtcaccaatgatggacataccattcaggttatcctgaagtcaaaatcagttctttcgggaggaccattgcctcaagggcatgaatttgaactgtacgaagtgagatttcactggggaagagaaaaccagcgtggttctgagcacacggttaatttcaaagcttttcccatggagctccatctgatccactggaactccactctgtttggcagcattgatgaggctgtggggaagccgcacggaatcgccatcattgctctgtttgttcagataggaaaggaacatgttggcttgaaggctgtgactgaaatcctccaagatattcagtataaggggaagtccaaaacaataccttgctttaatcctaacactttattaccagaccctctgctgcgggattactgggtgtatgaaggctctctcaccatcccaccttgcagtgaaggtgtcacctggatattattccgataccctttaactatatcccagctacagatagaagaatttcgaaggctgaggacacatgttaagggggcagaacttgtggaaggctgtgatgggattttgggagacaactttcggcccactcagcctcttagtgacagagtcattagagctgcatttcagtagccaaagaggacaggaacaagtctgtcttcatgagggaggaagacaatggtcctataatgcccttggataagaaaaggaaacttttgagctgcaccttcagtttatcctcaaagcctgcgttgtttgtcttcatctaatccagctttgatggacatctgtgatggttgcctgtacacttgctgaaatgaaatattagaaatggctgtatattccaaagaaaccctatattatatatccacattactgctgctaggattcatagttgcacatactgtttattgcttatgtgtagaaggaatgaaactagtttccagagttgttattaatatgaatatatatcatgtgttaatattgagaaaggaaaaatacattcccggtgttagtagttcttcatttcctgtctccaacagaaaattcactcattttagaactagtgtaattcttgataataaaataagagttttgattaagaacagcatagagcttcaaaatgcaaagtgaatgattagtaaaattatgtctcattttattttttcagcacccataccacaattaatattaggctggattgccatgggaaacattttttggcattaatgcagcaacataatactcactttaggtattactacatagttgaaggatttaactgaatgtatggatcaaatttatttatttgacatattcgaagctgtggtttaataggaatttgagaaaggtgtaagaaataggataaaaagaaggtcagcaccatgtaccaggaatagctttactttccatacatagaaatataaatttagtggtatcctatattactttagtgtcgtacgctttgtaagacttaaatattttattctattgattccactactttggtatgttaagacatttctttaaagatgaccaacaatatccttattttaggtgccactagcagatgtaagcgtatacttagttgccgttagatgtgacagaatgagataatttatgtaaagcagtagagtacctggcacaaagcaaacaataaatattattgttattgttgttataattgtaaaatgaatgacttcaaaaacatagtcccagtttggagggattttgtgatgcagaatatctaagtcatagaaatagaagacaggtggaataagtatatgttcagagtttttagatgtgttgagtagagacggtaataatggaagcattaaatacaaatgaaaatcacaccagatatccctgaaattcaagcaaagaaagttcatcatgtattcttgggcagcaagagaaaggactagggttatggcaatgtgtggaaaagttgaggcttgctaagggttgagatctgttggtagccctggatcacatggggtcagcaccaggcagtgcctctgaaagcggagagaggtcctggacttcccttgtgtataacagttcctagtgtccaacaatgaggaaacggtgaagcatggttacaaaactgtgacaaaaatatttacatctagcactgttaccactcacatgccaaacattggctgcacacgtgcagccttatttgtaattaacatcaaaagactagatctgaagccttccataaatgagaggccattcatatggcattcctggaacaaaacactgcacaggtaccagcctctccactcctgaccgggttggtgctgaacagtcagggattgttcttgaactagacttctgatgcttcttgcaatcttctttcatctttccctgaaatacacaaaataaacaaatacaataacaaatagtaattaaatgactttcaggataacatctagttgttcagacttcacccttcacaggtgtgtgtgtatgtgtgtttatgtctgtatattgaagcaatttgaatttatttactgtatattttctgagtaaaagactgaaatgaactacttggttcagatcatggtgtccattggtgacattgtttggaggcataatattctttatatggaaaatcctttaattccacagttagttacctcagattcagaatatgaatactgtttataatacgcttttgtaggaatgaatttgaaaggtagtttgtcagtaaacgaaagcacaacaactaatctcaaatctgttttgatggtgtgataggaaagaaagtaaaacctatgtgatggaccctgtaattggggcaggaatctcccaaagaaaaaggggagaattaatgacaaatgtcatagatcttgaaatttaatttagggtgcattttgtttatgaaacaatttaataaggcaacaaagtgaaatgatttttcatgtagcttatacacatgtaagtgcctctgattcatggtaactaacgtacctgatggtgtgtaaagtaatactgttgtcagaaggtttgccaattaagataatttgagtttactctttttttgttggttagtttagctgaaggcttgtcaattttattgatttttttcaaggagccaaagtggattttggggttttctctattgtgtttgtattctctatgtcatcaaactctgctcaaatcttacaaaatagtaagattagtaagaaagcagactaacttctgcttgctttgtatttagtttgtgtcttttccagtattttaaggtggaaggttaggttattgatttgaattcttttttgaataaaggcattaacagtta

SEQ ID NO: 143149 - DNA, 873 bp, Artificial Sequence
  derived and/or modified sequence
atggccgacctgagcttcatcgaggacaccgtggccttccccgagaaggaggaggacgaggaggaggaggaggagggcgtggagtggggctacgaggagggcgtggagtggggcctggtgttccccgacgccaacggcgagtaccagagccccatcaacctgaacagcagagaggccagatacgaccccagcctgctggacgtgagactgagccccaactacgtggtgtgcagagactgcgaggtgaccaacgacggccacaccatccaggtgatcctgaagagcaagagcgtgctgagcggcggccccctgccccagggccacgagttcgagctgtacgaggtgagattccactggggcagagagaaccagagaggcagcgagcacaccgtgaacttcaaggccttccccatggagctgcacctgatccactggaacagcaccctgttcggcagcatcgacgaggccgtgggcaagccccacggcatcgccatcatcgccctgttcgtgcagatcggcaaggagcacgtgggcctgaaggccgtgaccgagatcctgcaggacatccagtacaagggcaagagcaagaccatcccctgcttcaaccccaacaccctgctgcccgaccccctgctgagagactactgggtgtacgagggcagcctgaccatccccccctgcagcgagggcgtgacctggatcctgttcagataccccctgaccatcagccagctgcagatcgaggagttcagaagactgagaacccacgtgaagggcgccgagctggtggagggctgcgacggcatcctgggcgacaacttcagacccacccagcccctgagcgacagagtgatcagagccgccttccagtag

SEQ ID NO: 143150 - protein, 189 aa, Artificial Sequence
  derived and/or modified sequence
MDAVDATMEKLRAQCLSRGASGIQGLARFFRQLDRDGSRSLDADEFRQGLAKLGLVLDQAEAEGVCRKWDRNGSGTLDLEEFLRALRPPMSQAREAVIAAAFAKLDRSGDGVVTVDDLRGVYSGRAHPKVRSGEWTEDEVLRRFLDNFDSSEKDGQVTLAEFQDYYSGVSASMNTDEEFVAMMTSAWQL

SEQ ID NO: 143151 - protein, 322 aa, Artificial Sequence
  derived and/or modified sequence
SQRGKGTCPGSHRNHASSLPSHGLVSIQGISAPAGQWPAPPPWSQEGMQCHRDLALSQALWGWQLSKQSGWAHPSLPHSPLPSTVHSCSWAPPHLQRHLPLATVSPGTTQLTQGPAGRTLGQTQASCPEPRPSMDAVDATMEKLRAQCLSRGASGIQGLARFFRQLDRDGSRSLDADEFRQGLAKLGLVLDQAEAEGVCRKWDRNGSGTLDLEEFLRALRPPMSQAREAVIAAAFAKLDRSGDGVVTVDDLRGVYSGRAHPKVRSGEWTEDEVLRRFLDNFDSSEKDGQVTLAEFQDYYSGVSASMNTDEEFVAMMTSAWQL

SEQ ID NO: 143152 - DNA, 969 bp, Artificial Sequence
  derived and/or modified sequence
tctcaaaggggtaaagggacctgtcccggtagccatcgtaaccacgcctcttccctgccctcccatggcctggtaagtattcagggcattagcgcccctgccggccagtggcccgcccctcctccatggtcccaggagggaatgcagtgccatagggacctggctctgagccaggccttatggggctggcaattgagcaagcagtccgggtgggcgcatccctctttgccacactcgcctttgccatccactgtgcactcttgtagttgggcaccgccacacctgcagcgacatctgcccctggccactgtctctccaggtaccacccagttaacccaggggcccgctgggcgaacgctgggtcagacccaggctagctgcccagagcccagaccttctatggacgccgtggatgccaccatggagaaactgagggctcaatgcctctctcgaggggcaagcgggatccagggcctcgcaagattctttaggcagctcgaccgcgacggttcccggtctcttgacgctgatgagttcaggcaaggactggctaagcttggactggtcctggaccaagcagaggcagagggagtgtgccgcaaatgggatcggaatggaagcggaactcttgatctagaagaattccttcgcgccttacggccacctatgtctcaagctagagaggctgttatcgctgccgctttcgctaagctagacagatccggtgacggggtcgtgacggttgacgatctgcgcggcgtgtattccggtagggctcacccaaaggtgcgctctggggagtggaccgaagacgaagtattgcggagatttctcgataattttgactcaagcgagaaggacggacaggtgacgttagctgagtttcaagactattatagcggcgtatccgcttccatgaataccgatgaggagtttgtagctatgatgacttccgcttggcaattatag

SEQ ID NO: 143153 - DNA, 570 bp, Artificial Sequence
  derived and/or modified sequence
atggacgcagtggacgcaaccatggagaagcttagagctcagtgcctcagccgcggggcatctggtatccaaggcctcgctcggtttttcaggcagctggacagggacggtagccggtccctggatgcggacgaattccgtcaaggccttgccaagttaggtctggtacttgatcaagccgaggctgagggggtgtgccggaaatgggatcgtaatggctctggaaccctggacttggaagaatttctcagagcactgaggccacctatgtcacaggctagggaagcggtcattgccgcagcatttgcaaagctcgatagaagtggtgatggcgtagtgacagtggatgacttacgcggggtgtactctggccgcgcccacccgaaagtgagatctggtgagtggacagaggatgaggttctgaggcgatttttggataatttcgacagcagtgagaaggacggtcaagtaacattggccgagttccaggattactattcaggagtgtctgcaagcatgaacacggacgaggagttcgtggcaatgatgacctccgcatggcagctttag

SEQ ID NO: 143154 - DNA, 969 bp, Artificial Sequence
  derived and/or modified sequence
agccagaggggcaagggcacctgccccggcagccacagaaatcatgccagcagcctgcccagccacggcctggtgtccatccagggcatcagcgccccagctggccagtggccagcccccccaccctggagccaggagggcatgcagtgccaccgggacctggccctgagccaggccctgtggggctggcagctgagcaagcagagcggctgggcccaccccagcctgccccacagccccctgcccagcacagtgcacagctgctcctgggccccaccccacctgcagaggcacctgcccctggccaccgtgtccccaggcaccacccagctgacccagggccctgctggccgcaccctgggccagacccaggccagctgcccagagccccggcccagcatggatgctgtggatgccaccatggagaagctgcgggcccagtgcctgagcagaggagccagcggcatccagggcctggcccgcttcttccggcagctggacagagatggcagccgcagcctggatgctgatgagttccggcagggcctggccaagctgggcctggtgctggaccaggccgaggccgagggcgtgtgcaggaagtgggacagaaatggaagtggcaccctggacctggaggagttcctgcgggccctgcggccccccatgagccaggcccgggaggccgtgattgctgctgcctttgccaagctggacagaagtggagatggagtggtgacagtggatgacctgcggggcgtgtacagcggccgggcccaccccaaggtgcgctctggagagtggacagaagatgaggtgctgcggcgcttcctggacaactttgacagcagcgagaaggatggccaggtgaccctggccgagttccaggactactacagcggcgtgtctgcctccatgaacacagatgaggagtttgtggccatgatgaccagcgcctggcagctgtag

SEQ ID NO: 143155 - DNA, 570 bp, Artificial Sequence
  derived and/or modified sequence
atggatgctgtggatgccaccatggagaagctgcgggcccagtgcctgagcagaggagccagcggcatccagggcctggcccgcttcttccggcagctggacagagatggcagccgcagcctggatgctgatgagttccggcagggcctggccaagctgggcctggtgctggaccaggccgaggccgagggcgtgtgcaggaagtgggacagaaatggcagcggcaccctggacctggaggagttcctgcgggccctgcggccccccatgagccaggcccgggaggccgtgattgctgctgcctttgccaagctggacagaagtggagatggagtggtgacagtggatgacctgcggggcgtgtacagcggccgggcccaccccaaggtgcgcagcggggagtggacagaagatgaggtgctgcggcgcttcctggacaactttgacagcagcgagaaggatggccaggtgaccctggccgagttccaggactactacagcggcgtgtctgcctccatgaacacagatgaggagtttgtggccatgatgaccagcgcctggcagctgtag

SEQ ID NO: 143156 - DNA, 969 bp, Artificial Sequence
  derived and/or modified sequence
agccagcggggcaagggcacctgccccggcagccaccggaaccacgcctcctcattgccttcacatggcttggttagcatccaggggatctccgcccctgccggacagtggccggccccgcctccctggtcccaggaaggaatgcagtgccatcgggacctcgctctcagtcaggccctctgggggtggcaactgtccaagcagtccggatgggcacatccctctctgccacactccccactgcccagcacagtgcactcttgtagctgggcccccccccatctgcagaggcatcttcctctggcaaccgtttctcccggcactacacagctaacccagggacccgctggtaggaccctcggccagacccaggcctcctgtcctgaacctagaccgtccatggatgctgtggatgccacaatggagaaactgagggcccagtgtctgtctcgcggagcgagcggcattcagggattggcccggttcttcaggcagttggatcgcgatgggtcgaggagtctagacgctgatgaatttaggcagggcctggccaagctcgggttggttctggatcaggcggaagccgagggtgtgtgtcggaagtgggaccgcaatggatctggcactctggacttagaagagtttctgcgggctctgaggcctccaatgagccaggcacgtgaggcagtgattgccgctgcatttgcaaagctggacaggtccggggatggagtggtgacagtagacgacctgcggggagtgtactcaggtcgggcacatcccaaggttcgaagtggcgaatggacagaggatgaggtgttgagaagattcttggacaacttcgattctagcgagaaagatggacaggtcaccctggcggagttccaggactattactccggagtgtctgctagcatgaacaccgatgaggaatttgtggctatgatgacatcagcttggcaactgtag

SEQ ID NO: 143157 - DNA, 570 bp, Artificial Sequence
  derived and/or modified sequence
atggacgccgtggacgccaccatggagaagctgcgggcccagtgcctgtccagaggggcctctgggattcagggtctggcaagatttttccgtcagctggatcgagatggctcccggagcttggatgccgacgagttcaggcagggccttgccaagcttggtctggtgctggatcaggccgaggctgaaggggtctgcaggaaatgggatcgtaatggaagcggcacgctcgaccttgaagagttcctacgagccctgcggccacccatgagtcaggccagagaggccgtgattgccgctgccttcgccaagctggaccgatcgggcgatggggtggttacagtggatgacctgcgtggagtatattccggccgagctcatcccaaggtgcgtagtggagaatggaccgaggatgaggtgcttcggagattccttgacaatttcgattctagcgagaaggatggccaagtcactttggctgagtttcaggactactattctggagtaagtgctagcatgaatacagatgaggagtttgttgcaatgatgacctccgcatggcaactatag

SEQ ID NO: 143158 - DNA, 969 bp, Artificial Sequence
  derived and/or modified sequence
tcacagaggggtaaagggacgtgtcccggatcacaccgcaaccatgcttcctctctgcccagccacgggctggtgtcaattcagggcatctcagcaccagcgggacaatggcctgcccctcccccatggtcacaagaagggatgcagtgtcacagggacctagcactgtcacaggctttatgggggtggcagctttcaaagcagtctggatgggctcatccgagcctccctcatagccccctgccatccactgtccattcctgctcctgggcgccaccccacctccagcgacatctgccattagcaactgtctctccaggtactacacaacttacccaggggccagccggtcggacccttggccagacccaggcaagctgccccgagcccagacctagcatggacgccgtggacgccacaatggagaagctgagagctcagtgtctgagcagaggggctagtgggattcagggactggccagattctttcgacaacttgaccgcgatggaagtaggagtcttgatgccgatgagttcagacagggactggccaagctcgggctcgttctcgaccaagccgaggctgagggagtgtgtaggaagtgggatcgaaatggatcaggcactttggacctggaggagtttctgcgggctctgcggcctccgatgtctcaagcacgtgaggcggtcattgcagctgcctttgcaaagctagacaggtccggagatggagtagttaccgttgacgacctcaggggagtgtattcaggaagggcacatcctaaggttcggtctggagaatggacggaagacgaggtgcttcgaagattccttgacaactttgattcgtcagaaaaggacggacaggtaactctggccgaatttcaggactattattcaggggtatcagcatctatgaacacggacgaggagtttgtggcaatgatgacatcagcttggcaactctag

SEQ ID NO: 143159 - DNA, 570 bp, Artificial Sequence
  derived and/or modified sequence
atggatgctgtcgatgccaccatggagaaactccgtgcccaatgcctcagccggggtgcctcaggtattcagggccttgccagattctttcgccagctagatcgggacggctcccgctctcttgacgccgatgaattccgccagggactggcaaaactcggtctggtgctagatcaggctgaggcagagggcgtttgtagaaagtgggaccgaaatggatctggtacgctagacttggaggaattcctacgcgctcttcgccctcccatgtctcaggctagagaggctgttatcgcagctgccttcgccaagctagatcggtctggagatggggtcgtgacggtcgacgacctgagaggcgtatactcgggtagagctcaccctaaggtccggtctggcgaatggacggaggacgaggtgcttcggcgttttctggataattttgatagttctgagaaggacggccaggtgaccctggccgaattccaggactattacagcggggtgtctgcctccatgaacaccgacgaggagttcgtggccatgatgaccagcgcctggcaactctag

SEQ ID NO: 143160 - DNA, 1606 bp, Artificial Sequence
  derived and/or modified sequence
acagtgcattcatgcagctgggccccaccccatctccagaggcaccttccactagcaacagtctccccaggcacaacacagctaacacaaggccccgcaggcaggactctgggacagacgcaggccagctgcccagagcccagaccaagcatggacgccgtggatgccaccatggagaaactccgggcacagtgcctgtcccgcggggcctcgggcatccagggcctggccaggtttttccgccaactagaccgggacgggagcagatccctggacgctgatgagttccggcagggtctggccaaactcgggctggtgctggaccaggcggaggcagagggtgtgtgcaggaagtgggaccgcaatggcagcgggacgctggatctggaggagttccttcgggcgctgcggccccccatgtcccaggcccgggaggctgtcatcgcagctgcatttgccaagctggaccgcagtggggacggcgtcgtgacggtggacgacctccgcggggtgtacagtggccgtgcccaccccaaggtgcgcagtggggagtggaccgaggacgaggtgctgcgccgcttcctggacaacttcgactcctctgagaaggacgggcaggtcacactggcggaattccaggactactacagcggcgtgagtgcctccatgaacacggatgaggagttcgtggccatgatgaccagtgcctggcagctgtgagcagctccggctcagccctgctgccctggcctgtcactccccacccctgccggagacctcccttccctgggccccttctctcctgggcagccacaccacagagcggggaggggcaggtgggggaatggaggctgcaggactggctagaccaggtccctgccggtccaccaggcggaggtgggacaaaggtcctaacaggagtcactggctcaggaccccagggagaaacgctctccccacccacgccatgctgaccagagatcttgcagcccctgtggatgcccccgccgaggtcccccgatccccgcacccggactgctgctccctgcccctcccttgcgggtcccccaggaagccaggtgaccccaggtgggaggctgtgtgtggaggccatcctggaaggaagtttagacctgcccaggtgtggagcgaggggcacaggggcatcctaacctcagaaactgaaataaagcctttgaaaaaaaaatctgtaaaacatcaacccccaatcagaagatggcaaatggggaataaaaatagcaggtaacatgtccagcgggcccagtatctacattctggtgagcggcccgaggctgggagctctgggcgggggcagaccggcggggccttgcagcaggggtgggggtaaagtgcgggtggtggtggagagaacagggctgtggctggaccccagcactggtgacacgctgggtgggagcatgaggccccaggctgctggaggtcctcgcccggggaggtggaggccgttcctggtcaggggcttcctgaggcccctggggcatgcagaggccagggttttagttaaaagtttaatgtagttcccaaatacatttcatatgacaatcttacataaatgttccaaaac

SEQ ID NO: 143161 - DNA, 4081 bp, Artificial Sequence
  derived and/or modified sequence
caagaaattcttactaaacatttacaaatgagatgccaaaacagcacttcagtaatagtggttatattttatagttctctacacagaaaaaaaaatgctgcttgtaacactcatagacatgaaagtatttctctgcctatttaaataattctggattgcagtgagccaccaggattttggcagccagatgtcaccatgatttctcataaaactgatgatgttacatcagtggtggcctgaatcaagatgctgggatgcctgtaacctacagattggtttcagactccaaaggcaacttttttttttttttttttttgagacggagtctggctctgccaccctgccacccaggctgaagtacagtggtgtgatctaggctcactgcaacctctgcctccagggttcaagtgattctcctgccttggcctcctgagtagctgggattacaggcatgcaccaccatgcccagctatttattttttttagtagagatggggtttcaaaatgttggccaggctggtcttgaactcctgacctcaagtgatccgcccacctcagcctcccaaagtgctgggattacagctgtgagccaccgcgcccagccctggcctctttttttaagttatttatttatttttgagacagagtctcactctgtcgcccaggctgtggtgcagtggcatggtcttggttcactgcaacctctgcctcctgggttcaagtgattctcctgcctcagcctctggagtaggtgggattacaggcacccgccaccatacctggctaattttctttttttttttttgagacaaagtcttgctcttgtcccccagtctggagtgcaatggcacgatctcggctcactgcaacctccgcttcccaggttcatgcaattctcctgcctcagcctcccgagtagctgggattacaggcacataccaccacgcccagctagtttttcgtattttaagtagagacagggtttcaccatgttggccaggctggtctcaaactcctgacctcaggtgatctgtctgcctcggcctcccaaagtgctgtgattacaggcatgagccaccgcacccggctgactaatttttgtatttatagtagagacagggtttcaccatgttggccaggctggtctcgaactgctgacctcatgatctgcccgcctcggcctcccaaagtgctgggattacaggcgtgagccaccgtgcccggccagtttatttacttatttttaagaggcgggcgtcttgctctgtaacccaggctggagtgcagtggtgcgatcatagctcactgcagcctccaactcccgggctcaagtgatcctcctgcctcagccttccaagtaggtgggattacaggaacacaccaccatgcctggctaattttttgtagtttttgtagagatgggggggtctcactatgttgcacaggcgggtctcaaactcctgggctcaagtgatcttcctgccctggcttcccaaagtgttgggattacaggcatgagccaccgcgctcaggcaaggcaacttctgacaatataattgtgctgtgagcgaggtaaagccaggcttggagaaggctccgattgatgatccttgggtcggggcgaacagtgggtcctcaaacagggcccacgtttcaagtcctggaaaacccacctatcttagcgggcaggtatatccgatgtctccgttgaaggccttcagtgaggtggcttcgtctcttgaggtttatgtccaggatcagggctgctcttccactcggggtcacaacctctggctcaccaccttgtcaggagccagcccactaagtcacgtttcaggcctgaaaaccaacaacaaaagatccgtaaagacagaaatcctgggactggctcctaacaacggccagtgacaagctttgtggcagtgagcagaggtgtccctcaggctcagctcagtctctgtgggttgcaggacctgcccttggaggtgggcctgggtgggaggtcttagggccccaggacctgggccacctggggctttttttttttttttctttttgagatggagtcttgctctgtcgcccagactggagtgcagtggtgcaatcttggctcactgcaagctccacctcctgggttcaagcgattctcctgcctcagcttcctaagtagctcggattacaggcgcccaccatcatgcacggctaatttttgtatttttagtagaggcggggtttcaccatgttggtcaggctggtctcaaactcctcaccttgtgatctgcccacctcggcctcccaaagtgctgggattacaggcatgagccaccgcgcccagcccacctggggcatttttgttgctgtacaatagaaacaagttctctatatgttccccaggctggtccaaactcctgggctcaagtgatcctcccacctagacctcccaaagtgctgggatttcaggcatgagccgcagtggccggtcagaacctggggcccttttgaactttgattcctcagcaattttgtcagccctggctcgggctgagaagcccctgtgaagccagagagggaaagggacctgtccagggtcacacaggaatcatgcgtcaagcctccccagccacggacttgtctccatccagggcatttcagcccctgcagggcagtggcctgcccctcctccttggagccaggaagggatgcagtgccacagggatctggctctgtcccaggccctgtggggctggcagttgagtaagcagtcaggctgggcgcacccatccctcccccactccccactgcccagcacagtgcattcatgcagctgggccccaccccatctccagaggcaccttccactagcaacagtctccccaggcacaacacagctaacacaaggccccgcaggcaggactctgggacagacgcaggccagctgcccagagcccagaccaagcatggacgccgtggatgccaccatggagaaactccgggcacagtgcctgtcccgcggggcctcgggcatccagggcctggccaggtttttccgccaactagaccgggacgggagcagatccctggacgctgatgagttccggcagggtctggccaaactcgggctggtgctggaccaggcggaggcagagggtgtgtgcaggaagtgggaccgcaatggcagcgggacgctggatctggaggagttccttcgggcgctgcggccccccatgtcccaggcccgggaggctgtcatcgcagctgcatttgccaagctggaccgcagtggggacggcgtcgtgacggtggacgacctccgcggggtgtacagtggccgtgcccaccccaaggtgcgcagtggggagtggaccgaggacgaggtgctgcgccgcttcctggacaacttcgactcctctgagaaggacgggcaggtcacactggcggaattccaggactactacagcggcgtgagtgcctccatgaacacggatgaggagttcgtggccatgatgaccagtgcctggcagctgtgagcagctccggctcagccctgctgccctggcctgtcactccccacccctgccggagacctcccttccctgggccccttctctcctgggcagccacaccacagagcggggaggggcaggtgggggaatggaggctgcaggactggctagaccaggtccctgccggtccaccaggcggaggtgggacaaaggtcctaacaggagtcactggctcaggaccccagggagaaacgctctccccacccacgccatgctgaccagagatcttgcagcccctgtggatgcccccgccgaggtcccccgatccccgcacccggactgctgctccctgcccctcccttgcgggtcccccaggaagccaggtgaccccaggtgggaggctgtgtgtggaggccatcctggaaggaagtttagacctgcccaggtgtggagcgaggggcacaggggcatcctaacctcagaaactgaaataaagcctttgaaaaaaaaatctgtaaaacatcaacccccaatcagaagatggcaaatggggaataaaaatagcaggtaacatgtcc

SEQ ID NO: 143162 - DNA, 969 bp, Artificial Sequence
  derived and/or modified sequence
agccagagaggcaagggcacctgccccggcagccacagaaaccacgccagcagcctgcccagccacggcctggtgagcatccagggcatcagcgcccccgccggccagtggcccgccccccccccctggagccaggagggcatgcagtgccacagagacctggccctgagccaggccctgtggggctggcagctgagcaagcagagcggctgggcccaccccagcctgccccacagccccctgcccagcaccgtgcacagctgcagctgggcccccccccacctgcagagacacctgcccctggccaccgtgagccccggcaccacccagctgacccagggccccgccggcagaaccctgggccagacccaggccagctgccccgagcccagacccagcatggacgccgtggacgccaccatggagaagctgagagcccagtgcctgagcagaggcgccagcggcatccagggcctggccagattcttcagacagctggacagagacggcagcagaagcctggacgccgacgagttcagacagggcctggccaagctgggcctggtgctggaccaggccgaggccgagggcgtgtgcagaaagtgggacagaaacggcagcggcaccctggacctggaggagttcctgagagccctgagaccccccatgagccaggccagagaggccgtgatcgccgccgccttcgccaagctggacagaagcggcgacggcgtggtgaccgtggacgacctgagaggcgtgtacagcggcagagcccaccccaaggtgagaagcggcgagtggaccgaggacgaggtgctgagaagattcctggacaacttcgacagcagcgagaaggacggccaggtgaccctggccgagttccaggactactacagcggcgtgagcgccagcatgaacaccgacgaggagttcgtggccatgatgaccagcgcctggcagctgtag

SEQ ID NO: 143163 - DNA, 570 bp, Artificial Sequence
  derived and/or modified sequence
atggacgccgtggacgccaccatggagaagctgagagcccagtgcctgagcagaggcgccagcggcatccagggcctggccagattcttcagacagctggacagagacggcagcagaagcctggacgccgacgagttcagacagggcctggccaagctgggcctggtgctggaccaggccgaggccgagggcgtgtgcagaaagtgggacagaaacggcagcggcaccctggacctggaggagttcctgagagccctgagaccccccatgagccaggccagagaggccgtgatcgccgccgccttcgccaagctggacagaagcggcgacggcgtggtgaccgtggacgacctgagaggcgtgtacagcggcagagcccaccccaaggtgagaagcggcgagtggaccgaggacgaggtgctgagaagattcctggacaacttcgacagcagcgagaaggacggccaggtgaccctggccgagttccaggactactacagcggcgtgagcgccagcatgaacaccgacgaggagttcgtggccatgatgaccagcgcctggcagctgtag

SEQ ID NO: 143164 - protein, 829 aa, Artificial Sequence
  derived and/or modified sequence
MVPAWLWLLCVSVPQALPKAQPAELSVEVPENYGGNFPLYLTKLPLPREGAEGQIVLSGDSGKATEGPFAMDPDSGFLLVTRALDREEQAEYQLQVTLEMQDGHVLWGPQPVLVHVKDENDQVPHFSQAIYRARLSRGTRPGIPFLFLEASDRDEPGTANSDLRFHILSQAPAQPSPDMFQLEPRLGALALSPKGSTSLDHALERTYQLLVQVKDMGDQASGHQATATVEVSIIESTWVSLEPIHLAENLKVLYPHHMAQVHWSGGDVHYHLESHPPGPFEVNAEGNLYVTRELDREAQAEYLLQVRAQNSHGEDYAAPLELHVLVMDENDNVPICPPRDPTVSIPELSPPGTEVTRLSAEDADAPGSPNSHVVYQLLSPEPEDGVEGRAFQVDPTSGSVTLGVLPLRAGQNILLLVLAMDLAGAEGGFSSTCEVEVAVTDINDHAPEFITSQIGPISLPEDVEPGTLVAMLTAIDADLEPAFRLMDFAIERGDTEGTFGLDWEPDSGHVRLRLCKNLSYEAAPSHEVVVVVQSVAKLVGPGPGPGATATVTVLVERVMPPPKLDQESYEASVPISAPAGSFLLTIQPSDPISRTLRFSLVNDSEGWLCIEKFSGEVHTAQSLQGAQPGDTYTVLVEAQDTDEPRLSASAPLVIHFLKAPPAPALTLAPVPSQYLCTPRQDHGLIVSGPSKDPDLASGHGPYSFTLGPNPTVQRDWRLQTLNGSHAYLTLALHWVEPREHIIPVVVSHNAQMWQLLVRVIVCRCNVEGQCMRKVGRMKGMPTKLSAVGILVGTLVAIGIFLILIFTHWTMSRKKDPDQPADSVPLKATV

SEQ ID NO: 143165 - protein, 793 aa, Artificial Sequence
  derived and/or modified sequence
MVPAWLWLLCVSVPQALPKAQPAELSVEVPENYGGNFPLYLTKLPLPREGAEGQIVLSGEQAEMQDGHVLWGPQPVLVHVKDENDQVPHFSQAIYRARLSRGTRPGIPFLFLEASDRDEPGTANSDLRFHILSQAPAQPSPDMFQLEPRLGALALSPKGSTSLDHALERTYQLLVQVKDMGDQASGHQATATVEVSIIESTWVSLEPIHLAENLKVLYPHHMAQVHWSGGDVHYHLESHPPGPFEVNAEGNLYVTRELDREAQAEYLLQVRAQNSHGEDYAAPLELHVLVMDENDNVPICPPRDPTVSIPELSPPGTEVTRLSAEDADAPGSPNSHVVYQLLSPEPEDGVEGRAFQVDPTSGSVTLGVLPLRAGQNILLLVLAMDLAGAEGGFSSTCEVEVAVTDINDHAPEFITSQIGPISLPEDVEPGTLVAMLTAIDADLEPAFRLMDFAIERGDTEGTFGLDWEPDSGHVRLRLCKNLSYEAAPSHEVVVVVQSVAKLVGPGPGPGATATVTVLVERVMPPPKLDQESYEASVPISAPAGSFLLTIQPSDPISRTLRFSLVNDSEGWLCIEKFSGEVHTAQSLQGAQPGDTYTVLVEAQDTDEPRLSASAPLVIHFLKAPPAPALTLAPVPSQYLCTPRQDHGLIVSGPSKDPDLASGHGPYSFTLGPNPTVQRDWRLQTLNGSHAYLTLALHWVEPREHIIPVVVSHNAQMWQLLVRVIVCRCNVEGQCMRKVGRMKGMPTKLSAVGILVGTLVAIGIFLILIFTHWTMSRKKDPDQPADSVPLKATV

SEQ ID NO: 143166 - DNA, 2490 bp, Artificial Sequence
  derived and/or modified sequence
atggttccggcatggctttggctgttgtgtgtttctgtgcctcaggctctgcccaaggcccaaccagccgagctcagcgtggaggtgccagagaattacggcgggaactttccactctacttgacaaagttgccgttgccgagggagggggccgaaggacagattgtgctcagtggagatagcggaaaggcaaccgaaggccctttcgctatggatcccgattctggatttctgctcgtgacccgcgcacttgaccgtgaagagcaggctgaataccagctgcaggtgaccctggagatgcaagacgggcacgtgctgtgggggccacaacctgttctggtgcacgttaaggacgaaaacgaccaggttccccacttctcgcaagctatctatcgcgctcgcctctccagaggcacccggccaggtataccgtttctctttcttgaagccagcgacagggacgaaccaggcacagctaactcggacctcaggtttcatattctctcacaagctcctgcccagccttcccccgatatgttccagctagaaccacgcctgggcgctcttgctctctcccccaaaggatctaccagcctcgatcatgctttggaaaggacataccaactccttgtgcaagtcaaagacatgggggaccaagcctcaggacaccaggcgactgctactgtcgaggtgagcatcatcgagtccacatgggtcagcttagaacccatccatctggctgaaaatctaaaagtcctgtatccacatcatatggctcaggtccattggtccggcggagatgttcattatcacctggagagccacccccctggacccttcgaagtcaatgccgaggggaacctgtacgtgactagggaacttgacagggaagcccaggctgagtacctgttacaagtgcgcgcgcagaattcccacggcgaggattatgccgcgcccctcgagttacacgttctcgtaatggacgagaacgacaacgtgcctatctgcccacctcgtgaccccactgtcagtattcctgagctgtcgccgccgggtaccgaagttacacgactctcagctgaggacgccgatgccccgggcagccctaacagccatgtggtgtatcaactgctgtcccctgagccagaggacggggtggaggggcgggcctttcaagtagacccaacctccggctcggtgactctcggtgttctccctcttcgggccggtcaaaacatactgctgctggttctcgccatggatctggccggcgccgaaggcggattctcctccacttgcgaagttgaagtggcggtgactgacattaacgatcatgctccagaattcattacctctcagattgggcctatcagcctgcccgaggacgtagagccaggtacccttgtcgctatgctgacagccatcgatgcggaccttgagccagccttccgtctgatggactttgcaatcgaaaggggggacacagagggaacatttggactcgactgggagcccgactccggacacgtccgactgcgtctgtgcaaaaatttgtcttacgaggctgcaccgagccacgaagttgtggtggtggtacagagtgtggcaaagctggtgggtccaggccccggcccaggtgctaccgctaccgtcacagtcttggttgaaagggttatgcctcctcctaaactggatcaggagtcctatgaagcatcagtacccattagcgctcccgccggaagtttcttgttaaccattcaaccaagtgatccaataagccgcacgttaagattttcccttgttaatgacagtgagggatggctgtgtatcgaaaaattttccggcgaagtgcacacagcccaaagcctccagggggctcagcctggggacacatatactgtgcttgttgaagcgcaggacaccgacgagccacggctgagcgcaagtgctccgctagttatacactttttgaaggcacccccggcaccagctctaactctggcaccggtaccctctcagtatctctgcacaccccggcaggaccacggtctgattgtctccggcccaagtaaggaccctgaccttgcatcgggtcatggcccatatagtttcaccctgggtcctaaccccactgtccagcgcgattggaggttgcagacattgaacggctcgcacgcatacctgactctggctttacactgggtagagccaagggaacatatcatcccagtggtggtgtcacataacgctcagatgtggcagttgttagttagggttattgtctgccgttgcaatgtagaaggccagtgcatgcggaaggtggggcggatgaaggggatgcccaccaagctgagtgccgtcggaatcctcgtgggtacactggttgcaattggcatcttcctgattctcatcttcactcattggactatgtctaggaaaaaggatccggatcagccggcagattcagtccccctcaaagccaccgtgtag

SEQ ID NO: 143167 - DNA, 2382 bp, Artificial Sequence
  derived and/or modified sequence
atggtacccgcctggctatggttattatgcgtgagtgtaccacaggccctgccaaaggcacagccagccgagctttccgtggaggtgcctgagaattatggtgggaattttccactgtaccttaccaaactcccactgccgagggagggcgccgagggacagattgtactttccggcgagcaagcagagatgcaagatgggcacgttctatggggcccccagcccgtattggtgcacgtgaaggacgaaaacgatcaagtgcctcatttcagtcaagcaatttaccgggcgagactgagtcgggggacccgccctgggatcccattcctctttctggaggccagtgacagggatgagcctggcacagccaacagtgacctgcgcttccacattttgagccaagcgccggcccagccctctcccgatatgttccaactcgagccccgtctcggggcactagctttatcgcccaagggaagcacaagtctggaccatgccctggagaggacttatcagcttcttgtacaggtgaaggatatgggcgaccaggcatcaggacaccaggcaacagccaccgtggaggtttcaatcatcgagtccacctgggtcagtttggaacctatccatttggccgaaaatctgaaagtgctgtacccccaccatatggctcaggtgcactggagcgggggcgacgttcattaccatctggagtctcacccccccgggccgtttgaggtaaatgccgagggtaacttgtacgtgacacgcgaactggatcgcgaggcccaggcagagtaccttctgcaggtgagagcccagaactctcacggggaggattatgccgcccctcttgagctgcatgttctcgtcatggatgaaaacgataatgtaccaatttgtccacctcgggaccctactgtgtccataccagagctctcacccccaggcaccgaggtaacccggctttccgctgaagatgccgacgcccccggcagccctaactcccacgtcgtgtaccaactactgagccccgagccagaggacggtgtcgagggcagagcatttcaggtagaccctactagcgggagcgtgaccctcggagtgctccccctccgcgctggtcagaatatactgttgctagttctcgcgatggacctggccggcgcggaaggcggctttagctctacttgtgaggtcgaggtcgccgtgactgatataaatgaccatgcccctgagtttatcacatctcaaattggacctataagtttacccgaggacgtggagccaggaaccttggtagctatgctaaccgcaatcgacgccgacctggagccggccttccggcttatggatttcgcaatagagcgcggagatactgaggggactttcggacttgactgggagcctgactccggccatgtgaggctgcgtttatgcaagaatttgagctacgaggccgcaccgtcacacgaggttgtcgttgtggtgcagagcgtcgccaaactcgttgggcctggaccgggtccgggcgcaactgctacggtgactgttttggttgagagggtgatgcccccccctaaactcgatcaggagtcatacgaggccagcgttcccatctccgcccccgcaggatcttttttattgaccattcagccctccgatcctatctctaggactcttcgatttagcctggtgaacgactcagagggatggctctgtattgaaaagttcagcggagaagttcatacagctcagtctcttcaaggggcgcaacccggggatacttatactgtgcttgtggaggctcaagatacagacgaaccaagacttagcgcctccgctcctctcgtgatccattttctgaaagctcccccggctccagcgttgacgttggcacctgtgccctcccaatacctctgtactccccggcaggatcatggcttaattgtgtctggaccctctaaagatcccgatctcgcttctggccacggaccctatagcttcactcttgggcccaatcccacagtccaaagggactggcgcttacagactctcaatggatcacatgcatatctgacactggcacttcattgggttgagcccagggagcatataatccctgtcgtagtgagccataatgcacagatgtggcagctgttggttcgggtgatcgtgtgccgctgtaatgtggaggggcagtgtatgagaaaggtgggccgcatgaaaggcatgcccaccaaattatcggctgtggggatcctagtggggacccttgttgccataggcatcttcctcatcttgattttcacccactggacaatgtcacgcaaaaaagaccccgaccagcccgccgattccgttccccttaaggctacggtctag

SEQ ID NO: 143168 - DNA, 2490 bp, Artificial Sequence
  derived and/or modified sequence
atggtgcctgcctggctgtggctgctgtgtgtgtctgtgccccaggccctgcccaaggcccagcctgctgagctgtctgtggaggtgcctgaaaattatggaggcaacttccccctgtacctgaccaagctgcccctgccccgggagggcgctgagggccagatcgtgctgagcggggacagcggcaaggccacagagggcccctttgccatggaccctgattctggcttcctgctggtgacccgggccctggaccgggaggagcaggccgagtaccagctgcaggtgaccctggagatgcaggacggccacgtgctgtggggcccccagcctgtgctggtgcacgtgaaggatgaaaatgaccaggtgccccacttcagccaggccatctaccgggcccggctgagccggggcaccaggcctggcatccccttcctgttcctggaggccagtgacagagatgagcccggcacagccaacagcgacctgcgcttccacatcctgagccaggccccagcccagcccagcccagacatgttccagctggagccccggctgggcgccctggccctgagccccaagggcagcaccagcctggaccacgccctggagaggacctaccagctgctggtgcaggtgaaggacatgggagaccaggccagcggccaccaggccacagccaccgtggaggtgtccatcatcgagagcacctgggtgtccctggagcccatccacctggccgagaacctgaaggtgctgtacccccaccacatggcccaggtgcactggagcggaggagatgtgcactaccacctggagagccaccccccaggcccctttgaggtgaatgctgagggcaacctgtatgtgacccgggagctggaccgggaggcccaggccgagtacctgctgcaggtgcgggcccagaacagccacggggaggactatgctgcccccctggagctgcacgtgctggtgatggatgaaaatgacaacgtgcccatctgccccccccgggaccccaccgtgtccatccctgagctgagccccccaggcacagaggtgacccggctgtctgcagaagatgctgatgcccctggcagccccaacagccacgtggtgtaccagctgctgagccctgagccagaagatggagtggagggccgggccttccaggtggaccccaccagcggctctgtgaccctgggcgtgctgcccctgcgggccggccagaacatcctgctgctggtgctggccatggacctggccggggctgagggcggcttcagcagcacctgtgaggtggaggtggccgtgacagacatcaatgaccacgcccctgagttcatcaccagccagatcggccccatcagcctgcctgaagatgtggagcccggcaccctggtggccatgctgacagccattgatgctgacctggagcccgccttccggctgatggactttgccatcgagcggggggacacagagggcaccttcggcctggactgggagccagattctggccacgtgcggctgcggctgtgcaagaacctgtcctatgaggccgcccccagccatgaggtggtggtggtggtgcagagcgtggccaagctggtgggccctggccctggccctggggccacagccaccgtgacagtgctggtggagcgggtgatgcccccacccaagctggaccaggagagctatgaggcctctgtgcccatcagcgccccagctggcagcttcctgctgaccatccagcccagcgaccccatcagcaggaccctgcgcttcagcctggtgaatgacagcgagggctggctgtgcatcgagaagttcagcggggaggtgcacacagcccagagcctgcagggcgcccagcccggggacacctacacagtgctggtggaggcccaggacacagatgagccccggctgagcgccagcgcccccctggtgatccacttcctgaaggcccccccagccccagccctgaccctggcccctgtgcccagccagtacctgtgcaccccccggcaggaccacggcctgattgtgtctggccccagcaaggaccctgacctggccagcggccacggcccctacagcttcaccctgggccccaaccccaccgtgcagagggactggaggctgcagaccctgaatggcagccacgcctacctgaccctggccctgcactgggtggagccccgggagcacatcatccctgtggtggtgagccacaatgcccagatgtggcagctgctggtgcgggtcatcgtgtgccgctgcaatgtggagggccagtgcatgaggaaggtgggccgcatgaagggcatgcccaccaagctgtctgctgtgggcatcctggtgggcaccctggtggccatcggcatcttcctgatcctgatcttcacccactggaccatgagcaggaagaaggaccctgaccagcctgctgacagcgtgcccctgaaggccaccgtgtag

SEQ ID NO: 143169 - DNA, 2382 bp, Artificial Sequence
  derived and/or modified sequence
atggtgcctgcctggctgtggctgctgtgtgtgtctgtgccccaggccctgcccaaggcccagcctgctgagctgtctgtggaggtgcctgaaaattatggaggcaacttccccctgtacctgaccaagctgcccctgccccgggagggcgctgagggccagatcgtgctgagcggggagcaggccgagatgcaggacggccacgtgctgtggggcccccagcctgtgctggtgcacgtgaaggatgaaaatgaccaggtgccccacttcagccaggccatctaccgggcccggctgagccggggcaccaggcctggcatccccttcctgttcctggaggccagtgacagagatgagcccggcacagccaacagcgacctgcgcttccacatcctgagccaggccccagcccagcccagcccagacatgttccagctggagccccggctgggcgccctggccctgagccccaagggcagcaccagcctggaccacgccctggagaggacctaccagctgctggtgcaggtgaaggacatgggagaccaggccagcggccaccaggccacagccaccgtggaggtgtccatcatcgagagcacctgggtgtccctggagcccatccacctggccgagaacctgaaggtgctgtacccccaccacatggcccaggtgcactggagcggaggagatgtgcactaccacctggagagccaccccccaggcccctttgaggtgaatgctgagggcaacctgtatgtgacccgggagctggaccgggaggcccaggccgagtacctgctgcaggtgcgggcccagaacagccacggggaggactatgctgcccccctggagctgcacgtgctggtgatggatgaaaatgacaacgtgcccatctgccccccccgggaccccaccgtgtccatccctgagctgagccccccaggcacagaggtgacccggctgtctgcagaagatgctgatgcccctggcagccccaacagccacgtggtgtaccagctgctgagccctgagccagaagatggagtggagggccgggccttccaggtggaccccaccagcggctctgtgaccctgggcgtgctgcccctgcgggccggccagaacatcctgctgctggtgctggccatggacctggccggggctgagggcggcttcagcagcacctgtgaggtggaggtggccgtgacagacatcaatgaccacgcccctgagttcatcaccagccagatcggccccatcagcctgcctgaagatgtggagcccggcaccctggtggccatgctgacagccattgatgctgacctggagcccgccttccggctgatggactttgccatcgagcggggggacacagagggcaccttcggcctggactgggagccagattctggccacgtgcggctgcggctgtgcaagaacctgtcctatgaggccgcccccagccatgaggtggtggtggtggtgcagagcgtggccaagctggtgggccctggccctggccctggggccacagccaccgtgacagtgctggtggagcgggtgatgcccccacccaagctggaccaggagagctatgaggcctctgtgcccatcagcgccccagctggcagcttcctgctgaccatccagcccagcgaccccatcagcaggaccctgcgcttcagcctggtgaatgacagcgagggctggctgtgcatcgagaagttcagcggggaggtgcacacagcccagagcctgcagggcgcccagcccggggacacctacacagtgctggtggaggcccaggacacagatgagccccggctgagcgccagcgcccccctggtgatccacttcctgaaggcccccccagccccagccctgaccctggcccctgtgcccagccagtacctgtgcaccccccggcaggaccacggcctgattgtgtctggccccagcaaggaccctgacctggccagcggccacggcccctacagcttcaccctgggccccaaccccaccgtgcagagggactggaggctgcagaccctgaatggcagccacgcctacctgaccctggccctgcactgggtggagccccgggagcacatcatccctgtggtggtgagccacaatgcccagatgtggcagctgctggtgcgggtcatcgtgtgccgctgcaatgtggagggccagtgcatgaggaaggtgggccgcatgaagggcatgcccaccaagctgtctgctgtgggcatcctggtgggcaccctggtggccatcggcatcttcctgatcctgatcttcacccactggaccatgagcaggaagaaggaccctgaccagcctgctgacagcgtgcccctgaaggccaccgtgtag

SEQ ID NO: 143170 - DNA, 2490 bp, Artificial Sequence
  derived and/or modified sequence
atggtgcccgcctggctgtggctgctgtgcgtgagcgtgccccaggcgctaccgaaggcccagccggcagaactatctgtagaggttccggagaattatggtggcaattttccactttatctcacaaagctaccattaccacgagagggtgctgaaggtcagattgtactatcaggcgatagcggaaaagccaccgaggggccctttgccatggatccggacagtggctttctgttggtcacccgggccctagaccgtgaggagcaagctgagtaccagcttcaggttacactcgagatgcaggacggtcatgtcctgtgggggccacagcccgttctggtacatgtgaaggacgaaaacgaccaagtccctcacttcagccaggccatctaccgcgctaggctaagtcgtggtacaagaccgggcatcccattcttatttctcgaggcatctgatcgcgacgagccaggcacagcgaatagcgatctgagatttcatattctgtcgcaggctcccgcccagccctctcccgatatgtttcagctagaacccaggttaggcgctttggcattatcccccaaagggagcacctccctggatcacgccctcgagaggacctatcagcttctggtacaagtaaaagatatgggagatcaagcctctgggcatcaggccacagccacagtggaggtgtctatcatagagtccacttgggtgtcactggaaccgatccatctggccgaaaatctgaaggtgctgtacccccaccacatggcacaagttcattggtcagggggggatgtacattaccatctcgagagccatcctccaggtccttttgaagtgaacgctgaaggcaacctgtatgtgacgagggagttggacagagaagcgcaggctgaatatctgttgcaggtccgggctcaaaatagccatggagaagactacgcagcacccctggaactgcacgtccttgtgatggatgaaaatgataatgtacctatctgccctccccgtgaccccactgtcagcattcctgagctctcccccccaggaacggaggtcacacggctctcggccgaggacgccgacgcacccggctctcctaactcccatgtggtctaccaactactttcgcctgagccagaggatggtgtggagggacgcgcattccaggtggatccaacaagtgggagcgtaactctgggagtgcttccactgcgggcaggccaaaacatactgctgctggtgctggcaatggacctggccggtgcggagggaggtttttctagcacttgcgaagtagaagtcgctgtgaccgatatcaatgaccatgctcccgaatttatcacaagccagatcggtccgattagtttgcccgaggatgtggaacctgggaccctggtagccatgcttaccgccattgacgccgatttggagcctgccttccggctgatggacttcgcgatcgaacggggagataccgaaggcacctttggtctagactgggagcctgactcaggtcacgtgcgcctccgcttatgcaagaacttgagttacgaggccgcaccttcccatgaggttgtggttgttgttcagagcgttgccaaactcgttggacccgggccgggccctggggctaccgccacagttaccgtgctcgtcgagcgggttatgccacccccgaagctagaccaggaatcgtacgaggcaagtgtgccaataagtgcaccggctggttcttttctgctgactatccaaccttcagacccgatctcacgtaccctccgcttctcactggttaacgatagcgaaggctggctgtgtatcgaaaagttctcaggtgaggtgcatactgcgcaatccttgcagggggcccagccaggggatacatacaccgtgctcgtcgaggctcaggacaccgatgaaccaaggctgagcgcgtccgctcctttggtgatccatttcctcaaagccccaccagctccagccctaaccttggcccccgtgccttcccagtatctgtgcaccccgaggcaggatcatggcctgattgtgtcaggacctagcaaggatcctgacttggccagcggacacgggccttacagcttcaccctgggccccaatcccaccgtgcagagggactggaggctccagactctgaacggcagtcacgcttacctgacccttgcccttcattgggtggaaccaagggaacacatcattccagtggtcgtttcccataatgcccaaatgtggcagctgttggtgagggttatcgtctgtagatgtaatgtggaaggacagtgcatgagaaaggtgggccgtatgaaaggcatgccaacaaagttaagcgcggttggaattctggttgggactctcgtggccatcggcatctttttgatccttatttttactcattggaccatgagccgaaaaaaagatcccgatcagcccgcagatagcgttcctcttaaagccaccgtgtag

SEQ ID NO: 143171 - DNA, 2382 bp, Artificial Sequence
  derived and/or modified sequence
atggtgcccgcctggctgtggctgctgtgcgtgagcgtgccccaggcactgcccaaggctcagccagcggaactgtccgtggaggtgcctgaaaattacggcgggaattttcccctgtacctcactaagttaccactgcctagagagggtgctgagggccagattgtcctgtcaggcgagcaggccgaaatgcaggacggacacgtgctctggggaccacagccagtgctggtacacgtcaaggacgagaatgaccaagtcccgcacttcagccaggcaatctatagagccagactgtcccggggcacgcgtcctggtatccccttcttgttcttagaagcctctgacagggacgaaccaggcacagcaaactcagatcttcggtttcatatcttgtcccaggccccagcacagccctccccggatatgtttcagctggagcctcgactcggcgctctggccctttccccgaaaggaagcacctccctggaccatgcccttgagcggacatatcagcttcttgtgcaagtgaaggacatgggggatcaggctagtggacatcaggccaccgcgactgtggaagtctcgattattgaaagtacctgggtttctcttgagcctatccacttagctgaaaacctcaaggttctatatccacatcatatggcacaggtccattggtctgggggtgacgtacattaccatctggaaagccacccccctgggccatttgaagtaaacgcggagggcaatctatatgtgaccagagaactggatcgggaagcccaagcagaatacttgcttcaggtgcgcgcccagaattctcacggcgaagattacgctgctcctttggagttgcacgtccttgtaatggacgaaaatgacaacgtcccgatctgccccccgcgggaccccacagtctccatccccgagctttccccccccggaactgaggttactaggttatccgccgaggatgccgatgcgccgggctcaccaaatagccatgttgtctaccagctcttgagccccgagcccgaagacggagtagaggggagagccttccaagtggaccctacgagcggttcggtgactctgggagttctgcccctacgagcaggccaaaatattctgttgctggtgctcgccatggatcttgccggggccgagggcggcttttcaagcacgtgcgaagtagaagtcgccgtgactgacatcaacgatcatgctcccgaattcatcacatcccagatagggccaatcagcctgcccgaggacgtggagcctgggaccttagtggcaatgttaacggccatcgatgcagatctcgaacctgcttttcgcttaatggactttgccatcgaaaggggtgatacagagggaactttcggcctggactgggaacctgattcaggccacgtccgcctgcgcctgtgcaaaaaccttagctacgaggcagctccaagtcatgaggtggtggtagtggtgcagtcggtggccaagcttgtgggacccggacctggtccaggcgccacggccactgtcacggtgttggtcgagcgcgttatgccccctccgaaactcgaccaggaaagttatgaggcaagcgtccctatttccgccccagccggctcgttcctgctgaccattcaaccttcggaccctatctccagaactctgcgattcagccttgtcaatgattctgaggggtggctgtgcatcgaaaagttcagcggagaggtacatacggctcagtctctgcagggtgcacaacccggggacacctatacagtgttggtggaagctcaagacactgatgagccaaggctcagcgcatctgccccccttgtgattcactttctaaaggcaccacccgctcctgctctcactcttgcaccagtcccaagccaatatctctgcactcctcgccaggatcacggattaatcgtgtcagggccaagcaaggatcccgatctcgcgtccggacacgggccgtactcgtttaccctgggtcctaatccaacagttcagcgggactggaggctgcagactctgaacggcagccacgcgtacctaactctcgccctccattgggtggaacctagagagcatatcattccagtggttgtgagccataacgcccagatgtggcagctactggtgagggtgatcgtttgccgatgtaatgtggagggacagtgtatgcggaaggtcggaagaatgaagggcatgccaacaaagcttagtgccgtggggatcttagtcgggactttggtggcaattgggatctttttgatccttatcttcacacactggaccatgagcaggaagaaagaccccgaccaaccagccgactccgtgccgctgaaggcgacggtatag

SEQ ID NO: 143172 - DNA, 2490 bp, Artificial Sequence
  derived and/or modified sequence
atggttcctgcttggttatggcttttgtgcgtctctgtcccccaggccttgccaaaggcccaacctgctgagctgagtgtggaagtccctgagaactacggcggaaactttcccctgtacttgaccaaactccccctcccgagggagggagcagagggtcagatcgtgttgtcgggagattccggtaaggcaaccgaggggcctttcgcaatggatcctgactccgggttcctgctggtaaccagggccctcgatcgggaggagcaggcagagtatcagcttcaggtgactctcgaaatgcaggatggtcacgtactgtgggggccacagcccgtgctcgtgcatgtgaaggatgagaacgatcaagtgcctcacttttctcaagcaatctatagagcacgcctgtctagagggacccgaccaggaatcccgtttttgttcctcgaggcatcggacagggacgagcctggaactgcgaacagcgatctccgcttccacatcctcagtcaggccccagctcaaccctcaccagatatgttccagttggagcccaggctgggtgcactggccctgtcccctaaaggatctacatcgttagaccacgcacttgagcgcacttaccagctcctagtgcaggttaaggatatgggagatcaggccagcgggcaccaggccaccgcaacggtcgaggtcagcatcatcgaatccacatgggtgtcgttggagccgatccatctggccgaaaatcttaaagttttgtaccctcaccatatggcccaagtacactggtcagggggagatgtgcattatcatctggaatcacacccacccggaccctttgaggtgaacgcggagggaaatctctacgtgacaagagaactcgaccgcgaggctcaggccgaatacctacttcaggtgcgcgctcagaactcgcacggagaagactacgcagcacccctggagctgcatgtgctggtgatggatgagaacgataatgtgcccatctgcccacctagggaccccaccgtgtctattcctgaattgtcacccccagggaccgaggtgaccaggctaagcgccgaggacgctgatgccccaggctcacccaacagccacgtggtataccaactcctgtctcctgaacccgaagacggcgtggaggggagagcctttcaggtggacccgacatctggcagcgtgacactgggcgttcttcctctcagagccggacaaaacatcctgctgctggtactggctatggacttggccggtgcagagggaggctttagctccacttgcgaggtcgaagttgctgtcacagacatcaatgatcacgccccagagttcatcacatcgcagatcggccctatcagcctaccggaggacgtggagcccggaacattggtcgcaatgcttactgccattgacgccgacctggagcccgcatttcgcttaatggactttgctattgagagaggcgatactgaaggcacttttggactggactgggaaccagactccgggcatgtccgcttgcgtctttgtaagaatctgagctacgaagcagccccttcacatgaagtggttgtagtggtgcagagcgtcgcaaagcttgtgggacccggtcccggtccaggggcaactgcgaccgttacagtgttagtcgagagggttatgcctccgccaaagcttgatcaggaaagctatgaggccagcgtcccaattagcgcaccggctggaagctttctgctgaccatacagccctctgacccgatcagcagaactctgcgattttccctcgtgaatgattccgaaggctggctctgcatcgaaaaattttcaggggaagtgcatacggcccagagtctgcaaggcgcacagccgggtgatacttatacagtgctggttgaggcgcaggatactgacgaacccaggctgtccgccagcgcaccgctggtaatccactttctgaaagcccctccagcaccagctctgacactggctcctgtgcctagtcagtacctgtgcacaccacggcaggaccacggtctgatcgttagcggcccatccaaggatcctgatttagcctccggacacggcccttactcctttactctaggaccaaaccctacagtccagcgggactggcgattacagaccctgaatggatctcacgcctatctcaccctcgctctccactgggtcgaaccacgtgaacatattatccccgttgtcgtgagccataacgctcagatgtggcagcttctggttagagtgatagtgtgtcgctgcaacgttgagggtcaatgtatgcggaaggtcggaaggatgaaggggatgcccaccaaactcagtgctgtgggcatcctggttgggacactcgtcgccatagggatctttctgatcctgatcttcactcactggacaatgtctcgaaaaaaagacccagatcagcccgctgattcagtgcctttgaaggccacagtctag

SEQ ID NO: 143173 - DNA, 2382 bp, Artificial Sequence
  derived and/or modified sequence
atggttccagcctggctatggctgttgtgcgtatctgtgccccaagcccttccaaaggcccagccagccgaactgtcagtggaggtgcctgaaaactacggcggaaatttccccctatatctgacaaagttgccgttgcccagagaaggggctgaaggccagatcgttctctccggagaacaggccgagatgcaggacggacacgttttatggggccctcagcccgtgcttgttcatgtaaaagatgaaaacgatcaagtgccccacttttcacaagccatatatcgcgctagactctcacgcggaaccagaccgggaatacctttcctgttcctggaggctagtgatcgagatgagcctggcaccgctaactccgacctccgcttccacatcctgagtcaggctcccgctcagccttctccagacatgtttcagctggagccaaggcttggcgctttggcactgtctccgaaggggtccaccagcttagatcatgctctggagagaacgtatcaacttttagttcaggtcaaagatatgggtgatcaggcctccgggcatcaggcgacagctaccgtggaggtctcaatcatcgagagcacctgggtgagccttgagccaattcacctagccgagaacctcaaagtcctctatcctcaccacatggctcaggtccattggtctgggggtgacgtgcattatcacctcgagtcacatcctccgggtccatttgaagtgaacgcggagggaaacttgtacgtaacccgtgagctggatcgcgaagcccaggcagaatacctcttgcaggtacgagcccaaaacagccatggagaggactatgccgcacctctggagctccacgttctcgtcatggacgagaacgacaacgtcccaatctgcccgccacgggaccccactgtaagcattccagaattatcaccacctggaaccgaggtgacacggctgagtgccgaagacgccgatgcccctggatcacccaacagccacgtggtttaccagctgctatccccagaaccggaagacggtgtggaaggcagagcttttcaagtagatcccacatctgggagcgtcactctgggggtgctgccactccgtgctgggcagaacattctgctgttggtgctggccatggacctggccggtgcagaagggggattctcttccacctgtgaagtagaggtggccgtgactgatataaacgatcatgcccctgagttcattaccagccaaataggtcccatatctctgccagaagacgtggaaccgggtacgttggtggccatgctcacggctattgacgccgatcttgaacctgccttccgcctgatggactttgccatagagagaggggatactgaaggaacgttcggactcgactgggaacctgacagcggacacgtcagactccggctttgtaaaaatctctcctacgaagctgctccatcccacgaagtggtagtggtggtgcaaagcgtcgccaagctggtggggcctggccctggtcccggagccactgcaacggtaaccgttttggtggagagagtaatgccgccaccaaaactggaccaagagagttacgaagcaagcgtgcccatcagtgctcctgccggaagtttcctgctgactatccaaccaagtgatccgatttctcgtactctgaggttctccctcgtgaatgattctgagggttggctgtgcatcgagaagttttccggggaagtgcacaccgctcaatcactgcaaggcgcacagccgggtgatacttatacagtcttagtcgaagcccaggatactgacgagccaaggttgtcggcctctgcgcctctcgtgatccacttcctgaaagccccaccagccccagcgctgactctggcacccgtcccgagccaatatctgtgtacccctagacaggatcacgggctgattgtctcaggtccatctaaggaccccgatctagccagtggacacggcccatactcctttacccttggacccaaccccaccgtacagcgtgattggcggctccaaactctgaacggcagccacgcctacctaactctggccctccactgggtggaaccaagggaacacataattcccgtagtggttagccacaacgcacaaatgtggcaactgttggtgagggtgatcgtctgccggtgtaacgtagagggccagtgtatgagaaaggttgggcgaatgaaggggatgcccactaaactgtcggccgtgggcatactcgtaggcacactggtcgctattggaatcttccttatcctcatcttcacccactggacaatgtcacgtaagaaagacccagatcaacccgctgattcggttcctctgaaagctaccgtgtag

SEQ ID NO: 143174 - DNA, 2927 bp, Artificial Sequence
  derived and/or modified sequence
ttttccactcctgagcaagcgtggctgaaccctcctacctgctcaagtgccctgccttgccccacccagcccagcctggccagagccccctggagaaggagctctcttcttgcttggcagctggaccaagggagccagtcttgggcgctggagggcctgtcctgaccatggtccctgcctggctgtggctgctttgtgtctccgtcccccaggctctccccaaggcccagcctgcagagctgtctgtggaagttccagaaaactatggtggaaatttccctttatacctgaccaagttgccgctgccccgtgagggggctgaaggccagatcgtgctgtcaggggactcaggcaaggcaactgagggcccatttgctatggatccagattctggcttcctgctggtgaccagggccctggaccgagaggagcaggcagagtaccagctacaggtcaccctggagatgcaggatggacatgtcttgtggggtccacagcctgtgcttgtgcacgtgaaggatgagaatgaccaggtgccccatttctctcaagccatctacagagctcggctgagccggggtaccaggcctggcatccccttcctcttccttgaggcttcagaccgggatgagccaggcacagccaactcggatcttcgattccacatcctgagccaggctccagcccagccttccccagacatgttccagctggagcctcggctgggggctctggccctcagccccaaggggagcaccagccttgaccacgccctggagaggacctaccagctgttggtacaggtcaaggacatgggtgaccaggcctcaggccaccaggccactgccaccgtggaagtctccatcatagagagcacctgggtgtccctagagcctatccacctggcagagaatctcaaagtcctatacccgcaccacatggcccaggtacactggagtgggggtgatgtgcactatcacctggagagccatcccccgggaccctttgaagtgaatgcagagggaaacctctacgtgaccagagagctggacagagaagcccaggctgagtacctgctccaggtgcgggctcagaattcccatggcgaggactatgcggcccctctggagctgcacgtgctggtgatggatgagaatgacaacgtgcctatctgccctccccgtgaccccacagtcagcatccctgagctcagtccaccaggtactgaagtgactagactgtcagcagaggatgcagatgcccccggctcccccaattcccacgttgtgtatcagctcctgagccctgagcctgaggatggggtagaggggagagccttccaggtggaccccacttcaggcagtgtgacgctgggggtgctcccactccgagcaggccagaacatcctgcttctggtgctggccatggacctggcaggcgcagagggtggcttcagcagcacgtgtgaagtcgaagtcgcagtcacagatatcaatgatcacgcccctgagttcatcacttcccagattgggcctataagcctccctgaggatgtggagcccgggactctggtggccatgctaacagccattgatgctgacctcgagcccgccttccgcctcatggattttgccattgagaggggagacacagaagggacttttggcctggattgggagccagactctgggcatgttagactcagactctgcaagaacctcagttatgaggcagctccaagtcatgaggtggtggtggtggtgcagagtgtggcgaagctggtggggccaggcccaggccctggagccaccgccacggtgactgtgctagtggagagagtgatgccaccccccaagttggaccaggagagctacgaggccagtgtccccatcagtgccccagccggctctttcctgctgaccatccagccctccgaccccatcagccgaaccctcaggttctccctagtcaatgactcagagggctggctctgcattgagaaattctccggggaggtgcacaccgcccagtccctgcagggcgcccagcctggggacacctacacggtgcttgtggaggcccaggatacagatgagccgagactgagcgcttctgcacccctggtgatccacttcctaaaggcccctcctgccccagccctgactcttgcccctgtgccctcccaatacctctgcacaccccgccaagaccatggcttgatcgtgagtggacccagcaaggaccccgatctggccagtgggcacggtccctacagcttcacccttggtcccaaccccacggtgcaacgggattggcgcctccagactctcaatggttcccatgcctacctcaccttggccctgcattgggtggagccacgtgaacacataatccccgtggtggtcagccacaatgcccagatgtggcagctcctggttcgagtgatcgtgtgtcgctgcaacgtggaggggcagtgcatgcgcaaggtgggccgcatgaagggcatgcccacgaagctgtcggcagtgggcatccttgtaggcaccctggtagcaataggaatcttcctcatcctcattttcacccactggaccatgtcaaggaagaaggacccggatcaaccagcagacagcgtgcccctgaaggcgactgtctgaatggcccaggcagctctagctgggagcttggcctctggctccatctgagtcccctgggagagagcccagcacccaagatccagcaggggacaggacagagtagaagcccctccatctgccctggggtggaggcaccatcaccatcaccaggcatgtctgcagagcctggacaccaactttatggactgcccatgggagtgctccaaatgtcagggtgtttgcccaataataaagccccagagaactgggctgggccctatgggattggta

SEQ ID NO: 143175 - DNA, 2473 bp, Artificial Sequence
  derived and/or modified sequence
cttcttgcttggcagctggaccaagggagccagtcttgggcgctggagggcctgtcctgaccatggtccctgcctggctgtggctgctttgtgtctccgtcccccaggctctccccaaggcccagcctgcagagctgtctgtggaagttccagaaaactatggtggaaatttccctttatacctgaccaagttgccgctgccccgtgagggggctgaaggccagatcgtgctgtcaggggagcaggcagagatgcaggatggacatgtcttgtggggtccacagcctgtgcttgtgcacgtgaaggatgagaatgaccaggtgccccatttctctcaagccatctacagagctcggctgagccggggtaccaggcctggcatccccttcctcttccttgaggcttcagaccgggatgagccaggcacagccaactcggatcttcgattccacatcctgagccaggctccagcccagccttccccagacatgttccagctggagcctcggctgggggctctggccctcagccccaaggggagcaccagccttgaccacgccctggagaggacctaccagctgttggtacaggtcaaggacatgggtgaccaggcctcaggccaccaggccactgccaccgtggaagtctccatcatagagagcacctgggtgtccctagagcctatccacctggcagagaatctcaaagtcctatacccgcaccacatggcccaggtacactggagtgggggtgatgtgcactatcacctggagagccatcccccgggaccctttgaagtgaatgcagagggaaacctctacgtgaccagagagctggacagagaagcccaggctgagtacctgctccaggtgcgggctcagaattcccatggcgaggactatgcggcccctctggagctgcacgtgctggtgatggatgagaatgacaacgtgcctatctgccctccccgtgaccccacagtcagcatccctgagctcagtccaccaggtactgaagtgactagactgtcagcagaggatgcagatgcccccggctcccccaattcccacgttgtgtatcagctcctgagccctgagcctgaggatggggtagaggggagagccttccaggtggaccccacttcaggcagtgtgacgctgggggtgctcccactccgagcaggccagaacatcctgcttctggtgctggccatggacctggcaggcgcagagggtggcttcagcagcacgtgtgaagtcgaagtcgcagtcacagatatcaatgatcacgcccctgagttcatcacttcccagattgggcctataagcctccctgaggatgtggagcccgggactctggtggccatgctaacagccattgatgctgacctcgagcccgccttccgcctcatggattttgccattgagaggggagacacagaagggacttttggcctggattgggagccagactctgggcatgttagactcagactctgcaagaacctcagttatgaggcagctccaagtcatgaggtggtggtggtggtgcagagtgtggcgaagctggtggggccaggcccaggccctggagccaccgccacggtgactgtgctagtggagagagtgatgccaccccccaagttggaccaggagagctacgaggccagtgtccccatcagtgccccagccggctctttcctgctgaccatccagccctccgaccccatcagccgaaccctcaggttctccctagtcaatgactcagagggctggctctgcattgagaaattctccggggaggtgcacaccgcccagtccctgcagggcgcccagcctggggacacctacacggtgcttgtggaggcccaggatacagatgagccgagactgagcgcttctgcacccctggtgatccacttcctaaaggcccctcctgccccagccctgactcttgcccctgtgccctcccaatacctctgcacaccccgccaagaccatggcttgatcgtgagtggacccagcaaggaccccgatctggccagtgggcacggtccctacagcttcacccttggtcccaaccccacggtgcaacgggattggcgcctccagactctcaatggttcccatgcctacctcaccttggccctgcattgggtggagccacgtgaacacataatccccgtggtggtcagccacaatgcccagatgtggcagctcctggttcgagtgatcgtgtgtcgctgcaacgtggaggggcagtgcatgcgcaaggtgggccgcatgaagggcatgcccacgaagctgtcggcagtgggcatccttgtaggcaccctggtagcaataggaatcttcctcatcctcattttcacccactggaccatgtcaaggaagaaggacccggatcaaccagcagacagcgtgcccctgaaggcgactgtctgaatggcccaggcagctctagctgggagctt

SEQ ID NO: 143176 - DNA, 2490 bp, Artificial Sequence
  derived and/or modified sequence
atggtgcccgcctggctgtggctgctgtgcgtgagcgtgccccaggccctgcccaaggcccagcccgccgagctgagcgtggaggtgcccgagaactacggcggcaacttccccctgtacctgaccaagctgcccctgcccagagagggcgccgagggccagatcgtgctgagcggcgacagcggcaaggccaccgagggccccttcgccatggaccccgacagcggcttcctgctggtgaccagagccctggacagagaggagcaggccgagtaccagctgcaggtgaccctggagatgcaggacggccacgtgctgtggggcccccagcccgtgctggtgcacgtgaaggacgagaacgaccaggtgccccacttcagccaggccatctacagagccagactgagcagaggcaccagacccggcatccccttcctgttcctggaggccagcgacagagacgagcccggcaccgccaacagcgacctgagattccacatcctgagccaggcccccgcccagcccagccccgacatgttccagctggagcccagactgggcgccctggccctgagccccaagggcagcaccagcctggaccacgccctggagagaacctaccagctgctggtgcaggtgaaggacatgggcgaccaggccagcggccaccaggccaccgccaccgtggaggtgagcatcatcgagagcacctgggtgagcctggagcccatccacctggccgagaacctgaaggtgctgtacccccaccacatggcccaggtgcactggagcggcggcgacgtgcactaccacctggagagccacccccccggccccttcgaggtgaacgccgagggcaacctgtacgtgaccagagagctggacagagaggcccaggccgagtacctgctgcaggtgagagcccagaacagccacggcgaggactacgccgcccccctggagctgcacgtgctggtgatggacgagaacgacaacgtgcccatctgcccccccagagaccccaccgtgagcatccccgagctgagcccccccggcaccgaggtgaccagactgagcgccgaggacgccgacgcccccggcagccccaacagccacgtggtgtaccagctgctgagccccgagcccgaggacggcgtggagggcagagccttccaggtggaccccaccagcggcagcgtgaccctgggcgtgctgcccctgagagccggccagaacatcctgctgctggtgctggccatggacctggccggcgccgagggcggcttcagcagcacctgcgaggtggaggtggccgtgaccgacatcaacgaccacgcccccgagttcatcaccagccagatcggccccatcagcctgcccgaggacgtggagcccggcaccctggtggccatgctgaccgccatcgacgccgacctggagcccgccttcagactgatggacttcgccatcgagagaggcgacaccgagggcaccttcggcctggactgggagcccgacagcggccacgtgagactgagactgtgcaagaacctgagctacgaggccgcccccagccacgaggtggtggtggtggtgcagagcgtggccaagctggtgggccccggccccggccccggcgccaccgccaccgtgaccgtgctggtggagagagtgatgcccccccccaagctggaccaggagagctacgaggccagcgtgcccatcagcgcccccgccggcagcttcctgctgaccatccagcccagcgaccccatcagcagaaccctgagattcagcctggtgaacgacagcgagggctggctgtgcatcgagaagttcagcggcgaggtgcacaccgcccagagcctgcagggcgcccagcccggcgacacctacaccgtgctggtggaggcccaggacaccgacgagcccagactgagcgccagcgcccccctggtgatccacttcctgaaggccccccccgcccccgccctgaccctggcccccgtgcccagccagtacctgtgcacccccagacaggaccacggcctgatcgtgagcggccccagcaaggaccccgacctggccagcggccacggcccctacagcttcaccctgggccccaaccccaccgtgcagagagactggagactgcagaccctgaacggcagccacgcctacctgaccctggccctgcactgggtggagcccagagagcacatcatccccgtggtggtgagccacaacgcccagatgtggcagctgctggtgagagtgatcgtgtgcagatgcaacgtggagggccagtgcatgagaaaggtgggcagaatgaagggcatgcccaccaagctgagcgccgtgggcatcctggtgggcaccctggtggccatcggcatcttcctgatcctgatcttcacccactggaccatgagcagaaagaaggaccccgaccagcccgccgacagcgtgcccctgaaggccaccgtgtag

SEQ ID NO: 143177 - DNA, 2382 bp, Artificial Sequence
  derived and/or modified sequence
atggtgcccgcctggctgtggctgctgtgcgtgagcgtgccccaggccctgcccaaggcccagcccgccgagctgagcgtggaggtgcccgagaactacggcggcaacttccccctgtacctgaccaagctgcccctgcccagagagggcgccgagggccagatcgtgctgagcggcgagcaggccgagatgcaggacggccacgtgctgtggggcccccagcccgtgctggtgcacgtgaaggacgagaacgaccaggtgccccacttcagccaggccatctacagagccagactgagcagaggcaccagacccggcatccccttcctgttcctggaggccagcgacagagacgagcccggcaccgccaacagcgacctgagattccacatcctgagccaggcccccgcccagcccagccccgacatgttccagctggagcccagactgggcgccctggccctgagccccaagggcagcaccagcctggaccacgccctggagagaacctaccagctgctggtgcaggtgaaggacatgggcgaccaggccagcggccaccaggccaccgccaccgtggaggtgagcatcatcgagagcacctgggtgagcctggagcccatccacctggccgagaacctgaaggtgctgtacccccaccacatggcccaggtgcactggagcggcggcgacgtgcactaccacctggagagccacccccccggccccttcgaggtgaacgccgagggcaacctgtacgtgaccagagagctggacagagaggcccaggccgagtacctgctgcaggtgagagcccagaacagccacggcgaggactacgccgcccccctggagctgcacgtgctggtgatggacgagaacgacaacgtgcccatctgcccccccagagaccccaccgtgagcatccccgagctgagcccccccggcaccgaggtgaccagactgagcgccgaggacgccgacgcccccggcagccccaacagccacgtggtgtaccagctgctgagccccgagcccgaggacggcgtggagggcagagccttccaggtggaccccaccagcggcagcgtgaccctgggcgtgctgcccctgagagccggccagaacatcctgctgctggtgctggccatggacctggccggcgccgagggcggcttcagcagcacctgcgaggtggaggtggccgtgaccgacatcaacgaccacgcccccgagttcatcaccagccagatcggccccatcagcctgcccgaggacgtggagcccggcaccctggtggccatgctgaccgccatcgacgccgacctggagcccgccttcagactgatggacttcgccatcgagagaggcgacaccgagggcaccttcggcctggactgggagcccgacagcggccacgtgagactgagactgtgcaagaacctgagctacgaggccgcccccagccacgaggtggtggtggtggtgcagagcgtggccaagctggtgggccccggccccggccccggcgccaccgccaccgtgaccgtgctggtggagagagtgatgcccccccccaagctggaccaggagagctacgaggccagcgtgcccatcagcgcccccgccggcagcttcctgctgaccatccagcccagcgaccccatcagcagaaccctgagattcagcctggtgaacgacagcgagggctggctgtgcatcgagaagttcagcggcgaggtgcacaccgcccagagcctgcagggcgcccagcccggcgacacctacaccgtgctggtggaggcccaggacaccgacgagcccagactgagcgccagcgcccccctggtgatccacttcctgaaggccccccccgcccccgccctgaccctggcccccgtgcccagccagtacctgtgcacccccagacaggaccacggcctgatcgtgagcggccccagcaaggaccccgacctggccagcggccacggcccctacagcttcaccctgggccccaaccccaccgtgcagagagactggagactgcagaccctgaacggcagccacgcctacctgaccctggccctgcactgggtggagcccagagagcacatcatccccgtggtggtgagccacaacgcccagatgtggcagctgctggtgagagtgatcgtgtgcagatgcaacgtggagggccagtgcatgagaaaggtgggcagaatgaagggcatgcccaccaagctgagcgccgtgggcatcctggtgggcaccctggtggccatcggcatcttcctgatcctgatcttcacccactggaccatgagcagaaagaaggaccccgaccagcccgccgacagcgtgcccctgaaggccaccgtgtag

SEQ ID NO: 143178 - protein, 198 aa, Artificial Sequence
  derived and/or modified sequence
MSNVRVSNGSPSLERMDARQAEHPKPSACRNLFGPVDHEELTRDLEKHCRDMEEASQRKWNFDFQNHKPLEGKYEWQEVEKGSLPEFYYRPPRPPKGACKVPAQESQDVSGSRPAAPLIGAPANSEDTHLVDPKTDPSDSQTGLAEQCAGIRKRPATDDSSTQNKRANRTEENVSDGSPNAGSVEQTPKKPGLRRRQT

SEQ ID NO: 143179 - protein, 147 aa, Artificial Sequence
  derived and/or modified sequence
MEEASQRKWNFDFQNHKPLEGKYEWQEVEKGSLPEFYYRPPRPPKGACKVPAQESQDVSGSRPAAPLIGAPANSEDTHLVDPKTDPSDSQTGLAEQCAGIRKRPATDDSSTQNKRANRTEENVSDGSPNAGSVEQTPKKPGLRRRQT

SEQ ID NO: 143180 - DNA, 444 bp, Artificial Sequence
  derived and/or modified sequence
atggaggaggccagccagagaaagtggaacttcgacttccagaaccacaagcccctggagggcaagtacgagtggcaggaggtggagaagggcagcctgcccgagttctactacagaccccccagaccccccaagggcgcctgcaaggtgcccgcccaggagagccaggacgtgagcggcagcagacccgccgcccccctgatcggcgcccccgccaacagcgaggacacccacctggtggaccccaagaccgaccccagcgacagccagaccggcctggccgagcagtgcgccggcatcagaaagagacccgccaccgacgacagcagcacccagaacaagagagccaacagaaccgaggagaacgtgagcgacggcagccccaacgccggcagcgtggagcagacccccaagaagcccggcctgagaagaagacagacctag

SEQ ID NO: 143181 - DNA, 2657 bp, Artificial Sequence
  derived and/or modified sequence
tttaatttctccgaggccagccagagcaggtttgttggcagcagtacccctccagcagtcacgcgaccagccaatctcccggcggcgctcggggaggcggcgcgctcgggaacgaggggaggtggcggaaccgcgccggggccaccttaaggccgcgctcgccagcctcggcggggcggctcccgccgccgcaaccaatggatctcctcctctgtttaaatagactcgccgtgtcaatcattttcttcttcgtcagcctcccttccaccgccatattgggccactaaaaaaagggggctcgtcttttcggggtgtttttctccccctcccctgtccccgcttgctcacggctctgcgactccgacgccggcaaggtttggagagcggctgggttcgcgggacccgcgggcttgcacccgcccagactcggacgggctttgccaccctctccgcttgcctggtcccctctcctctccgccctcccgctcgccagtccatttgatcagcggagactcggcggccgggccggggcttccccgcagcccctgcgcgctcctagagctcgggccgtggctcgtcggggtctgtgtcttttggctccgagggcagtcgctgggcttccgagaggggttcgggctgcgtaggggcgctttgttttgttcggttttgtttttttgagagtgcgagagaggcggtcgtgcagacccgggagaaagatgtcaaacgtgcgagtgtctaacgggagccctagcctggagcggatggacgccaggcaggcggagcaccccaagccctcggcctgcaggaacctcttcggcccggtggaccacgaagagttaacccgggacttggagaagcactgcagagacatggaagaggcgagccagcgcaagtggaatttcgattttcagaatcacaaacccctagagggcaagtacgagtggcaagaggtggagaagggcagcttgcccgagttctactacagacccccgcggccccccaaaggtgcctgcaaggtgccggcgcaggagagccaggatgtcagcgggagccgcccggcggcgcctttaattggggctccggctaactctgaggacacgcatttggtggacccaaagactgatccgtcggacagccagacggggttagcggagcaatgcgcaggaataaggaagcgacctgcaaccgacgattcttctactcaaaacaaaagagccaacagaacagaagaaaatgtttcagacggttccccaaatgccggttctgtggagcagacgcccaagaagcctggcctcagaagacgtcaaacgtaaacagctcgaattaagaatatgtttccttgtttatcagatacatcactgcttgatgaagcaaggaagatatacatgaaaattttaaaaatacatatcgctgacttcatggaatggacatcctgtataagcactgaaaaacaacaacacaataacactaaaattttaggcactcttaaatgatctgcctctaaaagcgttggatgtagcattatgcaattaggtttttccttatttgcttcattgtactacctgtgtatatagtttttaccttttatgtagcacataaactttggggaagggagggcagggtggggctgaggaactgacgtggagcggggtatgaagagcttgctttgatttacagcaagtagataaatatttgacttgcatgaagagaagcaattttggggaagggtttgaattgttttctttaaagatgtaatgtccctttcagagacagctgatacttcatttaaaaaaatcacaaaaatttgaacactggctaaagataattgctatttatttttacaagaagtttattctcatttgggagatctggtgatctcccaagctatctaaagtttgttagatagctgcatgtggcttttttaaaaaagcaacagaaacctatcctcactgccctccccagtctctcttaaagttggaatttaccagttaattactcagcagaatggtgatcactccaggtagtttggggcaaaaatccgaggtgcttgggagttttgaatgttaagaattgaccatctgcttttattaaatttgttgacaaaattttctcattttcttttcacttcgggctgtgtaaacacagtcaaaataattctaaatccctcgatatttttaaagatctgtaagtaacttcacattaaaaaatgaaatattttttaatttaaagcttactctgtccatttatccacaggaaagtgttatttttcaaggaaggttcatgtagagaaaagcacacttgtaggataagtgaaatggatactacatctttaaacagtatttcattgcctgtgtatggaaaaaccatttgaagtgtacctgtgtacataactctgtaaaaacactgaaaaattatactaacttatttatgttaaaagattttttttaatctagacaatatacaagccaaagtggcatgttttgtgcatttgtaaatgctgtgttgggtagaataggttttcccctcttttgttaaataatatggctatgcttaaaaggttgcatactgagccaagtataattttttgtaatgtgtgaaaaagatgccaattattgttacacattaagtaatcaataaagaaaacttccatagctatt

SEQ ID NO: 143182 - DNA, 1405 bp, Artificial Sequence
  derived and/or modified sequence
acggctctgcgactccgacgccggcaaggtttggagagcggctgggttcgcgggacccgcgggcttgcacccgcccagactcggacgggctttgccaccctctccgcttgcctggtcccctctcctctccgccctcccgctcgccagtccatttgatcagcggagactcggcctgcaggaacctcttcggcccggtggaccacgaagagttaacccgggacttggagaagcactgcagagacatggaagaggcgagccagcgcaagtggaatttcgattttcagaatcacaaacccctagagggcaagtacgagtggcaagaggtggagaagggcagcttgcccgagttctactacagacccccgcggccccccaaaggtgcctgcaaggtgccggcgcaggagagccaggatgtcagcgggagccgcccggcggcgcctttaattggggctccggctaactctgaggacacgcatttggtggacccaaagactgatccgtcggacagccagacggggttagcggagcaatgcgcaggaataaggaagcgacctgcaaccgacgattcttctactcaaaacaaaagagccaacagaacagaagaaaatgtttcagacggttccccaaatgccggttctgtggagcagacgcccaagaagcctggcctcagaagacgtcaaacgtaaacagctcgaattaagaatatgtttccttgtttatcagatacatcactgcttgatgaagcaaggaagatatacatgaaaattttaaaaatacatatcgctgacttcatggaatggacatcctgtataagcactgaaaaacaacaacacaataacactaaaattttaggcactcttaaatgatctgcctctaaaagcgttggatgtagcattatgcaattaggtttttccttatttgcttcattgtactacctgtgtatatagtttttaccttttatgtagcacataaactttggggaagggagggcagggtggggctgaggaactgacgtggagcggggtatgaagagcttgctttgatttacagcaagtagataaatatttgacttgcatgaagagaagcaattttggggaagggtttgaattgttttctttaaagatgtaatgtccctttcagagacagctgatacttcatttaaaaaaatcacaaaaatttgaacactggctaaagataattgctatttatttttacaagaagtttattctcatttgggagatctggtgatctcccaagctatctaaagtttgttagatagctgcatgtggcttttttaaaaaagcaacagaaacctatcctcactgccctccccagtctctcttaaagttggaatttaccagttaattactcagcagaatggtgatcactccaggtagtttggggc

SEQ ID NO: 143183 - DNA, 444 bp, Artificial Sequence
  derived and/or modified sequence
atggaggaggccagtcaacggaaatggaactttgactttcagaaccataagcccctggaggggaaatatgagtggcaagaagtggagaaagggtccctgcccgagttttactaccgccccccccgtccccctaagggtgcatgcaaggtgcccgcccaagagagtcaggacgtgtcgggttctagacccgcagccccactgattggagccccagccaattcggaagatacccacctggttgatcccaagacagacccatccgacagccagacgggactcgcagaacagtgtgccggaattaggaagcgaccagctactgatgattcttcaacacagaacaaacgggcgaaccgtactgaagagaacgtgtctgacgggtcaccaaatgcgggctcagtcgagcagacacctaagaaacccggtctccgacgccgtcagacttag

SEQ ID NO: 143184 - DNA, 444 bp, Artificial Sequence
  derived and/or modified sequence
atggaggaggccagccagaggaagtggaactttgacttccagaaccacaagcccctggagggcaagtatgagtggcaggaggtggagaagggcagcctgcctgagttctactaccggccccccaggcctcccaagggggcctgcaaggtgcctgcccaggagagccaggatgtgtctggcagcaggcctgctgcccccctcatcggggccccagccaacagcgaggacacccacctggtggaccccaagacagaccccagcgacagccagacaggcctggccgagcagtgtgccggcatcaggaagaggcctgccacagatgacagcagcacccagaacaagagggccaacagaacagaagaaaatgtgtctgatggcagccccaatgccggctctgtggagcagacccccaagaagccaggcctgcggcggcggcagacctag

SEQ ID NO: 143185 - DNA, 444 bp, Artificial Sequence
  derived and/or modified sequence
atggaggaggccagccagcggaagtggaacttcgacttccagaaccataagcctctcgaagggaagtacgaatggcaggaggtggaaaagggctccctcccagagttctattaccgcccacctaggccccccaagggagcgtgtaaggtgcccgcacaggaaagccaggacgtaagtggctcccggccggcagctcctctcattggagctcccgccaattcagaagatactcatctcgtcgatccaaagactgatccgtccgactctcagactggccttgcagagcagtgcgcaggtattcgaaagcgtccggcaacagacgattcatccacacagaataaaagagccaacagaaccgaagaaaacgttagtgacggatccccgaacgccggatccgtcgaacagacccccaagaagccaggcctgaggagaagacagacttag

SEQ ID NO: 143186 - DNA, 444 bp, Artificial Sequence
  derived and/or modified sequence
atggaggaggcctctcagaggaagtggaacttcgacttccagaaccataagcccttggaaggaaagtacgagtggcaggaagtcgagaagggctcccttcctgagttttattacagaccgcctagacctcccaaaggcgcttgcaaagtgcctgcacaggagagtcaagacgtgagtggaagccggccagccgctccactgatcggcgctcccgctaatagcgaagacacacatttagtcgatcctaaaaccgacccgagcgactcccagacgggactcgcggaacagtgtgctgggatacgcaagcgcccagcaaccgacgatagcagcacgcagaacaaaagagcaaacagaactgaggagaacgtgagtgacggctcacctaacgccggatctgttgagcaaacccctaaaaagccaggactgcgcagacgccaaacttag

SEQ ID NO: 143187 - DNA, 597 bp, Artificial Sequence
  derived and/or modified sequence
atgagcaacgtccgtgtcagcaacggttcacctagcctcgagaggatggatgctcgacaggccgagcacccgaaaccctctgcgtgccgtaacctgttcggccctgtggaccacgaggagctcactagggaccttgaaaaacattgccgggacatggaagaggcctctcagaggaagtggaattttgactttcagaaccataaaccactcgaaggtaaatatgaatggcaggaagttgagaagggctctctccctgagttctactaccgccctccaaggccacccaagggggcgtgcaaggtcccagcccaggagagccaggatgtctctggatctagacccgccgccccacttattggcgcccctgcaaactctgaggatacacacctcgtagacccaaagaccgatccctccgactctcagactggtctagcagaacagtgtgcaggtatccggaaacggcccgctacagatgactcaagtacccagaacaaacgagcgaatcgtacagaggagaacgtgtctgatggcagccccaacgccggtagtgtggaacagactccgaaaaagcccgggctgcgtagaaggcaaacctag

SEQ ID NO: 143188 - DNA, 597 bp, Artificial Sequence
  derived and/or modified sequence
atgagcaatgtgcgggtgtccaatggcagccccagcctggagaggatggatgcccggcaggccgagcaccccaagcccagcgcctgcaggaacctgtttggacctgtggaccacgaggagctgacccgggacctggagaagcactgccgggacatggaggaggccagccagaggaagtggaactttgacttccagaaccacaagcccctggagggcaagtatgagtggcaggaggtggagaagggcagcctgcctgagttctactacagaccaccccggccccccaagggggcctgcaaggtgcctgcccaggagagccaggatgtgtctggcagcaggcctgctgcccccctgattggagccccagccaacagcgaggacacccacctggtggaccccaagacagaccccagcgacagccagacaggcctggccgagcagtgtgccggcatcaggaagaggcctgccacagatgacagcagcacccagaacaagagggccaacagaacagaggagaatgtgtctgatggcagccccaatgccggctctgtggagcagacccccaagaagccaggcctgcggcggcggcagacctag

SEQ ID NO: 143189 - DNA, 597 bp, Artificial Sequence
  derived and/or modified sequence
atgagcaacgtgcgggtgagcaacggcagccccagcctggagcggatggatgctcgccaagctgagcatccaaagcccagcgcttgtcgaaacctcttcggccccgtcgaccacgaggagttgacccgcgatctggaaaagcattgtcgcgacatggaagaggcttcccagcgtaagtggaacttcgattttcagaatcacaaacccctggagggaaaatacgagtggcaggaagtcgagaagggcagcctgccagaattctactaccgccccccgaggccaccgaaaggcgcttgcaaagtgccggctcaggagtctcaggacgtgtctggctcgaggcccgcagctccgttgattggtgcacccgctaacagtgaagacacgcacctggtggatccaaagactgacccaagcgactcccagaccggcttggctgaacagtgtgccggcatccgaaaacgacctgcaactgatgatagttccacccaaaataaaagggccaatcggaccgaagagaatgtctcagacggatcccccaatgcgggcagcgtcgagcagactccaaagaagcctgggctaaggagaagacagacatag

SEQ ID NO: 143190 - DNA, 597 bp, Artificial Sequence
  derived and/or modified sequence
atgtctaatgtacgcgtgagtaacggaagcccgagccttgagcgaatggatgccaggcaggccgagcacccgaagccaagtgcatgtaggaacctgttcggcccagttgatcacgaggaattgacacgggatctcgagaagcactgcagagacatggaggaagcaagccagaggaagtggaactttgactttcagaatcataagccccttgaaggtaaatatgagtggcaggaggtggaaaaggggtctctgcccgagttctactatagacctccaagaccacccaagggcgcttgtaaagttcccgcacaggagagccaggacgtctcagggtctagacccgctgctcccctcattggcgcacctgccaattctgaggacacacaccttgtagaccccaaaaccgacccgtccgactctcaaacaggtctggccgagcaatgtgccggtattcggaagcgtcctgccaccgatgatagctccacacaaaacaaaagagccaacagaacagaggagaatgtgtcggatggttccccaaatgccggttccgttgaacagacaccaaaaaagccaggactgcgacggaggcagacttag

SEQ ID NO: 143191 - DNA, 597 bp, Artificial Sequence
  derived and/or modified sequence
atgagcaacgtgagagtgagcaacggcagccccagcctggagagaatggacgccagacaggccgagcaccccaagcccagcgcctgcagaaacctgttcggccccgtggaccacgaggagctgaccagagacctggagaagcactgcagagacatggaggaggccagccagagaaagtggaacttcgacttccagaaccacaagcccctggagggcaagtacgagtggcaggaggtggagaagggcagcctgcccgagttctactacagaccccccagaccccccaagggcgcctgcaaggtgcccgcccaggagagccaggacgtgagcggcagcagacccgccgcccccctgatcggcgcccccgccaacagcgaggacacccacctggtggaccccaagaccgaccccagcgacagccagaccggcctggccgagcagtgcgccggcatcagaaagagacccgccaccgacgacagcagcacccagaacaagagagccaacagaaccgaggagaacgtgagcgacggcagccccaacgccggcagcgtggagcagacccccaagaagcccggcctgagaagaagacagacctag

SEQ ID NO: 143192 - protein, 262 aa, Artificial Sequence
  derived and/or modified sequence
MAWLEDVDFLEDVPLLEDIPLLEDVPLLEDVPLLEDTSRLEDINLMEDMALLEDVDLLEDTDFLEDLDFSEAMDLREDKDFLEDMDSLEDMALLEDVDLLEDTDFLEDPDFLEAIDLREDKDFLEDMDSLEDLEAIGRCGFSGRHGFFGRRRFSGRPKLSGRLGLLGRRGFSGRLGGYWKTWIFWKTWIFWKTWIFRKTYIGWKTWIFSGRCGLTGRPGFGGRRRFFWKTLTDWKTWISFWKTLIDWKTWISFWKTLIDWKI

SEQ ID NO: 143193 - DNA, 789 bp, Artificial Sequence
  derived and/or modified sequence
atggcatggcttgaagatgtcgactttcttgaagatgtccctctgctcgaggacatcccactcctcgaagacgtgccactgcttgaagatgtcccattactagaggatacatctaggctggaggacataaacttgatggaggatatggccctgctcgaggatgtggacctactggaggacacagactttctcgaggatcttgacttctcggaagccatggacctgcgagaagataaagatttcttagaagacatggattcacttgaagacatggctttgctggaagatgttgacctgttagaagacactgactttctggaggatcctgacttcctcgaggccattgacctgagagaggataaagatttcctcgaagacatggatagcttggaggatctcgaggccatcggccggtgtggcttctctggcagacatggattttttgggcggcgccgcttctcagggagaccaaagttatcaggaagacttgggctactaggtaggagaggattttccggccgcctgggaggatattggaaaacctggatattctggaagacttggattttttggaaaacttggatcttccggaagacttatattgggtggaaaacatggatatttagcgggcggtgcggccttaccggccgacctggctttggaggtcgtaggagattcttttggaaaacactaaccgattggaagacatggatttccttctggaaaacattaatagactggaaaacttggatctctttttggaagacactgattgattggaaaatatag

SEQ ID NO: 143194 - DNA, 789 bp, Artificial Sequence
  derived and/or modified sequence
atggcctggctggaggatgtggacttcctggaggatgtgcccctgctggaggacatccccctgctggaggatgtgcccctgctggaggatgtgcccctgctggaggacaccagccggctggaggacatcaacctgatggaggacatggccctgctggaggatgtggacctgctggaggacacagacttcctggaggacctggacttcagcgaggccatggacctgcgggaggacaaggacttcctggaggacatggacagcctggaggacatggccctgctggaggatgtggacctgctggaggacacagacttcctggaggaccctgacttcctggaggccatcgacctgcgggaggacaaggacttcctggaggacatggacagcctggaggacctggaggccatcggccgctgtggcttcagcggcagacatggcttcttcggcagaagacgcttcagcggccggcccaagctgagcggccgcctgggcctgctgggccggcggggcttcagcggccgcctgggcggctactggaagacctggatcttctggaagacctggatcttctggaagacctggatcttcaggaagacctacatcggctggaagacctggatcttcagcggccgctgtggcctgaccggccggcccggctttggaggaagaagacgcttcttctggaagaccctgacagactggaagacctggatctccttctggaagaccctgattgactggaagacctggatctccttctggaagaccctgattgactggaagatctag

SEQ ID NO: 143195 - DNA, 789 bp, Artificial Sequence
  derived and/or modified sequence
atggcctggctggaggacgtggacttcctggaggacgtgcccctgcttgaggatataccattactagaggacgtcccacttcttgaggacgttcctttgctagaggatacctctagattagaagatattaatttgatggaagacatggcgctacttgaggatgtcgatctcttggaggacacggacttcctcgaagatctggacttttcagaagcgatggacttgcgtgaagacaaagactttcttgaagacatggacagcctcgaagatatggcccttctggaagatgtagacttattagaagataccgatttcctggaggatccagattttttggaagccatcgaccttagggaggacaaagattttctcgaggatatggattctctggaagacttggaggccattggtcgatgtggattttcgggcaggcatggctttttcgggcgtcgccggtttagcggccgacccaaactgtcaggccggctcggactccttggcagaaggggattttctggacgcctcggcggatattggaagacctggatattctggaaaacatggatcttctggaaaacgtggatcttccgcaagacttacataggatggaagacgtggatcttttccggtcgttgtggacttaccgggagaccaggctttggcggacggagacgcttcttctggaagaccttgaccgattggaagacatggatctctttctggaaaaccctgattgattggaagacctggataagcttttggaagactctcattgattggaagatctag

SEQ ID NO: 143196 - DNA, 789 bp, Artificial Sequence
  derived and/or modified sequence
atggcatggttggaagatgtggacttcttagaggacgtgcccctgttggaggacattccattgttagaagatgtccctttgctggaggacgtgccactcctagaagatacttccaggctcgaagacattaacctgatggaggacatggcgttactggaggacgtggatctgctggaagataccgactttctggaggacctcgacttctctgaagccatggacttgcgcgaagataaagacttcctggaagatatggacagcctagaggatatggccctgctggaagatgtcgatctactggaagacacagactttttggaggatcccgatttcttggaagctatcgatctgcgggaggacaaggacttccttgaggatatggatagcctcgaggacttggaggcaatagggaggtgtggtttttccggcaggcacgggttttttggcaggcgcaggttctcaggccgacctaaactttcaggtagactgggccttcttgggcgacggggattttccgggagattaggaggttactggaaaacatggattttctggaagacctggattttctggaaaacttggatcttccggaagacttacatcgggtggaagacctggatattttccgggcgatgcgggcttactggaaggccaggattcggaggtcgaagaaggtttttctggaaaactctgacagactggaagacttggatcagtttctggaaaactctcattgactggaaaacttggatctcattttggaagactctgattgactggaagatctag

SEQ ID NO: 143197 - DNA, 1299 bp, Artificial Sequence
  derived and/or modified sequence
ttgttggaagacatgaagatgctggaagacacagagatgctggaagacgtggagatgttggaagacgagcagatgctggaagccctggagatgctggaagacctggagatataggaagacatggatttgttggaagacgtagcttagttggaagacatatattttctggaagacgtggattttctggaagacatggcttggttggaagacgtggattttctggaagacgtacctttgttggaagacatacctttgttggaagacgtacctttgttggaagacgtacctttgttggaagacacaagtaggctggaagacattaatttgatggaagacatggctttgttggaagacgtggatttgctggaagacacggatttcctggaagacctggatttttcggaagctatggatttgagggaagacaaggattttctggaagacatggatagtctggaagacatggctttgttggaagacgtggacttgctggaagacacggatttcctggaagacccggattttttggaagctatagatttaagggaagacaaggattttctggaagacatggatagtctggaagacctggaggccattggaagatgtggattttctggaagacatggcttttttggaagacgtagattttcaggaagacccaaattatccggaagacttggattgttgggaagacgtggattttctggaagactgggaggttactggaagacatggattttctggaagacatggattttctggaagacgtggatcttcaggaagacatatattggctggaagacctggattttttccggaagatgtggattgactggaagacctggatttggtggaagacgtagatttttctggaagacactgactgactggaagacctggatttctttctggaagacactgattgactggaagacctggatttctttctggaagacactgattgactggaagatctagatttttctggaagaactagatttactggaagacttggatttggtggaagacacagatttttctggaagacatggattagctggaagatctgtatttgatggaagaccttgaaattattggaagacatggatttcctggaagacgtggattttcctggaagatctggatttggtggaagaccagtaattgctggaagactggatttgctggaagacttgatttactggaagacttggagcttcttggaagacatggattgtccggaagacatggattgtctggaagatgtggattttctggaagctcaggattatctgg

SEQ ID NO: 143198 - DNA, 789 bp, Artificial Sequence
  derived and/or modified sequence
atggcctggctggaggacgtggacttcctggaggacgtgcccctgctggaggacatccccctgctggaggacgtgcccctgctggaggacgtgcccctgctggaggacaccagcagactggaggacatcaacctgatggaggacatggccctgctggaggacgtggacctgctggaggacaccgacttcctggaggacctggacttcagcgaggccatggacctgagagaggacaaggacttcctggaggacatggacagcctggaggacatggccctgctggaggacgtggacctgctggaggacaccgacttcctggaggaccccgacttcctggaggccatcgacctgagagaggacaaggacttcctggaggacatggacagcctggaggacctggaggccatcggcagatgcggcttcagcggcagacacggcttcttcggcagaagaagattcagcggcagacccaagctgagcggcagactgggcctgctgggcagaagaggcttcagcggcagactgggcggctactggaagacctggatcttctggaagacctggatcttctggaagacctggatcttcagaaagacctacatcggctggaagacctggatcttcagcggcagatgcggcctgaccggcagacccggcttcggcggcagaagaagattcttctggaagaccctgaccgactggaagacctggatcagcttctggaagaccctgatcgactggaagacctggatcagcttctggaagaccctgatcgactggaagatctag

SEQ ID NO: 143199 - protein, 172 aa, Artificial Sequence
  derived and/or modified sequence
MASGFKKPSAASTGQKRKVAPKPELTEDQKQEVREAFDLFDVDGSGTIDAKELKVAMRALGFEPRKEEMKKMISEVDREGTGKISFNDFLAVMTQKMSEKDTKEEILKAFRLFDDDETGKISFKNLKRVANELGENLTDEELQEMIDEADRDGDGEVNEEEFLRIMKKTSLY

SEQ ID NO: 143200 - DNA, 519 bp, Artificial Sequence
  derived and/or modified sequence
atggcttccggatttaaaaagccttccgccgcatccaccgggcagaaaaggaaggtcgccccgaaacccgagttaaccgaagaccagaagcaagaagtcagagaggcctttgacctttttgacgtagatgggtccggtactatagacgctaaggagctaaaggtggccatgagagccctcggattcgaaccacgcaaggaagagatgaaaaaaatgatcagtgaagtggatcgcgagggaactggaaaaatttcattcaatgacttcctagctgtaatgacacaaaagatgtccgaaaaggacaccaaggaggagattctgaaggccttcagactgtttgacgacgatgaaaccggcaaaatcagcttcaaaaatttgaagagagtcgctaatgagctgggcgagaatttaaccgacgaagaactgcaggagatgatagacgaggccgatcgcgatggggatggagaggtgaacgaggaagagttcctgagaatcatgaagaaaactagcctgtactag

SEQ ID NO: 143201 - DNA, 519 bp, Artificial Sequence
  derived and/or modified sequence
atggccagcggcttcaagaagcccagcgctgccagcacaggccagaagaggaaggtggcccccaagccagagctgacagaggaccagaagcaggaggtgcgggaggcctttgacctgtttgatgtggatggcagcggcaccattgatgccaaggagctgaaggtggccatgagggccctgggctttgagcccaggaaggaggagatgaagaagatgatcagcgaggtggaccgggagggcaccgggaagatctccttcaatgacttcctggccgtgatgacccagaagatgtctgagaaggacaccaaggaggagatcctgaaggccttccggctgtttgatgatgatgagaccgggaagatctccttcaagaacctgaagagggtggccaatgagctgggggagaacctgacagatgaggagctgcaggagatgattgatgaagctgacagagatggagatggagaggtgaatgaggaggagttcctgcgcatcatgaagaagaccagcctgtactag

SEQ ID NO: 143202 - DNA, 519 bp, Artificial Sequence
  derived and/or modified sequence
atggccagcggcttcaagaagcccagcgccgccagcaccggccagaaaagaaaggtggccccaaaacccgaactcaccgaggatcagaaacaggaggtgagagaggctttcgacctctttgatgtggatggctccggtacaattgatgcaaaggaactcaaggtggctatgagggctctgggttttgaacctcgcaaggaggaaatgaagaagatgattagcgaggtcgaccgagaaggcaccggaaaaatctcttttaacgactttctggcagtgatgacccagaaaatgtcagaaaaggatactaaggaggaaatcctaaaggctttccgtctgttcgatgacgatgaaactggcaaaataagcttcaagaacctgaaaagagtggcgaatgagttgggcgagaacctgaccgacgaagaactgcaggagatgattgacgaagcagaccgggacggagacggcgaagttaatgaagaagagttcctgcgcatcatgaagaaaacctccctttattag

SEQ ID NO: 143203 - DNA, 519 bp, Artificial Sequence
  derived and/or modified sequence
atggcctcaggcttcaagaagccttccgcagccagcaccggacagaagcgaaaggttgcccctaagcctgagctgaccgaggaccagaagcaggaggttagagaagccttcgatctgtttgacgtggacggcagtgggacaattgacgccaaagagctgaaagtggccatgagagctctcggtttcgaacctcgtaaggaggaaatgaagaagatgatttctgaggtcgatcgcgaggggaccggaaagatcagtttcaatgacttcctcgccgttatgacccagaagatgtctgagaaggatactaaagaagaaatcctaaaggcatttcgtcttttcgacgatgacgaaacgggaaagatcagtttcaagaatctgaaacgggttgccaatgaactgggcgagaacctgaccgatgaggaattgcaggaaatgatcgatgaagcagaccgtgatggggacggcgaagttaatgaggaggagtttttgaggatcatgaaaaaaacttctctctattag

SEQ ID NO: 143204 - DNA, 1158 bp, Artificial Sequence
  derived and/or modified sequence
gcggggcggtgccgttgggaccacggcggccagagcggcaggatggcttccggcttcaagaagcccagcgctgcctccaccggccaaaagagaaaggtggcacctaagcccgagctcactgaggatcagaagcaagaagttcgggaagcatttgacctcttcgacgtggacggaagtgggaccatcgacgcgaaggagctgaaggtggccatgagagcgctgggcttcgaacccaggaaggaagagatgaagaaaatgatctccgaggtggacagggaaggcacggggaagatcagcttcaatgacttcctggccgtgatgacgcagaagatgtccgagaaggacaccaaagaagaaatcctgaaggccttcaggctctttgatgacgatgagaccgggaagatctcgttcaaaaacctgaagcgtgtggccaacgagctgggggagaacctcacggatgaggagctgcaggagatgatcgacgaagctgatcgggatggggacggcgaagtgaacgaggaggagttccttcggatcatgaagaagaccagcctttactgaagtcggttcagaagctaaagtgactctctgggttgcctgcttccattttgtgaaaccttagaggacagcggctgcctgtcccttcttcaccccctcacccccataatttgtctagatctatttccatatctctagttcaataatagaatttgaaagatgcttgtaatgtgagttttgggttttaattctcaagagtcaacctggagcacatgaggttaaacaaagggccctgaagtttgagtgcgccctccatttgccctgtgctgaacttgctgttcatctgttgatctggaggcaggacagcttctgggacacacaaaaatgtggttccctttgtcacttctttggtggtcttaaattatcttgcttcatatatcattccttaaattccagtcattgttccagcataatgagatggaatctgccagtagatttgcctagcctgtccacttagctgaataccagtttgaaggaaaacagggtggccacttacaaacttacggagctcaggacagataatcttataaagaatagacttgcttgggtggtagtacgttgtgcaattttgactattcactggctttatacctgcaaatg

SEQ ID NO: 143205 - DNA, 519 bp, Artificial Sequence
  derived and/or modified sequence
atggccagcggcttcaagaagcccagcgccgccagcaccggccagaagagaaaggtggcccccaagcccgagctgaccgaggaccagaagcaggaggtgagagaggccttcgacctgttcgacgtggacggcagcggcaccatcgacgccaaggagctgaaggtggccatgagagccctgggcttcgagcccagaaaggaggagatgaagaagatgatcagcgaggtggacagagagggcaccggcaagatcagcttcaacgacttcctggccgtgatgacccagaagatgagcgagaaggacaccaaggaggagatcctgaaggccttcagactgttcgacgacgacgagaccggcaagatcagcttcaagaacctgaagagagtggccaacgagctgggcgagaacctgaccgacgaggagctgcaggagatgatcgacgaggccgacagagacggcgacggcgaggtgaacgaggaggagttcctgagaatcatgaagaagaccagcctgtactag

SEQ ID NO: 143206 - protein, 468 aa, Artificial Sequence
  derived and/or modified sequence
MAASSNSSLSGSSVSSDAEEYQPPIWKSYLYQLQQEAPRPKRIICPREVENRPKYYGREFHGIISREQADELLGGVEGAYILRESQRQPGCYTLALRFGNQTLNYRLFHDGKHFVGEKRFESIHDLVTDGLITLYIETKAAEYISKMTTNPIYEHIGYATLLREKVSRRLSRSKNEPRKTNVTHEEHTAVEKISSLVRRAALTHNDNHFNYEKTHNFKVHTFRGPHWCEYCANFMWGLIAQGVRCSDCGLNVHKQCSKHVPNDCQPDLKRIKKVYCCDLTTLVKAHNTQRPMVVDICIREIEARGLKSEGLYRVSGFTEHIEDVKMAFDRDGEKADISANVYPDINIITGALKLYFRDLPIPVITYDTYSKFIDAAKISNADERLEAVHEVLMLLPPAHYETLRYLMIHLKKVTMNEKDNFMNAENLGIVFGPTLMRPPEDSTLTTLHDMRYQKLIVQILIENEDVLF

SEQ ID NO: 143207 - DNA, 1853 bp, Artificial Sequence
  derived and/or modified sequence
cttttcccttatcctccagcagccgagacaaacatgcaaacagcaacctctattccagtttgataaaacaaattctgtggagaagggtgcagaggagaggaattgacttagtcaaattagaggggtcagtggaaatgtcatatgagttgggccttgaaagctgagtagaatttttccggaaaacaaatggagaaaaagacatttcaggaagagagaagagcttaggtaaaggcctggagatggatgctgaagaataccagcctcctatatggaaatcatacttatatcagttacagcaagaggcacctcgtcccaagagaatcatttgtcctcgggaggtggaaaacagaccaaaatattatggaagagagtttcatgggatcatctctcgggagcaggcggatgagcttcttggaggcgtggagggtgcctacatccttagagaaagccagcggcaaccaggatgctacacgctggctctcaggtttggaaaccagaccttaaactacaggctcttccacgacgggaaacactttgtgggtgagaagaggtttgagtcgattcatgatctggtgacagatggcttgataacactgtacatagaaacaaaagctgccgagtacatttcaaaaatgacaactaaccccatctatgaacacattggatatgccaccctactcagagaaaaagtatccagaaggctgagcaggtctaaaaatgaaccaagaaaaacaaacgtcacacatgaagaacacacagcggtggaaaagatctcctccctggttcgaagggctgccctcacacacaacgacaaccacttcaattatgagaagacacacaactttaaggtccacacgttccgaggcccacactggtgtgaatattgtgccaatttcatgtgggggctcatcgcccaaggggtccggtgctcagactgtggattgaacgtacacaaacagtgttccaagcacgttcccaatgactgccaacctgatctcaagaggatcaagaaagtgtactgttgtgacctcacaacacttgtgaaggctcacaacactcagagacccatggtggtagacatatgcattcgggaaattgaagcaagaggattaaaatcggaaggcctttacagagtctctgggttcactgaacacattgaagatgtcaaaatggcatttgacagagatggtgaaaaggccgatatatctgccaatgtctatccagacataaacatcatcactggagcccttaaactgtatttcagagacttacccatccctgtcatcacatatgatacctattccaaatttatagatgcagcaaaaatctccaatgcagatgagaggctggaagccgtccatgaagtgctgatgctgctgcctcctgcccactatgaaaccctccggtacctaatgatccacctcaaaaaggttactatgaatgaaaaagacaatttcatgaatgcagaaaatctggggatcgtgtttgggcccactctgatgaggccccctgaggacagcaccctgaccaccctgcatgatatgcggtaccaaaagctgattgtgcagattttaatagaaaacgaagacgttttattctaatccatcagggaaatgagctgaatggccccagcaccatccaagttgacacagctaaaggaataaaaacatttcttaccacttgatttgttttccaagcaagtgctagaatttcctggactgcagaggatcgctgagtggggtactgtgtctcatagacatgcgccacctccacgtgagaacaagggtgaaggtgagggaagcccctcaccttgggtcttttgctgtgcctcctatgtatgtctggtttgctgg

SEQ ID NO: 143208 - protein, 435 aa, Artificial Sequence
  derived and/or modified sequence
MIGGLFIYNHKGEVLISRVYRDDIGRNAVDAFRVNVIHARQQVRSPVTNIARTSFFHVKRSNIWLAAVTKQNVNAAMVFEFLYKMCDVMAAYFGKISEENIKNNFVLIYELLDEILDFGYPQNSETGALKTFITQQGIKSQHQTKEEQSQITSQVTGQIGWRREGIKYRRNELFLDVLESVNLLMSPQGQVLSAHVSGRVVMKSYLSGMPECKFGMNDKIVIEKQGKGTADETSKSGKQSIAIDDCTFHQCVRLSKFDSERSISFIPPDGEFELMRYRTTKDIILPFRVIPLVREVGRTKLEVKVVIKSNFKPSLLAQKIEVRIPTPLNTSGVQVICMKGKAKYKASENAIVWKIKRMAGMKESQISAEIELLPTNDKKKWARPPISMNFEVPFAPSGLKVRYLKVFEPKLNYSDHDVIKWVRYIGRSGIYETRC

SEQ ID NO: 143209 - protein, 113 aa, Artificial Sequence
  derived and/or modified sequence
MIGGLFIYNHKGEVLISRVYRDDIGRNAVDAFRVNVIHARQQVRSPVTNIARTSFFHVKRSNIWLAAVTKQNVNAAMVFEFLYKMCDVMAAYFGKISEENIKNNFVLIYELLD

SEQ ID NO: 143210 - protein, 375 aa, Artificial Sequence
  derived and/or modified sequence
MIGGLFIYNHKGEVLISRVYRDDIGRNAVAAYFGKISEENIKNNFVLIYELLDEILDFGYPQNSETGALKTFITQQGIKSQHQTKEEQSQITSQVTGQIGWRREGIKYRRNELFLDVLESVNLLMSPQGQVLSAHVSGRVVMKSYLSGMPECKFGMNDKIVIEKQGKGTADETSKSGKQSIAIDDCTFHQCVRLSKFDSERSISFIPPDGEFELMRYRTTKDIILPFRVIPLVREVGRTKLEVKVVIKSNFKPSLLAQKIEVRIPTPLNTSGVQVICMKGKAKYKASENAIVWKIKRMAGMKESQISAEIELLPTNDKKKWARPPISMNFEVPFAPSGLKVRYLKVFEPKLNYSDHDVIKWVRYIGRSGIYETRC

SEQ ID NO: 143211 - DNA, 1308 bp, Artificial Sequence
  derived and/or modified sequence
atgatcggtggactgttcatttacaatcataagggggaagtgttgatttcaagagtctatcgggatgacattgggagaaatgcagtcgacgccttcagagtaaatgtcatacacgccaggcagcaagtcagaagtccggtcaccaatatcgccagaaccagcttctttcacgtaaagcggtcaaatatttggttggccgccgtcactaagcagaatgtaaacgcggcaatggtgtttgaattcttgtataagatgtgcgatgtcatggccgcttacttcggcaagattagtgaagagaacataaagaataatttcgttctgatatacgagcttcttgacgaaattcttgacttcggctacccacagaatagtgagactggcgctctgaagacctttatcacccagcagggtattaagagccagcaccaaactaaggaggagcagtcacagattaccagccaagtcactggacagattggctggcgcagagaaggtattaagtacaggcgaaatgagctttttcttgacgtcctggaatcagtgaacctgttgatgtctccacagggacaggtcttgagtgctcacgtctcaggcagggttgtcatgaagtcctacctgtcaggtatgcccgagtgtaagtttggcatgaacgacaaaattgtgattgagaagcaaggcaaagggactgctgacgaaacaagcaaatccggtaaacaaagtatcgcaattgacgactgtaccttccatcaatgtgtgagactgagcaagtttgattccgagcgctccatctctttcatccctcccgacggggagttcgaactaatgcggtacagaacaactaaggacattatcctcccgttccgagtcatccctctggtaagggaagtgggtaggaccaaattagaagtaaaggtcgtaattaaatccaactttaagccaagtctacttgctcagaaaattgaggtccgtatccccactcctcttaacacgagcggtgtccaggtgatctgtatgaagggaaaggctaagtacaaggcctccgaaaatgccattgtgtggaagatcaaacgcatggccggaatgaaggaatcccaaatctcagcggagatcgagctgctgccaacaaacgacaagaaaaaatgggcccgcccgcccattagcatgaattttgaggtcccttttgccccttctggactcaaggtgcgatacctgaaggtctttgagcctaagcttaattacagcgaccatgacgtgatcaaatgggtccggtatatcgggaggagtggtatctatgaaacacgatgctag

SEQ ID NO: 143212 - DNA, 1128 bp, Artificial Sequence
  derived and/or modified sequence
atgattggggggctttttatttacaatcacaaaggggaggtgctgatctcccgggtttacagggacgatatcggtagaaatgctgtggcagcatacttcggcaaaatctccgaggaaaatataaagaacaatttcgtcttaatttacgagctcctggatgaaatactcgacttcgggtacccccagaactcggagactggagccttgaaaacgtttataactcagcaaggtattaagtctcaacatcagaccaaagaggaacagtctcagataacatcacaagtgaccggccagatcggatggcgaagagaaggtatcaagtatagacgaaatgagctcttcctcgatgttttggaatccgtgaatctgctaatgtccccccaggggcaggtccttagtgctcacgtctccggccgagttgtcatgaagtcatatctgagtggcatgcccgagtgtaaattcgggatgaacgataaaatcgtcattgagaaacagggaaagggaaccgctgatgaaacgagcaaatcaggtaaacagagtatagcaattgacgactgtacgtttcatcagtgcgtgcgtctctccaaattcgactccgaaagatctatatcttttatccccccagacggcgagttcgagttaatgagataccggacaaccaaggacataatactgccctttcgcgtaattcccttggttagagaggtgggacgtacaaaacttgaggtcaaggttgtcattaaaagtaattttaaaccaagtttattggcccagaagatcgaggttagaatacccacccccctcaacaccagcggggtgcaagtgatttgcatgaaaggaaaagccaagtataaagccagcgaaaacgcaatcgtgtggaaaatcaagcgcatggccgggatgaaggaatcccagatctctgcggagatcgaattgttgccaacgaatgataagaaaaaatgggctcgaccgcccatcagcatgaactttgaggttccgtttgccccgtctgggctgaaggtgcgataccttaaggtcttcgaacctaaattgaattacagtgatcacgacgtcataaaatgggtccggtacatcggcaggtcaggtatttatgaaacacgctgctag

SEQ ID NO: 143213 - DNA, 1931 bp, Artificial Sequence
  derived and/or modified sequence
actgcggtgaaagccgaggcagcgggcagacgagcagggggcgggcggacatcttgggatccggagagtggccgggccggcagagcagggggccgaggacaccaggtctgttctcagagcgatgggccgcggagactgatctgccgccatgattggaggcttattcatctataatcacaagggggaggtgctcatctcccgagtctaccgagatgacatcgggaggaacgcagtggatgcctttcgggtcaatgttatccatgcccggcagcaggtgcgcagccccgtcaccaacattgctcgcaccagcttcttccacgttaagcggtccaacatttggctggcagcagtcaccaagcagaatgtcaacgctgccatggtcttcgaattcctctataagatgtgtgacgtgatggctgcctactttggcaagatcagcgaggaaaacatcaagaacaattttgtgctcatatatgagctgctggatgagattctagactttggctacccacagaattccgagacaggcgcgctgaaaaccttcatcacgcagcagggcatcaagagtcagcatcagacaaaagaagagcagtcacagatcaccagccaggtaactgggcagattggctggcggcgagagggtatcaagtatcgtcggaatgagctcttcctggatgtgctggagagtgtgaacctgctcatgtccccacaagggcaggtgctgagtgcccatgtgtcgggccgggtggtgatgaagagctacctgagtggcatgcctgaatgcaagtttgggatgaatgacaagattgttattgaaaagcagggcaaaggcacagctgatgaaacaagcaagagcgggaagcaatcaattgccattgatgactgcaccttccaccagtgtgtgcgactcagcaagtttgactctgaacgcagcatcagctttatcccgccagatggagagtttgagcttatgaggtatcgcacaaccaaggacatcatccttcccttccgggtgatcccgctagtgcgagaagtgggacgcaccaaactggaggtcaaggtggtcatcaagtccaactttaaaccctcactgctggctcagaagatcgaggtgaggatcccaaccccactgaacacaagcggggtgcaggtgatctgcatgaaggggaaggccaagtacaaggccagcgagaatgccatcgtgtggaagatcaagcgcatggcaggcatgaaggaatcgcagatcagcgcagagattgagcttctgcctaccaacgacaagaagaaatgggctcgaccccccatttccatgaactttgaggtgccattcgcgccctctggcctcaaggtgcgctacttgaaggtgtttgaaccgaagctgaactacagcgaccatgatgtcatcaaatgggtgcgctacattggccgcagtggcatttatgaaactcgctgctagctgccactaggcagctagcccacctccccagccaccctcctccacaggtccaggtgccgctccctcccccaccacacatcagtgtctcctccctcctgctttgctgccttccctttgcaccagcccgagtctaggtctgggccaagcacattacaagtgggaccggtggagcagcccctgggctccctgggcaggggagttctgaggctcctgctctcccatccacctgtctgtcctggcctaatgccaggctctgagttctgtgaccaaagccaggtgggttccctttccttcccacccctgtggccacagctctggagtgggagggttggttgcccctcacctcagagctcccccaaaggccagtaatggatccccggcctcagtccctactctgctttgggatagtgtgagcttcattttgtacacgtgtgacttcgtccagttacaaacccaataaactctgtagagtgga

SEQ ID NO: 143214 - DNA, 1750 bp, Artificial Sequence
  derived and/or modified sequence
actgcggtgaaagccgaggcagcgggcagacgagcagggggcgggcggacatcttgggatccggagagtggccgggccggcagagcagggggccgaggacaccaggtctgttctcagagcgatgggccgcggagactgatctgccgccatgattggaggcttattcatctataatcacaagggggaggtgctcatctcccgagtctaccgagatgacatcgggaggaacgcagtggctgcctactttggcaagatcagcgaggaaaacatcaagaacaattttgtgctcatatatgagctgctggatgagattctagactttggctacccacagaattccgagacaggcgcgctgaaaaccttcatcacgcagcagggcatcaagagtcagcatcagacaaaagaagagcagtcacagatcaccagccaggtaactgggcagattggctggcggcgagagggtatcaagtatcgtcggaatgagctcttcctggatgtgctggagagtgtgaacctgctcatgtccccacaagggcaggtgctgagtgcccatgtgtcgggccgggtggtgatgaagagctacctgagtggcatgcctgaatgcaagtttgggatgaatgacaagattgttattgaaaagcagggcaaaggcacagctgatgaaacaagcaagagcgggaagcaatcaattgccattgatgactgcaccttccaccagtgtgtgcgactcagcaagtttgactctgaacgcagcatcagctttatcccgccagatggagagtttgagcttatgaggtatcgcacaaccaaggacatcatccttcccttccgggtgatcccgctagtgcgagaagtgggacgcaccaaactggaggtcaaggtggtcatcaagtccaactttaaaccctcactgctggctcagaagatcgaggtgaggatcccaaccccactgaacacaagcggggtgcaggtgatctgcatgaaggggaaggccaagtacaaggccagcgagaatgccatcgtgtggaagatcaagcgcatggcaggcatgaaggaatcgcagatcagcgcagagattgagcttctgcctaccaacgacaagaagaaatgggctcgaccccccatttccatgaactttgaggtgccattcgcgccctctggcctcaaggtgcgctacttgaaggtgtttgaaccgaagctgaactacagcgaccatgatgtcatcaaatgggtgcgctacattggccgcagtggcatttatgaaactcgctgctagctgccactaggcagctagcccacctccccagccaccctcctccacaggtccaggtgccgctccctcccccaccacacatcagtgtctcctccctcctgctttgctgccttccctttgcaccagcccgagtctaggtctgggccaagcacattacaagtgggaccggtggagcagcccctgggctccctgggcaggggagttctgaggctcctgctctcccatccacctgtctgtcctggcctaatgccaggctctgagttctgtgaccaaagccaggtgggttccctttccttcccacccctgtggccacagctctggagtgggagggttggttgcccctcacctcagagctcccccaaaggccagtaatggatccccggcctcagtccctactctgctttgggatagtgtgagcttcattttgtacacgtgtgacttcgtccagttacaaacccaataaactctgtagagtgg

SEQ ID NO: 143215 - DNA, 1308 bp, Artificial Sequence
  derived and/or modified sequence
atgattggaggcctcttcatctacaaccacaagggggaggtgctgatcagccgggtgtacagagatgacatcggcagaaatgctgtggatgccttccgggtgaatgtcatccacgcccggcagcaggtgcgcagccctgtgaccaacatcgcccggaccagcttcttccacgtgaagaggagcaacatctggctggccgctgtgaccaagcagaatgtgaatgctgccatggtgtttgagttcctgtacaagatgtgtgatgtgatggccgcctactttgggaagatcagcgaggagaacatcaagaacaactttgtgctgatctatgagctgctggatgagatcctggactttggctacccccagaacagcgagaccggggccctgaagaccttcatcacccagcagggcatcaagagccagcaccagaccaaggaggagcagagccagatcaccagccaggtgacaggccagatcggctggaggcgggagggcatcaagtacagaagaaatgaactcttcctggatgtgctggagagcgtgaacctgctgatgagcccccagggccaggtgctgagcgcccacgtgtctggccgggtggtgatgaagagctacctgagcggcatgcctgagtgcaagtttggcatgaatgacaagatcgtcatcgagaagcagggcaaaggaacagcagatgagaccagcaagagcggcaagcagagcatcgccattgatgactgcaccttccaccagtgtgtgcggctgagcaagtttgattctgagaggagcatctccttcatccccccagatggagaatttgagctgatgagataccgcaccaccaaggacatcatcctgcccttccgggtcatccccctggtgcgggaggtgggccgcaccaagctggaggtgaaggtggtgatcaagagcaacttcaagcccagcctgctggcccagaagattgaggtgcgcatccccacccccctgaacaccagcggcgtgcaggtgatctgcatgaagggcaaggccaagtacaaggcctctgaaaatgccatcgtgtggaagatcaagaggatggccggcatgaaggagagccagatctctgctgagattgagctgctgcccaccaatgacaagaagaagtgggcccggccccccatctccatgaactttgaggtgccctttgcccccagcggcctgaaggtgcgctacctgaaggtgtttgagcccaagctgaactacagcgaccatgatgtgatcaagtgggtgcgctacatcggccgcagcggcatctatgagacccgctgctag

SEQ ID NO: 143216 - DNA, 1128 bp, Artificial Sequence
  derived and/or modified sequence
atgattggaggcctcttcatctacaaccacaagggggaggtgctgatcagccgggtgtacagagatgacatcggcagaaatgctgtggccgcctactttgggaagatcagcgaggagaacatcaagaacaactttgtgctgatctatgagctgctggatgagatcctggactttggctacccccagaacagcgagaccggggccctgaagaccttcatcacccagcagggcatcaagagccagcaccagaccaaggaggagcagagccagatcaccagccaggtgacaggccagatcggctggaggcgggagggcatcaagtacagaagaaatgaactcttcctggatgtgctggagagcgtgaacctgctgatgagcccccagggccaggtgctgagcgcccacgtgtctggccgggtggtgatgaagagctacctgagcggcatgcctgagtgcaagtttggcatgaatgacaagatcgtcatcgagaagcagggcaaaggaacagcagatgagaccagcaagagcggcaagcagagcatcgccattgatgactgcaccttccaccagtgtgtgcggctgagcaagtttgattctgagaggagcatctccttcatccccccagatggagaatttgagctgatgagataccgcaccaccaaggacatcatcctgcccttccgggtcatccccctggtgcgggaggtgggccgcaccaagctggaggtgaaggtggtgatcaagagcaacttcaagcccagcctgctggcccagaagattgaggtgcgcatccccacccccctgaacaccagcggcgtgcaggtgatctgcatgaagggcaaggccaagtacaaggcctctgaaaatgccatcgtgtggaagatcaagaggatggccggcatgaaggagagccagatctctgctgagattgagctgctgcccaccaatgacaagaagaagtgggcccggccccccatctccatgaactttgaggtgccctttgcccccagcggcctgaaggtgcgctacctgaaggtgtttgagcccaagctgaactacagcgaccatgatgtgatcaagtgggtgcgctacatcggccgcagcggcatctatgagacccgctgctag

SEQ ID NO: 143217 - DNA, 1308 bp, Artificial Sequence
  derived and/or modified sequence
atgatcggcggcctgttcatctacaaccacaagggcgaggtgctgatctcaagggtgtaccgcgacgatataggacggaatgcggtggatgcattcagagtgaacgtcatccacgcccgacagcaggtgaggtctccagtcacaaatatagcacggacatctttcttccacgtgaaaagatccaacatctggcttgccgcagtcaccaagcagaatgtgaatgcagccatggtattcgagtttctttataagatgtgcgacgtcatggcagcctactttgggaagatcagcgaagaaaatatcaagaacaacttcgtactgatttacgagctactcgacgagatcctcgatttcggctatccacagaactccgaaactggggctctgaagacctttataacccagcaggggatcaagtcacagcaccagacgaaagaggaacagagtcaaatcacatcccaagtcacagggcagattggatggcgccgggagggcatcaaataccgcagaaacgagctgttcctggatgtgctcgagtctgttaaccttctgatgtcccctcaaggacaggtgctgtcagcccacgtcagcggccgcgttgtgatgaaaagctacctgagcggaatgcccgagtgcaaatttggcatgaacgacaagatcgtcatcgaaaaacagggcaaagggacagctgatgaaaccagcaaatcaggcaagcagtctatcgccatcgacgattgtacatttcatcaatgtgttagattgtccaaatttgactctgaaagatccatcagctttattccacctgatggcgagttcgagcttatgcgttataggactaccaaagatattatactgccttttcgagtgattcccttggttagagaggttgggcggactaaacttgaagtgaaggtggtgatcaagagtaacttcaagccctctctgctggcacagaaaattgaggtgcgaattcctacaccactgaataccagcggcgttcaggtgatttgtatgaaaggaaaggcgaagtacaaagcatcagaaaatgccattgtgtggaaaattaagcggatggcaggaatgaaagaatcccagatctctgccgaaattgaactgctgcccacaaacgataaaaagaagtgggcccgaccacctataagcatgaatttcgaagtgccctttgccccgtctgggctgaaggtgcggtaccttaaggtctttgaaccgaagctcaattattctgaccacgacgtcattaaatgggtgcgctatatcggacgcagcggtatctatgagactagatgctag

SEQ ID NO: 143218 - DNA, 1128 bp, Artificial Sequence
  derived and/or modified sequence
atgatcggcggcctgttcatctacaaccacaagggcgaggtgctgattagccgagtttatagagacgacataggcagaaacgccgtcgcggcttatttcgggaagatcagtgaagaaaacatcaagaataatttcgtactaatatacgaattgctggacgagatcctggatttcggatatccacagaatagtgagaccggggctctaaaaaccttcatcacacagcaagggattaagtcccagcatcaaaccaaggaggaacagtcccagataaccagccaggtgaccggacagatcggctggcgtcgcgaggggatcaagtacagacgcaatgagctgtttctggatgtgcttgaaagcgtaaatttgctgatgagcccccagggacaggtgctaagcgcccacgtgagtggtcgcgtggtgatgaagagctacttatccggaatgcctgaatgcaaatttggcatgaacgacaaaatcgtgatagaaaagcagggcaaggggacggctgatgagacgtctaaaagcgggaagcagtctatcgcaatcgacgattgcacttttcatcagtgtgtgcggctgtctaagtttgatagcgagcgctctatctccttcatccccccagatggggaattcgaactcatgcgctaccgcaccaccaaggacatcattcttccgttccgggtcattcctctggtgagggaagtgggtcgaactaaactggaagtgaaggtcgtcattaagtcaaacttcaaaccaagcctcctagcccaaaaaattgaagtgcggattccgacccccctgaacacaagcggtgtccaggtcatttgcatgaaggggaaggccaagtacaaagcgagtgagaacgctatcgtatggaagatcaagagaatggctggcatgaaggaaagtcagattagtgcggagattgagttgttgcctaccaatgataaaaagaagtgggcccggcccccaatctcgatgaattttgaagtcccttttgccccgtccggtctcaaagtgagatacctcaaagtgttcgagcccaagctcaattatagcgaccacgacgtaattaagtgggtaagatacatcgggaggtctggcatttatgaaacacgttgttag

SEQ ID NO: 143219 - DNA, 1308 bp, Artificial Sequence
  derived and/or modified sequence
atgattggagggctgtttatctataaccacaaaggtgaagtgctcatctcccgcgtatacagggatgatatcgggagaaatgctgtggacgctttccgagtcaacgtgattcacgctcggcaacaggtccggtctccagtcaccaacatcgcaaggaccagttttttccatgtgaagagatcaaatatctggttggcagccgtaacgaagcagaacgtgaatgccgcaatggtctttgagtttctgtacaagatgtgcgacgttatggccgcatacttcggaaagatttctgaagaaaatattaaaaacaactttgtcttgatttacgaactgctggacgagatactggacttcggctacccccagaattctgaaacaggagccctcaaaacctttatcacccagcaaggtatcaagtcgcagcaccagactaaagaggaacaaagccagatcacgtcacaggtgactggccaaatcggctggagaagagagggcatcaagtatcggcgaaacgaactgtttttggatgtgcttgaatcagttaacttgcttatgtcgccgcagggccaggtacttagcgcccacgtgtctggccgagtcgttatgaagagttacttgagtggcatgccggaatgtaaattcgggatgaacgacaaaatagtcatcgagaagcaaggaaagggaacagccgacgagacgagcaaatccggaaagcagtcaattgctatcgatgattgcacctttcatcagtgcgtgaggctcagcaagttcgattctgagagatcaattagctttattcccccagacggagaattcgagcttatgaggtaccgcacaacaaaagatattattcttcctttcagagtcattcctttggtgagggaggtaggacgcaccaagttggaggtgaaggtggtcataaaatcaaactttaaaccttctctcttggcccagaaaatcgaagtaagaattcccacacccctcaatacgtctggagttcaggtgatatgtatgaaggggaaggctaagtacaaggctagcgagaacgcgatagtttggaaaattaagcggatggcaggcatgaaagaatcacagatttccgctgagatcgagctgctcccaacgaacgataagaaaaaatgggcaaggcccccaatcagtatgaacttcgaggtcccctttgcgccatcaggattgaaggtgagatatctgaaggtatttgagcccaaactcaattattcagaccatgatgtcattaagtgggtgcgctatattggcagatcaggaatctacgaaacgcgctgttag

SEQ ID NO: 143220 - DNA, 1128 bp, Artificial Sequence
  derived and/or modified sequence
atgattgggggactttttatttataatcacaaaggggaggttttgatcagtagggtatatagggatgatataggtcggaacgccgtggcagcctacttcggaaaaatttccgaggagaacattaagaataactttgttctcatttacgaactgctggacgagatcctggacttcgggtatccacagaattcggagacaggcgctttgaagactttcatcacacagcaaggcatcaaaagccagcaccagacaaaggaagagcagtcccagattacctctcaggtgactggacagatcggttggcgcagggagggaataaaatatagacgaaacgaactgtttctggatgtgctggagagcgtgaacctgctcatgtcaccacagggccaagtgttgagcgcccacgtgtccggaagagtggtgatgaagagctacttgtctggcatgcccgagtgcaagttcgggatgaatgataagattgtgattgagaaacaggggaagggcaccgctgacgaaacctctaaatcggggaagcagagcattgctatcgatgactgcactttccaccagtgtgtacgtctttcaaaattcgattcggaacgcagcataagctttattcctccggacggggagtttgagcttatgcgttatcgtaccactaaggatattatcctgccgtttagagtgatacctctggttcgcgaggtgggccgaacaaagctggaggtcaaggtggtgataaagtcgaatttcaagcccagtctcctggctcagaagatcgaggtgagaatacccacaccgctgaacacctccggggttcaggtcatttgcatgaaagggaaagctaaatataaagcctctgaaaacgctatagtgtggaagattaaacgtatggccggaatgaaggagtctcagatctctgcagagattgaactactcccaactaacgacaagaaaaagtgggccagacctcccatatcaatgaacttcgaagtaccattcgctcctagcggcctgaaggtgagatatctgaaagtgttcgagcctaaattaaattattccgaccacgacgtgataaagtgggtgagatatatcggccgatcagggatctacgagaccaggtgctag

SEQ ID NO: 143221 - DNA, 1308 bp, Artificial Sequence
  derived and/or modified sequence
atgatcggcggcctgttcatctacaaccacaagggcgaggtgctgatcagcagagtgtacagagacgacatcggcagaaacgccgtggacgccttcagagtgaacgtgatccacgccagacagcaggtgagaagccccgtgaccaacatcgccagaaccagcttcttccacgtgaagagaagcaacatctggctggccgccgtgaccaagcagaacgtgaacgccgccatggtgttcgagttcctgtacaagatgtgcgacgtgatggccgcctacttcggcaagatcagcgaggagaacatcaagaacaacttcgtgctgatctacgagctgctggacgagatcctggacttcggctacccccagaacagcgagaccggcgccctgaagaccttcatcacccagcagggcatcaagagccagcaccagaccaaggaggagcagagccagatcaccagccaggtgaccggccagatcggctggagaagagagggcatcaagtacagaagaaacgagctgttcctggacgtgctggagagcgtgaacctgctgatgagcccccagggccaggtgctgagcgcccacgtgagcggcagagtggtgatgaagagctacctgagcggcatgcccgagtgcaagttcggcatgaacgacaagatcgtgatcgagaagcagggcaagggcaccgccgacgagaccagcaagagcggcaagcagagcatcgccatcgacgactgcaccttccaccagtgcgtgagactgagcaagttcgacagcgagagaagcatcagcttcatcccccccgacggcgagttcgagctgatgagatacagaaccaccaaggacatcatcctgcccttcagagtgatccccctggtgagagaggtgggcagaaccaagctggaggtgaaggtggtgatcaagagcaacttcaagcccagcctgctggcccagaagatcgaggtgagaatccccacccccctgaacaccagcggcgtgcaggtgatctgcatgaagggcaaggccaagtacaaggccagcgagaacgccatcgtgtggaagatcaagagaatggccggcatgaaggagagccagatcagcgccgagatcgagctgctgcccaccaacgacaagaagaagtgggccagaccccccatcagcatgaacttcgaggtgcccttcgcccccagcggcctgaaggtgagatacctgaaggtgttcgagcccaagctgaactacagcgaccacgacgtgatcaagtgggtgagatacatcggcagaagcggcatctacgagaccagatgctag

SEQ ID NO: 143222 - DNA, 1128 bp, Artificial Sequence
  derived and/or modified sequence
atgatcggcggcctgttcatctacaaccacaagggcgaggtgctgatcagcagagtgtacagagacgacatcggcagaaacgccgtggccgcctacttcggcaagatcagcgaggagaacatcaagaacaacttcgtgctgatctacgagctgctggacgagatcctggacttcggctacccccagaacagcgagaccggcgccctgaagaccttcatcacccagcagggcatcaagagccagcaccagaccaaggaggagcagagccagatcaccagccaggtgaccggccagatcggctggagaagagagggcatcaagtacagaagaaacgagctgttcctggacgtgctggagagcgtgaacctgctgatgagcccccagggccaggtgctgagcgcccacgtgagcggcagagtggtgatgaagagctacctgagcggcatgcccgagtgcaagttcggcatgaacgacaagatcgtgatcgagaagcagggcaagggcaccgccgacgagaccagcaagagcggcaagcagagcatcgccatcgacgactgcaccttccaccagtgcgtgagactgagcaagttcgacagcgagagaagcatcagcttcatcccccccgacggcgagttcgagctgatgagatacagaaccaccaaggacatcatcctgcccttcagagtgatccccctggtgagagaggtgggcagaaccaagctggaggtgaaggtggtgatcaagagcaacttcaagcccagcctgctggcccagaagatcgaggtgagaatccccacccccctgaacaccagcggcgtgcaggtgatctgcatgaagggcaaggccaagtacaaggccagcgagaacgccatcgtgtggaagatcaagagaatggccggcatgaaggagagccagatcagcgccgagatcgagctgctgcccaccaacgacaagaagaagtgggccagaccccccatcagcatgaacttcgaggtgcccttcgcccccagcggcctgaaggtgagatacctgaaggtgttcgagcccaagctgaactacagcgaccacgacgtgatcaagtgggtgagatacatcggcagaagcggcatctacgagaccagatgctag

SEQ ID NO: 143223 - protein, 142 aa, Artificial Sequence
  derived and/or modified sequence
MIRFILIQNRAGKTRLAKWYMQFDDDEKQKLIEEVHAVVTVRDAKHTNFVEFRNFKIIYRRYAGLYFCICVDVNDNNLAYLEAIHNFVEVLNEYFHNVCELDLVFNFYKVYTVVDEMFLAGEIRETSQTKVLKQLLMLQSLE

SEQ ID NO: 143224 - DNA, 429 bp, Artificial Sequence
  derived and/or modified sequence
atgatccgctttatcctcatccagaatcgcgctggcaaaactagattagctaagtggtacatgcagttcgacgatgatgaaaaacagaaacttatcgaggaggtccatgcagtcgttaccgttagggatgcaaagcacacgaatttcgtagagttcagaaactttaaaatcatctaccgtcggtatgctggactatatttttgtatctgcgttgacgtcaatgacaacaatctcgcctaccttgaagctattcacaactttgttgaagtgctcaacgagtatttccacaacgtatgcgagctcgacctggtctttaatttttacaaagtgtacactgtggttgatgagatgtttctagccggggagatccgtgagacaagccaaaccaaggtgttgaagcagctgctgatgttacaatctcttgagtag

SEQ ID NO: 143225 - DNA, 890 bp, Artificial Sequence
  derived and/or modified sequence
atcttcacccaggctggcccctttggtgaaactacaactcccaggggtctgtgcgcgagaaggcaggcgggtttttctaccggaagtccgctctagctctgggccctacaactgcaccctgagccggagctgcccagtcgccgcgggaccggggccgctggggtctggacgggggtcgccatgatccgctttatcctcatccagaaccgggcaggcaagacgcgcctggccaagtggtacatgcagtttgatgatgatgagaaacagaagctgatcgaggaggtgcatgccgtggtcaccgtccgagacgccaaacacaccaactttgtggagttccggaactttaagatcatttaccgccgctatgctggcctctacttctgcatctgtgtggatgtcaatgacaacaacctggcttacctggaggccattcacaacttcgtggaggtcttaaacgaatatttccacaatgtctgtgaactggacctggtgttcaacttctacaaggtttacacggtcgtggacgagatgttcctggctggcgaaatccgagagaccagccagacgaaggtgctgaaacagctgctgatgctacagtccctggagtgagggcaggcgagccccaccccggccccggcccctcctggactcgcctgctcgcttccccttcccaggcccgtggccaacccagcagtccttccctcagctgcctaggaggaagggacccagctgggtctgggccacaagggaggagactgcaccccactgcctctgggccctggctgtgggcagaggccaccgtgtgtgtcccgagtaaccgtgccgttgtcgtgtgatgccataagcgtctgtgcgtggagtccccaataaacctgtggtcctgcctggcc

SEQ ID NO: 143226 - DNA, 429 bp, Artificial Sequence
  derived and/or modified sequence
atgatccgcttcatcctgatccagaacagagctgggaagacccggctggccaagtggtacatgcagtttgatgatgatgagaagcagaagctgattgaggaggtgcatgctgtggtgacagtgagagatgccaagcacaccaactttgtggagttcaggaacttcaagatcatctaccgccgctatgccggcctgtacttctgcatctgtgtggatgtgaatgacaacaacctggcctacctggaggccatccacaactttgtggaggtgctgaatgagtacttccacaacgtgtgtgagctggacctggtgttcaacttctacaaggtgtacacagtggtggatgagatgttcctggccggggagatccgggagaccagccagaccaaggtgctgaagcagctgctgatgctgcagagcctggagtag

SEQ ID NO: 143227 - DNA, 429 bp, Artificial Sequence
  derived and/or modified sequence
atgatccggttcatcctgatccagaaccgggccggcaagacccggttagccaagtggtacatgcaatttgacgacgacgaaaaacagaagctcatcgaagaagtccatgccgtggtcactgttcgggatgctaaacacacgaactttgtggagttcaggaattttaaaataatttatcgcagatacgcgggcttgtatttctgcatttgcgttgacgtgaatgacaacaacctcgcctaccttgaggctattcacaacttcgtggaggtgcttaatgagtacttccacaacgtttgtgagctggatttggtgttcaatttctacaaggtctacaccgtcgtcgacgaaatgtttcttgcgggggaaatccgcgagactagccagaccaaggtcctgaaacagctgctgatgcttcagtctttggagtag

SEQ ID NO: 143228 - DNA, 429 bp, Artificial Sequence
  derived and/or modified sequence
atgattcggttcatactgatacagaaccgggctggcaagacccgcttagccaaatggtacatgcagttcgacgatgatgaaaaacagaagctaatcgaggaggtgcacgccgtggttacagtcagagacgccaagcatacaaattttgtggagtttaggaatttcaaaatcatctacagacgttacgcaggactctacttttgtatctgtgtagacgtgaatgacaataacctggcgtatcttgaagccattcataattttgtggaggttcttaacgagtattttcacaatgtgtgtgaactggatctcgtgtttaacttctacaaggtttatactgttgtggacgaaatgttcttggctggagaaatccgggaaacgtcccagacaaaggttctgaagcagcttcttatgctgcagtctctcgagtag

SEQ ID NO: 143229 - DNA, 429 bp, Artificial Sequence
  derived and/or modified sequence
atgatcagattcatcctgatccagaacagagccggcaagaccagactggccaagtggtacatgcagttcgacgacgacgagaagcagaagctgatcgaggaggtgcacgccgtggtgaccgtgagagacgccaagcacaccaacttcgtggagttcagaaacttcaagatcatctacagaagatacgccggcctgtacttctgcatctgcgtggacgtgaacgacaacaacctggcctacctggaggccatccacaacttcgtggaggtgctgaacgagtacttccacaacgtgtgcgagctggacctggtgttcaacttctacaaggtgtacaccgtggtggacgagatgttcctggccggcgagatcagagagaccagccagaccaaggtgctgaagcagctgctgatgctgcagagcctggagtag

SEQ ID NO: 143230 - protein, 454 aa, Artificial Sequence
  derived and/or modified sequence
MRHSKRTYCPDWDDKDWDYGKWRSSSSHKRRKRSHSSAQENKRCKYNHSKMCDSHYLESRSINEKDYHSRRYIDEYRNDYTQGCEPGHRQRDHESRYQNHSSKSSGRSGRSSYKSKHRIHHSTSHRRSHGDEIVDTLGEGAFGKVVECIDHKAGGRHVAVKIVKNVDRYCEAARSEIQVLEHLNTTDPNSTFRCVQMLEWFEHHGHICIVFELLGLSTYDFIKENGFLPFRLDHIRKMAYQICKSVNFLHSNKLTHTDLKPENILFVQSDYTEAYNPKIKRDERTLINPDIKVVDFGSATYDDEHHSTLVSTRHYRAPEVILALGWSQPCDVWSIGCILIEYYLGFTVFPTHDSKEHLAMMERILGPLPKHMIQKTRKRKYFHHDRLDWDEHSSAGRYVSRRCKPLKEFMLSQDVEHERLFDLIQKMLEYDPAKRITLREALKHPFFDLLKKSI

SEQ ID NO: 143231 - DNA, 1455 bp, Artificial Sequence
  derived and/or modified sequence
atgcggcactctaaaaggacctattgtcccgactgggatgataaggactgggactatggcaagtggcggtcgtcatcctcacacaaacgcaggaaaagaagccactcttcagcccaggagaacaagcgctgcaaatataaccattccaagatgtgtgattctcactacctggaaagcaggagcattaatgagaaagactaccattcgagacgatacattgacgaatacaggaatgattacacacagggctgtgaacccgggcacaggcagcgtgatcacgaatctcggtatcaaaaccactcaagtaagtcaagcggacggtctggccgtagctcctacaagtcgaagcaccggattcaccatagtacatctcatcgcagaagccacggcaagtcccatcgcagaaagcgtacccgctctgtcgaagatgatgaagagggacatcttatttgtcagtcgggggacgtgcttagtgcacgatacgagattgttgacacccttggggaaggcgccttcggaaaggtggtcgagtgtatcgatcataaggccggcggtaggcacgtggccgtgaagatcgtgaagaacgtggaccgatattgtgaagctgctaggagcgaaattcaggtgcttgaacatcttaacaccacagaccctaacagcacgtttcgttgcgtccaaatgctggagtggttcgaacaccacggccatatttgcatcgtgttcgaattgctagggttgtcaacttacgattttattaaggaaaatggcttcctgccctttaggctggatcatattagaaagatggcatatcagatctgcaagagcgtcaactttctgcactccaacaagcttactcacacagacctgaaacccgaaaatatcctgtttgtgcaaagtgattacactgaggcatataatcctaaaatcaaacgggacgaacgcaccttaataaatcctgatattaaagttgtggactttggctctgcaacctatgacgacgagcatcattccactctcgttagcacgcggcactaccgggcccccgaggtcatcctggccctgggttggagtcaaccttgcgatgtgtggtccattggttgcattttgatcgaatactatttagggttcaccgtgttccctactcacgattccaaggagcacttagcgatgatggagagaatcttaggcccactgcccaagcatatgatccagaaaacacgcaaaagaaagtatttccatcacgacaggctcgactgggatgagcattcatctgcagggaggtacgtctcccgccgctgtaaaccactgaaggagtttatgctgagccaagatgtcgaacacgagcggctgttcgacctcatccaaaaaatgctcgagtatgaccccgctaagcggatcactctgcgagaagctctcaaacaccctttttttgatttactgaagaagtccatctag

SEQ ID NO: 143232 - DNA, 1365 bp, Artificial Sequence
  derived and/or modified sequence
atgaggcacagcaaaagaacatattgtccggattgggacgataaggactgggactatgggaagtggaggagttcaagctctcataagcgtcggaaacgttcacacagctcggctcaggagaataagcgctgtaaatacaatcattcaaaaatgtgcgattcacattatctggaatccagatctattaacgagaaagattatcactcacgaaggtacatagatgagtaccgcaacgactacacgcagggctgcgaaccaggacatagacagcgcgaccacgaaagcaggtatcagaatcacagcagcaagtcatctggcagatccggaagatcctcctataagtccaagcacaggattcaccactccaccagccacaggagatcacacggtgatgagatcgtggataccctcggggaaggcgcatttggaaaagtagtcgaatgtattgatcacaaagccggagggcggcatgtagccgtgaaaatcgtcaagaacgtcgacaggtattgtgaagcggcaaggtctgaaatacaggttctcgaacacctcaacacaacagatcccaacagcaccttcagatgtgtgcaaatgctggagtggttcgaacatcatggacatatctgcatcgtttttgaattactggggctgtctacctacgactttatcaaggagaacggcttcttacctttcaggctggatcacatcaggaaaatggcgtatcagatctgcaagtctgtcaattttctgcactcaaataaacttacacatacggatctgaaacctgagaatatcctttttgtacagtccgactatactgaagcttacaatcccaaaataaaacgtgatgagcggacgttgataaatcctgatatcaaggtcgtggacttcggttccgccacttatgatgacgagcaccactctactctggtctccacaagacactacagagccccagaagtgattctggccctgggatggtctcagccttgcgatgtgtggagcatcggatgcatactgatcgagtactatttgggcttcacagtctttcctacccatgatagcaaagagcacttagccatgatggaaaggatattgggtccccttcccaagcatatgattcaaaaaactcggaaacgcaagtattttcatcacgatagactggactgggacgaacattccagcgcaggaagatacgtgtctcggagatgcaagcccctgaaggagtttatgctgtcgcaggacgttgaacacgagcggctgttcgacctgatacaaaagatgctggagtacgatcccgcgaagaggatcaccctgcgagaagcattgaagcacccatttttcgatctcctgaaaaaaagcatctag

SEQ ID NO: 143233 - DNA, 1455 bp, Artificial Sequence
  derived and/or modified sequence
atgaggcacagcaagaggacctactgcccagactgggatgacaaggactgggactatggcaagtggaggagcagcagcagccacaagaggaggaagaggagccacagcagcgcccaggagaacaagcgctgcaagtacaaccacagcaagatgtgtgacagccactacctggagagccgcagcatcaatgagaaggactaccacagccgccgctacattgatgagtacagaaatgactacacccagggctgtgagcccggccaccggcagagggaccacgagagccgctaccagaaccacagcagcaagagcagcggccgcagcggccgcagcagctacaagagcaagcaccgcatccaccacagcaccagccaccggcgcagccacggcaagagccacaggaggaagaggaccaggtctgtggaggatgatgaggagggccacctgatctgccagagcggagatgtgctgagcgcccgctatgaaattgtggacaccctgggggagggcgccttcggcaaggtggtggagtgcatcgaccacaaggccggcggcagacatgtggccgtgaagatcgtgaagaatgtggaccgctactgtgaggccgcccggtctgagatccaggtgctggagcacctgaacaccacagaccccaacagcaccttccgctgtgtgcagatgctggagtggtttgagcaccacggccacatctgcatcgtgtttgagctgctgggcctgagcacctatgacttcatcaaggaaaatggcttcctgcccttccggctggaccacatcaggaagatggcctaccagatctgcaagtctgtgaacttcctgcacagcaacaagctgacccacacagacctgaagccagagaacatcctgtttgtgcagagcgactacacagaggcctacaaccccaagatcaagagagatgagaggaccctcatcaacccagacatcaaggtggtggactttggcagcgccacctatgatgatgagcaccacagcaccctggtgtccaccaggcactaccgggcccctgaggtgatcctggccctgggctggagccagccctgtgatgtgtggagcatcggctgcatcctgattgagtactacctgggcttcaccgtcttccccacccatgacagcaaggagcacctggccatgatggagcgcatcctgggccccctgcccaagcacatgatccagaagaccaggaagaggaagtacttccaccacgaccggctggactgggatgagcacagcagcgctggccgctacgtgtcccggcgctgcaagcccctgaaggagttcatgctgagccaggatgtggagcacgagcggctgtttgacctgatccagaagatgctggagtatgaccctgccaagaggatcaccctgcgggaggccctgaagcaccccttctttgacctgctgaagaagagcatctag

SEQ ID NO: 143234 - DNA, 1365 bp, Artificial Sequence
  derived and/or modified sequence
atgaggcacagcaagaggacctactgcccagactgggatgacaaggactgggactatggcaagtggaggagcagcagcagccacaagaggaggaagaggagccacagcagcgcccaggagaacaagcgctgcaagtacaaccacagcaagatgtgtgacagccactacctggagagccgcagcatcaatgagaaggactaccacagccgccgctacattgatgagtacagaaatgactacacccagggctgtgagcccggccaccggcagagggaccacgagagccgctaccagaaccacagcagcaagagcagcggccgcagcggccgcagcagctacaagagcaagcaccgcatccaccacagcaccagccaccggcgcagccatggagatgaaattgtggacaccctgggggagggcgccttcggcaaggtggtggagtgcatcgaccacaaggccggcggcagacatgtggccgtgaagatcgtgaagaatgtggaccgctactgtgaggccgcccggtctgagatccaggtgctggagcacctgaacaccacagaccccaacagcaccttccgctgtgtgcagatgctggagtggtttgagcaccacggccacatctgcatcgtgtttgagctgctgggcctgagcacctatgacttcatcaaggaaaatggcttcctgcccttccggctggaccacatcaggaagatggcctaccagatctgcaagtctgtgaacttcctgcacagcaacaagctgacccacacagacctgaagccagagaacatcctgtttgtgcagagcgactacacagaggcctacaaccccaagatcaagagagatgagaggaccctcatcaacccagacatcaaggtggtggactttggcagcgccacctatgatgatgagcaccacagcaccctggtgtccaccaggcactaccgggcccctgaggtgatcctggccctgggctggagccagccctgtgatgtgtggagcatcggctgcatcctgattgagtactacctgggcttcaccgtcttccccacccatgacagcaaggagcacctggccatgatggagcgcatcctgggccccctgcccaagcacatgatccagaagaccaggaagaggaagtacttccaccacgaccggctggactgggatgagcacagcagcgctggccgctacgtgtcccggcgctgcaagcccctgaaggagttcatgctgagccaggatgtggagcacgagcggctgtttgacctgatccagaagatgctggagtatgaccctgccaagaggatcaccctgcgggaggccctgaagcaccccttctttgacctgctgaagaagagcatctag

SEQ ID NO: 143235 - DNA, 1455 bp, Artificial Sequence
  derived and/or modified sequence
atgcggcacagcaagcggacctactgccccgactgggacgacaaggactgggactacggaaaatggcggtctagctcctcacataagcgccgtaagaggtctcactcctccgcacaagagaacaagcgctgtaagtacaaccactctaaaatgtgtgacagccattatcttgagtcacggtccattaacgaaaaggattatcattcccggaggtatatcgacgaatacaggaacgactacacacaggggtgtgaacctgggcaccgccagagagatcacgagagtcgctatcaaaaccactcatccaagagctctgggaggtctggcagatcctcctacaagagcaagcatcgaatccatcattcaacctcccatcgtagaagtcatggcaaatctcatcgtagaaagaggacgcggagtgtcgaggacgacgaagagggccacctgatatgtcagtcaggtgacgtgctgagcgcccgctatgagattgtggacactctgggtgaaggtgcattcggaaaggttgtggagtgtatcgaccataaggccggtggaagacacgtggcagttaaaattgtgaagaacgtggaccgctattgcgaagccgcccggtcagaaatccaggtccttgagcaccttaatactaccgatcccaattccacctttcgatgcgtgcagatgctcgaatggttcgaacaccatggacatatatgtatcgtgttcgagctgcttggactgtctacctatgatttcataaaggaaaacggctttctccccttccgactggaccacatccgaaaaatggcttaccaaatatgcaagtccgttaactttttacacagcaacaagctgacccatacggatctgaagccggagaacatcctgtttgttcagagcgactatactgaagcatacaatccaaaaataaagcgggacgaacgcaccctcatcaatcccgatataaaagtggttgacttcggcagcgctacatacgatgatgaacaccacagcacgctggtctccacaagacactacagggctccagaagtcatcctcgcactagggtggagccagccctgcgatgtttggtctatcggttgcatattgattgagtactaccttggttttacagtgtttccgacacacgattccaaagagcacctcgctatgatggagcgcattcttggacccctgcccaagcatatgattcagaagacaaggaaacgaaagtatttccatcacgaccgtcttgactgggatgaacattcaagcgccggcaggtacgtcagcagacggtgtaaaccgcttaaggaattcatgttgagtcaggacgtggaacacgagcggctgttcgatctgatccagaagatgctcgaatatgatccagctaaacgaatcaccctgcgggaggccctcaagcacccatttttcgacctcctaaaaaagagtatttag

SEQ ID NO: 143236 - DNA, 1365 bp, Artificial Sequence
  derived and/or modified sequence
atgcggcacagcaagcggacctactgccccgactgggacgacaaggactgggattacggcaaatggcgatcatctagcagtcacaagaggaggaagcgcagccatagttccgcgcaggaaaacaagcgttgcaagtacaatcattcaaagatgtgtgattctcactatctggagagtcgtagcataaacgaaaaagattaccacagcagacgctatatagatgagtaccggaatgattacacccaaggatgtgaaccaggacacagacaacgggatcacgaaagtcggtatcagaatcattcctctaagtcgtcaggccgctctggaagaagttcgtataaatctaaacatcgcatccaccattcaacatcccaccgcagaagtcatggtgacgagattgtggatacactgggggaaggtgccttcgggaaggtggttgagtgcattgatcataaggccgggggcagacatgtggctgtaaaaattgtgaaaaacgtggatagatattgcgaagccgccaggtcagaaattcaggtcctcgaacacctgaataccacagacccaaactccacctttaggtgcgttcagatgttggaatggttcgaacaccacggacatatctgtatcgtttttgagttactcggtctgagcacctatgactttataaaagaaaatggctttcttcccttcaggctggaccatatcagaaaaatggcctatcaaatttgtaaatcagtgaattttttgcactcaaataaactaacacataccgatctgaagcctgagaacattctatttgtgcaaagcgattataccgaagcatacaaccccaagattaaaagggacgaacggactctcataaatccagacattaaggttgtggactttggtagcgcgacctacgatgacgaacatcatagtaccctcgtctccacccgacactaccgcgcccctgaggtcatcctcgcactgggatggagtcagccatgtgatgtttggtcaattggctgtatccttattgagtactaccttggattcaccgtctttcccacgcacgacagtaaggaacatctggccatgatggaaaggatcctgggtcctctgcccaaacacatgattcaaaaaactaggaagaggaaatatttccatcacgatcggttggattgggacgaacactcttcagcggggaggtatgtctctaggcgatgcaaacctctgaaggagtttatgctaagccaagacgtcgaacatgagaggctctttgacctcattcagaaaatgcttgagtacgacccggcaaaacgaatcacgcttagggaggcactgaagcatccattctttgatctgctaaaaaaaagcatctag

SEQ ID NO: 143237 - DNA, 510 bp, Artificial Sequence
  derived and/or modified sequence
atgggctgctgcggctgcagcggcggctgcggcagcagctgcggcggatgtgatagtagctgtgggtcctgcggatccggctgccgcgggtgcgggccttcctgctgtgctcccgtatattgctgtaagccggtctgctgttgtgtgccagcctgttcatgctcatcttgtggcaagcggggatgtgggagctgtggggggtccaagggcggatgtgggagctgcggctgctcccagtgtagctgctgcaaaccctgttgttgctcctccggctgtggaagctcttgctgccagtgcagttgctgtaaaccctattgcagtcagtgttcttgttgtaagccatgctgcagctcctctggtagaggaagctcatgctgtcagtccagctgttgtaaaccttgctgttcctcaagcggctgcgggagctcttgttgtcaaagctcttgctgcaagccctgctgtagccagtctaggtgctgtgtccccgtgtgttaccagtgtaagatttag

SEQ ID NO: 143238 - DNA, 1455 bp, Artificial Sequence
  derived and/or modified sequence
atgagacactctaagagaacttattgcccggattgggacgacaaagattgggattacggtaagtggcgatcaagcagcagccacaagcgtagaaaacggtcacactcttctgctcaggaaaacaaacgttgcaagtacaaccacagtaaaatgtgtgattcccactacctcgaatcacgctcaattaatgaaaaggattaccactcacggagatacatagacgagtacagaaatgactatacacaaggctgcgagcccggtcatcggcagagggaccatgagagtcgctatcagaaccactccagtaagagtagcggtcggagtggcagatcatcctacaagagtaagcaccggattcatcactccacctctcacagaagaagtcacggcaagagtcatcgcagaaagcgaacaaggagcgtcgaggatgacgaagaaggtcatctcatctgccaaagcggcgatgtgctcagcgccaggtacgagatagtggacaccctgggagagggcgcattcgggaaggtggttgagtgcatcgatcacaaagcgggtggtcgccacgtggctgtgaagatcgtgaaaaatgtggatcggtactgcgaagcagcgaggtcagaaatacaggtgctggagcaccttaacaccactgatccaaattcaacttttaggtgcgtgcagatgttggaatggtttgagcaccatgggcacatctgcattgtgtttgagctgcttggcttatcaacctacgattttattaaggaaaacgggttcctcccgttccggctagatcatattcggaaaatggcctatcagatatgcaagtctgtcaacttcctccattctaataaactgactcacacagatctgaagccagaaaatatcctgtttgtacagtcagactacactgaagcgtataatcctaagattaagcgcgatgagaggactctgattaatcccgacatcaaggtggtcgacttcgggtcagccacttatgacgatgagcaccactctactttagtctccacaagacactacagggcccctgaggtaatcctggcgctcgggtggtcacagccatgcgatgtgtggagcatcggctgcattttaatagagtactacttaggcttcactgttttcccaacacacgacagcaaagaacaccttgcaatgatggagcggattttaggacccctgcccaagcacatgattcagaagacccgaaaacgcaagtactttcaccacgatagactggactgggatgaacacagctccgctggtcgctatgtcagcagaaggtgcaaacccctgaaggaattcatgttatctcaagatgtagagcatgagcggctttttgacctaattcagaaaatgctcgaatacgacccagccaagaggatcactttaagggaggccctgaaacacccatttttcgatttactcaagaagtccatctag

SEQ ID NO: 143239 - DNA, 1365 bp, Artificial Sequence
  derived and/or modified sequence
atgaggcattccaagcgcacttactgtcccgactgggacgacaaagactgggattacggaaagtggcgatccagctcctctcacaagaggaggaagcgatcccactctagcgctcaggaaaacaaacgatgcaagtataatcatagtaagatgtgtgactcccattacctcgagtctaggtcaattaacgaaaaagactaccactcccggcgatatatcgatgagtatcggaatgactatacgcagggatgcgaaccaggccaccggcagcgagaccatgagtctcgttatcagaaccactcttccaagtcatccggtaggagtggcaggtcatcgtacaagtcaaaacaccgcatacatcactcgaccagccaccgccgttcacacggcgacgagatagtggacaccctgggtgaaggcgcattcggcaaagtggtagagtgcattgatcacaaggcaggaggaagacatgtggctgttaagattgtcaagaatgtggatcgctattgcgaggccgcaagatctgagatccaagtattagaacacctgaatactactgaccccaattctacttttcgctgcgtgcagatgctcgaatggtttgagcaccacggccatatttgcatcgtgtttgagctgctgggcctcagtacatacgatttcatcaaagagaacggtttcctcccgtttcgcctcgaccatataaggaagatggcttatcaaatctgtaagtctgtgaactttcttcattcaaacaagctgacccacacagatctgaaacctgagaacattcttttcgtccagtctgactataccgaagcctacaatcccaaaataaagcgggacgagcgaacgctgattaaccccgatatcaaggtagtggactttgggtcagcgacgtatgatgacgagcatcatagcacactcgtgagcaccaggcattatcgagccccagaggtcatcctcgcactcggctggtctcagccatgtgacgtgtggtctattggttgcatcctaattgagtactatctgggattcaccgtattccccacccatgactccaaggaacacttagctatgatggagaggatcctcgggccactgcccaaacatatgatccagaagaccagaaagaggaagtattttcaccatgacaggctggactgggacgagcatagctcggccggacgctacgtgtccagacggtgtaaacctttgaaagaatttatgctgtcccaggatgttgaacatgagcgcctgtttgatctgattcagaagatgctggagtatgatcctgcaaaaagaatcaccctccgggaggccctgaaacaccctttttttgatcttctaaagaagagcatatag

SEQ ID NO: 143240 - DNA, 1888 bp, Artificial Sequence
  derived and/or modified sequence
gtgttttcgagacgagtctcgacgcagcagctgtcagctccattttgttgttggtgcgcgacgcagtcagctgcgtgattcccgtgattgcgttacaagctttgtctccttcgacttggagtctttgtccaggacgatgagacactcaaagagaacttactgtcctgattgggatgacaaggattgggattatggaaaatggaggagcagcagcagtcataaaagaaggaagagatcacatagcagtgcccaggagaacaagcgctgcaaatacaatcactctaaaatgtgtgatagccattatttggaaagcaggtctataaatgagaaagattatcatagtcgacgctacattgatgagtacagaaatgactacactcaaggatgtgaacctggacatcgccaaagagaccatgaaagccggtatcagaaccatagtagcaagtcttctggtagaagtggaagaagtagttataaaagcaaacacaggattcaccacagtacttcacatcgtcgttcacatgggaagagtcaccgaaggaaaagaaccaggagtgtagaggatgatgaggagggtcacctgatctgtcagagtggagacgtactaagtgcaagatatgaaattgttgatactttaggtgaaggagcttttggaaaagttgtggagtgcatcgatcataaagcgggaggtagacatgtagcagtaaaaatagttaaaaatgtggatagatactgtgaagctgctcgctcagaaatacaagttctggaacatctgaatacaacagaccccaacagtactttccgctgtgtccagatgttggaatggtttgagcatcatggtcacatttgcattgtttttgaactattgggacttagtacttacgacttcattaaagaaaatggttttctaccatttcgactggatcatatcagaaagatggcatatcagatatgcaagtctgtgaattttttgcacagtaataagttgactcacacagacttaaagcctgaaaacatcttatttgtgcagtctgactacacagaggcgtataatcccaaaataaaacgtgatgaacgcaccttaataaatccagatattaaagttgtagactttggtagtgcaacatatgatgacgaacatcacagtacattggtatctacaagacattatagagcacctgaagttattttagccctagggtggtcccaaccatgtgatgtctggagcataggatgcattcttattgaatactatcttgggtttaccgtatttccaacacacgatagtaaggagcatttagcaatgatggaaaggattcttggacctctaccaaaacatatgatacagaaaaccaggaaacgtaaatattttcaccacgatcgattagactgggatgaacacagttctgccggcagatatgtttcaagacgctgtaaacctctgaaggaatttatgctttctcaagatgttgaacatgagcgtctctttgacctcattcagaaaatgttggagtatgatccagccaaaagaattactctcagagaagccttaaagcatcctttctttgaccttctgaagaaaagtatatagatctgtaattggacagctctctcgaagagatcttacagactgtatcagtctaatttttaaattttaagttattttgtacagctttgtaaattcttaacatttttatattgccatgtttattttgtttgggtaatttggttcattaagtacatagctaaggtaatgaacatctttttcagtaattgtaaagtgatttattcagaataaattttttgtgcttatgaagttgatatgtatctgaacagtttgttctaagtaccatttttcttcctacttctattaaagaatggacataga

SEQ ID NO: 143241 - DNA, 1843 bp, Artificial Sequence
  derived and/or modified sequence
gtgcatgacccgccccgcggcggagacgcgctcgctgcgtcatcagtgttttcgagacgagtctcgacgcagcagctgtcagctccattttgttgttggtgcgcgacgcagtcagctgcgtgattcccgtgattgcgttacaagctttgtctccttcgacttggagtctttgtccaggacgatgagacactcaaagagaacttactgtcctgattgggatgacaaggattgggattatggaaaatggaggagcagcagcagtcataaaagaaggaagagatcacatagcagtgcccaggagaacaagcgctgcaaatacaatcactctaaaatgtgtgatagccattatttggaaagcaggtctataaatgagaaagattatcatagtcgacgctacattgatgagtacagaaatgactacactcaaggatgtgaacctggacatcgccaaagagaccatgaaagccggtatcagaaccatagtagcaagtcttctggtagaagtggaagaagtagttataaaagcaaacacaggattcaccacagtacttcacatcgtcgttcacatggggatgaaattgttgatactttaggtgaaggagcttttggaaaagttgtggagtgcatcgatcataaagcgggaggtagacatgtagcagtaaaaatagttaaaaatgtggatagatactgtgaagctgctcgctcagaaatacaagttctggaacatctgaatacaacagaccccaacagtactttccgctgtgtccagatgttggaatggtttgagcatcatggtcacatttgcattgtttttgaactattgggacttagtacttacgacttcattaaagaaaatggttttctaccatttcgactggatcatatcagaaagatggcatatcagatatgcaagtctgtgaattttttgcacagtaataagttgactcacacagacttaaagcctgaaaacatcttatttgtgcagtctgactacacagaggcgtataatcccaaaataaaacgtgatgaacgcaccttaataaatccagatattaaagttgtagactttggtagtgcaacatatgatgacgaacatcacagtacattggtatctacaagacattatagagcacctgaagttattttagccctagggtggtcccaaccatgtgatgtctggagcataggatgcattcttattgaatactatcttgggtttaccgtatttccaacacacgatagtaaggagcatttagcaatgatggaaaggattcttggacctctaccaaaacatatgatacagaaaaccaggaaacgtaaatattttcaccacgatcgattagactgggatgaacacagttctgccggcagatatgtttcaagacgctgtaaacctctgaaggaatttatgctttctcaagatgttgaacatgagcgtctctttgacctcattcagaaaatgttggagtatgatccagccaaaagaattactctcagagaagccttaaagcatcctttctttgaccttctgaagaaaagtatatagatctgtaattggacagctctctcgaagagatcttacagactgtatcagtctaatttttaaattttaagttattttgtacagctttgtaaattcttaacatttttatattgccatgtttattttgtttgggtaatttggttcattaagtacatagctaaggtaatgaacatctttttcagtaattgtaaagtgatttattcagaataaattttttgtgcttatgaagttgatatgtatctgaacagtttgttctaagtaccatttttcttcctacttctattaaagaatggacataga

SEQ ID NO: 143242 - DNA, 1455 bp, Artificial Sequence
  derived and/or modified sequence
atgagacacagcaagagaacctactgccccgactgggacgacaaggactgggactacggcaagtggagaagcagcagcagccacaagagaagaaagagaagccacagcagcgcccaggagaacaagagatgcaagtacaaccacagcaagatgtgcgacagccactacctggagagcagaagcatcaacgagaaggactaccacagcagaagatacatcgacgagtacagaaacgactacacccagggctgcgagcccggccacagacagagagaccacgagagcagataccagaaccacagcagcaagagcagcggcagaagcggcagaagcagctacaagagcaagcacagaatccaccacagcaccagccacagaagaagccacggcaagagccacagaagaaagagaaccagaagcgtggaggacgacgaggagggccacctgatctgccagagcggcgacgtgctgagcgccagatacgagatcgtggacaccctgggcgagggcgccttcggcaaggtggtggagtgcatcgaccacaaggccggcggcagacacgtggccgtgaagatcgtgaagaacgtggacagatactgcgaggccgccagaagcgagatccaggtgctggagcacctgaacaccaccgaccccaacagcaccttcagatgcgtgcagatgctggagtggttcgagcaccacggccacatctgcatcgtgttcgagctgctgggcctgagcacctacgacttcatcaaggagaacggcttcctgcccttcagactggaccacatcagaaagatggcctaccagatctgcaagagcgtgaacttcctgcacagcaacaagctgacccacaccgacctgaagcccgagaacatcctgttcgtgcagagcgactacaccgaggcctacaaccccaagatcaagagagacgagagaaccctgatcaaccccgacatcaaggtggtggacttcggcagcgccacctacgacgacgagcaccacagcaccctggtgagcaccagacactacagagcccccgaggtgatcctggccctgggctggagccagccctgcgacgtgtggagcatcggctgcatcctgatcgagtactacctgggcttcaccgtgttccccacccacgacagcaaggagcacctggccatgatggagagaatcctgggccccctgcccaagcacatgatccagaagaccagaaagagaaagtacttccaccacgacagactggactgggacgagcacagcagcgccggcagatacgtgagcagaagatgcaagcccctgaaggagttcatgctgagccaggacgtggagcacgagagactgttcgacctgatccagaagatgctggagtacgaccccgccaagagaatcaccctgagagaggccctgaagcaccccttcttcgacctgctgaagaagagcatctag

SEQ ID NO: 143243 - DNA, 1365 bp, Artificial Sequence
  derived and/or modified sequence
atgagacacagcaagagaacctactgccccgactgggacgacaaggactgggactacggcaagtggagaagcagcagcagccacaagagaagaaagagaagccacagcagcgcccaggagaacaagagatgcaagtacaaccacagcaagatgtgcgacagccactacctggagagcagaagcatcaacgagaaggactaccacagcagaagatacatcgacgagtacagaaacgactacacccagggctgcgagcccggccacagacagagagaccacgagagcagataccagaaccacagcagcaagagcagcggcagaagcggcagaagcagctacaagagcaagcacagaatccaccacagcaccagccacagaagaagccacggcgacgagatcgtggacaccctgggcgagggcgccttcggcaaggtggtggagtgcatcgaccacaaggccggcggcagacacgtggccgtgaagatcgtgaagaacgtggacagatactgcgaggccgccagaagcgagatccaggtgctggagcacctgaacaccaccgaccccaacagcaccttcagatgcgtgcagatgctggagtggttcgagcaccacggccacatctgcatcgtgttcgagctgctgggcctgagcacctacgacttcatcaaggagaacggcttcctgcccttcagactggaccacatcagaaagatggcctaccagatctgcaagagcgtgaacttcctgcacagcaacaagctgacccacaccgacctgaagcccgagaacatcctgttcgtgcagagcgactacaccgaggcctacaaccccaagatcaagagagacgagagaaccctgatcaaccccgacatcaaggtggtggacttcggcagcgccacctacgacgacgagcaccacagcaccctggtgagcaccagacactacagagcccccgaggtgatcctggccctgggctggagccagccctgcgacgtgtggagcatcggctgcatcctgatcgagtactacctgggcttcaccgtgttccccacccacgacagcaaggagcacctggccatgatggagagaatcctgggccccctgcccaagcacatgatccagaagaccagaaagagaaagtacttccaccacgacagactggactgggacgagcacagcagcgccggcagatacgtgagcagaagatgcaagcccctgaaggagttcatgctgagccaggacgtggagcacgagagactgttcgacctgatccagaagatgctggagtacgaccccgccaagagaatcaccctgagagaggccctgaagcaccccttcttcgacctgctgaagaagagcatctag

SEQ ID NO: 143244 - DNA, 1116 bp, Artificial Sequence
  derived and/or modified sequence
atggaggacgaggactacaacacctcgattagttatggagacgagtaccccgactatttggattccatcgtggtgttggaagatctctctcctttggaagctcgggtcactcggatcttcctggtggtggtgtacagcattgtgtgtttcttaggtatcctgggtaacggcttggtcattatcattgcaacctttaaaatgaaaaagactgtgaatatggtctggtttttgaacttggccgtggcggactttctgtttaatgtctttctcccgatacatataacttatgccgcgatggattatcactgggtgttcgggactgcaatgtgtaagataagtaacttccttctgatccacaacatgtttacatccgtgttcctgctcacaattattagctcagacaggtgtatctccgtcttgctgcccgtttggtcccaaaaccatagaagtgtccggctggcctacatggcatgtatggtcatctgggtgctggcattctttctgagcagcccttcccttgttttcagagacactgctaatctccacggcaaaatatcttgtttcaacaatttctccctatcaacacccggcagtagtagttggcccacgcactctcagatggaccctgtcgggtattccaggcacatggttgtaaccgtcaccaggtttctgtgcggattcctggttccagtgctcattattaccgcctgctatctgacaatcgtctgcaaactgcaacgcaatcgcttggcaaagactaagaaaccttttaagatcatcgtgacaatcatcattacatttttcctctgctggtgtccttatcacactctgaacctgctggaactgcaccatacagctatgccagggagcgtgttctccttaggcctaccacttgccactgccttagcgatagcaaactcctgcatgaaccccatcttgtacgtgtttatgggacaagatttcaagaaatttaaagtggccttgttttcccgcttggtgaacgcactcagcgaagacaccgggcatagcagctacccaagtcatagatcttttacaaaaatgtcttccatgaacgagagaacatctatgaacgagagagaaactggtatgctgtag

SEQ ID NO: 143245 - DNA, 1116 bp, Artificial Sequence
  derived and/or modified sequence
atggaggatgaagactacaacacttctatctcgtatggcgacgagtaccctgattatctcgactccatcgtagtgctagaggatctgagtcctttagaggcccgggtaactcgaatcttcctcgttgtggtgtacagtatagtatgctttcttggcattttggggaacggtctcgtcatcattatcgcgacttttaagatgaagaagactgttaacatggtctggttcctgaatttagctgtcgctgatttcctttttaatgtgttcctgccgatccatattacttacgccgccatggattatcattgggtgtttggcactgctatgtgtaagatttccaattttctgctaatccacaacatgttcacctcagtgtttcttttgaccataatttcgtcagatcggtgtataagcgttctgctgcctgtgtggagccagaatcatcgatccgtcaggttggcgtatatggcctgtatggtgatctgggtgctggctttcttcctgtcctctcccagcttagtttttagagatacagccaacttgcacgggaagataagctgtttcaacaacttctcactgtcgacgcctggctcctcttcttggcctacccattcccagatggatccggtcgggtactcaaggcatatggtggtcaccgtgacaaggtttctctgcggctttctggtgcctgtgctgattatcactgcctgttacttaacgatcgtgtgcaagttgcaaagaaataggttggcaaaaaccaaaaagcccttcaagattatagtcactataattatcacattcttcttgtgctggtgcccttatcacactctcaatctgctggaactgcatcacacagccatgcccggctctgtattcagcctgggtctgcctctcgccaccgctctcgccatagctaactcatgcatgaatcccattctgtacgtgttcatgggccaagatttcaagaaatttaaggtggccctcttctcaaggctagtgaacgctttgtccgaggatactggtcactcatcctatccttcccacagatccttcacgaaaatgtcttccatgaacgaaagaacctctatgaatgagcgggaaacaggcatgctgtag

SEQ ID NO: 143246 - DNA, 1116 bp, Artificial Sequence
  derived and/or modified sequence
atggaggatgaggactacaacaccagcatctcctatggagatgagtacccagactacctggacagcatcgtggtgctggaggacctgagccccctggaggcccgggtgacccgcatcttcctggtggtggtgtacagcatcgtgtgcttcctgggcatcctgggcaatggcctggtgatcatcatcgccaccttcaagatgaagaagacagtgaacatggtgtggttcctgaacctggccgtggccgacttcctgttcaacgtgttcctgcccatccacatcacctatgctgccatggactaccactgggtgtttggaacagccatgtgcaagatcagcaacttcctgctgatccacaacatgttcaccagcgtcttcctgctgaccatcatcagcagtgaccgctgcatctctgtgctgctgcctgtgtggagccagaaccacaggtctgtgcggctggcctacatggcctgcatggtgatctgggtgctggccttcttcctgagcagccccagcctggtgttccgggacacagccaacctgcacggcaagatcagctgcttcaacaacttcagcctgagcaccccaggcagcagctcctggcccacccacagccagatggaccctgtgggctacagccgccacatggtggtgacagtgacccgcttcctgtgtggcttcctggtgcctgtgctgatcatcacagcctgctacctgaccatcgtgtgcaagctgcagaggaaccggctggccaagaccaagaagcccttcaagatcatcgtgaccatcatcatcaccttcttcctgtgctggtgcccctaccacaccctgaacctgctggagctgcaccacacagccatgcctggcagcgtcttcagcctgggcctgcccctggccacagccctggccatcgccaacagctgcatgaaccccatcctgtatgtgttcatgggccaggacttcaagaagttcaaggtggccctcttcagccggctggtgaatgccctgtctgaggacaccggccacagcagctaccccagccacaggagcttcaccaagatgagctccatgaatgaaagaacctccatgaatgaaagagagaccggcatgctgtag

SEQ ID NO: 143247 - DNA, 1116 bp, Artificial Sequence
  derived and/or modified sequence
atggaggacgaggactacaacaccagcatcagctacggcgacgagtatcctgactacctagactctatcgtagtgctcgaggacctgtcccccctcgaggctcgtgtcacacgaatcttcctggtagtagtttatagtatcgtctgcttcttgggcatactgggcaacggactcgttataataattgcgaccttcaagatgaagaaaacagttaatatggtttggtttctgaatctggccgtggccgatttcctctttaacgtattcctgccaatccatattacatacgctgcaatggactaccattgggtgtttgggaccgctatgtgcaaaataagcaatttcttgctaatccataatatgtttacttcggtgttcctcctcactattattagttccgatcgttgtatttctgtcctgctgcccgtgtggtcccagaatcacaggtctgtcagactggcgtacatggcgtgcatggtaatctgggttcttgcattttttctgtcctctccctctctcgtgttccgagacactgccaatctccacggaaagatctcctgctttaacaattttagtctgtctacacctgggagcagctcctggccaacccactctcagatggacccagtcgggtatagcaggcacatggtcgtgactgtgacacgatttttatgcggctttttggtgcccgtactgataatcacagcctgttacctcacaatcgtttgtaaattacagcgaaataggctggcgaagaccaaaaagcccttcaaaattatcgtgacaatcatcattacttttttcctttgctggtgtccttaccatacattaaacttgctggaattgcatcacactgccatgccggggagtgtattttccctgggtttgcccctcgcaaccgcacttgccattgcgaatagttgcatgaaccctatcctctatgttttcatgggtcaggatttcaagaaattcaaagtggctctgttctcgcgacttgttaacgccctttcagaggacactggccactcctcatacccctcacatcgctcatttactaaaatgagctcgatgaacgagagaacctccatgaacgagcgcgaaacaggaatgctatag

SEQ ID NO: 143248 - DNA, 1116 bp, Artificial Sequence
  derived and/or modified sequence
atggaggacgaggactacaacaccagcatcagctacggcgacgagtaccccgactaccttgactcgatcgtggtcctcgaagatttaagccccctggaggcccgggttacccgcatctttctcgtggtcgtgtactctatagtgtgtttcctcggaatccttggcaatggtctcgttatcataatagcaacatttaagatgaagaaaactgtcaatatggtgtggttccttaatctcgccgtagctgacttcctgttcaatgttttcctccccatacacatcacttacgcagctatggactaccactgggttttcgggaccgccatgtgcaaaatttcaaattttctgctgattcataacatgtttacttccgtcttcctgcttacgatcatttcctctgaccgctgcatctcagtgctccttcccgtttggtcccagaatcataggtccgtcaggctggcttatatggcctgcatggtaatctgggtgctcgctttcttcctgagcagtccttcccttgtcttccgcgatacagccaatctgcatggaaagattagctgttttaataatttctccctgagcaccccgggcagttctagctggcccacccacagtcaaatggatcctgtcggatattcgcgacatatggtcgtgacagtgaccagattcctatgcggatttcttgttccagttctaattatcacagcctgctatctgaccatagtctgtaagcttcagcgtaatcgattggcgaaaaccaaaaaaccctttaagatcatagttaccatcattatcacatttttcctctgttggtgcccctatcacaccctgaacctgctggagttacaccacaccgctatgcctggatccgtgttcagccttggcctgcccctcgctaccgccctggcaattgcgaactcgtgcatgaaccctatactctatgtctttatggggcaggacttcaagaaatttaaggtggccctctttagccgactcgttaacgcgctctccgaggatacgggccactccagttatccttcgcatcgatcttttacaaaaatgtcgagtatgaacgagcgaacgtcaatgaatgaaagggaaacgggcatgctgtag

SEQ ID NO: 143249 - DNA, 1116 bp, Artificial Sequence
  derived and/or modified sequence
atggaagacgaagattacaatacaagcatctcgtacggggatgaataccccgactatcttgatagtattgtagtgctggaggatctgtcaccactcgaagctagagtgactaggatatttctggtggtagtgtatagcattgtatgctttctggggattctgggcaacgggttggtgattattatcgccaccttcaagatgaagaaaaccgttaatatggtctggtttctgaacctggctgtcgctgacttcctgtttaatgtgttcttgccgattcacatcacgtatgcggcaatggactatcactgggtttttggaaccgcaatgtgtaaaatctccaattttcttttaatccataatatgtttaccagtgtgtttttacttacaatcatttcttctgaccggtgtatatccgtgcttttacccgtctggtcccagaaccataggtcagttcgccttgcatacatggcatgtatggttatctgggtgctcgctttcttcctgtcgagcccttctctggtgttcagagacactgcaaacctccatgggaagataagctgctttaataattttagtctgtcgactcccggtagctcgagctggcccacacactctcagatggaccctgtgggatattcccggcatatggtcgtgactgttacaagatttctctgcggcttcctcgtcccggtgctgattatcacagcgtgttatctgacaatcgtgtgtaagctgcagcggaacagactcgctaaaacaaagaaaccgtttaagattatcgttacgatcataatcacattctttctgtgttggtgcccataccataccctgaaccttttagagctacatcacactgcgatgcctggttctgtgttcagcctagggctgcctctcgccactgccctggctattgctaactcatgtatgaatcctattttgtacgtgtttatggggcaggactttaagaagtttaaagtcgccctgttcagtcggctcgtaaatgccctctctgaggacacagggcatagttcctatcccagccacagatcattcactaagatgtcgtccatgaatgaaagaacctcgatgaacgaacgcgagacgggcatgctgtag

SEQ ID NO: 143250 - DNA, 1116 bp, Artificial Sequence
  derived and/or modified sequence
atggaggatgaggactacaatactagtatctcttatggggacgagtaccctgactatctggactcaattgtggttctcgaggacttatctccactagaagcgagggtcaccagaatattccttgtggtggtatactccatagtgtgtttcctcggaatcctggggaatggcctcgtcataatcattgccacgttcaagatgaagaagacagttaacatggtgtggttcctgaatctggctgtcgccgacttcttattcaatgtattcctgcctatccacatcacatacgctgcaatggattaccactgggtattcggtactgcaatgtgcaagatcagcaactttttgttgatccacaatatgttcaccagcgtgtttctgctcacaatcatatcgtctgaccgctgcatttcagttctgcttcctgtgtggagccaaaatcaccgaagtgtgaggctggcctatatggcatgtatggttatttgggtccttgccttctttctgagctccccatcgctggtcttccgcgacactgccaatctgcacggaaaaattagttgcttcaacaacttctcactttcaaccccaggctcttctagctggcccacacatagccagatggatcctgtgggatattccaggcacatggttgttaccgtcacgagatttctgtgcggctttctggtgcctgtgttaataatcaccgcgtgctacctgaccatcgtgtgtaagctgcagcgtaacagactagcaaaaactaagaaaccctttaaaatcatcgtcacaattatcatcactttcttcctgtgctggtgtccttaccacacgcttaatctgttagaactgcaccatacagcgatgcctggctccgtcttcagcctcggacttcctctggctaccgctctggcaatagccaatagttgtatgaatcccatattgtatgtctttatgggtcaggacttcaagaaattcaaggtggctctgttcagcaggttggtcaacgccctctccgaagatacagggcattcatcttaccccagtcatcggtcattcacgaagatgtccagtatgaatgagcggacctcaatgaatgagcgggagacgggaatgttatag

SEQ ID NO: 143251 - DNA, 1116 bp, Artificial Sequence
  derived and/or modified sequence
atggaggacgaggactacaacaccagcatcagctacggcgacgagtaccccgactacctggacagcatcgtggtgctggaggacctgagccccctggaggccagagtgaccagaatcttcctggtggtggtgtacagcatcgtgtgcttcctgggcatcctgggcaacggcctggtgatcatcatcgccaccttcaagatgaagaagaccgtgaacatggtgtggttcctgaacctggccgtggccgacttcctgttcaacgtgttcctgcccatccacatcacctacgccgccatggactaccactgggtgttcggcaccgccatgtgcaagatcagcaacttcctgctgatccacaacatgttcaccagcgtgttcctgctgaccatcatcagcagcgacagatgcatcagcgtgctgctgcccgtgtggagccagaaccacagaagcgtgagactggcctacatggcctgcatggtgatctgggtgctggccttcttcctgagcagccccagcctggtgttcagagacaccgccaacctgcacggcaagatcagctgcttcaacaacttcagcctgagcacccccggcagcagcagctggcccacccacagccagatggaccccgtgggctacagcagacacatggtggtgaccgtgaccagattcctgtgcggcttcctggtgcccgtgctgatcatcaccgcctgctacctgaccatcgtgtgcaagctgcagagaaacagactggccaagaccaagaagcccttcaagatcatcgtgaccatcatcatcaccttcttcctgtgctggtgcccctaccacaccctgaacctgctggagctgcaccacaccgccatgcccggcagcgtgttcagcctgggcctgcccctggccaccgccctggccatcgccaacagctgcatgaaccccatcctgtacgtgttcatgggccaggacttcaagaagttcaaggtggccctgttcagcagactggtgaacgccctgagcgaggacaccggccacagcagctaccccagccacagaagcttcaccaagatgagcagcatgaacgagagaaccagcatgaacgagagagagaccggcatgctgtag

SEQ ID NO: 143252 - protein, 29 aa, Artificial Sequence
  derived and/or modified sequence
MSVLTPLLLRGLTGSARRLPVPRAKIHSL

SEQ ID NO: 143253 - protein, 69 aa, Artificial Sequence
  derived and/or modified sequence
MSVLTPLLLRGLTGSARRLPVPRAKIHSLPPEGKLGIMELAVGLTSCFVTFLLPAGWILSHLETYRRPE

SEQ ID NO: 143254 - DNA, 210 bp, Artificial Sequence
  derived and/or modified sequence
atgagcgtgctgacccccctgctgctgagaggcctgaccggcagcgccagaagactgcccgtgcccagagccaagatccacagcctgccccccgagggcaagctgggcatcatggagctggccgtgggcctgaccagctgcttcgtgaccttcctgctgcccgccggctggatcctgagccacctggagacctacagaagacccgagtag

SEQ ID NO: 143255 - DNA, 507 bp, Artificial Sequence
  derived and/or modified sequence
ggccagcgcagccattttggcttcctgaccttgggctacggctgaccgttttttgtggtgtactccgtgccatcatgtccgtcctgacgccgctgctgctgcggggcttgacaggctcggcccggcggctcccagtgccgcgcgccaagatccattcgttgccgccggaggggaagcttgggatcatggaattggccgttgggcttacctcctgcttcgtgaccttcctcctgccagcgggctggatcctgtcacacctggagacctacaggaggccagagtgaaggggtccgttctgtccctcacactgtgacctgaccagccccaccggcccatcctggtcatgttactgcatttgtggccggcctcccctggatcatgtcattcaattccagtcacctcttctgcaatcatgacctcttgatgtctccatggtgacctccttgggggtcactgaccctgcttggtggggtcccccttgtaacaataaaatctatttaaacttta

SEQ ID NO: 143256 - DNA, 210 bp, Artificial Sequence
  derived and/or modified sequence
atgagtgtgctgacccctctgcttctccggggccttacaggttccgcccgtagactgcccgtgccccgcgctaaaatacactccctgccgccggagggcaaactggggattatggagctggctgtgggacttacctcctgctttgttacctttcttctccccgcagggtggatcttatctcatctcgaaacatatcgccgtccggaatag

SEQ ID NO: 143257 - DNA, 210 bp, Artificial Sequence
  derived and/or modified sequence
atgtctgtgctgacccccctgctgctgcggggcctgactggaagtgcccggcggctgcctgtgccccgggccaagatccacagcctgcccccagagggcaagctgggcatcatggagctggccgtgggcctgaccagctgctttgtgaccttcctgctgcctgctggctggatcctgagccacctggagacctacagaagacctgagtag

SEQ ID NO: 143258 - DNA, 87 bp, Artificial Sequence
  derived and/or modified sequence
atgtccgtcttgacacccctgctcttgagagggctgacggggtccgctagacgcctgccggtaccgcgagcgaagatccactccctg

SEQ ID NO: 143259 - DNA, 87 bp, Artificial Sequence
  derived and/or modified sequence
atgagcgtgctcactccgttgcttcttcgagggcttacgggatcggctcggaggttgcccgtcccgagagcgaagatccattcgttg

SEQ ID NO: 143260 - DNA, 210 bp, Artificial Sequence
  derived and/or modified sequence
atgagcgtgctgacccccctgctgctgcggggcctgaccggcagcgcaagacgcctacctgtgccgcgcgccaagattcattccctgccacctgaagggaagttaggcatcatggaactcgccgtgggccttacgtcctgtttcgttacctttctgctgcctgcgggatggatcttgtctcatctggagacataccggcggccggagtag

SEQ ID NO: 143261 - DNA, 210 bp, Artificial Sequence
  derived and/or modified sequence
atgtctgtactgacacccctgcttctaagaggtctgacaggcagcgcgaggagactgcccgttccacgagcaaagatccattccctgccccctgagggcaaactcggcattatggagctggccgtagggctcacctcctgcttcgtaacctttctgcttccagctggctggattctctcacatcttgaaacttaccggcgtccggagtag

SEQ ID NO: 143262 - protein, 586 aa, Artificial Sequence
  derived and/or modified sequence
MGVNAVHWFRKGLRLHDNPALKECIQGADTIRCVYILDPWFAGSSNVGINRWRFLLQCLEDLDANLRKLNSRLFVIRGQPADVFPRLFKEWNITKLSIEYDSEPFGKERDAAIKKLATEAGVEVIVRISHTLYDLDKIIELNGGQPPLTYKRFQTLISKMEPLEIPVETITSEVIEKCTTPLSDDHDEKYGVPSLEELGFDTDGLSSAVWPGGETEALTRLERHLERKAWVANFERPRMNANSLLASPTGLSPYLRFGCLSCRLFYFKLTDLYKKVKKNSSPPLSLYGQLLWREFFYTAATNNPRFDKMEGNPICVQIPWDKNPEALAKWAEGRTGFPWIDAIMTQLRQEGWIHHLARHAVACFLTRGDLWISWEEGMKVFEELLLDADWSINAGSWMWLSCSSFFQQFFHCYCPVGFGRRTDPNGDYIRRYLPVLRGFPAKYIYDPWNAPEGIQKVAKCLIGVNYPKPMVNHAEASRLNIERMKQIYQQLSRYRGLGLLASVPSNPNGNGGFMGYSAENIPGCSSSGSCSQGSGILHYAHGDSQQTHLLKQGRSSMGTGLSGGKRPSQEEDTQSIGPKVQRQSTN

SEQ ID NO: 143263 - DNA, 1761 bp, Artificial Sequence
  derived and/or modified sequence
atgggcgtgaacgccgtgcactggttcagaaagggcctgagactgcacgacaaccccgccctgaaggagtgcatccagggcgccgacaccatcagatgcgtgtacatcctggacccctggttcgccggcagcagcaacgtgggcatcaacagatggagattcctgctgcagtgcctggaggacctggacgccaacctgagaaagctgaacagcagactgttcgtgatcagaggccagcccgccgacgtgttccccagactgttcaaggagtggaacatcaccaagctgagcatcgagtacgacagcgagcccttcggcaaggagagagacgccgccatcaagaagctggccaccgaggccggcgtggaggtgatcgtgagaatcagccacaccctgtacgacctggacaagatcatcgagctgaacggcggccagccccccctgacctacaagagattccagaccctgatcagcaagatggagcccctggagatccccgtggagaccatcaccagcgaggtgatcgagaagtgcaccacccccctgagcgacgaccacgacgagaagtacggcgtgcccagcctggaggagctgggcttcgacaccgacggcctgagcagcgccgtgtggcccggcggcgagaccgaggccctgaccagactggagagacacctggagagaaaggcctgggtggccaacttcgagagacccagaatgaacgccaacagcctgctggccagccccaccggcctgagcccctacctgagattcggctgcctgagctgcagactgttctacttcaagctgaccgacctgtacaagaaggtgaagaagaacagcagcccccccctgagcctgtacggccagctgctgtggagagagttcttctacaccgccgccaccaacaaccccagattcgacaagatggagggcaaccccatctgcgtgcagatcccctgggacaagaaccccgaggccctggccaagtgggccgagggcagaaccggcttcccctggatcgacgccatcatgacccagctgagacaggagggctggatccaccacctggccagacacgccgtggcctgcttcctgaccagaggcgacctgtggatcagctgggaggagggcatgaaggtgttcgaggagctgctgctggacgccgactggagcatcaacgccggcagctggatgtggctgagctgcagcagcttcttccagcagttcttccactgctactgccccgtgggcttcggcagaagaaccgaccccaacggcgactacatcagaagatacctgcccgtgctgagaggcttccccgccaagtacatctacgacccctggaacgcccccgagggcatccagaaggtggccaagtgcctgatcggcgtgaactaccccaagcccatggtgaaccacgccgaggccagcagactgaacatcgagagaatgaagcagatctaccagcagctgagcagatacagaggcctgggcctgctggccagcgtgcccagcaaccccaacggcaacggcggcttcatgggctacagcgccgagaacatccccggctgcagcagcagcggcagctgcagccagggcagcggcatcctgcactacgcccacggcgacagccagcagacccacctgctgaagcagggcagaagcagcatgggcaccggcctgagcggcggcaagagacccagccaggaggaggacacccagagcatcggccccaaggtgcagagacagagcaccaactag

SEQ ID NO: 143264 - DNA, 3267 bp, Artificial Sequence
  derived and/or modified sequence
ggggcctgtggtcaacgcgatttgcttccaagggacggccaccagtcggcacaggaaaggggcagaggcagtgagttcagcgtgtggacgagggtcaacaagtttgggatcaagcggctgccgctcctccaaaagcgaccgaagcgcgagcagattacccctccgagccagtgtagtaaacacacttcagaaacgtgaggtgccggtggtcacgaggggagcgcgccctccaatgaggagccgggggcggggccgaggccgctgacgcggcggcggcggcagagtcacccgggcagcctcgggaccggtcaccggccggcaaccgtccagcggcctcgaccaccgcctctagcctccgttcccggtcctttctcccgggccgagagacagcgtcgccgacaggggctcattcccctccggttctcctcggtgactcacctcgggcgggccgttttgtctttaggggccgccttggtggggcgaggtttccgtgacgaatctcctggggccgtccgtgccggctcgggccgtcgtggcggctcgagctcctggaacttgctcaggctccggaggtccgaggccctcgaagttatgcgtcgcctccaggcggttgcggcgggcgcgggctcctaaagggcgtcacacccggactccgccgactaggcaacctccattcatctttccactgcgcctccggcgcccccgccttctccggtcccctcctcggagtcattttttcctgttccccctctgccgccctttcctcacgccccgggtgaggcaattctcttggaagcgaaggtgtcggctatgagccggagcctccttccttgaatttctccgtggaggacccgccgcgccccccggcatgggggtgaacgccgtgcactggttccgaaaggggctccggctccacgacaaccccgccctgaaggagtgcattcagggcgccgacaccatccgctgcgtctacatcctggacccctggttcgccggctcctccaatgtgggcatcaacaggtggcgatttttgcttcagtgtcttgaggatcttgatgccaatctacgaaaattaaactcccgtctgtttgtgattcgtggacaaccagcagatgtgtttcccaggcttttcaaggaatggaacattactaaactttcaattgagtatgattctgagccctttggaaaggaacgagacgcagctattaagaaactggcaactgaagctggagtagaagtcattgtaagaatttcacatacattatatgacctagacaagatcatagaactcaatggtggacaaccgcctctaacttataaaagattccagactctcatcagcaaaatggaaccactagagataccagtagagacaattacttcagaagtgatagaaaagtgcacaactcctctgtctgatgaccatgatgagaaatatggagtcccttcactggaagagctaggttttgatacagatggcttatcctctgcagtgtggccaggtggagaaactgaagcacttactcgtttggaaaggcatttggaaagaaaagcttgggtggcaaattttgaaagacctcgaatgaatgcgaattctctgcttgcaagccctactggacttagtccttatctccgatttggttgtttgtcatgtcgactgttttacttcaaactaacagatctctacaaaaaggtaaagaagaacagttcccctcccctttccctttatgggcaactgttatggcgtgaatttttctatacagcagcaacaaataatccacgctttgataaaatggaaggaaaccctatctgtgttcagattccttgggataaaaatcctgaggctttagccaaatgggcggaaggccggacaggctttccatggattgatgccatcatgacacagcttcgtcaggagggttggattcatcatctagccaggcatgcagttgcttgcttcctgacacgaggggacctgtggattagttgggaagaaggaatgaaggtatttgaagaattattgcttgatgcagattggagcataaatgctggaagttggatgtggctgtcttgtagttccttttttcaacagttttttcactgctattgccctgttggttttggtaggagaacagatcccaatggagactatatcaggcgttatttgcctgtcctaagaggcttccctgcaaaatatatctatgatccctggaatgcaccagaaggtatccaaaaggtagccaaatgtttgataggagttaattatcctaaaccaatggtgaaccatgctgaggcaagccgtttgaatatcgaaaggatgaaacagatctatcagcagctttcacgatatagaggactaggtcttctggcatcagtaccttctaatcctaatgggaatggaggcttcatgggatattctgcagaaaatatcccaggttgtagcagcagtggaagttgctctcaagggagtggtattttacactatgctcatggcgacagtcagcaaactcacctgttgaagcaaggaagaagctccatgggcactggtctcagtggtgggaaacgtcctagtcaggaagaggacacacagagtattggtcctaaagtccagagacagagcactaattagaaaacattcaggaggaatactgttgcagctgaaattggtggggagttcaatacttttcaattaagttatttaaaaatattcttcattgatggaaagcagttacatattgaaatatgttgtttctaatgacatttctgtggtttttaactttttaatgaatttcacagaggacaattggtaatttgtatataaagaacttggcaagagaatttgcttaatgtaaatataaacagtcacaattagtatagacccatcgatatatttttgataatttttcatgtatggtaaagttaaaatgacaaattgatattctgatataaaactcaaagttttgaagtcagtgggaaaaaaggaggtttttagactttcttaaaagacgttaaaattttaggacagaattttcttgatgttgtttgatctaactttgcactctttgataataatgttttagataatgtgcgtaatccaaattggtattgtagcctctgttaacacagacagtatatgttttaaactttgatgtaaacctttttagacccaaacttgtggaagtatcatgtgttaagttctctgtctctgtttctttgttcatttattactaaaatgaacttgttattaaagtatatgcaaatatgaaa

SEQ ID NO: 143265 - DNA, 1761 bp, Artificial Sequence
  derived and/or modified sequence
atgggggtcaacgcagtgcactggttcaggaagggacttcgtcttcacgacaatcctgctctgaaggaatgtatccagggggctgacaccattcgatgtgtgtacatcctagatccttggtttgccggaagttcgaacgttgggattaatcggtggcgatttctgctgcagtgcctggaggacttggatgccaacctgagaaaactgaactcgcgtctttttgtgattcgaggtcagcctgcggatgtctttcccagactctttaaagaatggaatatcaccaagctgtccatcgaatacgatagtgaacctttcggtaaagagcgcgatgccgctataaagaaactggcaaccgaggccggcgtggaggtcatcgtccggatttctcacaccctctatgatctggacaagatcattgaactgaacggggggcagcccccgctgacatacaagagatttcagacactgatctcaaagatggagccgcttgagatcccagtggaaaccatcacatccgaggtcattgagaagtgtacaacacccctcagcgatgatcatgatgagaagtacggcgtgccctccctggaagagctcggcttcgacacagatgggttgagttccgccgtatggcctgggggagagaccgaggcccttacccgactggaaagacatctagagcgcaaagcctgggtcgctaacttcgaacgtcctaggatgaatgccaatagtctcctcgccagccctaccggactctccccatatctcagatttggttgcctttcttgcagactcttctacttcaagctgaccgatctttataagaaggtgaagaagaacagctctccaccattaagcttgtacgggcagctgctgtggagagagtttttctatactgcagctacaaataatcctcggtttgataagatggaaggaaacccaatctgtgttcaaatcccttgggacaaaaatcccgaagctttagcaaagtgggcagagggccggaccggatttccgtggatagacgcgattatgacccagctgcgccaggaaggatggatccaccatctggcgcggcatgctgtcgcctgtttcctaacaaggggcgatctttggatatcctgggaggaggggatgaaagtgttcgaggaacttctgctggatgccgactggtccattaacgccggaagctggatgtggttgtcttgttcctcgttcttccagcaatttttccattgctattgtccagttggatttggcaggcggaccgacccaaacggcgactatatacggaggtatcttccagtccttcgcggattccccgcaaagtacatatacgacccctggaacgctcctgagggaatccagaaggtagctaaatgtttgattggcgtcaattacccgaagccaatggtaaatcacgccgaagcatcacggctcaatatcgaacggatgaagcagatctatcagcagttgtcaagatacaggggattgggactgttggcatctgtaccctcaaacccaaatggtaatggtgggttcatgggatacagtgcggaaaatataccaggatgtagctccagcggatcttgctcccagggttccggaattctgcactacgctcatggcgatagtcagcagacccacctactaaagcagggccgaagttctatgggaaccggccttagtgggggaaagcgtcctagccaggaagaagatacccagtccattggacctaaagtacagagacaaagcacaaactag

SEQ ID NO: 143266 - DNA, 1761 bp, Artificial Sequence
  derived and/or modified sequence
atgggcgtgaatgctgtgcactggttcaggaagggcctgcggctgcatgacaacccagccctgaaggagtgcatccagggcgctgacaccatccgctgtgtgtacatcctggacccctggtttgctggcagcagcaatgtgggcatcaaccgctggaggttcctgctgcagtgcctggaggacctggatgccaacctgaggaagctgaacagccgcctcttcgtcatccggggccagcctgcagatgtgttccccaggctcttcaaggagtggaacatcaccaagctgagcattgaatatgacagcgagccctttgggaaggagagagatgctgccatcaagaagctggccacagaggccggcgtggaggtgattgtgcgcatcagccacaccctgtatgacctggacaagatcatcgagctgaatggaggccagccccccctgacctacaagcgcttccagaccctcatcagcaagatggagcccctggagatccctgtggagaccatcaccagcgaggtgattgagaagtgcaccacccccctgagtgatgaccatgatgagaagtatggagtgcccagcctggaggagctgggctttgacacagatggcctgagcagcgctgtgtggccaggaggagaaacagaggccctgacccggctggagcggcacctggagaggaaggcctgggtggccaactttgagcggcccaggatgaatgccaacagcctgctggccagccccaccggcctgagcccctacctgcgcttcggctgcctgagctgccgcctcttctacttcaagctgacagacctgtacaagaaggtgaagaagaacagcagcccccccctgagcctgtatggccagctgctgtggagggagttcttctacacagctgccaccaacaaccccaggtttgacaagatggagggcaaccccatctgtgtgcagatcccctgggacaagaaccctgaggccctggccaagtgggccgagggccgcacaggcttcccctggattgatgccatcatgacccagctgcggcaggagggctggatccaccacctggcccggcatgctgtggcctgcttcctgaccaggggggacctgtggatctcctgggaggagggcatgaaggtgtttgaggagctgctgctggatgctgactggagcatcaatgccggctcctggatgtggctgagctgcagcagcttcttccagcagttcttccactgctactgccctgtgggcttcggccgcaggacagaccccaatggagactacatccgccgctacctgcctgtgctgcggggcttccctgccaagtacatctatgacccctggaatgcccctgagggcatccagaaggtggccaagtgcctgattggagtgaactaccccaagcccatggtgaaccacgccgaggccagccggctgaacattgaaagaatgaagcagatctaccagcagctgagccgctaccggggcctgggcctgctggcctctgtgcccagcaaccccaatggaaatggaggcttcatgggctacagcgctgagaacatccctggctgcagcagcagcggcagctgcagccagggcagcggcatcctgcactacgcccatggagacagccagcagacccacctgctgaagcagggccgcagctccatgggcaccggcctgagcggcggcaagaggcccagccaggaggaggacacccagagcatcggccccaaggtgcagaggcagagcaccaactag

SEQ ID NO: 143267 - DNA, 1761 bp, Artificial Sequence
  derived and/or modified sequence
atgggcgtgaacgccgtgcactggttccggaagggcctgcggctgcatgacaaccccgcattgaaggaatgtatccagggcgcagacacaattcggtgcgtttatatcctggatccttggtttgccggaagttccaatgttggcataaaccggtggcggttcctgcttcagtgcttggaggacctggacgctaatttgaggaaattaaatagcagactgttcgtgatccggggtcagcctgccgacgtgtttccacgactttttaaggagtggaacattacgaagttgtccatcgagtacgactccgaacctttcggtaaagaacgagacgctgctatcaaaaagctggccactgaggctggcgtcgaagttattgtgcgcataagccatacactctatgatttggataagataatcgagcttaacgggggtcaaccaccccttacatataagaggtttcagaccctgatatcaaagatggagcccttggagatccccgtcgagacaatcacatcagaggtgatcgaaaagtgtacaacacccctgtccgacgatcatgacgagaagtatggagttccatctctggaagagctcggctttgacaccgacgggttatcctctgctgtctggcccggcggtgagacggaagctttgacgagactcgagcgacacctcgaacgaaaagcctgggttgcaaatttcgagcggccccgcatgaatgcaaactcgctgcttgcatctcctacaggcctgtccccgtacttgagattcgggtgtctgtcatgtagactcttctacttcaaacttaccgacctgtacaaaaaggtcaaaaaaaacagttccccccctctatcactatacggacagctattgtggcgcgagttcttctatacggccgccaccaacaacccaaggttcgacaagatggagggtaaccccatttgcgtccagatcccatgggacaaaaaccctgaggccctcgctaagtgggctgaaggtcggaccggtttcccctggattgatgccatcatgacacagctgcgacaggaaggttggattcaccaccttgcacggcatgccgtggcctgttttctcacacggggtgatctgtggatttcctgggaagaggggatgaaggtgttcgaagaacttctgctggacgctgactggagcattaacgctggttcctggatgtggctcagctgtagttctttcttccagcaattctttcattgctactgtcctgtcggctttggccggcgcactgaccccaacggggattacatccggcggtatctccctgtgctgaggggctttccagccaagtatatctacgacccttggaacgccccagaaggcattcagaaggttgctaaatgtttgatcggcgtgaactatccaaagcccatggtgaatcacgccgaagctagcaggctgaacatcgagcggatgaagcaaatttatcagcagctctcccgctatcgcggattgggcttgcttgccagcgtccctagcaatcccaatggtaacggtggctttatgggttattctgctgagaacatcccaggttgctcatcatccggatcctgtagtcagggctcggggattctccactatgctcacggcgacagccagcagactcacttactgaagcaaggaaggtcaagcatgggcacaggtttatcaggcggaaagcgcccctcacaggaagaagacactcagagcattggccccaaggtgcagaggcaatccactaattag

SEQ ID NO: 143268 - DNA, 1761 bp, Artificial Sequence
  derived and/or modified sequence
atgggcgttaacgctgtgcactggtttcgtaaagggctgcgcctgcacgataatccagctttgaaagaatgtatacagggagctgacactatcaggtgcgtgtacattcttgatccttggtttgccggatcctctaacgtggggatcaaccgatggcggtttctccttcagtgtcttgaggacctggacgcaaacctgaggaaactgaactctcgactctttgtcatacgaggtcaacctgctgatgttttcccccgactcttcaaagaatggaacatcactaagctgtctattgaatacgattcagaaccctttggaaaggagcgcgatgcggcaatcaagaagcttgctaccgaggccggtgtcgaagtgatagttagaataagccataccttgtacgacctcgataagatcatcgaactgaatggcggacagccacccttgacctataaaaggtttcagaccctgatttccaagatggagcccctcgaaatacctgtcgagactatcacatccgaagtgatcgaaaaatgtactacgcctctgtcggatgatcacgatgaaaagtacggggtgccttcccttgaggaactgggctttgatacagacggactgtcatccgcagtctggccaggcggagaaaccgaggccctcaccaggctggagcgacatttggaacggaaggcatgggtggcaaattttgagcgtcccagaatgaatgccaacagtcttctggcctccccaacaggtttatctccatatcttcggtttggctgtctgagctgtaggctgttctattttaagctgacggatctgtacaaaaaagtgaagaagaattcttccccacctctgagtctctacggacagctcctttggcgtgaatttttttacacagcagcaacaaataatcctcgttttgacaaaatggaaggcaatccaatttgtgtgcagataccctgggacaagaatcctgaagctctggccaaatgggcggagggtcgtactggcttcccctggattgatgccattatgacacaactgcgtcaagagggctggatccaccacctggcccgacacgcagtcgcttgttttttgacacggggtgatttgtggatttcctgggaggagggtatgaaagtttttgaggagttactgctggacgcggattggagcattaatgcaggatcctggatgtggttgtcatgcagctctttctttcaacagttcttccactgctactgtcctgtgggtttcggccgtagaacagatccaaatggagattacatccgcaggtacctgcccgtcttgcgcggattccctgcgaaatacatatatgatccctggaacgccccagaagggatccaaaaagtcgccaagtgcctgatcggagtgaactacccaaagcccatggtgaaccatgccgaggcttcccggctcaacatcgagcggatgaaacagatttatcagcagttgtccaggtatcgtgggctgggccttctggccagcgtaccaagcaaccctaacggaaatgggggtttcatggggtatagcgcagagaatattcctggatgttctagctcgggctcgtgcagtcaggggtcaggcattctccactacgcacacggagattcacaacaaacgcatctccttaaacagggacggtcgtctatgggtacaggcctgtctggtggaaaacggcctagccaggaagaggacacacagagcattggcccaaaagtgcagcggcagtccaccaactag

SEQ ID NO: 143269 - DNA, 1761 bp, Artificial Sequence
  derived and/or modified sequence
atgggcgtcaacgctgtgcactggtttcggaaggggctcaggcttcacgataatccagctcttaaagaatgcattcagggagctgatacaatccgctgtgtgtatatccttgacccatggttcgcagggtcttcgaacgtgggtattaaccgatggaggtttctcctgcagtgcctggaagacctggatgcaaatctgcggaaactgaactcccggctgttcgttatccggggccaaccagcagacgtctttcctcgactgtttaaagaatggaatatcacgaaactcagcatcgaatacgactcggaacccttcgggaaagagcgggacgccgcaatcaaaaagctcgccactgaggctggggtcgaggtcatcgtgaggatttcccatacactgtacgatctggacaagatcattgagctgaacggaggccagccacccctgacgtacaaacgttttcagacgctcatttcaaagatggaacctttggaaatccccgttgaaaccattaccagcgaagtgatagaaaagtgcaccactccactgagcgacgatcacgacgagaaatacggggtgccctccctggaggaacttgggtttgacaccgacggcctgtcgtccgccgtgtggccaggaggggaaactgaggccctcacacgcctggagcgccatttagagaggaaggcttgggttgctaacttcgaacgccctcgtatgaacgccaattctctgctcgctagccccaccggactttcgccctatctgcgattcggttgcctaagttgtaggctgttttatttcaaactgactgacttatacaaaaaggtgaagaagaattcgagcccacccctttccctctatggacagctcttatggagagagtttttctataccgccgccaccaacaatccaaggtttgataagatggaaggaaacccaatctgcgtccagatcccatgggataagaacccagaggctctggcaaaatgggctgaaggccgcaccggatttccatggattgacgcgatcatgactcaattgaggcaggaggggtggattcatcatctagcacggcatgcggtagcctgctttttgacgaggggagatctgtggatcagctgggaggaaggcatgaaggtgtttgaagaactacttttggatgccgattggagtatcaatgctgggagttggatgtggctctcttgtagttctttctttcaacagttttttcactgctattgccctgtcggatttggaaggcgcaccgaccctaatggggattatatcaggcggtatctgcctgtactgagagggtttccggctaagtacatttacgatccatggaatgcgcctgagggaatacaaaaagtggcaaagtgcctgattggcgtcaattaccctaagccaatggtgaatcatgcagaagcgagcagactgaacatcgagcggatgaaacagatttaccagcagttgagtaggtatcggggcctgggtctgcttgccagtgttccttccaaccccaacggcaatgggggattcatgggatatagcgccgagaacatacctggatgcagtagcagcggctcgtgttcccaaggttcaggtatcctacactacgcccacggagacagccagcaaacccacctgctcaagcaaggtagaagctcaatgggcactgggctcagtggcggtaaacgcccgtcacaggaggaggatactcagtctatcggtcctaaagtgcagagacagagtacgaactag

SEQ ID NO: 143270 - DNA, 1761 bp, Artificial Sequence
  derived and/or modified sequence
atgggagttaacgcagttcactggttcaggaagggtcttcggctccatgacaatcccgcacttaaggaatgcatacagggtgctgacaccatccgctgcgtctacatcttggacccctggtttgcaggcagcagtaacgtgggcataaataggtggaggtttctccttcagtgtttggaggatttggacgccaatcttaggaagctgaattctagactgttcgtaatacggggtcaaccagcagacgtattcccccgattatttaaggaatggaacatcacaaaactaagtattgaatacgactcagagcccttcggaaaggagcgcgacgccgccatcaaaaagctcgctaccgaggcaggtgtggaagtaattgtgcgaatcagccatacattatacgacttggataagattatagagcttaacggaggccagccacctctaacatataagcgatttcagacactgataagcaaaatggagcccctcgagattccggtcgagaccataacaagcgaagtaatagaaaagtgtaccactcccctgtctgatgaccacgacgaaaagtacggagtgccctccctcgaggaactggggtttgacactgatggactatcctccgccgtctggccgggaggcgaaactgaagccctgactaggctggaaagacacttagaacgcaaggcctgggtagcgaactttgagagacctcggatgaacgccaattcactgctggcatccccaactggactgagtccgtacttgcggttcggctgcctcagctgtagactgttttatttcaagctcactgatctgtacaagaaagtcaagaaaaactcttcccccccactaagcctgtatggacagctactgtggcgcgaatttttttacaccgctgccactaacaaccctcgtttcgataaaatggaagggaatccaatatgcgtgcagatcccttgggataaaaatccagaagcacttgctaagtgggccgagggtcgaacagggtttccgtggattgacgcaataatgacccagctgcgacaagaaggatggatacaccacctcgccaggcatgcagttgcatgttttttgacaagaggcgacttgtggatatcttgggaggagggaatgaaggtgtttgaagagttgttactagatgccgattggagcatcaacgccggatcctggatgtggctgagttgctcctccttcttccaacagtttttccactgttattgccccgttggctttggaagacgcaccgacccgaacggagactacatcagacgctatttacctgtcctacggggctttccggccaagtatatctatgatccatggaacgcacctgaaggaattcaaaaagtcgctaagtgccttatcggagtgaactaccctaaacccatggtgaatcatgcagaagcctcccgactcaacatcgagcggatgaaacagatctatcagcagctgagtcggtataggggccttggactgctcgcaagtgttccatccaatccaaatggaaacggcggctttatggggtactcagccgagaacatccccggatgctcatcatcaggaagttgtagccagggcagtggcatactccattatgcacacggagacagtcagcagacccaccttctgaaacaagggcgaagtagcatggggaccggattatccggtggtaagaggccctctcaggaggaggacacccagtcaatcgggcctaaagtgcagcgccagtctaccaattag

SEQ ID NO: 143271 - RNA, 1761 nt, Artificial Sequence
  derived and/or modified sequence
augggcgucaacgcugugcacugguuucggaaggggcucaggcuucacgauaauccagcucuuaaagaaugcauucagggagcugauacaauccgcuguguguauauccuugacccaugguucgcagggucuucgaacguggguauuaaccgauggagguuucuccugcagugccuggaagaccuggaugcaaaucugcggaaacugaacucccggcuguucguuauccggggccaaccagcagacgucuuuccucgacuguuuaaagaauggaauaucacgaaacucagcaucgaauacgacucggaacccuucgggaaagagcgggacgccgcaaucaaaaagcucgccacugaggcuggggucgaggucaucgugaggauuucccauacacuguacgaucuggacaagaucauugagcugaacggaggccagccaccccugacguacaaacguuuucagacgcucauuucaaagauggaaccuuuggaaauccccguugaaaccauuaccagcgaagugauagaaaagugcaccacuccacugagcgacgaucacgacgagaaauacggggugcccucccuggaggaacuuggguuugacaccgacggccugucguccgccguguggccaggaggggaaacugaggcccucacacgccuggagcgccauuuagagaggaaggcuuggguugcuaacuucgaacgcccucguaugaacgccaauucucugcucgcuagccccaccggacuuucgcccuaucugcgauucgguugccuaaguuguaggcuguuuuauuucaaacugacugacuuauacaaaaaggugaagaagaauucgagcccaccccuuucccucuauggacagcucuuauggagagaguuuuucuauaccgccgccaccaacaauccaagguuugauaagauggaaggaaacccaaucugcguccagaucccaugggauaagaacccagaggcucuggcaaaaugggcugaaggccgcaccggauuuccauggauugacgcgaucaugacucaauugaggcaggagggguggauucaucaucuagcacggcaugcgguagccugcuuuuugacgaggggagaucuguggaucagcugggaggaaggcaugaagguguuugaagaacuacuuuuggaugccgauuggaguaucaaugcugggaguuggauguggcucucuuguaguucuuucuuucaacaguuuuuucacugcuauugcccugucggauuuggaaggcgcaccgacccuaauggggauuauaucaggcgguaucugccuguacugagaggguuuccggcuaaguacauuuacgauccauggaaugcgccugagggaauacaaaaaguggcaaagugccugauuggcgucaauuacccuaagccaauggugaaucaugcagaagcgagcagacugaacaucgagcggaugaaacagauuuaccagcaguugaguagguaucggggccugggucugcuugccaguguuccuuccaaccccaacggcaaugggggauucaugggauauagcgccgagaacauaccuggaugcaguagcagcggcucguguucccaagguucagguauccuacacuacgcccacggagacagccagcaaacccaccugcucaagcaagguagaagcucaaugggcacugggcucaguggcgguaaacgcccgucacaggaggaggauacucagucuaucgguccuaaagugcagagacagaguacgaacuag

SEQ ID NO: 143272 - RNA, 1761 nt, Artificial Sequence
  derived and/or modified sequence
augggaguuaacgcaguucacugguucaggaagggucuucggcuccaugacaaucccgcacuuaaggaaugcauacagggugcugacaccauccgcugcgucuacaucuuggaccccugguuugcaggcagcaguaacgugggcauaaauagguggagguuucuccuucaguguuuggaggauuuggacgccaaucuuaggaagcugaauucuagacuguucguaauacggggucaaccagcagacguauucccccgauuauuuaaggaauggaacaucacaaaacuaaguauugaauacgacucagagcccuucggaaaggagcgcgacgccgccaucaaaaagcucgcuaccgaggcagguguggaaguaauugugcgaaucagccauacauuauacgacuuggauaagauuauagagcuuaacggaggccagccaccucuaacauauaagcgauuucagacacugauaagcaaaauggagccccucgagauuccggucgagaccauaacaagcgaaguaauagaaaaguguaccacuccccugucugaugaccacgacgaaaaguacggagugcccucccucgaggaacugggguuugacacugauggacuauccuccgccgucuggccgggaggcgaaacugaagcccugacuaggcuggaaagacacuuagaacgcaaggccuggguagcgaacuuugagagaccucggaugaacgccaauucacugcuggcauccccaacuggacugaguccguacuugcgguucggcugccucagcuguagacuguuuuauuucaagcucacugaucuguacaagaaagucaagaaaaacucuucccccccacuaagccuguauggacagcuacuguggcgcgaauuuuuuuacaccgcugccacuaacaacccucguuucgauaaaauggaagggaauccaauaugcgugcagaucccuugggauaaaaauccagaagcacuugcuaagugggccgagggucgaacaggguuuccguggauugacgcaauaaugacccagcugcgacaagaaggauggauacaccaccucgccaggcaugcaguugcauguuuuuugacaagaggcgacuuguggauaucuugggaggagggaaugaagguguuugaagaguuguuacuagaugccgauuggagcaucaacgccggauccuggauguggcugaguugcuccuccuucuuccaacaguuuuuccacuguuauugccccguuggcuuuggaagacgcaccgacccgaacggagacuacaucagacgcuauuuaccuguccuacggggcuuuccggccaaguauaucuaugauccauggaacgcaccugaaggaauucaaaaagucgcuaagugccuuaucggagugaacuacccuaaacccauggugaaucaugcagaagccucccgacucaacaucgagcggaugaaacagaucuaucagcagcugagucgguauaggggccuuggacugcucgcaaguguuccauccaauccaaauggaaacggcggcuuuaugggguacucagccgagaacauccccggaugcucaucaucaggaaguuguagccagggcaguggcauacuccauuaugcacacggagacagucagcagacccaccuucugaaacaagggcgaaguagcauggggaccggauuauccggugguaagaggcccucucaggaggaggacacccagucaaucgggccuaaagugcagcgccagucuaccaauuag

SEQ ID NO: 143273 - DNA, 636 bp, Artificial Sequence
  derived and/or modified sequence
atggccgagcaacatggagcacccgagcaggctgcagccggtaagtcccacggggatctcggggggtcatataaggtgattctttatgaactggaaaatttccaaggtaagcggtgtgagctgtcagccgagtgcccatctctgaccgatagtctgctcgaaaaagtgggtagtatccaggtggagtcagggccctggctggctttcgaatctcgagcctttagaggggaacaattcgtcctagagaaaggggactatccaaggtgggacgcatggtccaattccagggactccgatagtcttctctcgttgaggcccctgaatatcgatagccctcaccacaagttacacctctttgagaatcccgcgttcagtgggcgaaaaatggagattgttgatgatgatgtgccttccctctgggcccacggctttcaggaccgggtggccagcgttcgcgccatcaacggcacttgggtaggctacgaatttcccgggtatagaggccggcaatatgtctttgagcgcggagaatatcggcattggaatgagtgggacgccagccagcctcaattgcaaagcgtacgccggattcgcgaccagaaatggcacaagagaggccggtttccctcttcctag

SEQ ID NO: 143274 - DNA, 636 bp, Artificial Sequence
  derived and/or modified sequence
atggccgagcagcacggggcccctgagcaggccgctgctgggaagagccatggagacctgggcggcagctacaaggtgatcctgtatgagctggagaacttccagggcaagagatgtgagctgtctgctgagtgccccagcctgacagacagcctgctggagaaggtgggcagcatccaggtggagagcggcccctggctggcctttgagagccgggccttccggggggagcagtttgtgctggagaagggggactacccccgctgggatgcctggagcaacagccgggacagcgacagcctgctgagcctgcggcccctgaacatcgacagcccccaccacaagctgcacctgtttgagaacccagccttcagcggcaggaagatggagatcgtggatgatgatgtgcccagcctgtgggcccacggcttccaggacagagtggcctctgtgcgggccatcaatggcacctgggtgggctatgagttccctggctaccggggccggcagtatgtgtttgagcggggggagtaccgccactggaatgagtgggatgccagccagccccagctgcagagcgtgcggcgcatccgggaccagaagtggcacaagaggggccgcttccccagcagctag

SEQ ID NO: 143275 - DNA, 636 bp, Artificial Sequence
  derived and/or modified sequence
atggccgagcagcacggcgcccccgagcaggccgccgccggcaagtctcacggagatttgggaggctcgtacaaagtgattctctacgagctggagaatttccaggggaagaggtgtgagctgtccgctgaatgcccaagcttgacggactccctcctggaaaaggttggcagtatccaggtggaatctggtccctggttagctttcgaatccagagcattcagaggggaacagtttgttctcgaaaagggtgattaccccagatgggatgcatggagtaattctcgggattcagacagtctcctttcacttagacctttaaatatcgatagccctcatcacaagctccatctgttcgagaatcctgctttcagtggcaggaagatggaaatcgttgatgacgacgtcccatccctctgggcacacggttttcaggatcgggtggcctcggttagggcaatcaatggaacatgggtggggtacgaattccctggatatcgcgggaggcaatacgtgttcgaaagaggcgaatatcgccactggaatgagtgggacgcctcccaaccacagttgcagagtgttcggcgaattcgtgaccaaaaatggcacaaaaggggacgctttccgtcatcttag

SEQ ID NO: 143276 - DNA, 636 bp, Artificial Sequence
  derived and/or modified sequence
atggcagagcagcacggagctcccgagcaggctgccgctgggaagtctcatggagatctagggggtagttacaaggttatcctgtacgaacttgagaatttccaaggcaagcgatgcgagctgtccgccgagtgtcctagcctgacagattccctcctcgaaaaggtgggctctatccaggtcgagtcgggcccatggctcgcctttgagagtcgggcttttcggggtgaacagtttgtgctggagaagggggattaccctcgctgggacgcctggtcgaactccagagatagcgatagtttgttgtcgctgcgaccgttgaatattgatagcccacaccacaaactgcacttattcgaaaaccccgctttttcgggcagaaagatggagattgtcgatgacgacgtgccttcactctgggcccacgggttccaggatagagtggctagcgtgagggctatcaacggtacatgggtagggtatgaattccccggatacagaggacgccaatacgtgttcgaacgaggcgaatatcgacactggaacgagtgggatgcaagccagccccagctccagtcagtgaggagaattcgtgaccagaagtggcacaaacgcggacgcttccccagttcatag

SEQ ID NO: 143277 - DNA, 636 bp, Artificial Sequence
  derived and/or modified sequence
atggccgagcagcacggcgcccccgagcaggccgccgccggcaagagccacggcgacctgggcggcagctacaaggtgatcctgtacgagctggagaacttccagggcaagagatgcgagctgagcgccgagtgccccagcctgaccgacagcctgctggagaaggtgggcagcatccaggtggagagcggcccctggctggccttcgagagcagagccttcagaggcgagcagttcgtgctggagaagggcgactaccccagatgggacgcctggagcaacagcagagacagcgacagcctgctgagcctgagacccctgaacatcgacagcccccaccacaagctgcacctgttcgagaaccccgccttcagcggcagaaagatggagatcgtggacgacgacgtgcccagcctgtgggcccacggcttccaggacagagtggccagcgtgagagccatcaacggcacctgggtgggctacgagttccccggctacagaggcagacagtacgtgttcgagagaggcgagtacagacactggaacgagtgggacgccagccagccccagctgcagagcgtgagaagaatcagagaccagaagtggcacaagagaggcagattccccagcagctag

SEQ ID NO: 143278 - protein, 466 aa, Artificial Sequence [sequence omitted]

SEQ ID NO: 143279 - protein, 178 aa, Artificial Sequence
  derived and/or modified sequence
MALLTAAARLLGTKNASCLVLAARHASASSTNLKDILADLIPKEQARIKTFRQQHGKTVVGQITVDMMYGGMRGMKGLVYETSVLDPDEGIRFRGFSIPECQKLLPKAKGGEEPLPEGLFWLLVTGHIPTEEQVSWLSKEWAKRAALPSHVVTMLDNFPTNLHPMSQLSAAVTALNSE

SEQ ID NO: 143280 - DNA, 1401 bp, Artificial Sequence
  derived and/or modified sequence
atggccttattaacagcagctgctagattactcggcacaaagaacgcaagctgcttggttctggctgcaagacatgccagcgcgtcctcgactaatctcaaggacattctcgcagatttgataccaaaggagcaggctagaattaagaccttcaggcaacagcacggcaagactgtggttggtcagattacagtggacatgatgtatggaggaatgcggggtatgaaaggcttggtctatgagacttccgtgttagatcctgacgaaggcattcggttccggggcttctcgatccccgagtgtcaaaagctcttgcccaaggcaaagggaggggaagagccattgcctgaggggctgttttggttgttggtgactggacatatacccaccgaggagcaagtttcttggctaagcaaggagtgggccaagagggcagcactgccgtcccatgttgtaaccatgctagacaacttccctacaaaccttcatccaatgtctcagttgtcggcagccgttaccgccttaaactccgagtcaaactttgcccgggcctatgctcaggggatcagccggactaaatactgggaattaatctacgaggattcaatggacctcattgccaaactcccttgcgtcgctgcaaagatttataggaatctttaccgagagggatccggaattggagccattgattcgaacctcgattggtctcacaactttaccaatatgctcggatacaccgaccaccagttcaccgagctcaccagactctaccttactatccattccgaccacgagggcggtaatgtctcagcccatacctctcaccttgttggaagcgctttgtccgacccttatctctcttttgccgccgcgatgaacggcctggcggggccactgcatggactcgctaaccaggaagtccttgtttggctgacgcaattgcagaaagaagttggtaaagacgtgagcgacgaaaagctccgagattacatctggaacactctcaattccgggagagttgtcccgggctacgggcacgcggtcttgcggaaaaccgatcccagatacacttgccagagagagttcgccttgaaacatctgccgaacgatccaatgttcaagctggtcgcccagctgtacaagatcgttcccaatgtgctgctggaacagggcaaggccaagaatccatggcctaacgtggacgctcatagcggggtcctgttgcagtattacggtatgacggagatgaattattatacagtgttgttcggcgttagccgtgccctaggtgtgcttgcccagttaatctggtctcgtgcactcggcttcccgctggagaggcctaagtctatgtcaacggagggcctgatgaaatttgtagactccaaatccgggtag

SEQ ID NO: 143281 - DNA, 537 bp, Artificial Sequence
  derived and/or modified sequence
atggctctgttgacggcggcagctagactactgggaaccaagaacgccagctgtctggttcttgccgcgcggcatgccagcgcctcaagtaccaacctgaaggatattctggccgatctgattccaaaggagcaggctcgaatcaagacttttcggcagcagcacggcaagacggtggtcggccagatcactgtggatatgatgtatgggggtatgcgtggcatgaagggtctggtctatgaaacttctgtcctggatcctgacgaaggaatccgatttaggggtttctccattcctgagtgccagaaactgctgcccaaggctaagggcggtgaggagcctctaccggagggtctcttttggctcctcgtcaccggccacatccccaccgaggaacaggtgtcatggctgtccaaagagtgggccaaacgtgctgcccttccgagccacgtggtcacaatgcttgataactttcctacaaatctgcacccaatgagccagttgtctgccgccgtgaccgccctaaattccgaatag

SEQ ID NO: 143282 - DNA, 1401 bp, Artificial Sequence
  derived and/or modified sequence
atggccctgctgacagctgctgcccggctgctgggcaccaagaatgccagctgcctggtgctggccgcccggcatgccagcgccagcagcaccaacctgaaggacatcctggccgacctgatccccaaggagcaggcccgcatcaagaccttccggcagcagcacggcaagacagtggtgggccagatcaccgtggacatgatgtatggaggcatgaggggcatgaagggcctggtgtatgagacctctgtgctggaccctgatgagggcatccgcttccggggcttcagcatccctgagtgccagaagctgctgcccaaggccaagggcggggaggagcccctgcctgagggcctcttctggctgctggtgacaggccacatccccacagaggagcaggtgtcctggctgagcaaggagtgggccaagagagctgccctgcccagccacgtggtgaccatgctggacaacttccccaccaacctgcaccccatgagccagctgtctgctgctgtgacagccctgaacagcgagagcaactttgcccgggcctatgcccagggcatcagcaggaccaagtactgggagctgatctatgaggacagcatggacctgattgccaagctgccctgtgtggccgccaagatctacagaaacctgtaccgggagggcagcggcattggagccatcgacagcaacctggactggagccacaacttcaccaacatgctgggctacacagaccaccagttcacagagctgacccggctgtacctgaccatccacagcgaccatgaaggaggaaatgtgtctgcccacaccagccacctggtgggcagcgccctgagtgacccctacctgagctttgctgctgccatgaatggcctggccggccccctgcacggcctggccaaccaggaggtgctggtgtggctgacccagctgcagaaggaggtgggcaaggatgtgtctgatgagaagctgcgggactacatctggaacaccctgaacagcggccgggtggtgcccggctacggccatgctgtgctgaggaagacagacccccgctacacctgccagcgggagtttgccctgaagcacctgcccaatgaccccatgttcaagctggtggcccagctgtacaagatcgtgcccaacgtgctgctggagcagggcaaggccaagaacccctggcccaacgtggatgcccacagcggcgtgctgctgcagtactacggcatgacagagatgaactactacacagtgctgtttggagtgtcccgggccctgggcgtgctggcccagctgatctggagccgggccctgggcttccccctggagcggcccaagtccatgagcacagagggcctgatgaagtttgtggacagcaagtctggatag

SEQ ID NO: 143283 - DNA, 537 bp, Artificial Sequence
  derived and/or modified sequence
atggccctgctgacagctgctgcccggctgctgggcaccaagaatgccagctgcctggtgctggccgcccggcatgccagcgccagcagcaccaacctgaaggacatcctggccgacctgatccccaaggagcaggcccgcatcaagaccttccggcagcagcacggcaagacagtggtgggccagatcaccgtggacatgatgtatggaggcatgaggggcatgaagggcctggtgtatgagacctctgtgctggaccctgatgagggcatccgcttccggggcttcagcatccctgagtgccagaagctgctgcccaaggccaagggcggggaggagcccctgcctgagggcctcttctggctgctggtgacaggccacatccccacagaggagcaggtgtcctggctgagcaaggagtgggccaagagagctgccctgcccagccacgtggtgaccatgctggacaacttccccaccaacctgcaccccatgagccagctgtctgctgctgtgacagccctgaacagcgagtag

SEQ ID NO: 143284 - DNA, 1401 bp, Artificial Sequence
  derived and/or modified sequence
atggccctgctgaccgccgccgcccggctgctgggcaccaagaacgcgtcatgcctggtgttagccgcccgccacgcaagtgcaagtagcacgaaccttaaggacattctagctgatcttattcccaaagaacaagcacgcatcaagacctttcgccaacagcacggcaagaccgttgtaggtcagattaccgttgacatgatgtatggtggcatgcgcggaatgaagggattggtttatgaaacgtctgtcctggaccctgacgagggcatccgttttcgcgggttttccataccagaatgccagaagctgctcccaaaggccaagggcggtgaagaacctctgcccgaaggactattctggctccttgtcactggccacatccctacagaggagcaggtgagctggctctccaaggagtgggcgaagcgcgcagctctgccctcccacgtggtgactatgctggataattttccaacaaacctccatcctatgagtcagctgagcgccgcggtgaccgccctgaactctgagtccaactttgcgcgcgcatatgcccaaggcatcagcaggactaagtattgggaattgatctatgaggatagtatggatcttatagcgaaactgccttgcgtcgccgccaaaatttataggaacctttaccgtgagggctctggtattggggcaatcgatagcaaccttgactggtcacacaactttacaaatatgttgggttatacagaccaccaattcactgaactgacccggctatacctgactatccactccgaccacgagggaggtaacgtttccgctcatacttctcacctggtgggaagcgctctcagtgacccctacttaagtttcgctgccgcaatgaatgggctggcggggccactgcatggcctggctaaccaggaagtcctcgtctggttgacccaacttcagaaggaggtgggaaaggacgtcagtgatgaaaagctgagggattacatttggaacaccttaaattcgggtcgcgtggtgcctggatacggccacgccgttttgcgcaaaactgatccgcgctatacttgccagcgagagtttgccttaaagcatcttcccaatgatcctatgttcaagctcgttgcccagctctataaaattgtgccaaatgtgttgctggaacagggaaaagctaaaaacccttggcccaacgtcgacgcccactcaggcgttttactgcaatattacgggatgaccgagatgaactactatactgtgctattcggagtgtcgcgagccctaggggtgctggcccagcttatttggagtagggccctgggattccccttagagcggcccaagtccatgtccacagaagggttaatgaaattcgtggactctaaaagtggctag

SEQ ID NO: 143285 - DNA, 537 bp, Artificial Sequence
  derived and/or modified sequence
atggccctgctgaccgccgccgcccggctgctgggcaccaagaacgcttcttgtctggttttggccgcccgccatgctagcgctagctcaacaaacctgaaggacatcctggctgacttgatacctaaagagcaagcccgaattaagacttttcgccagcaacatggtaaaacagtcgtcggtcagatcactgtggacatgatgtatggtgggatgcgggggatgaaaggattggtgtacgagacgtccgtcctggacccagacgaaggaattcgcttccgcggattttccatccctgaatgtcaaaaactactcccaaaggccaaaggaggtgaggaacctcttcccgaagggctattctggctcctggtaaccggtcatatccctaccgaggagcaggtctcttggttgagcaaggagtgggccaagcgtgctgctctgccatcccatgtcgtcacaatgcttgataactttccaaccaatttacaccccatgtcgcagctcagtgctgctgttacagcgcttaattctgagtag

SEQ ID NO: 143286 - DNA, 1401 bp, Artificial Sequence
  derived and/or modified sequence
atggcgctgctcaccgctgctgcgaggctgctaggaactaaaaacgctagttgcctggtcctcgctgcacggcatgcctctgctagttctaccaacctgaaggatatcctggccgacctcataccaaaagaacaagccagaatcaaaacctttagacagcagcatgggaaaacggtggtagggcaaattacggtggatatgatgtatggcggaatgaggggcatgaaaggtctggtatatgaaacttctgtgcttgaccctgatgagggaatacgcttccggggattcagcatacccgagtgtcagaagcttttgccaaaggctaaaggcggtgaggaacctctccccgagggattgttttggctgcttgttacaggtcacattcctactgaagaacaggtgtcctggctctcaaaggagtgggccaagagagccgctctcccaagccatgttgtgaccatgctggacaacttccctaccaatttgcacccaatgtcacagctgagcgccgctgtgaccgcccttaatagtgagtcaaattttgcaagagcctatgcacagggtatatcccggacaaagtattgggagcttatttacgaagattctatggatctcattgctaaattaccttgcgtggcagccaagatctacagaaacctgtatagagagggcagtgggattggcgctatcgactcaaatctcgactggtcccataattttaccaatatgcttggctacaccgatcatcagtttacagaacttacaaggctatatctgactatccactcagatcacgaagggggaaacgtctcagctcatacatcccaccttgtaggcagtgccctcagcgacccgtacctgtcattcgccgcagcgatgaacggattggcgggacccttacacggtctcgcaaaccaggaggtcctggtctggctgacccaactgcagaaagaggtggggaaggatgtttcagacgagaaactgagagattatatttggaatacccttaactctggacgtgttgtgccaggatatggacacgcagtgttaaggaaaactgatcccagatacacgtgccagagggagtttgctctcaaacacctgccgaacgaccctatgttcaagctcgttgcgcagctctataagatcgtgcccaacgtcctcctggagcaggggaaagccaaaaatccgtggcccaatgtcgatgcccactctggggtgctgttgcagtattacgggatgacagagatgaactactatactgtgctcttcggcgtgagtcgggcactgggtgtgctggcccagctgatttggagtcgcgcactgggctttccattagagcggccaaaatcgatgtcaaccgagggcctgatgaagttcgtcgacagcaagtccggctag

SEQ ID NO: 143287 - DNA, 537 bp, Artificial Sequence
  derived and/or modified sequence
atggcactgctcaccgctgcagcgcgacttctcgggactaagaacgctagctgtcttgtgctggcagcgcgtcatgcctcagcttctagtacaaatcttaaagatatcttggcagatctcatccctaaagaacaagcccgaatcaaaacatttagacagcagcatggtaagacagtggtggggcagattacagtggatatgatgtacggtggtatgaggggtatgaagggcctcgtgtacgaaacctctgtcttggatcccgacgagggcatccggtttaggggattttctattcccgagtgccagaaacttctgccgaaggcaaaaggaggtgaggagccactgcccgagggacttttctggttactggtcacaggccacataccgacagaagaacaggtaagctggctgtccaaggagtgggccaagcgtgctgcactccccagtcacgtcgtgaccatgctcgacaacttccccactaacctgcacccgatgtcacagctttccgccgctgttaccgccttgaactccgaatag

SEQ ID NO: 143288 - DNA, 2975 bp, Artificial Sequence
  derived and/or modified sequence
cagtgggcggggcctccttgaggaccccgggctgggcgccgccgccggttcgtctactctttccttcagccgcctcctttcaaccttgtcaacccgtcggcgcggcctctggtgcagcggcggcggctcctgttcctgccgcagctctctccctttcttacctccccaccagatcccggagatcgcccgccatggctttacttactgcggccgcccggctcttgggaaccaagaatgcatcttgtcttgttcttgcagcccggcatgccagtgcttcctccacgaatttgaaagacatattggctgacctgatacctaaggagcaggccagaattaagactttcaggcagcaacatggcaagacggtggtgggccaaatcactgtggacatgatgtatggtggcatgagaggcatgaagggattggtctatgaaacatcagttcttgatcctgatgagggcatccgtttccgaggctttagtatccctgaatgccagaaactgctacccaaggctaagggtggggaagaacccctgcctgagggcttattttggctgctggtaactggacatatcccaacagaggaacaggtatcttggctctcaaaagagtgggcaaagagggcagctctgccttcccatgtggtcaccatgctggacaactttcccaccaatctacaccccatgtctcagctcagtgcagctgttacagccctcaacagtgaaagtaactttgcccgagcatatgcacagggtatcagccgaaccaagtactgggagttgatttatgaagactctatggatctaatcgcaaagctaccttgtgttgcagcaaagatctaccgaaatctctacagagaaggcagcggtattggggccattgactctaacctggactggtctcacaatttcaccaacatgttaggctatactgatcatcagttcactgagctcacgcgcctgtacctcaccatccacagtgaccatgagggtggcaatgtaagtgcccataccagccatttggtgggcagtgccctttccgacccttacctgtcctttgcagcagccatgaacgggctggcagggcctctccatggactggcaaatcaggaagtgcttgtctggctaacacagctgcagaaggaagttggcaaagatgtgtcagatgagaagttacgagactacatctggaacacactcaactcaggacgggttgttccaggctatggccatgcagtactaaggaagactgatccgcgatatacctgtcagcgagagtttgctctgaaacacctgcctaatgaccccatgtttaagttggttgctcagctgtacaagattgtgcccaatgtcctcttagagcagggtaaagccaagaatccttggcccaatgtagatgctcacagtggggtgctgctccagtattatggcatgacggagatgaattactacacggtcctgtttggggtgtcacgagcattgggtgtactggcacagctcatctggagccgagccttaggcttccctctagaaaggcccaagtccatgagcacagagggtctgatgaagtttgtggactctaagtcagggtaaaactggagactgggtgaaagtgactaccagaaagtgaggaagcctaaataaaaagtatacttttgtttcagggggcctttaaagacttaagattaaattatatctgaggcactgataatatgtttgaggttaaaatataaattaagactttaaaagatgaaaaatggtcccttcttccctaatcagctcccttcccctgcctggtatgagttgcccatcatacgcatggtcctggaggatgaccaggactaatgcatgtggtatgagtaggtttggccccctcactatctctagagtgagaatctggctcctgtttccatgggtcaaagccggttgcagagaatctgtagtcactttggagctttagcttctctgccaagccctcaataagccagcaaaccaggactctgccccttctgtttccataggaatcatgttggatagtcagctgtaccaagccccttggccctctcccatgcacacaaacacctcctagcaagacctgttggttagctggacatgctttggcaatttttttatactaccaagtgaccataaaggcatggcatttgttgtgactggcacccaatgtttgattttttttttaaaactatccaattaaaattaaggtctgggagtgttctgtttcccattactttaatactcacctcctcccagactttctacacctgttgcacctcaggcagaggatgttctggacctccccctcttggtccctactagagacctctcaacagatctgtgggcccagtcattgggttttatcagtgcttaatgtgaactaagttttttacttccacagaatacaagccactaccttctgacctccccaccccccaccaacccccatcttttaatatgctgtggggcatagaactccggaatgaccagcatgatattttcagagtcttgtccccggggtattagcacctctttttgaacagggaattgattcaagattggacatggtctcctctgattatcaggtactggggctgagggcattaaaaatagtaagcctccctcctcgtcccctgcctcaagaaattgcctccttatttatcaacatctttttcctccctttccctgagagctcacagtacaatgtttcagaagccccatttgcacaggttttcagcaactcagaatgctctacttctttttctttgagaaaggattaagatacactcctgctgtgcccccatctttcctccaaactcctgcctgtgtttgtgtggatacccagtcccagaaccacactgttgagttggacacactgtaaacccctgggtaactgtcaagtcatgatggagacttcaggttgttctgtataaaatgcaaaataaatgtttttattaacaa

SEQ ID NO: 143289 - DNA, 589 bp, Artificial Sequence
  derived and/or modified sequence
ctccttgaggaccccgggctgggcgccgccgccgatcccggagatcgcccgccatggctttacttactgcggccgcccggctcttgggaaccaagaatgcatcttgtcttgttcttgcagcccggcatgccagtgcttcctccacgaatttgaaagacatattggctgacctgatacctaaggagcaggccagaattaagactttcaggcagcaacatggcaagacggtggtgggccaaatcactgtggacatgatgtatggtggcatgagaggcatgaagggattggtctatgaaacatcagttcttgatcctgatgagggcatccgtttccgaggctttagtatccctgaatgccagaaactgctacccaaggctaagggtggggaagaacccctgcctgagggcttattttggctgctggtaactggacatatcccaacagaggaacaggtatcttggctctcaaaagagtgggcaaagagggcagctctgccttcccatgtggtcaccatgctggacaactttcccaccaatctacaccccatgtctcagctcagtgcagctgttacagccctcaacagtgaaag

SEQ ID NO: 143290 - DNA, 1401 bp, Artificial Sequence
  derived and/or modified sequence
atggccctgctgaccgccgccgccagactgctgggcaccaagaacgccagctgcctggtgctggccgccagacacgccagcgccagcagcaccaacctgaaggacatcctggccgacctgatccccaaggagcaggccagaatcaagaccttcagacagcagcacggcaagaccgtggtgggccagatcaccgtggacatgatgtacggcggcatgagaggcatgaagggcctggtgtacgagaccagcgtgctggaccccgacgagggcatcagattcagaggcttcagcatccccgagtgccagaagctgctgcccaaggccaagggcggcgaggagcccctgcccgagggcctgttctggctgctggtgaccggccacatccccaccgaggagcaggtgagctggctgagcaaggagtgggccaagagagccgccctgcccagccacgtggtgaccatgctggacaacttccccaccaacctgcaccccatgagccagctgagcgccgccgtgaccgccctgaacagcgagagcaacttcgccagagcctacgcccagggcatcagcagaaccaagtactgggagctgatctacgaggacagcatggacctgatcgccaagctgccctgcgtggccgccaagatctacagaaacctgtacagagagggcagcggcatcggcgccatcgacagcaacctggactggagccacaacttcaccaacatgctgggctacaccgaccaccagttcaccgagctgaccagactgtacctgaccatccacagcgaccacgagggcggcaacgtgagcgcccacaccagccacctggtgggcagcgccctgagcgacccctacctgagcttcgccgccgccatgaacggcctggccggccccctgcacggcctggccaaccaggaggtgctggtgtggctgacccagctgcagaaggaggtgggcaaggacgtgagcgacgagaagctgagagactacatctggaacaccctgaacagcggcagagtggtgcccggctacggccacgccgtgctgagaaagaccgaccccagatacacctgccagagagagttcgccctgaagcacctgcccaacgaccccatgttcaagctggtggcccagctgtacaagatcgtgcccaacgtgctgctggagcagggcaaggccaagaacccctggcccaacgtggacgcccacagcggcgtgctgctgcagtactacggcatgaccgagatgaactactacaccgtgctgttcggcgtgagcagagccctgggcgtgctggcccagctgatctggagcagagccctgggcttccccctggagagacccaagagcatgagcaccgagggcctgatgaagttcgtggacagcaagagcggctag

SEQ ID NO: 143291 - DNA, 537 bp, Artificial Sequence
  derived and/or modified sequence
atggccctgctgaccgccgccgccagactgctgggcaccaagaacgccagctgcctggtgctggccgccagacacgccagcgccagcagcaccaacctgaaggacatcctggccgacctgatccccaaggagcaggccagaatcaagaccttcagacagcagcacggcaagaccgtggtgggccagatcaccgtggacatgatgtacggcggcatgagaggcatgaagggcctggtgtacgagaccagcgtgctggaccccgacgagggcatcagattcagaggcttcagcatccccgagtgccagaagctgctgcccaaggccaagggcggcgaggagcccctgcccgagggcctgttctggctgctggtgaccggccacatccccaccgaggagcaggtgagctggctgagcaaggagtgggccaagagagccgccctgcccagccacgtggtgaccatgctggacaacttccccaccaacctgcaccccatgagccagctgagcgccgccgtgaccgccctgaacagcgagtag

SEQ ID NO: 143292 - protein, 804 aa, Artificial Sequence
  derived and/or modified sequence
MTNQEKWAHLSPSEFSQLQKYAEYSTKKLKDVLEEFHGNGVLAKYNPEGKLVVLGNTIDFEGFKLFMKTFLEAELPDDFTAHLFMSFSNKFPHSSPMVKSKPALLSGGLRMNKGAITPPRTTSPANTCSPEVIHLKDIVCYLSLLERGRPEDKLEFMFRLYDTDGNGFLDSSELENIISQMMHVAEYLEWDVTELNPILHEMMEEIDYDHDGTVSLEEWIQGGMTTIPLLVLLGLENNVKDDGQHVWRLKHFNKPAYCNLCLNMLIGVGKQGLCCSFCKYTVHERCVARAPPSCIKTYVKSKRNTDVMHHYWVEGNCPTKCDKCHKTVKCYQGLTGLHCVWCQITLHNKCASHLKPECDCGPLKDHILPPTTICPVVLQTLPTSGVSVPEERQSTVKKEKSGSQQPNKVIDKNKMQRANSVTVDGQGLQVTPVPGTHPLLVFVNPKSGGKQGERIYRKFQYLLNPRQVYSLSGNGPMPGLNFFRDVPDFRVLACGGDGTVGWVLDCIEKANVGKHPPVAILPLGTGNDLARCLRWGGGYEGENLMKILKDIENSTEIMLDRWKFEVIPNDKDEKGDPVPYSIINNYFSIGVDASIAHRFHIMREKHPEKFNSRMKNKFWYFEFGTSETFSATCKKLHESVEIECDGVQIDLINISLEGIAILNIPSMHGGSNLWGESKKRRSHRRIEKKGSDKRTTVTDAKELKFASQDLSDQLLEVVGLEGAMEMGQIYTGLKSAGRRLAQCSCVVIRTSKSLPMQIDGEPWMQTPCTIKITHKNQAPMLMGPPPKTGLFCSLVKRTRNRSKE

SEQ ID NO: 143293 - protein, 804 aa, Artificial Sequence [sequence omitted]

SEQ ID NO: 143294 - DNA, 2415 bp, Artificial Sequence
  derived and/or modified sequence
atgactaaccaggagaaatgggcccatttatccccttccgagttttcacagctacaaaaatatgcagagtacagcacgaagaaactgaaggacgttttagaggagttccatggcaacggggtgctagccaagtacaacccagagggcaagctggtcgtgctggggaacacaatagacttcgaggggtttaaactatttatgaaaacttttctggaggcagagttaccggatgactttacggcacacctgtttatgtcattctcaaataagttccctcactcctctcctatggttaaaagtaagcctgccctcctctctggaggtctacgtatgaacaagggcgccatcactccaccccggactacaagtcccgctaatacgtgtagccccgaggtgattcatcttaaggacatagtatgttacctctcactcctagaacgcgggcgtccagaggataagctagaattcatgttcaggctttatgatactgatggcaatggtttcctcgacagcagtgagctcgaaaatattatttctcaaatgatgcacgtcgccgaatatctcgaatgggacgtgacagagctgaatcccattctgcatgaaatgatggaggagatcgactacgaccatgacggaaccgtctccctcgaggagtggatacagggtggaatgaccactataccactgctagtcctcttaggcctcgagaataacgtcaaggacgacggacagcatgtgtggaggttgaaacatttcaacaaacccgcttattgtaacctgtgcctgaatatgctcattggcgtcgggaagcagggcctctgttgtagtttctgcaaatacacagtgcacgagcgttgcgtcgcacgagcccccccaagctgcatcaaaacttacgtcaaatcaaaacgcaacaccgacgtgatgcatcattactgggtcgaaggaaattgtcctaccaagtgtgacaagtgccacaaaaccgtgaagtgctaccagggtctaaccggactgcattgcgtatggtgtcaaataaccctgcataacaaatgcgcctcgcatttaaagcccgagtgtgactgtgggcccctgaaagatcatatactcccaccgaccaccatatgcccagtggtgcttcaaaccttaccaaccagcggcgttagtgtgccagaggagagacagtcaacggttaagaaagaaaagagcggttcccagcagcctaacaaggtaattgacaagaataagatgcagagagccaacagtgtgaccgtggatggacaaggattacaggtaacaccagtgcctggaacccaccccctcctggttttcgtgaaccctaagtccggaggcaagcagggagagcgtatctatagaaagtttcaatatctgttgaaccccaggcaggtctactctctgagcggcaacggaccaatgcccggcttgaacttctttcgggacgtgccggactttcgtgtgcttgcctgtgggggcgatggaacagttggctgggtcctggattgcatcgaaaaggctaacgtggggaagcatcctcctgtggctatactgccactcgggacaggtaatgacctggcccgatgtctgcgatggggcggtggctacgaaggcgagaacctgatgaaaatcctgaaagatatagagaacagcactgagattatgcttgatcggtggaaatttgaggttatacctaatgacaaagacgaaaagggtgacccggttccttactctatcattaacaactatttcagcataggagtggatgcttctatcgcacataggtttcatattatgagagaaaagcatccagagaagtttaactcccgcatgaagaataagttttggtatttcgagtttgggacctccgaaacattttctgccacttgcaaaaagctccacgagtcggtggagatcgagtgcgatggcgtccagatcgatctgatcaatatcagtctggagggcattgcgattctcaatatcccaagtatgcatggcggctcaaacctgtggggagagtctaaaaagaggcggtcacaccgaaggatagaaaagaaggggtcagacaagcgaacaacggtgactgatgcgaaggaactcaagttcgcctcccaagacttgtcagatcagttgttagaagtggtgggattagaaggtgcgatggaaatgggccagatctacaccgggctgaaatctgccggacggaggcttgcccaatgctcatgtgtcgttattcggacatccaaaagtctccccatgcagatagacggagagccatggatgcagaccccatgtactatcaaaattactcacaagaaccaggctccaatgctgatgggtccacctcccaagaccggacttttctgttccctggttaaacgcacccgtaacaggtctaaagagtag

SEQ ID NO: 143295 - DNA, 2415 bp, Artificial Sequence
  derived and/or modified sequence
atgacaaaccaggagaaatgggctcacctgagcccgagtgaattcagtcaacttcagaaatacgcagaatactccactaaaaagctgaaagatgtgctggaggaattccacggtaacggtgttcttgctaaatataaccccgagggcaaacaggacatcctgaatcagacgatagactttgagggttttaagctctttatgaagacctttctcgaggctgaactcccagatgacttcaccgcccatttgtttatgtcgtttagcaacaagttcccccactcttcacctatggtgaagagtaaaccagcgctgctgtccgggggcctaaggatgaataaaggggccataacgccccccaggactactagccccgccaatacatgcagcccagaggttattcacctgaaggatatagtatgctatctctctttattagaaaggggccgtcctgaagataagctggaatttatgtttcggttatacgatactgacggaaatggtttcctggacagcagcgagctggaaaacattatttcacagatgatgcacgtggccgagtacctagaatgggacgtgaccgagctgaaccccatccttcacgagatgatggaggagatcgattacgatcacgatggtaccgtttcactggaggagtggatccagggaggtatgacaacaatccccctgctggtattgctcggcctggagaacaatgtcaaagacgatgggcagcacgtgtggagattgaaacacttcaacaagcctgcatattgcaacctgtgtctcaatatgctgatcggggtggggaaacagggactctgttgttcattctgtaaatataccgtgcatgagcgctgtgtcgccagggcccccccaagctgcataaagacttacgttaaatccaagaggaataccgatgtgatgcaccactactgggtagaaggcaactgccccacgaaatgcgataagtgccataagacagttaaatgttaccagggccttacagggctacattgtgtctggtgtcagattaccctccacaataagtgcgctagccaccttaaacccgagtgtgattgcgggcccctcaaggaccacatccttccacctacaacaatttgccctgtcgtgctccagacgctgcccacctcaggagtgagcgtgcccgaggaacgccagtctaccgtgaagaaagaaaaatccgggtcccagcagccaaacaaagtaattgataagaataaaatgcagagggcaaatagcgtgacagtggatgggcaggggctccaggttactcctgttccagggacccaccccctcctggtgttcgtgaatcctaaatcaggaggtaaacaaggagagcgcatttatcgcaagtttcaatacctcttgaaccctcgtcaggtctacagtttatcaggcaatgggccgatgcccggcttgaactttttccgggacgtgcctgacttccgtgtgctcgcatgtggaggggacggcacagtgggatgggtgctggattgcattgagaaggctaacgtgggcaagcaccctcctgtggcaatcctcccattgggtactggaaatgacctagcgaggtgtctgcggtggggcgggggctacgagggggagaacctgatgaaaatcctcaaagacatagagaacagtactgagatcatgttggatcgctggaagtttgaggtgatacctaacgataaggatgagaagggagatccagtaccctacagtattattaacaactacttttctatcggggtggacgcaagcattgcacatcgctttcatatcatgcgggaaaagcacccggaaaaattcaatagccggatgaagaacaagttctggtattttgaatttggaacatcagaaaccttttctgccacctgcaagaaactccacgagtctgtggagattgaatgtgatggggtgcaaatcgatctgattaacatttccctggagggtatcgctattctaaatattcctagtatgcacggcggttctaacctgtggggagaaagtaagaagagacgttcccatcgacggattgagaaaaaaggcagcgataaacggacgacagtgacggatgcaaaggagctgaagttcgcatctcaggatctttcagatcagctactagaggtcgttggactagagggtgcgatggaaatgggccagatctacactggtctcaagtccgcaggcaggagattagctcagtgttcttgcgtggttattcggacttcaaagtccctgcctatgcagatcgacggagaaccatggatgcagacaccctgcactattaaaattactcacaagaaccaagccccgatgctcatgggaccaccaccaaagactggactattctgcagcttagtcaagaggacccgcaatcgctccaaggagtag

SEQ ID NO: 143296 - DNA, 2415 bp, Artificial Sequence
  derived and/or modified sequence
atgacgaaccaagaaaagtgggctcatctgtctccctcagaatttagccagctgcagaaatacgctgaatattccaccaagaaactgaaggatgtcctggaggagttccatggaaatggagttttagccaagtataatcctgaagggaagcaggatattctgaatcagacaattgactttgagggattcaagttgtttatgaagacatttctggaggcagagttaccagacgattttactgcacacctgtttatgagtttcagcaataagttcccccactccagccccatggtgaagtcaaagcccgcactgctgagtgggggcttaaggatgaataagggcgccataacacctcctcgtaccactagcccggcaaatacatgctcacccgaagtgatacaccttaaagacattgtctgttacttgagtctgctcgagaggggcagacctgaagataaacttgagtttatgtttagactttatgataccgatgggaacggattcctggactcttctgaattggagaatatcatttctcaaatgatgcatgttgccgagtacctggagtgggatgtgaccgagcttaacccaatcctccacgaaatgatggaagagatagactacgaccacgacgggactgtgagtctggaggagtggatccagggcggaatgacaacaattcccctactggttctcctgggcttggagaacaatgtgaaagacgatggtcagcacgtgtggcgactgaagcatttcaacaaaccagcatactgcaacctgtgcctgaacatgctaatcggggtgggtaaacagggtctctgttgctcattctgtaagtacactgtgcatgaaagatgtgtggcgagggcacccccgagctgtataaaaacctatgtaaagagcaaaagaaatacagacgtgatgcaccattattgggtggaggggaattgtcccactaagtgtgacaagtgccataagacagtgaaatgttaccagggcctcacggggctccattgtgtatggtgtcagattacactgcacaacaaatgcgcttctcacctgaaacccgagtgtgattgcggacctctcaaagatcatatccttcctcctaccaccatctgccccgtggtgctgcagactctgccgacatcgggcgtaagtgtgccggaagaaagacagtccaccgtgaaaaaagaaaagagcgggtcccagcaacccaacaaagtcatcgataagaacaaaatgcagagggcaaactctgtgactgttgacggtcaaggcctacaggtgaccccagtacccggcacgcacccattactcgttttcgttaatccaaagtcgggcgggaagcagggggagaggatttataggaaatttcaatacttgctcaatcctaggcaggtctactctctgtcaggtaatggccccatgcctggcctcaattttttccgagatgtgccagatttccgggttcttgcatgcggaggagacggtacggttggttgggtcctcgactgcattgagaaagccaacgtggggaaacacccaccggtcgccattctccctttaggaactggcaacgacctggcacgttgcttgcggtgggggggtggttatgagggagaaaacctcatgaagatactgaaggatattgagaattcaacagagattatgctggacaggtggaaattcgaggtgatccccaacgacaaggatgaaaaaggagacccagtgccttacagcatcatcaataactacttctctatcggggtggatgccagcattgctcatcgcttccacattatgcgagaaaagcatcccgagaaatttaacagtcgcatgaagaacaagttctggtattttgagtttggcacatctgagacattctccgctacatgcaaaaagttgcacgagtcggtggagatagagtgcgacggggtacagatcgacttgatcaatatttccctggagggaattgctattctgaatatcccgagtatgcacggaggctccaacctctggggagagtccaagaaacgccggagtcaccgtaggatcgagaagaagggatccgataagaggacgacagtcacagacgccaaagaactcaagtttgccagccaggacctgtcagatcagttactggaggttgtcggtctggaaggggccatggagatgggccagatatacacaggactcaaaagtgccgggagaagactggcccagtgctcctgtgtggtgattaggacttccaaatcactccccatgcagatagacggggagccatggatgcagaccccatgtacaattaagattacccacaagaatcaggcccctatgttaatggggccacctcccaaaaccggcctgttttgcagcctggtcaaaaggactcgcaaccggtcgaaggaatag

SEQ ID NO: 143297 - DNA, 2415 bp, Artificial Sequence
  derived and/or modified sequence
atgaccaaccaggagaagtgggcccacctgagccccagcgagttcagccagctgcagaagtatgcagagtacagcaccaagaagctgaaggatgtgctggaggagttccatggaaatggagtgctggccaagtacaaccctgagggcaagctggtggtgctgggcaacaccatcgactttgagggcttcaagctgttcatgaagaccttcctggaggccgagctgcctgatgacttcaccgcccacctgttcatgtccttcagcaacaagttcccccacagcagccccatggtgaagagcaagccagccctgctgagcggcggcctgaggatgaacaagggggccatcaccccacccaggaccaccagccctgccaacacctgcagccctgaggtgatccacctgaaggacatcgtgtgctacctgagcctgctggagcggggccggcctgaggacaagctggagttcatgttccggctgtatgacacagatggaaatggcttcctggacagcagcgagctggagaacatcatcagccagatgatgcacgtggccgagtacctggagtgggatgtgacagagctgaaccccatcctgcacgagatgatggaggagattgattatgaccatgatggcaccgtgtccctggaggagtggatccagggcggcatgaccaccatccccctgctggtgctgctgggcctggagaacaacgtgaaggatgatggccagcacgtgtggaggctgaagcacttcaacaagccagcctactgcaacctgtgcctgaacatgctgattggagtgggcaagcagggcctgtgctgcagcttctgcaagtacacagtgcatgagcgctgtgtggcccgggccccacccagctgcatcaagacctacgtgaagagcaagaggaacacagatgtgatgcaccactactgggtggagggcaactgccccaccaagtgtgacaagtgccacaagacagtgaagtgctaccagggcctgaccggcctgcactgtgtgtggtgccagatcaccctgcacaacaagtgtgccagccacctgaagccagaatgtgactgtggccccctgaaggaccacatcctgccccccaccaccatctgccctgtggtgctgcagaccctgcccaccagcggcgtgtctgtgcctgaggagcggcagagcacagtgaagaaggagaagagcggcagccagcagcccaacaaggtgattgacaagaacaagatgcagagggccaacagcgtgacagtggatggccagggcctgcaggtgacccctgtgcccggcacccaccccctgctggtgtttgtgaaccccaagagcggcggcaagcagggcgagcgcatctacaggaagttccagtacctgctgaacccccggcaggtgtacagcctgtctggaaatggccccatgcctggcctgaacttcttcagagatgtgcctgacttccgggtgctggcctgtggaggagatggcaccgtgggctgggtgctggactgcatcgagaaggccaacgtgggcaagcacccccctgtggccatcctgcccctgggcactggaaatgacctggcccgctgcctgcgctggggcggcggctatgaaggagagaacctgatgaagatcctgaaggacatcgagaacagcacagagatcatgctggaccgctggaagtttgaggtgatccccaatgacaaggatgagaagggggaccctgtgccctacagcatcatcaacaactacttcagcattggagtggatgccagcatcgcccaccgcttccacatcatgagggagaagcaccctgagaagttcaacagcaggatgaagaacaagttctggtactttgaatttggcaccagcgagaccttcagcgccacctgcaagaagctgcatgaatctgtggagattgaatgtgatggagtgcagattgacctgatcaacatcagcctggagggcatcgccatcctgaacatccccagcatgcacggcggcagcaacctgtggggcgagagcaagaagaggaggagccaccggcgcatcgagaagaagggcagtgacaagaggaccaccgtgacagatgccaaggagctgaagtttgccagccaggacctgagtgaccagctgctggaggtggtgggcctggagggcgccatggagatgggccagatctacacaggcctgaagtctgctggccggcggctggcccagtgcagctgtgtggtgatccgcaccagcaagagcctgcccatgcagattgatggagagccctggatgcagaccccctgcaccatcaagatcacccacaagaaccaggcccccatgctgatgggccccccacccaagacaggcctcttctgcagcctggtgaagaggaccaggaacagaagcaaggagtag

SEQ ID NO: 143298 - DNA, 2415 bp, Artificial Sequence
  derived and/or modified sequence
atgaccaaccaggagaagtgggcccacctgagccccagcgagttcagccagctgcagaagtatgcagagtacagcaccaagaagctgaaggatgtgctggaggagttccatggaaatggagtgctggccaagtacaaccctgagggcaagcaggacatcctgaaccagaccatcgactttgagggcttcaagctgttcatgaagaccttcctggaggccgagctgcctgatgacttcaccgcccacctgttcatgtccttcagcaacaagttcccccacagcagccccatggtgaagagcaagccagccctgctgagcggcggcctgaggatgaacaagggggccatcaccccacccaggaccaccagccctgccaacacctgcagccctgaggtgatccacctgaaggacatcgtgtgctacctgagcctgctggagcggggccggcctgaggacaagctggagttcatgttccggctgtatgacacagatggaaatggcttcctggacagcagcgagctggagaacatcatcagccagatgatgcacgtggccgagtacctggagtgggatgtgacagagctgaaccccatcctgcacgagatgatggaggagattgattatgaccatgatggcaccgtgtccctggaggagtggatccagggcggcatgaccaccatccccctgctggtgctgctgggcctggagaacaacgtgaaggatgatggccagcacgtgtggaggctgaagcacttcaacaagccagcctactgcaacctgtgcctgaacatgctgattggagtgggcaagcagggcctgtgctgcagcttctgcaagtacacagtgcatgagcgctgtgtggcccgggccccacccagctgcatcaagacctacgtgaagagcaagaggaacacagatgtgatgcaccactactgggtggagggcaactgccccaccaagtgtgacaagtgccacaagacagtgaagtgctaccagggcctgaccggcctgcactgtgtgtggtgccagatcaccctgcacaacaagtgtgccagccacctgaagccagaatgtgactgtggccccctgaaggaccacatcctgccccccaccaccatctgccctgtggtgctgcagaccctgcccaccagcggcgtgtctgtgcctgaggagcggcagagcacagtgaagaaggagaagagcggcagccagcagcccaacaaggtgattgacaagaacaagatgcagagggccaacagcgtgacagtggatggccagggcctgcaggtgacccctgtgcccggcacccaccccctgctggtgtttgtgaaccccaagagcggcggcaagcagggcgagcgcatctacaggaagttccagtacctgctgaacccccggcaggtgtacagcctgtctggaaatggccccatgcctggcctgaacttcttcagagatgtgcctgacttccgggtgctggcctgtggaggagatggcaccgtgggctgggtgctggactgcatcgagaaggccaacgtgggcaagcacccccctgtggccatcctgcccctgggcactggaaatgacctggcccgctgcctgcgctggggcggcggctatgaaggagagaacctgatgaagatcctgaaggacatcgagaacagcacagagatcatgctggaccgctggaagtttgaggtgatccccaatgacaaggatgagaagggggaccctgtgccctacagcatcatcaacaactacttcagcattggagtggatgccagcatcgcccaccgcttccacatcatgagggagaagcaccctgagaagttcaacagcaggatgaagaacaagttctggtactttgaatttggcaccagcgagaccttcagcgccacctgcaagaagctgcatgaatctgtggagattgaatgtgatggagtgcagattgacctgatcaacatcagcctggagggcatcgccatcctgaacatccccagcatgcacggcggcagcaacctgtggggcgagagcaagaagaggaggagccaccggcgcatcgagaagaagggcagtgacaagaggaccaccgtgacagatgccaaggagctgaagtttgccagccaggacctgagtgaccagctgctggaggtggtgggcctggagggcgccatggagatgggccagatctacacaggcctgaagtctgctggccggcggctggcccagtgcagctgtgtggtgatccgcaccagcaagagcctgcccatgcagattgatggagagccctggatgcagaccccctgcaccatcaagatcacccacaagaaccaggcccccatgctgatgggccccccacccaagacaggcctcttctgcagcctggtgaagaggaccaggaacagaagcaaggagtag

SEQ ID NO: 143299 - DNA, 2415 bp, Artificial Sequence
  derived and/or modified sequence
atgaccaaccaggagaagtgggcccacctgagccccagcgagttcagccagctgcagaaatacgcagaatactccacaaaaaagctgaaggatgtattggaagagtttcacgggaacggtgtcctggctaaatataatccagaggggaaattggtagtgttggggaataccattgacttcgaaggcttcaaactgtttatgaaaaccttcttagaagctgagctgcccgacgacttcactgcccacctgttcatgagcttcagcaataaatttccgcacagctcgcccatggtgaaatccaagcccgccctgcttagcggcggactccgcatgaataaaggggccatcacacctccacggacaaccagccccgctaatacctgttccccagaagtgatacacctgaaagatatagtctgctatctaagcctgctggagagaggtcggcccgaagacaagcttgagtttatgttcaggctctacgacaccgatggaaacgggtttctggactccagcgagctggaaaatattatatcacagatgatgcatgtggccgaatacctggagtgggacgtgaccgagctgaaccctatactccatgaaatgatggaagaaattgactatgatcatgatggaacggtctcactggaggaatggatccaaggcggaatgacaaccattccactgctggtgctattggggttagagaacaacgtcaaggacgatggtcagcatgtgtggaggctgaaacactttaataagcctgcctactgtaacctgtgtttgaatatgttgatcggagtcggcaagcaaggattgtgctgttcattctgcaagtacaccgtgcacgagaggtgcgtcgcccgggccccaccgtcgtgtataaagacatatgttaaatccaaacggaataccgacgtaatgcaccattattgggtggagggcaactgtcctacaaagtgtgataagtgtcacaagacagtgaagtgctatcaaggcctgaccggactccattgtgtttggtgccaaataacactccataataagtgcgctagtcatctcaagccagagtgtgattgtggtcctctaaaggaccatatcctgcctcccaccaccatctgtcccgtagttcttcagaccctgccgacttctggagtgtccgtcccagaagaacggcaatccaccgtaaaaaaggagaagtctggcagtcaacagcccaacaaggtgattgataagaacaaaatgcaacgcgccaattctgttaccgtcgatgggcagggactccaggttaccccagtgcccggaacccaccccctcctcgtttttgtgaatcccaaaagtgggggcaaacaaggtgagcggatttacaggaagttccagtacctgcttaacccgcggcaggtgtacagcctgtcggggaatggaccaatgccaggtttgaattttttccgggacgtccccgattttcgagtgctggcgtgtggtggcgatggcactgtggggtgggtgcttgattgtatcgagaaagctaatgtgggtaaacatccccccgtggcaattctcccactagggactggcaacgatctggctaggtgtctgcgctggggcggcgggtatgaaggagagaaccttatgaagattctaaaagatatagaaaatagtacagaaattatgctggataggtggaaattcgaagtgatccccaacgataaagatgagaaaggtgaccccgtgccctattcaattatcaataattacttctctattggcgtggatgcaagcatcgcccatcgttttcatatcatgagggaaaagcatccagagaaatttaatagtcgcatgaagaataagttttggtatttcgagtttggaaccagcgaaaccttctcagccacttgtaagaagcttcacgaaagtgtggaaatcgaatgtgacggcgtccagatcgacctcatcaatatttccctcgaagggattgccatcctcaacatcccctccatgcacggtggatccaatctgtggggtgagtcaaaaaaacggcgcagtcaccgaagaatcgagaaaaagggtagcgacaagcgcaccactgtcacagacgcgaaggagctgaagtttgcttcccaggatctgagcgaccagctactcgaagtagtgggcctagagggagcaatggaaatggggcaaatatataccggacttaaatctgctggacgccggctggctcagtgcagctgcgtggttatacggacctccaagagcctcccaatgcagatagacggtgaaccctggatgcaaacaccctgcacaatcaagatcactcacaaaaaccaggcgcccatgctgatgggtccacctcccaagactggcctcttttgttccctcgttaagcgcacacgaaatcggtcaaaagagtag

SEQ ID NO: 143300 - DNA, 2415 bp, Artificial Sequence
  derived and/or modified sequence
atgaccaaccaggagaagtgggcccacctgagccccagcgagttctcccagctgcagaagtatgctgagtactccaccaaaaagctgaaagatgtgttagaggaattccacgggaatggtgtgctggcaaaatacaatcccgaagggaaacaggacatcctaaatcagacaattgacttcgagggattcaaactgtttatgaagacattcctggaagcagagctcccagacgactttacggcgcatttatttatgtccttctctaataaattcccccacagcagcccaatggtcaagtcaaagccagcgctcctttcaggcgggctgagaatgaataaaggcgcgatcacccctcctaggacaacctctcccgctaacacttgttcaccagaggtcatccacctgaaagacattgtatgctacctgtccttgctggaacgcggacgaccagaagataaactcgaatttatgttccggctgtatgacactgacggtaatggcttcctggacagttcggagcttgagaatataataagccagatgatgcacgtggcagagtacctcgagtgggatgtaacagaactgaaccccatccttcacgaaatgatggaggagatcgattacgatcatgacggaaccgtatcccttgaggaatggattcagggtggcatgacaacaatccccctactggtgctgttgggactggagaataatgttaaggacgacggtcagcacgtttggagactcaagcactttaacaagcctgcgtactgcaatctgtgtttgaacatgcttatcggcgttggcaagcagggtctctgttgttccttttgcaaatacacagtgcacgaaagatgtgtggctagggcgccgccctcttgcatcaagacctatgtcaagtcaaaaaggaatacggatgtcatgcaccactactgggtggaggggaattgtcccacaaagtgcgacaagtgccacaaaacagtcaagtgctatcagggtctcactggactacattgcgtgtggtgtcagataaccctgcataacaagtgcgctagtcatttgaaacccgagtgcgattgtggacctctcaaagatcacatactcccacccaccaccatttgcccggtcgtgcttcagaccttaccgacttctggggtgtccgtgcccgaggagagacagagcaccgttaaaaaggagaaatccggatcacagcagcccaataaagtgattgataagaataagatgcagcgtgctaatagcgtgacagtcgacgggcaggggcttcaagtcactccagtccctgggacgcaccccctgcttgtgttcgtgaaccctaaatccggtggaaaacagggggagagaatataccgcaagtttcaatacctgctgaatccaagacaagtgtactccctgtccggcaacggccccatgcctgggctaaatttctttagggacgtgccggactttagggtgctggcatgcggcggggacgggaccgtgggctgggtattagattgcatcgaaaaagctaatgtgggaaaacatcctccagtggctatcttaccacttgggactggaaacgatctagcccgctgcctccggtggggcggggggtatgagggagagaacctgatgaaaatcctgaaggatatcgaaaattctaccgagattatgctggacaggtggaaattcgaagtcattcccaatgataaggacgagaagggcgatcccgttccatactcaattataaacaattacttctctataggagtggacgcctcaatagcccaccgcttccacattatgagagagaagcaccccgagaagtttaatagccggatgaagaacaagttttggtattttgagtttgggacatcagaaaccttttcagccacatgtaagaaactccatgaatctgtggagatagaatgtgatggggtgcagattgacctaatcaacatatctctggagggtatagcgatcctgaatatcccctctatgcacggagggtccaacctctggggggagtcaaagaaacgccggtcccatcgaaggattgagaagaaaggcagcgataagaggaccacagtaacagacgctaaggaactgaagtttgcttctcaagacctttcagaccaactgctagaggtcgtgggcctggaaggggccatggagatgggccagatctatacaggtctgaaaagtgcaggtcggcgcctggcccagtgctcttgcgtggttatccgcacctcaaaatcgcttcctatgcagattgacggggagccatggatgcagaccccatgtaccatcaaaattactcacaagaaccaggcacccatgctaatgggaccccctcccaagactggccttttctgctctctcgtgaaacgaacacgcaataggagtaaagagtag

SEQ ID NO: 143301 - DNA, 2415 bp, Artificial Sequence
  derived and/or modified sequence
atgaccaaccaggagaagtgggcccacctgagccccagcgagttctcgcaactgcaaaagtatgcagaatattccaccaagaagctgaaggacgtgctcgaggagttccacggcaacggagtgctcgctaagtacaatcctgagggaaaacaggatatattaaaccagaccatcgactttgaaggattcaagctgtttatgaagacctttttagaggcagagcttccagatgacttcaccgctcatttattcatgtccttctcaaacaaattcccccacagttcccccatggtgaaaagtaaaccagccctgctgtccggcgggcttaggatgaacaagggcgctatcaccccacccaggaccacttctcccgctaatacctgctccccagaggtcattcatttaaaggacattgtgtgctaccttagcctcctggagcgaggcagacctgaggataagttggagtttatgttcaggctttacgatacagacggaaatgggttcctggactcttcggagttggagaatatcatttcccaaatgatgcacgtcgcggagtatctggaatgggatgtgacagaacttaacccaatcttacacgaaatgatggaagagatcgactacgaccatgatggtactgtgtccctggaagagtggattcagggcgggatgaccaccatacctctactggtcctgctgggcctagaaaacaacgtgaaggatgatggccagcatgtgtggcgcttgaagcactttaataagcccgcatattgcaacctttgtttgaatatgttgattggggtcgggaaacaaggtctgtgttgcagtttttgcaagtacactgttcacgaaagatgcgtagcacgggccccccccagttgtatcaagacatacgttaagagcaaaaggaacactgacgtgatgcaccattattgggtcgaggggaactgcccaaccaagtgtgataaatgccacaaaactgtgaaatgctaccaggggctcacgggcctccactgcgtgtggtgtcaaattacgcttcacaacaagtgtgcctctcaccttaaacccgaatgtgactgcggcccattaaaggaccatattctccctcccacgactatctgtccagtagtgttgcaaacattgcctactagtggcgtttctgtgcccgaagaacgccagagcaccgtgaagaaggagaagagcgggtctcagcaacccaacaaggttattgacaagaataaaatgcaacgggccaactccgtaactgttgacgggcagggactgcaggttactccagtgcccggcacccatccccttcttgtattcgtgaaccccaagtccggcggcaaacagggcgagagaatctacagaaagtttcagtatctgctgaacccgaggcaagtatattcactgagcggtaatggccccatgccagggctgaattttttccgtgacgtgccagatttccgcgtgctggcatgcggcggtgacggcaccgtggggtgggtgctggattgtatcgaaaaagccaacgttggaaagcacccacctgtggcaattctccctctaggcaccggaaatgacctggcacggtgcctgcgatggggcggcgggtacgagggggagaacctcatgaagattttgaaggatatcgaaaactctacggagatcatgctcgaccggtggaagtttgaagtgattccgaacgacaaggatgaaaagggggaccctgtcccctactccattataaacaactacttctcaatcggggttgacgcctccatcgcacaccgttttcatatcatgagggagaagcatccagagaagtttaatagcagaatgaagaataagttttggtactttgagtttggaacatctgaaaccttcagcgctacttgcaagaaattacacgagagtgttgaaatcgagtgcgacggagtccagatagacctgattaatattagcctcgagggaattgccattctaaatatcccatccatgcatggaggcagtaatctctggggagagagtaagaagcggaggtctcaccgacggattgagaaaaaaggctcggacaagcggactacagttacagacgcgaaggaactaaagttcgcctcccaagacttatctgaccagcttctcgaagtggtgggccttgagggcgcaatggaaatgggtcagatatacacaggcctgaagtctgctggacggaggttagcccagtgctcttgcgttgtcatccggacctcgaagtctctacccatgcagattgacggtgagccatggatgcagaccccttgcaccattaaaattacccacaagaatcaggcacccatgttgatggggccgccccccaagaccggactcttttgttccttggtgaaaaggacaagaaatcgaagtaaggaatag

SEQ ID NO: 143302 - DNA, 2415 bp, Artificial Sequence
  derived and/or modified sequence
atgacaaaccaggagaagtgggcacacttgagcccgtcagaattttctcagcttcaaaaatatgccgagtattccactaaaaaacttaaggatgtgctggaggagttccacggcaatggggtgctggcaaagtacaatcctgagggaaaactggttgtgctcggaaataccatcgattttgagggctttaagctgtttatgaagacatttctggaagctgagctacctgacgactttacagcacatctgttcatgtcttttagtaacaagtttccacacagttcccctatggtgaagagcaagcccgcactgctcagcggtggtctgcgaatgaataaaggcgcaattactcccccaaggaccaccagccccgctaatacctgctcccctgaggtcattcacttgaaggatatcgtgtgctatctgagtctgctggagcggggacgcccagaagacaagctggagttcatgtttcggctctacgatacagatgggaatgggttcctggacagtagtgagttggaaaatattatctcacagatgatgcatgtggcggaatatctggagtgggacgtcactgaattaaaccctattcttcatgaaatgatggaagagattgactatgaccacgatgggactgtttccctggaggagtggattcagggcggaatgaccactattcctctcctcgtgctcctagggctcgaaaataacgtaaaagacgacgggcagcatgtctggcggctcaaacatttcaataagcccgcttactgcaatctgtgcttgaatatgctgattggcgtgggaaaacaagggctgtgctgcagtttttgcaaatatactgtccacgagagatgtgttgccagagccccaccaagttgcattaagacctatgtgaagtcaaagcggaacaccgacgtcatgcatcattactgggtggaggggaactgtcctactaagtgtgacaagtgccacaaaacagttaaatgttaccagggtctaaccggtctccattgcgtgtggtgccagatcactttgcacaacaagtgcgcttcacatcttaaacctgaatgtgattgcggaccacttaaagaccatatcctgcctcccactaccatttgccccgtggttctccaaacactgcccacctctggagtgtccgttcccgaagaacggcaatccactgttaagaaggaaaagtccggctcccagcaacctaataaggtgatcgacaagaataagatgcagagggctaactcggttaccgtggacggacaaggcctgcaagtgacccccgttcccggaactcatccgctactcgtctttgtgaaccccaagagcgggggtaaacaaggggaacgcatctatcggaagtttcagtacctgctgaaccccaggcaggtgtactcgttgtcgggaaacgggcctatgcctgggctgaacttcttcagggatgttcctgacttccgagtactggcctgcggcggagatggtactgtgggctgggttcttgattgcatcgaaaaagccaatgtggggaaacatcccccagtggcgatcctacccttaggcaccggaaacgacctggccaggtgcctgcgatggggcggagggtatgaaggggagaacctgatgaaaatcctgaaggacatcgagaatagcacagaaataatgctggatagatggaaattcgaggtaatcccaaacgacaaggacgagaaaggggaccctgtgccctattctatcattaacaattacttttcgatcggcgtcgacgcatccattgcgcatcggttccacatcatgagggagaagcatccggaaaagttcaattcccgcatgaagaataagttttggtactttgaatttgggactagcgagacatttagcgctacgtgcaagaaattacacgagtctgttgagattgagtgcgacggcgtgcagatcgatcttatcaatatatccctggagggaatcgcaatattgaacatccccagcatgcacggcggatctaacctgtggggcgaatctaagaagcgcaggtcccacagaaggatcgagaaaaaaggttctgacaagcgcacaacagtcaccgatgcaaaggagcttaagtttgccagtcaggacctaagcgaccagcttctagaagttgtgggactcgagggtgcaatggaaatggggcagatttatactggcctgaagagcgcaggcaggaggctagctcagtgctcttgcgtggttatccgcacgtcaaaatcacttccaatgcagatcgacggggagccgtggatgcagacgccgtgtacaattaaaattactcacaagaatcaggcccctatgctgatgggccctccacctaagactggtctgttctgctctctcgtgaaacgcaccagaaatcgctccaaggagtag

SEQ ID NO: 143303 - DNA, 2415 bp, Artificial Sequence
  derived and/or modified sequence
atgacaaatcaggaaaagtgggcccacctatccccaagtgagttcagtcagttgcaaaaatacgcagaatattctaccaagaaactgaaggatgtgctggaggagtttcacggaaacggcgttctggccaagtataatcccgagggaaagcaggacattcttaaccagacaatagacttcgagggtttcaagcttttcatgaagaccttcctcgaagctgagctccccgatgattttacagcgcacctgttcatgtctttttctaacaaatttcctcatagtagtcctatggtgaaaagtaaaccagcgcttcttagtggcggactgaggatgaacaagggagcgatcactccccctaggaccactagtcctgccaacacctgtagtcccgaagttatacatctgaaagatatagtgtgttatctttcactgctggagcggggtcgccctgaggataaactcgaattcatgtttcggctatacgatactgatggcaatggttttctggactcaagtgaactggaaaacatcattagccagatgatgcatgtcgcggaatacctcgagtgggatgtgaccgagctgaacccgatacttcacgaaatgatggaggagatcgactatgatcacgatgggaccgtgagcctggaagagtggatacagggcggaatgacaaccatcccactgctcgtattgctgggcctcgagaacaacgtgaaagatgatggccagcatgtgtggcgcttgaagcatttcaataaaccagcatattgtaatctctgcctgaacatgctgattggcgtggggaaacaaggcctctgctgctccttctgtaaatatacagtccacgaacggtgcgtggcccgagctcctccctcttgtatcaagacttatgtaaagtcaaaaaggaataccgacgtcatgcaccactattgggtagaagggaactgcccaactaaatgtgataagtgtcacaagactgtgaaatgttatcaaggactgacaggactccactgcgtttggtgtcagatcaccctccacaataaatgcgcctcacacctgaagcctgagtgcgattgcggccctttgaaagaccacattctgccgcctactaccatctgccccgtggtgcttcagacactgcccacctctggcgtgagtgtgcccgaggagcggcaatctacagttaaaaaggaaaaaagtggcagccaacagcctaataaagtaatcgataagaataagatgcaacgcgcaaacagcgttacggttgacggtcagggtctgcaggtgactcctgtgcctggtacgcacccactcttggtgttcgtaaaccccaagtccgggggtaaacagggtgaaaggatttatagaaagtttcagtacctcctcaaccctagacaggtgtacagcctgagcggaaacgggccaatgcccggactaaacttttttcgagacgtacctgattttagggtgctggcatgtggtggtgatggcaccgtcgggtgggtgttagattgcatagaaaaggcaaacgtagggaaacacccaccagtggccatcctgcctctcggaaccggaaatgatttggcacgctgtttgcgttggggtggtggctacgaaggcgagaatctcatgaagattctcaaagacatcgagaactcaacggaaattatgctggacagatggaagttcgaggttattcccaatgataaggacgagaaaggagaccctgtgccttactctataatcaataactatttctcaattggggtggacgcctccatcgcccatagattccatatcatgcgagagaaacatcccgaaaaatttaactcacgaatgaagaacaagttctggtatttcgaatttgggacttccgagaccttttcagcaacctgtaaaaagctgcacgagtcagttgaaatcgagtgcgacggggtgcagattgatctaatcaatatctccctggagggaattgctattttgaacattccttccatgcatgggggttcgaatctgtggggggagtcaaagaagcgcaggagccacaggcgcatcgagaaaaaagggagcgacaaacgaaccaccgttactgatgccaaggagttaaagttcgcctcccaggatctctcagatcagctcctggaggttgtgggactggagggcgctatggagatgggtcagatctacaccggcctgaagtcagctggaaggcggctggcccagtgcagctgcgtggtcatacggacaagcaagagcctgcctatgcagatcgacggtgagccgtggatgcaaaccccctgcaccataaagattacacacaaaaaccaggctccgatgctcatggggcctccccctaagactggactcttctgctccttggtgaagcggacccgtaacaggtccaaggagtag

SEQ ID NO: 143304 - DNA, 2415 bp, Artificial Sequence
  derived and/or modified sequence
atgactaaccaggagaagtgggcacacctgagcccgagcgagttcagtcagttgcagaagtatgccgagtacagtactaagaaattaaaagacgtgctcgaggagtttcatggaaacggagtgcttgctaagtacaaccctgagggcaaacaggatatcttgaaccagaccatcgatttcgaggggtttaagttgtttatgaagaccttcctggaggcagagctgcccgacgactttacagctcacctgtttatgtcatttagcaataagttcccccacagctcaccaatggttaaatctaagccagcactgctttctggcggtctacggatgaacaagggcgctatcacaccccctcggactacaagtcccgcaaacacctgctcccccgaagtgattcacctcaaagacatagtgtgttaccttagcctcttggagcggggacgccctgaggacaaactggagtttatgttcagactgtacgatacggacggaaacggattcctggatagcagtgaactggagaatattatttcacagatgatgcacgtcgccgagtatcttgagtgggatgttacagagctgaatccaattctccatgagatgatggaagagattgattatgatcacgacggcactgtcagtcttgaagagtggatacaggggggtatgacaacgatcccactgcttgtgttgctgggacttgaaaacaatgtgaaggacgacggccaacacgtctggcggctcaagcattttaataagccagcctattgtaacctctgtcttaacatgctgattggcgtcggtaagcagggcttgtgttgcagtttttgcaaatatacagtacacgagaggtgcgtggcccgtgctcccccatcttgcattaagacatacgtcaagagtaaaagaaatactgatgttatgcaccattactgggtggaaggcaattgccccacaaagtgcgataagtgtcacaagacagttaagtgctaccaaggcttgaccggcttgcattgcgtatggtgtcagataacacttcataacaaatgtgcatcccacttgaagccagagtgcgactgcgggccactgaaggatcacatccttccgcctacgactatttgtccagtcgtgctgcagacccttccaacctcaggagtgagcgtgccggaagagcggcagagtaccgtgaagaaggaaaaatcaggcagtcaacaacctaacaaggtcatagacaaaaacaaaatgcagcgcgctaactctgtcacagtggacggtcagggtcttcaagttacgccagtgcctggcacccatcccttgctggtgtttgtcaatcccaagagcggaggtaagcagggagaacgtatttatcggaagttccagtatctgttaaacccccgtcaggtgtactcactgagtggcaatgggcctatgccgggtctgaatttttttagagatgtccccgatttcagggtgctggcttgtggtggagacggaaccgttggttgggttctcgactgtatagagaaggcgaacgtggggaaacatccccctgtagctatacttcccctgggaaccggaaatgatctggccaggtgtttgcgatgggggggtgggtacgagggagaaaacctgatgaaaatactcaaggacatcgaaaattccacagagatcatgctggaccgctggaagttcgaagtaatccctaatgacaaagatgagaaaggcgaccccgtgccttactctattataaacaactacttctccattggcgtggatgcgtccattgcccacaggttccatatcatgcgggaaaagcacccggagaaattcaactcacgtatgaaaaacaaattctggtatttcgaattcggcaccagcgagaccttctccgccacctgtaaaaaactacatgaaagcgtggagatcgagtgcgacggagttcagatagacctgatcaacatttccttggagggtatcgccatcctcaacataccgtccatgcacggaggctcaaacctctggggagagtctaaaaagaggaggtcgcatcgccgaatagaaaagaaagggtctgataagagaacaacagtcaccgacgccaaagaactgaagtttgccagtcaggatctgagtgaccaattactggaagtggtaggcttggaaggtgccatggaaatgggacagatatacactggattgaagagcgcagggagacggcttgctcagtgcagctgcgtggttataagaacaagtaaatcactgccgatgcagattgacggagagccctggatgcagaccccttgcacaatcaagatcacccacaagaaccaggcaccgatgctgatgggccctccacctaagacagggctcttttgttctctggtgaagagaacgcggaatcgctccaaggaatag

SEQ ID NO: 143305 - DNA, 2415 bp, Artificial Sequence
  derived and/or modified sequence
atgaccaaccaggagaagtgggcccacctgagccccagcgagttcagccagctgcagaagtacgccgagtacagcaccaagaagctgaaggacgtgctggaggagttccacggcaacggcgtgctggccaagtacaaccccgagggcaagctggtggtgctgggcaacaccatcgacttcgagggcttcaagctgttcatgaagaccttcctggaggccgagctgcccgacgacttcaccgcccacctgttcatgagcttcagcaacaagttcccccacagcagccccatggtgaagagcaagcccgccctgctgagcggcggcctgagaatgaacaagggcgccatcaccccccccagaaccaccagccccgccaacacctgcagccccgaggtgatccacctgaaggacatcgtgtgctacctgagcctgctggagagaggcagacccgaggacaagctggagttcatgttcagactgtacgacaccgacggcaacggcttcctggacagcagcgagctggagaacatcatcagccagatgatgcacgtggccgagtacctggagtgggacgtgaccgagctgaaccccatcctgcacgagatgatggaggagatcgactacgaccacgacggcaccgtgagcctggaggagtggatccagggcggcatgaccaccatccccctgctggtgctgctgggcctggagaacaacgtgaaggacgacggccagcacgtgtggagactgaagcacttcaacaagcccgcctactgcaacctgtgcctgaacatgctgatcggcgtgggcaagcagggcctgtgctgcagcttctgcaagtacaccgtgcacgagagatgcgtggccagagccccccccagctgcatcaagacctacgtgaagagcaagagaaacaccgacgtgatgcaccactactgggtggagggcaactgccccaccaagtgcgacaagtgccacaagaccgtgaagtgctaccagggcctgaccggcctgcactgcgtgtggtgccagatcaccctgcacaacaagtgcgccagccacctgaagcccgagtgcgactgcggccccctgaaggaccacatcctgccccccaccaccatctgccccgtggtgctgcagaccctgcccaccagcggcgtgagcgtgcccgaggagagacagagcaccgtgaagaaggagaagagcggcagccagcagcccaacaaggtgatcgacaagaacaagatgcagagagccaacagcgtgaccgtggacggccagggcctgcaggtgacccccgtgcccggcacccaccccctgctggtgttcgtgaaccccaagagcggcggcaagcagggcgagagaatctacagaaagttccagtacctgctgaaccccagacaggtgtacagcctgagcggcaacggccccatgcccggcctgaacttcttcagagacgtgcccgacttcagagtgctggcctgcggcggcgacggcaccgtgggctgggtgctggactgcatcgagaaggccaacgtgggcaagcacccccccgtggccatcctgcccctgggcaccggcaacgacctggccagatgcctgagatggggcggcggctacgagggcgagaacctgatgaagatcctgaaggacatcgagaacagcaccgagatcatgctggacagatggaagttcgaggtgatccccaacgacaaggacgagaagggcgaccccgtgccctacagcatcatcaacaactacttcagcatcggcgtggacgccagcatcgcccacagattccacatcatgagagagaagcaccccgagaagttcaacagcagaatgaagaacaagttctggtacttcgagttcggcaccagcgagaccttcagcgccacctgcaagaagctgcacgagagcgtggagatcgagtgcgacggcgtgcagatcgacctgatcaacatcagcctggagggcatcgccatcctgaacatccccagcatgcacggcggcagcaacctgtggggcgagagcaagaagagaagaagccacagaagaatcgagaagaagggcagcgacaagagaaccaccgtgaccgacgccaaggagctgaagttcgccagccaggacctgagcgaccagctgctggaggtggtgggcctggagggcgccatggagatgggccagatctacaccggcctgaagagcgccggcagaagactggcccagtgcagctgcgtggtgatcagaaccagcaagagcctgcccatgcagatcgacggcgagccctggatgcagaccccctgcaccatcaagatcacccacaagaaccaggcccccatgctgatgggccccccccccaagaccggcctgttctgcagcctggtgaagagaaccagaaacagaagcaaggagtag

SEQ ID NO: 143306 - DNA, 2415 bp, Artificial Sequence
  derived and/or modified sequence
atgaccaaccaggagaagtgggcccacctgagccccagcgagttcagccagctgcagaagtacgccgagtacagcaccaagaagctgaaggacgtgctggaggagttccacggcaacggcgtgctggccaagtacaaccccgagggcaagcaggacatcctgaaccagaccatcgacttcgagggcttcaagctgttcatgaagaccttcctggaggccgagctgcccgacgacttcaccgcccacctgttcatgagcttcagcaacaagttcccccacagcagccccatggtgaagagcaagcccgccctgctgagcggcggcctgagaatgaacaagggcgccatcaccccccccagaaccaccagccccgccaacacctgcagccccgaggtgatccacctgaaggacatcgtgtgctacctgagcctgctggagagaggcagacccgaggacaagctggagttcatgttcagactgtacgacaccgacggcaacggcttcctggacagcagcgagctggagaacatcatcagccagatgatgcacgtggccgagtacctggagtgggacgtgaccgagctgaaccccatcctgcacgagatgatggaggagatcgactacgaccacgacggcaccgtgagcctggaggagtggatccagggcggcatgaccaccatccccctgctggtgctgctgggcctggagaacaacgtgaaggacgacggccagcacgtgtggagactgaagcacttcaacaagcccgcctactgcaacctgtgcctgaacatgctgatcggcgtgggcaagcagggcctgtgctgcagcttctgcaagtacaccgtgcacgagagatgcgtggccagagccccccccagctgcatcaagacctacgtgaagagcaagagaaacaccgacgtgatgcaccactactgggtggagggcaactgccccaccaagtgcgacaagtgccacaagaccgtgaagtgctaccagggcctgaccggcctgcactgcgtgtggtgccagatcaccctgcacaacaagtgcgccagccacctgaagcccgagtgcgactgcggccccctgaaggaccacatcctgccccccaccaccatctgccccgtggtgctgcagaccctgcccaccagcggcgtgagcgtgcccgaggagagacagagcaccgtgaagaaggagaagagcggcagccagcagcccaacaaggtgatcgacaagaacaagatgcagagagccaacagcgtgaccgtggacggccagggcctgcaggtgacccccgtgcccggcacccaccccctgctggtgttcgtgaaccccaagagcggcggcaagcagggcgagagaatctacagaaagttccagtacctgctgaaccccagacaggtgtacagcctgagcggcaacggccccatgcccggcctgaacttcttcagagacgtgcccgacttcagagtgctggcctgcggcggcgacggcaccgtgggctgggtgctggactgcatcgagaaggccaacgtgggcaagcacccccccgtggccatcctgcccctgggcaccggcaacgacctggccagatgcctgagatggggcggcggctacgagggcgagaacctgatgaagatcctgaaggacatcgagaacagcaccgagatcatgctggacagatggaagttcgaggtgatccccaacgacaaggacgagaagggcgaccccgtgccctacagcatcatcaacaactacttcagcatcggcgtggacgccagcatcgcccacagattccacatcatgagagagaagcaccccgagaagttcaacagcagaatgaagaacaagttctggtacttcgagttcggcaccagcgagaccttcagcgccacctgcaagaagctgcacgagagcgtggagatcgagtgcgacggcgtgcagatcgacctgatcaacatcagcctggagggcatcgccatcctgaacatccccagcatgcacggcggcagcaacctgtggggcgagagcaagaagagaagaagccacagaagaatcgagaagaagggcagcgacaagagaaccaccgtgaccgacgccaaggagctgaagttcgccagccaggacctgagcgaccagctgctggaggtggtgggcctggagggcgccatggagatgggccagatctacaccggcctgaagagcgccggcagaagactggcccagtgcagctgcgtggtgatcagaaccagcaagagcctgcccatgcagatcgacggcgagccctggatgcagaccccctgcaccatcaagatcacccacaagaaccaggcccccatgctgatgggccccccccccaagaccggcctgttctgcagcctggtgaagagaaccagaaacagaagcaaggagtag

SEQ ID NO: 143307 - DNA, 6684 bp, Artificial Sequence
  derived and/or modified sequence
ttctttaacacattattgaaattacaagcatccaaagcagtttcatgtggacagattgcatattttgaaagcctgaggtattttatcatgaaacatgccatgtggaatctttgaagcatagacctctgcgcaacacctgaataaagaatcttttacctggtatgtgacagagcttctcaccaccaccatgacaaaccaggaaaaatgggcccacctcagcccttcggaattttcccaacttcagaaatatgctgagtattctacaaagaaattaaaggatgttcttgaagaattccatggtaatggtgtgcttgcaaagtataatcctgaagggaagcttgtggtgttgggcaatacaatagattttgaaggtttcaaactattcatgaagacattcctggaagccgagcttcctgatgatttcactgcacaccttttcatgtcatttagcaacaagtttcctcattctagtccaatggtaaaaagtaagcctgctctcctatcaggcggtctgagaatgaataaaggtgccatcacccctccccggactacttctcctgcaaatacgtgttccccagaagtaatccatctgaaggacattgtctgttacctgtctctgcttgaaagaggaagacctgaggataagcttgagtttatgtttcgcctttatgacacggatgggaatggcttcctggacagctcggagctagaaaatatcatcagtcagatgatgcatgttgcagaataccttgagtgggatgtcactgaacttaatccaatcctccatgaaatgatggaagaaattgactatgatcatgatggaaccgtgtctctggaggaatggattcaaggaggaatgacaacgattccacttcttgtgctcctgggcttagaaaataacgtgaaggatgatggacagcacgtgtggcgactgaagcactttaacaaacctgcctattgcaacctttgcctgaacatgctgattggcgtggggaagcagggcctctgctgttccttctgcaagtacacagtccatgagcgctgtgtggctcgagcacctccctcttgcatcaagacctatgtgaagtccaaaaggaacactgatgtcatgcaccattactgggttgaaggtaactgcccaaccaagtgtgataagtgccacaaaactgttaaatgttaccagggcctgacaggactgcattgtgtttggtgtcagatcacactgcataataaatgtgcttctcatctaaaacctgaatgtgactgtggacctttgaaggaccatattttaccacccacaacaatctgtccagtggtactgcagactctgcccacttcaggagtttcagttcctgaggaaagacaatcaacagtgaaaaaggaaaagagtggttcccagcagccaaacaaagtgattgacaagaataaaatgcaaagagccaactctgttactgtagatggacaaggcctgcaggtcactcctgtgcctggtactcacccacttttagtttttgtgaaccccaaaagtggtggaaaacaaggagaacgaatttacagaaaattccagtatctattaaatcctcgtcaggtttacagtctttctggaaatggaccaatgccagggttaaactttttccgtgatgttcctgacttcagagtgttagcctgtggtggagatggaaccgtgggctgggttttggattgcatagaaaaggccaatgtaggcaagcatcctccagttgcgattctgcctcttgggactggcaatgatctagcaagatgcctgcgatggggaggaggttacgaaggtgagaatctgatgaaaattctaaaagacattgaaaacagcacagaaatcatgttggacaggtggaagtttgaagtcatacctaatgacaaagatgagaaaggagacccagtgccttacagtatcatcaataattacttttccattggcgtggatgcctccattgcacacagattccacatcatgagagaaaaacacccagagaaattcaacagtagaatgaagaacaaattttggtattttgagtttggcacatctgaaactttctcagccacctgcaagaagctacatgaatctgtagaaatagaatgtgatggagtacagatagatttaataaacatctctctggaaggaattgctattttgaatataccaagcatgcatggaggatccaatctttggggagagtctaagaaaagacgaagccatcgacgaatagagaaaaaagggtctgacaaaaggaccaccgtcacagatgccaaagagttgaagtttgcaagtcaagatctcagtgaccagctgctggaggtggtcggcttggaaggagccatggagatggggcaaatatacacaggcctgaaaagtgctggccggcggctggctcagtgctcctgcgtggtcatcaggacgagcaagtctctgccaatgcaaattgatggggagccatggatgcagaccccatgcacaataaaaattacacacaagaaccaagccccaatgctgatgggcccgcctccaaaaaccggtttattctgctccctcgtcaaaaggacaagaaaccgaagcaaggaataatcctgtgttgtttcactcttagaaattgaattagcataattgggccatggaacacatatgctggaaatctttgaaccatttcaagtctcctgctcatgcaaaatcatggaagtggtttaacagtttttgttactaagctaatgtaaaattcagctattagaaaatttattgtctcagtttttataggcatctttgcatgaagaaagcagaagtttacctgaagtgatactgcatatttttggtgcatgcattcccatagatttttacatctcccacccaactcttccccaatttccttttactaacctgtgagaaaaacccgtgaaacatgaaaaaggaaataccatgggaaacgtgattctcagtgtgattccaattattacgaagcactaatcagtaacgctacaatgatcataattgcagattgctatacgtttcccttttagaatcagtgtatcagtgacctatgacttgaggagaaacttttaattcgaagattttattaaatagttgactacaataccttgctatatatacatagtttttcttcaacatcttaactcttctgagtggaaataaaaatatcaggcataaggttttctcatgctgaaaaatagaacgcggtttttattttgcttagttttctttttaattccagaaataagtgaaaacatgttacttgacagtcaagtgtggtaatatggcaagccttgttcctttctgcatgagaatctaggagagaattcataaccacaccaataacgaaatagaagttttaaactatgtgcctaatcaatgtgtttcccaccaaagattcagaaaacaatgcttgagagaaatgggttaatgcataattaattaagcattgtggagcaaatttagggttcctgtgattaattttgtgatgactaaaatgctggaaagcgagtgagttgcccattaattatgattaaaattctcacctttcacagacagacaataagccagacaacacaatcaaagctcaatagatgatttcttgcttttttcagtcatttataaatataggtgtaatttttcatggatcagttaagtacacttgaaggaagtaaatgattgtatcagtttatttctagtataaatgggtacctgtaataatactgagctcttggaagcgaatcatgcatgcaattagctccctcctcctcacctactccactcccatctttatgacatttcaaatgtttatttggaaacaacagcctagatcactgttgaaggtgttcatggcatagttggagtctctgactgtttaaagaaatcacagaacagtacttttcttttagtgtttcattaagcctatgatgtaaaatgaaatgcttctgagcagtcttgtaatattgttcattcatattgacctgcatctcatcattgcatgttttatgttttcaaacatgccataaggaaaacgagtgcctgaactgcatgatttattagtttctctccactctgcattaaagtgctaatgatttatcggttctattttgttattgattcattcatctttctttgaataacaaatagcatttagtgattctgttgaacacaatcctgtgcatggatttatggatttcaagtgaaattgctataattttagttctttggtttgaaaactcaactgaatgctgttatatcaaatagctgctctcaagcaatgtgctataatggaagattacgtacaaagtgtattcttttagtgttcctggaacattggacggtaaatatcaatcaacaataagcttaattactttaaaaataaaagcttttgaataaaattaagacataatttagcattcccaggaaaattatgattacaattgcaaatttagtacagcaatcacttgcgctggtataaaataaaaaagttgtttggcagaagagtaatccagaccaaaagaaagaaagaaatctcaaaacagtaacaagtacattactgacataatgttacgtaacacacacattgattttttgtatctatggttgcaggtaataaatattttcacatgaattgacaaaattttctacaatgggcaggcaggctttgtgtcaaaaacatattttgaagccacaaattattttatgttcgctacaacatacaattatgtcttggctaccttttatagtatatagtttgaaggcagcaacagtttgtgaatcattcttaacaatctgtacagtagaaagctgttggatagacagtgggatgagacaaattaaacaacctgcttataagatttcaatgattgaaataatgggatgcagcttcacttcagtgtagctgtataactacaattagtgctaatagtggttacattttcagtcagatggattctttggtacccataataaatgttcaaataggaatccaatttgacttttctcaactcattttctaaatacactgatgtacttgccccttcaagtatactgcccctggggtttggaaagtagtttttaaaaacgtaacttgatgggtttgaaatcagagaagatattctcatcagttttatgacagcttcatatgaaaaatatatagtttaaggaaaattctatagtatattaaaatattgaatgatgaatgttgttagctttacaagatggaaacttctcttctatgtgtgcagataaattttcagctattgagtcgccctcttttaatataggagacataaagttttaagtggctgaaactcttaaatgtaaattaatgctggacttaacagcagtcagaaacaaagagggaaaagagacatgcactctgctaaacattgctaggcactgagttgatgagattccagagagacatttcagagtaaaccttgatatccacgcttctaagagataggaagggaggtatctacatagaaccagaaagtttaaaagacgtaaatttattttttccacttccttgtgtacaccatgtatttcatgtgaaaatgctgatcaatttattgtggtggaaggagatatcttgcaggaagtttaaaaattaacattttaaaacagtttttattttatttaaaacaggttcatgtgatcatagccagaataaaacaaaaggctcagatgtttagcctagtctactgcagacagaaatttaaatccagtgagggctaatgaatcacatacgtgtttccacattttattttgttttcgttttttaggcatatgggaagtagttgcaatttttcagggaagaatatgttttgaatctcacactgtattctccttgaatctcacactgtattcttgaatgagacaagattttgagatcattcttttcctttttgtgtcaacgttagtttgttgttcattggttataaaaaggaaaatgtggccaggcgcaatggcttacgcctgtaatcccagcactttgggagacagaggcaggcagatcacaaggtcaggagttcaagaccagcctggccaatatggtgaaacctcgtctctactaaaaatacaaaaattagccaggcatggtggcacatgcctgtaatcccagctactcgggaggctgaggcagaagaattgcttgaactcgggaggctgcggttgcagtgagccaagatcacaccactgcactccagcctgggtgacagagccagactctgtctcaaaaaaaaaaaggaaaatgtacttttcatggcacgtataacccccaaaggattattcaatactgaacaattaaataataattgaataatattgaatcatgttctccgttatttttcaaataactgaataatatctctattaaaagattaaacccttgtaacatatattaaagctgtaaactttaagaaaataaataaataaaaccctgtaaaagagcttttattttgtgagaggcagaaatcaccacttaaaactcccaattaaattctgctatatttaaataaagtttgagtaaactcacatttgagagattctgtataaccttattgtgtttaaaaacatggaacttaattatagtaccttaattattttctcagaaatgatatatacaatatcctgttttttgaaataaaaacgttaaccactca

SEQ ID NO: 143308 - DNA, 6684 bp, Artificial Sequence
  derived and/or modified sequence
ttctttaacacattattgaaattacaagcatccaaagcagtttcatgtggacagattgcatattttgaaagcctgaggtattttatcatgaaacatgccatgtggaatctttgaagcatagacctctgcgcaacacctgaataaagaatcttttacctggtatgtgacagagcttctcaccaccaccatgacaaaccaggaaaaatgggcccacctcagcccttcggaattttcccaacttcagaaatatgctgagtattctacaaagaaattaaaggatgttcttgaagaattccatggtaatggtgtgcttgcaaagtataatcctgaagggaaacaagacattcttaaccaaacaatagattttgaaggtttcaaactattcatgaagacattcctggaagccgagcttcctgatgatttcactgcacaccttttcatgtcatttagcaacaagtttcctcattctagtccaatggtaaaaagtaagcctgctctcctatcaggcggtctgagaatgaataaaggtgccatcacccctccccggactacttctcctgcaaatacgtgttccccagaagtaatccatctgaaggacattgtctgttacctgtctctgcttgaaagaggaagacctgaggataagcttgagtttatgtttcgcctttatgacacggatgggaatggcttcctggacagctcggagctagaaaatatcatcagtcagatgatgcatgttgcagaataccttgagtgggatgtcactgaacttaatccaatcctccatgaaatgatggaagaaattgactatgatcatgatggaaccgtgtctctggaggaatggattcaaggaggaatgacaacgattccacttcttgtgctcctgggcttagaaaataacgtgaaggatgatggacagcacgtgtggcgactgaagcactttaacaaacctgcctattgcaacctttgcctgaacatgctgattggcgtggggaagcagggcctctgctgttccttctgcaagtacacagtccatgagcgctgtgtggctcgagcacctccctcttgcatcaagacctatgtgaagtccaaaaggaacactgatgtcatgcaccattactgggttgaaggtaactgcccaaccaagtgtgataagtgccacaaaactgttaaatgttaccagggcctgacaggactgcattgtgtttggtgtcagatcacactgcataataaatgtgcttctcatctaaaacctgaatgtgactgtggacctttgaaggaccatattttaccacccacaacaatctgtccagtggtactgcagactctgcccacttcaggagtttcagttcctgaggaaagacaatcaacagtgaaaaaggaaaagagtggttcccagcagccaaacaaagtgattgacaagaataaaatgcaaagagccaactctgttactgtagatggacaaggcctgcaggtcactcctgtgcctggtactcacccacttttagtttttgtgaaccccaaaagtggtggaaaacaaggagaacgaatttacagaaaattccagtatctattaaatcctcgtcaggtttacagtctttctggaaatggaccaatgccagggttaaactttttccgtgatgttcctgacttcagagtgttagcctgtggtggagatggaaccgtgggctgggttttggattgcatagaaaaggccaatgtaggcaagcatcctccagttgcgattctgcctcttgggactggcaatgatctagcaagatgcctgcgatggggaggaggttacgaaggtgagaatctgatgaaaattctaaaagacattgaaaacagcacagaaatcatgttggacaggtggaagtttgaagtcatacctaatgacaaagatgagaaaggagacccagtgccttacagtatcatcaataattacttttccattggcgtggatgcctccattgcacacagattccacatcatgagagaaaaacacccagagaaattcaacagtagaatgaagaacaaattttggtattttgagtttggcacatctgaaactttctcagccacctgcaagaagctacatgaatctgtagaaatagaatgtgatggagtacagatagatttaataaacatctctctggaaggaattgctattttgaatataccaagcatgcatggaggatccaatctttggggagagtctaagaaaagacgaagccatcgacgaatagagaaaaaagggtctgacaaaaggaccaccgtcacagatgccaaagagttgaagtttgcaagtcaagatctcagtgaccagctgctggaggtggtcggcttggaaggagccatggagatggggcaaatatacacaggcctgaaaagtgctggccggcggctggctcagtgctcctgcgtggtcatcaggacgagcaagtctctgccaatgcaaattgatggggagccatggatgcagaccccatgcacaataaaaattacacacaagaaccaagccccaatgctgatgggcccgcctccaaaaaccggtttattctgctccctcgtcaaaaggacaagaaaccgaagcaaggaataatcctgtgttgtttcactcttagaaattgaattagcataattgggccatggaacacatatgctggaaatctttgaaccatttcaagtctcctgctcatgcaaaatcatggaagtggtttaacagtttttgttactaagctaatgtaaaattcagctattagaaaatttattgtctcagtttttataggcatctttgcatgaagaaagcagaagtttacctgaagtgatactgcatatttttggtgcatgcattcccatagatttttacatctcccacccaactcttccccaatttccttttactaacctgtgagaaaaacccgtgaaacatgaaaaaggaaataccatgggaaacgtgattctcagtgtgattccaattattacgaagcactaatcagtaacgctacaatgatcataattgcagattgctatacgtttcccttttagaatcagtgtatcagtgacctatgacttgaggagaaacttttaattcgaagattttattaaatagttgactacaataccttgctatatatacatagtttttcttcaacatcttaactcttctgagtggaaataaaaatatcaggcataaggttttctcatgctgaaaaatagaacgcggtttttattttgcttagttttctttttaattccagaaataagtgaaaacatgttacttgacagtcaagtgtggtaatatggcaagccttgttcctttctgcatgagaatctaggagagaattcataaccacaccaataacgaaatagaagttttaaactatgtgcctaatcaatgtgtttcccaccaaagattcagaaaacaatgcttgagagaaatgggttaatgcataattaattaagcattgtggagcaaatttagggttcctgtgattaattttgtgatgactaaaatgctggaaagcgagtgagttgcccattaattatgattaaaattctcacctttcacagacagacaataagccagacaacacaatcaaagctcaatagatgatttcttgcttttttcagtcatttataaatataggtgtaatttttcatggatcagttaagtacacttgaaggaagtaaatgattgtatcagtttatttctagtataaatgggtacctgtaataatactgagctcttggaagcgaatcatgcatgcaattagctccctcctcctcacctactccactcccatctttatgacatttcaaatgtttatttggaaacaacagcctagatcactgttgaaggtgttcatggcatagttggagtctctgactgtttaaagaaatcacagaacagtacttttcttttagtgtttcattaagcctatgatgtaaaatgaaatgcttctgagcagtcttgtaatattgttcattcatattgacctgcatctcatcattgcatgttttatgttttcaaacatgccataaggaaaacgagtgcctgaactgcatgatttattagtttctctccactctgcattaaagtgctaatgatttatcggttctattttgttattgattcattcatctttctttgaataacaaatagcatttagtgattctgttgaacacaatcctgtgcatggatttatggatttcaagtgaaattgctataattttagttctttggtttgaaaactcaactgaatgctgttatatcaaatagctgctctcaagcaatgtgctataatggaagattacgtacaaagtgtattcttttagtgttcctggaacattggacggtaaatatcaatcaacaataagcttaattactttaaaaataaaagcttttgaataaaattaagacataatttagcattcccaggaaaattatgattacaattgcaaatttagtacagcaatcacttgcgctggtataaaataaaaaagttgtttggcagaagagtaatccagaccaaaagaaagaaagaaatctcaaaacagtaacaagtacattactgacataatgttacgtaacacacacattgattttttgtatctatggttgcaggtaataaatattttcacatgaattgacaaaattttctacaatgggcaggcaggctttgtgtcaaaaacatattttgaagccacaaattattttatgttcgctacaacatacaattatgtcttggctaccttttatagtatatagtttgaaggcagcaacagtttgtgaatcattcttaacaatctgtacagtagaaagctgttggatagacagtgggatgagacaaattaaacaacctgcttataagatttcaatgattgaaataatgggatgcagcttcacttcagtgtagctgtataactacaattagtgctaatagtggttacattttcagtcagatggattctttggtacccataataaatgttcaaataggaatccaatttgacttttctcaactcattttctaaatacactgatgtacttgccccttcaagtatactgcccctggggtttggaaagtagtttttaaaaacgtaacttgatgggtttgaaatcagagaagatattctcatcagttttatgacagcttcatatgaaaaatatatagtttaaggaaaattctatagtatattaaaatattgaatgatgaatgttgttagctttacaagatggaaacttctcttctatgtgtgcagataaattttcagctattgagtcgccctcttttaatataggagacataaagttttaagtggctgaaactcttaaatgtaaattaatgctggacttaacagcagtcagaaacaaagagggaaaagagacatgcactctgctaaacattgctaggcactgagttgatgagattccagagagacatttcagagtaaaccttgatatccacgcttctaagagataggaagggaggtatctacatagaaccagaaagtttaaaagacgtaaatttattttttccacttccttgtgtacaccatgtatttcatgtgaaaatgctgatcaatttattgtggtggaaggagatatcttgcaggaagtttaaaaattaacattttaaaacagtttttattttatttaaaacaggttcatgtgatcatagccagaataaaacaaaaggctcagatgtttagcctagtctactgcagacagaaatttaaatccagtgagggctaatgaatcacatacgtgtttccacattttattttgttttcgttttttaggcatatgggaagtagttgcaatttttcagggaagaatatgttttgaatctcacactgtattctccttgaatctcacactgtattcttgaatgagacaagattttgagatcattcttttcctttttgtgtcaacgttagtttgttgttcattggttataaaaaggaaaatgtggccaggcgcaatggcttacgcctgtaatcccagcactttgggagacagaggcaggcagatcacaaggtcaggagttcaagaccagcctggccaatatggtgaaacctcgtctctactaaaaatacaaaaattagccaggcatggtggcacatgcctgtaatcccagctactcgggaggctgaggcagaagaattgcttgaactcgggaggctgcggttgcagtgagccaagatcacaccactgcactccagcctgggtgacagagccagactctgtctcaaaaaaaaaaaggaaaatgtacttttcatggcacgtataacccccaaaggattattcaatactgaacaattaaataataattgaataatattgaatcatgttctccgttatttttcaaataactgaataatatctctattaaaagattaaacccttgtaacatatattaaagctgtaaactttaagaaaataaataaataaaaccctgtaaaagagcttttattttgtgagaggcagaaatcaccacttaaaactcccaattaaattctgctatatttaaataaagtttgagtaaactcacatttgagagattctgtataaccttattgtgtttaaaaacatggaacttaattatagtaccttaattattttctcagaaatgatatatacaatatcctgttttttgaaataaaaacgttaaccactca

SEQ ID NO: 143309 - DNA, 6917 bp, Artificial Sequence
  derived and/or modified sequence
attttcccctgagctccatcagcaagagtagcaatagcagctggagaagcggcagccagagataggcagggctggtgcttgcagccgcgcaaatcgcctcctcctcaacacacacacacacacacacacacacacacacacacacacactgcacagacttccaatatcaacgcgtcttgacataaatcaaggactaagagagactgaagaagagcgttagtcatggacaacagttctttaacacattattgaaattacaagcatccaaagcagtttcatgtggacagattgcatattttgaaagcctgaggtattttatcatgaaacatgccatgtggaatctttgaagcatagacctctgcgcaacacctgaataaagaatcttttacctggtatgtgacagagcttctcaccaccaccatgacaaaccaggaaaaatgggcccacctcagcccttcggaattttcccaacttcagaaatatgctgagtattctacaaagaaattaaaggatgttcttgaagaattccatggtaatggtgtgcttgcaaagtataatcctgaagggaaacaagacattcttaaccaaacaatagattttgaaggtttcaaactattcatgaagacattcctggaagccgagcttcctgatgatttcactgcacaccttttcatgtcatttagcaacaagtttcctcattctagtccaatggtaaaaagtaagcctgctctcctatcaggcggtctgagaatgaataaaggtgccatcacccctccccggactacttctcctgcaaatacgtgttccccagaagtaatccatctgaaggacattgtctgttacctgtctctgcttgaaagaggaagacctgaggataagcttgagtttatgtttcgcctttatgacacggatgggaatggcttcctggacagctcggagctagaaaatatcatcagtcagatgatgcatgttgcagaataccttgagtgggatgtcactgaacttaatccaatcctccatgaaatgatggaagaaattgactatgatcatgatggaaccgtgtctctggaggaatggattcaaggaggaatgacaacgattccacttcttgtgctcctgggcttagaaaataacgtgaaggatgatggacagcacgtgtggcgactgaagcactttaacaaacctgcctattgcaacctttgcctgaacatgctgattggcgtggggaagcagggcctctgctgttccttctgcaagtacacagtccatgagcgctgtgtggctcgagcacctccctcttgcatcaagacctatgtgaagtccaaaaggaacactgatgtcatgcaccattactgggttgaaggtaactgcccaaccaagtgtgataagtgccacaaaactgttaaatgttaccagggcctgacaggactgcattgtgtttggtgtcagatcacactgcataataaatgtgcttctcatctaaaacctgaatgtgactgtggacctttgaaggaccatattttaccacccacaacaatctgtccagtggtactgcagactctgcccacttcaggagtttcagttcctgaggaaagacaatcaacagtgaaaaaggaaaagagtggttcccagcagccaaacaaagtgattgacaagaataaaatgcaaagagccaactctgttactgtagatggacaaggcctgcaggtcactcctgtgcctggtactcacccacttttagtttttgtgaaccccaaaagtggtggaaaacaaggagaacgaatttacagaaaattccagtatctattaaatcctcgtcaggtttacagtctttctggaaatggaccaatgccagggttaaactttttccgtgatgttcctgacttcagagtgttagcctgtggtggagatggaaccgtgggctgggttttggattgcatagaaaaggccaatgtaggcaagcatcctccagttgcgattctgcctcttgggactggcaatgatctagcaagatgcctgcgatggggaggaggttacgaaggtgagaatctgatgaaaattctaaaagacattgaaaacagcacagaaatcatgttggacaggtggaagtttgaagtcatacctaatgacaaagatgagaaaggagacccagtgccttacagtatcatcaataattacttttccattggcgtggatgcctccattgcacacagattccacatcatgagagaaaaacacccagagaaattcaacagtagaatgaagaacaaattttggtattttgagtttggcacatctgaaactttctcagccacctgcaagaagctacatgaatctgtagaaatagaatgtgatggagtacagatagatttaataaacatctctctggaaggaattgctattttgaatataccaagcatgcatggaggatccaatctttggggagagtctaagaaaagacgaagccatcgacgaatagagaaaaaagggtctgacaaaaggaccaccgtcacagatgccaaagagttgaagtttgcaagtcaagatctcagtgaccagctgctggaggtggtcggcttggaaggagccatggagatggggcaaatatacacaggcctgaaaagtgctggccggcggctggctcagtgctcctgcgtggtcatcaggacgagcaagtctctgccaatgcaaattgatggggagccatggatgcagaccccatgcacaataaaaattacacacaagaaccaagccccaatgctgatgggcccgcctccaaaaaccggtttattctgctccctcgtcaaaaggacaagaaaccgaagcaaggaataatcctgtgttgtttcactcttagaaattgaattagcataattgggccatggaacacatatgctggaaatctttgaaccatttcaagtctcctgctcatgcaaaatcatggaagtggtttaacagtttttgttactaagctaatgtaaaattcagctattagaaaatttattgtctcagtttttataggcatctttgcatgaagaaagcagaagtttacctgaagtgatactgcatatttttggtgcatgcattcccatagatttttacatctcccacccaactcttccccaatttccttttactaacctgtgagaaaaacccgtgaaacatgaaaaaggaaataccatgggaaacgtgattctcagtgtgattccaattattacgaagcactaatcagtaacgctacaatgatcataattgcagattgctatacgtttcccttttagaatcagtgtatcagtgacctatgacttgaggagaaacttttaattcgaagattttattaaatagttgactacaataccttgctatatatacatagtttttcttcaacatcttaactcttctgagtggaaataaaaatatcaggcataaggttttctcatgctgaaaaatagaacgcggtttttattttgcttagttttctttttaattccagaaataagtgaaaacatgttacttgacagtcaagtgtggtaatatggcaagccttgttcctttctgcatgagaatctaggagagaattcataaccacaccaataacgaaatagaagttttaaactatgtgcctaatcaatgtgtttcccaccaaagattcagaaaacaatgcttgagagaaatgggttaatgcataattaattaagcattgtggagcaaatttagggttcctgtgattaattttgtgatgactaaaatgctggaaagcgagtgagttgcccattaattatgattaaaattctcacctttcacagacagacaataagccagacaacacaatcaaagctcaatagatgatttcttgcttttttcagtcatttataaatataggtgtaatttttcatggatcagttaagtacacttgaaggaagtaaatgattgtatcagtttatttctagtataaatgggtacctgtaataatactgagctcttggaagcgaatcatgcatgcaattagctccctcctcctcacctactccactcccatctttatgacatttcaaatgtttatttggaaacaacagcctagatcactgttgaaggtgttcatggcatagttggagtctctgactgtttaaagaaatcacagaacagtacttttcttttagtgtttcattaagcctatgatgtaaaatgaaatgcttctgagcagtcttgtaatattgttcattcatattgacctgcatctcatcattgcatgttttatgttttcaaacatgccataaggaaaacgagtgcctgaactgcatgatttattagtttctctccactctgcattaaagtgctaatgatttatcggttctattttgttattgattcattcatctttctttgaataacaaatagcatttagtgattctgttgaacacaatcctgtgcatggatttatggatttcaagtgaaattgctataattttagttctttggtttgaaaactcaactgaatgctgttatatcaaatagctgctctcaagcaatgtgctataatggaagattacgtacaaagtgtattcttttagtgttcctggaacattggacggtaaatatcaatcaacaataagcttaattactttaaaaataaaagcttttgaataaaattaagacataatttagcattcccaggaaaattatgattacaattgcaaatttagtacagcaatcacttgcgctggtataaaataaaaaagttgtttggcagaagagtaatccagaccaaaagaaagaaagaaatctcaaaacagtaacaagtacattactgacataatgttacgtaacacacacattgattttttgtatctatggttgcaggtaataaatattttcacatgaattgacaaaattttctacaatgggcaggcaggctttgtgtcaaaaacatattttgaagccacaaattattttatgttcgctacaacatacaattatgtcttggctaccttttatagtatatagtttgaaggcagcaacagtttgtgaatcattcttaacaatctgtacagtagaaagctgttggatagacagtgggatgagacaaattaaacaacctgcttataagatttcaatgattgaaataatgggatgcagcttcacttcagtgtagctgtataactacaattagtgctaatagtggttacattttcagtcagatggattctttggtacccataataaatgttcaaataggaatccaatttgacttttctcaactcattttctaaatacactgatgtacttgccccttcaagtatactgcccctggggtttggaaagtagtttttaaaaacgtaacttgatgggtttgaaatcagagaagatattctcatcagttttatgacagcttcatatgaaaaatatatagtttaaggaaaattctatagtatattaaaatattgaatgatgaatgttgttagctttacaagatggaaacttctcttctatgtgtgcagataaattttcagctattgagtcgccctcttttaatataggagacataaagttttaagtggctgaaactcttaaatgtaaattaatgctggacttaacagcagtcagaaacaaagagggaaaagagacatgcactctgctaaacattgctaggcactgagttgatgagattccagagagacatttcagagtaaaccttgatatccacgcttctaagagataggaagggaggtatctacatagaaccagaaagtttaaaagacgtaaatttattttttccacttccttgtgtacaccatgtatttcatgtgaaaatgctgatcaatttattgtggtggaaggagatatcttgcaggaagtttaaaaattaacattttaaaacagtttttattttatttaaaacaggttcatgtgatcatagccagaataaaacaaaaggctcagatgtttagcctagtctactgcagacagaaatttaaatccagtgagggctaatgaatcacatacgtgtttccacattttattttgttttcgttttttaggcatatgggaagtagttgcaatttttcagggaagaatatgttttgaatctcacactgtattctccttgaatctcacactgtattcttgaatgagacaagattttgagatcattcttttcctttttgtgtcaacgttagtttgttgttcattggttataaaaaggaaaatgtggccaggcgcaatggcttacgcctgtaatcccagcactttgggagacagaggcaggcagatcacaaggtcaggagttcaagaccagcctggccaatatggtgaaacctcgtctctactaaaaatacaaaaattagccaggcatggtggcacatgcctgtaatcccagctactcgggaggctgaggcagaagaattgcttgaactcgggaggctgcggttgcagtgagccaagatcacaccactgcactccagcctgggtgacagagccagactctgtctcaaaaaaaaaaaggaaaatgtacttttcatggcacgtataacccccaaaggattattcaatactgaacaattaaataataattgaataatattgaatcatgttctccgttatttttcaaataactgaataatatctctattaaaagattaaacccttgtaacatatattaaagctgtaaactttaagaaaataaataaataaaaccctgtaaaagagcttttattttgtgagaggcagaaatcaccacttaaaactcccaattaaattctgctatatttaaataaagtttgagtaaactcacatttgagagattctgtataaccttattgtgtttaaaaacatggaacttaattatagtaccttaattattttctcagaaatgatatatacaatatcctgttttttgaaataaaaacgttaaccactca

SEQ ID NO: 143310 - protein, 334 aa, Artificial Sequence
  derived and/or modified sequence
MSAANPETPNSTISREASTQSSSAAASQGWVLPEGKIVPNTVFVGGIDARMDETEIGSCFGRYGSVKEVKIITNRTGVSKGYGFVSFVNDVDVQKIVGSQIHFHGKKLKLGPAIRKQKLCARHVQPRPLVVNPPPPPQFQNVWRNPNTETYLQPQITPNPVTQHVQAYSAYPHSPGQVITGCQLLVYNYQEYPTYPDSAFQVTTGYQLPVYNYQPFPAYPRSPFQVTAGYQLPVYNYQAFPAYPNSPFQVATGYQFPVYNYQPFPAYPSSPFQVTAGYQLPVYNYQAFPAYPNSPFQVATGYQFPVYNYQAFPAYPNSPVQVTTGYQLPVYNYQ

SEQ ID NO: 143311 - protein, 613 aa, Artificial Sequence
  derived and/or modified sequence
MSAANPETPNSTISREASTQSSSAAASQGWVLPEGKIVPNTVFVGGIDARMDETEIGSCFGRYGSVKEVKIITNRTGVSKGYGFVSFVNDVDVQKIVGSQIHFHGKKLKLGPAIRKQKLCARHVQPRPLVVNPPPPPQFQNVWRNPNTETYLQPQITPNPVTQHVQSAANPETPNSTISREASTQSSSAAASQGWVLPEGKIVPNTVFVGGIDARMDETEIGSCFGRYGSVKEVKIITNRTGVSKGYGFVSFVNDVDVQKIVGSQIHFHGKKLKLGPAIRKQKLCARHVQPRPLVVNPPPPPQFQNVWRNPNTETYLQPQITPNPVTQHVQSAANPETPNSTISREASTQSSSAAASQGWVLPEGKIVPNTVFVGGIDARMDETEIGSCFGRYGSVKEVKIITNRTGVSKGYGFVSFVNDVDVQKIVGSQIHFHGKKLKLGPAIRKQKLCARHVQPRPLVVNPPPPPQFQNVWRNPNTETYLQPQITPNPVTQHVQAYSAYPHSPGQVITGCQLLVYNYQEYPTYPDSAFQVTTGYQLPVYNYQPFPAYPRSPFQVTAGYQLPVYNYQAFPAYPNSPFQVATGYQFPVCEICKILVLKNAAAFLCHSKVNRSI

SEQ ID NO: 143312 - protein, 744 aa, Artificial Sequence
  derived and/or modified sequence
MSAANPETPNSTISREASTQSSSAAASQGWVLPEGKIVPNTVFVGGIDARMDETEIGSCFGRYGSVKEVKIITNRTGVSKGYGFVSFVNDVDVQKIVGSQIHFHGKKLKLGPAIRKQKLCARHVQPRPLVVNPPPPPQFQNVWRNPNTETYLQPQITPNPVTQHVQSAANPETPNSTISREASTQSSSAAASQGWVLPEGKIVPNTVFVGGIDARMDETEIGSCFGRYGSVKEVKIITNRTGVSKGYGFVSFVNDVDVQKIVGSQIHFHGKKLKLGPAIRKQKLCARHVQPRPLVVNPPPPPQFQNVWRNPNTETYLQPQITPNPVTQHVQSAANPETPNSTISREASTQSSSAAASQGWVLPEGKIVPNTVFVGGIDARMDETEIGSCFGRYGSVKEVKIITNRTGVSKGYGFVSFVNDVDVQKIVGSQIHFHGKKLKLGPAIRKQKLCARHVQPRPLVVNPPPPPQFQNVWRNPNTETYLQPQITPNPVTQHVQAYSAYPHSPGQVITGCQLLVYNYQEYPTYPDSAFQVTTGYQLPVYNYQPFPAYPRSPFQVTAGYQLPVYNYQAFPAYPNSPFQVATGYQFPVYNYQPFPAYPSSPFQVTAGYQLPVYNYQAFPAYPNSPFQVATGYQFPVYNYQAFPAYPNSPVQVTTGYQLPVYNYQAFPAYPSSPFQVTTGYQLPVYNYQAFPAYPNSAVQVTTGYQFHVYNYQMPPQCPVGEQRRNLWTEAYKWWYLVCLIQRRD

SEQ ID NO: 143313 - protein, 287 aa, Artificial Sequence
  derived and/or modified sequence
MDETEIGSCFGRYGSVKEVKIITNRTGVSKGYGFVSFVNDVDVQKIVGSQIHFHGKKLKLGPAIRKQKLCARHVQPRPLVVNPPPPPQFQNVWRNPNTETYLQPQITPNPVTQHVQAYSAYPHSPGQVITGCQLLVYNYQEYPTYPDSAFQVTTGYQLPVYNYQPFPAYPRSPFQVTAGYQLPVYNYQAFPAYPNSPFQVATGYQFPVYNYQPFPAYPSSPFQVTAGYQLPVYNYQAFPAYPNSPFQVATGYQFPVYNYQAFPAYPNSPVQVTTGYQLPVYNYQKFP

SEQ ID NO: 143314 - DNA, 1842 bp, Artificial Sequence
  derived and/or modified sequence
atgagcgccgccaaccccgagacccccaacagcaccatcagcagagaggccagcacccagagcagcagcgccgccgccagccagggctgggtgctgcccgagggcaagatcgtgcccaacaccgtgttcgtgggcggcatcgacgccagaatggacgagaccgagatcggcagctgcttcggcagatacggcagcgtgaaggaggtgaagatcatcaccaacagaaccggcgtgagcaagggctacggcttcgtgagcttcgtgaacgacgtggacgtgcagaagatcgtgggcagccagatccacttccacggcaagaagctgaagctgggccccgccatcagaaagcagaagctgtgcgccagacacgtgcagcccagacccctggtggtgaacccccccccccccccccagttccagaacgtgtggagaaaccccaacaccgagacctacctgcagccccagatcacccccaaccccgtgacccagcacgtgcagagcgccgccaaccccgagacccccaacagcaccatcagcagagaggccagcacccagagcagcagcgccgccgccagccagggctgggtgctgcccgagggcaagatcgtgcccaacaccgtgttcgtgggcggcatcgacgccagaatggacgagaccgagatcggcagctgcttcggcagatacggcagcgtgaaggaggtgaagatcatcaccaacagaaccggcgtgagcaagggctacggcttcgtgagcttcgtgaacgacgtggacgtgcagaagatcgtgggcagccagatccacttccacggcaagaagctgaagctgggccccgccatcagaaagcagaagctgtgcgccagacacgtgcagcccagacccctggtggtgaacccccccccccccccccagttccagaacgtgtggagaaaccccaacaccgagacctacctgcagccccagatcacccccaaccccgtgacccagcacgtgcagagcgccgccaaccccgagacccccaacagcaccatcagcagagaggccagcacccagagcagcagcgccgccgccagccagggctgggtgctgcccgagggcaagatcgtgcccaacaccgtgttcgtgggcggcatcgacgccagaatggacgagaccgagatcggcagctgcttcggcagatacggcagcgtgaaggaggtgaagatcatcaccaacagaaccggcgtgagcaagggctacggcttcgtgagcttcgtgaacgacgtggacgtgcagaagatcgtgggcagccagatccacttccacggcaagaagctgaagctgggccccgccatcagaaagcagaagctgtgcgccagacacgtgcagcccagacccctggtggtgaacccccccccccccccccagttccagaacgtgtggagaaaccccaacaccgagacctacctgcagccccagatcacccccaaccccgtgacccagcacgtgcaggcctacagcgcctacccccacagccccggccaggtgatcaccggctgccagctgctggtgtacaactaccaggagtaccccacctaccccgacagcgccttccaggtgaccaccggctaccagctgcccgtgtacaactaccagcccttccccgcctaccccagaagccccttccaggtgaccgccggctaccagctgcccgtgtacaactaccaggccttccccgcctaccccaacagccccttccaggtggccaccggctaccagttccccgtgtgcgagatctgcaagatcctggtgctgaagaacgccgccgccttcctgtgccacagcaaggtgaacagaagcatctag

SEQ ID NO: 143315 - DNA, 2235 bp, Artificial Sequence
  derived and/or modified sequence
atgagcgccgccaaccccgagacccccaacagcaccatcagcagagaggccagcacccagagcagcagcgccgccgccagccagggctgggtgctgcccgagggcaagatcgtgcccaacaccgtgttcgtgggcggcatcgacgccagaatggacgagaccgagatcggcagctgcttcggcagatacggcagcgtgaaggaggtgaagatcatcaccaacagaaccggcgtgagcaagggctacggcttcgtgagcttcgtgaacgacgtggacgtgcagaagatcgtgggcagccagatccacttccacggcaagaagctgaagctgggccccgccatcagaaagcagaagctgtgcgccagacacgtgcagcccagacccctggtggtgaacccccccccccccccccagttccagaacgtgtggagaaaccccaacaccgagacctacctgcagccccagatcacccccaaccccgtgacccagcacgtgcagagcgccgccaaccccgagacccccaacagcaccatcagcagagaggccagcacccagagcagcagcgccgccgccagccagggctgggtgctgcccgagggcaagatcgtgcccaacaccgtgttcgtgggcggcatcgacgccagaatggacgagaccgagatcggcagctgcttcggcagatacggcagcgtgaaggaggtgaagatcatcaccaacagaaccggcgtgagcaagggctacggcttcgtgagcttcgtgaacgacgtggacgtgcagaagatcgtgggcagccagatccacttccacggcaagaagctgaagctgggccccgccatcagaaagcagaagctgtgcgccagacacgtgcagcccagacccctggtggtgaacccccccccccccccccagttccagaacgtgtggagaaaccccaacaccgagacctacctgcagccccagatcacccccaaccccgtgacccagcacgtgcagagcgccgccaaccccgagacccccaacagcaccatcagcagagaggccagcacccagagcagcagcgccgccgccagccagggctgggtgctgcccgagggcaagatcgtgcccaacaccgtgttcgtgggcggcatcgacgccagaatggacgagaccgagatcggcagctgcttcggcagatacggcagcgtgaaggaggtgaagatcatcaccaacagaaccggcgtgagcaagggctacggcttcgtgagcttcgtgaacgacgtggacgtgcagaagatcgtgggcagccagatccacttccacggcaagaagctgaagctgggccccgccatcagaaagcagaagctgtgcgccagacacgtgcagcccagacccctggtggtgaacccccccccccccccccagttccagaacgtgtggagaaaccccaacaccgagacctacctgcagccccagatcacccccaaccccgtgacccagcacgtgcaggcctacagcgcctacccccacagccccggccaggtgatcaccggctgccagctgctggtgtacaactaccaggagtaccccacctaccccgacagcgccttccaggtgaccaccggctaccagctgcccgtgtacaactaccagcccttccccgcctaccccagaagccccttccaggtgaccgccggctaccagctgcccgtgtacaactaccaggccttccccgcctaccccaacagccccttccaggtggccaccggctaccagttccccgtgtacaactaccagcccttccccgcctaccccagcagccccttccaggtgaccgccggctaccagctgcccgtgtacaactaccaggccttccccgcctaccccaacagccccttccaggtggccaccggctaccagttccccgtgtacaactaccaggccttccccgcctaccccaacagccccgtgcaggtgaccaccggctaccagctgcccgtgtacaactaccaggccttccccgcctaccccagcagccccttccaggtgaccaccggctaccagctgcccgtgtacaactaccaggccttccccgcctaccccaacagcgccgtgcaggtgaccaccggctaccagttccacgtgtacaactaccagatgcccccccagtgccccgtgggcgagcagagaagaaacctgtggaccgaggcctacaagtggtggtacctggtgtgcctgatccagagaagagactag

SEQ ID NO: 143316 - DNA, 1842 bp, Artificial Sequence
  derived and/or modified sequence
atgagtgccgcaaatcccgaaactcccaactcaacgatcagcagagaggctagcactcagagcagttctgccgccgcttcccaaggctgggtgctgcctgaaggcaaaatcgtgcccaataccgtgtttgtcggcggcatagatgcaagaatggacgaaacggagataggcagctgcttcggtcgttatggtagcgtgaaggaggtcaagatcatcaccaaccgaacaggcgtgtccaaaggatatgggtttgtgtcttttgttaacgatgtggatgtgcagaagatcgtgggcagccagattcatttccacggcaagaaactgaaactcggcccggcaattcgaaaacaaaagttgtgcgccaggcatgtgcagcctcgccccctagtggtcaacccacctccccctcctcagtttcagaacgtgtggaggaatcccaacactgagacctatttgcagccacaaatcacccctaaccctgtcactcagcacgtgcagtccgctgccaaccccgagactcctaactctactattagtagggaggcatcgactcaatcatcatccgcggctgccagccaaggctgggtgcttccagagggcaagatcgttccaaacacagtctttgttggtggtattgacgctaggatggacgaaaccgaaataggcagctgtttcggtagatacggctccgtgaaggaggtgaaaatcattaccaatcgcaccggcgtatcgaaggggtatggatttgtatcttttgtcaatgatgtggatgtccagaagattgtggggagccagatccattttcacggcaagaagctcaaactcggacccgcgatccgaaaacagaagttatgcgctaggcacgttcaaccaagaccacttgttgtcaacccgccccccccccctcagtttcagaacgtgtggagaaatccaaacactgagacatacctccagcctcagatcacccccaatcctgtgactcaacatgtacagtctgctgcgaaccctgagacgcctaactccacgatctctagagaggcaagcactcagtcttccagtgccgccgctagccaaggctgggtgctcccagaaggcaaaattgttccgaataccgtgtttgtcggggggatagacgcccgcatggatgagaccgaaatcggcagctgttttgggcgttacggaagtgtgaaggaggtcaagattattaccaataggaccggtgtgagcaaggggtatggatttgtatcttttgttaatgatgttgatgtccagaagattgtaggatcccagattcacttccacggcaagaaactcaagctgggacccgccataagaaagcagaagctctgcgcgcggcacgtccagccccgcccgctagtcgtaaaccctcctccgcctccgcagtttcagaacgtgtggcgcaacccgaataccgagacctatctacaaccacagatcactcccaacccggtgacccaacacgtccaggcatattccgcttacccccactcccccggccaggtcataaccggctgccagctgctcgtgtacaattatcaagagtacccgacgtaccccgattccgctttccaagtcacgacgggataccagctacccgtatataattaccagccatttcccgcatatccccgctccccctttcaagtaacagccggttatcagttgccagtttacaattaccaagcgtttccagcctatcctaattcacccttccaggtggccacagggtaccaatttcctgtctgtgagatttgtaagatcctggtactcaaaaacgctgctgctttcttatgtcactctaaggtcaacagatctatctag

SEQ ID NO: 143317 - DNA, 2235 bp, Artificial Sequence
  derived and/or modified sequence
atgagcgcagccaatcccgagactcccaattcgacgataagccgcgaggctagtactcagagtagctctgcggccgcgagtcagggctgggtcctccctgagggcaagattgtgccaaatactgtgtttgtggggggaattgatgctaggatggatgagacagagatcggctcatgttttgggagatacggctctgttaaagaggtcaaaattatcacgaatcggacgggtgtttcaaaggggtatggattcgtcagctttgttaatgacgtggacgtgcaaaagatagtcgggtcgcaaatccatttccacgggaagaagctgaaattgggacctgcaattcggaaacaaaagctgtgcgctaggcatgtgcaacccagacctcttgtggtgaatcctcccccccccccacaatttcaaaatgtttggcggaaccctaacaccgagacctacctccagccccaaatcacacccaatcctgtcacccagcacgtccagagcgctgccaatccagagactcccaattccacaatctcgcgggaggcatccacgcaaagcagtagcgccgccgctagccaaggctgggtgctgcctgagggaaagatcgttccaaatacggtctttgtagggggaatcgacgccagaatggatgagaccgaaattggctcctgcttcgggaggtatggcagtgttaaagaggtcaagataattacaaatcgcactggcgtaagcaaaggatacgggtttgtgagcttcgtgaacgatgtggatgtccaaaaaatcgtgggatcacaaatccatttccatggaaaaaaactcaaactggggccagcaatcagaaagcaaaagttgtgtgcaaggcatgtgcagccccgcccattggtggtcaaccctccccccccgccccagtttcagaacgtatggaggaaccctaacactgaaacctacttgcaaccccagattacaccgaacccagtcacacaacacgtgcagagcgcggccaatccagaaactcccaactctacaatctctcgggaggcgtccactcagtctagctccgcagcggccagtcagggctgggttctcccagaagggaagattgtacccaatacagtgttcgtcggaggtatcgatgcccgaatggacgaaactgaaatcggatcttgtttcggaagatacggctccgtgaaggaggtgaagatcataaccaacagaaccggggtgtctaagggctatgggttcgtgagttttgtgaacgacgtagacgtacaaaagatcgtggggagtcagatccactttcatggcaagaagttgaaattggggcctgcgattagaaaacagaagctgtgcgcaagacacgtgcaacctcgcccactggttgtgaatccaccacctcctccccagttccagaacgtgtggcgtaaccccaacaccgagacctaccttcagccacagattactcctaaccccgtgacacagcacgtgcaggcttattctgcctatccacatagtcccggtcaggtgattaccggttgccaattgttagtctacaactatcaggagtaccctacctaccccgattctgccttccaggtaactacaggttaccaactgcccgtgtataattatcaaccttttccagcttaccccagaagtcccttccaggtgaccgcaggataccagctgcccgtctataattatcaagcattccctgcctacccaaactctccgtttcaggtggccacaggataccagttcccagtctataactaccagcctttccccgcctatccatcctcaccatttcaagtcaccgctggataccaactgcctgtctacaactaccaagcttttcccgcctatcccaactctcccttccaggtggcaactggataccagtttcctgtatataactaccaggcatttcctgcataccctaacagtccagtgcaggtgactacaggctaccagctccccgtctataactaccaagcgttccccgcttacccttcaagtccctttcaagttacaactgggtaccaactcccagtctataattaccaggcattccccgcctaccccaatagcgctgttcaagtgaccactggctatcagtttcatgtgtataattatcagatgccccctcagtgtcctgtcggcgagcagcgtcgcaacctgtggacagaggcctacaagtggtggtacctggtgtgcctcattcaaaggcgagactag

SEQ ID NO: 143318 - DNA, 1842 bp, Artificial Sequence
  derived and/or modified sequence
atgtctgctgccaaccctgagacccccaacagcaccatcagccgggaggccagcacccagagcagcagcgctgctgccagccagggctgggtgctgcctgagggcaagatcgtgcccaacacagtgtttgtgggcggcattgatgccaggatggatgaaacagagatcggcagctgcttcggccgctatggctctgtgaaggaggtgaagatcatcaccaacagaactggagtgtccaagggctacggctttgtgtcctttgtgaatgatgtggatgtgcagaagatcgtgggcagccagatccacttccacggcaagaagctgaagctgggccctgccatcaggaagcagaagctgtgtgcccggcacgtgcagccccggcccctggtggtgaaccccccacctccaccccagttccagaatgtgtggaggaaccccaacacagagacctacctgcagccccagatcacccccaaccctgtgacccagcacgtgcagagcgctgccaaccctgagacccccaacagcaccatcagccgggaggccagcacccagagcagcagcgctgctgccagccagggctgggtgctgcctgagggcaagatcgtgcccaacacagtgtttgtgggcggcattgatgccaggatggatgaaacagaaattggcagctgcttcggccgctatggctctgtgaaggaggtgaagatcatcaccaacagaactggagtgtccaagggctacggctttgtgtcctttgtgaatgatgtggatgtgcagaagatcgtgggcagccagatccacttccacggcaagaagctgaagctgggccctgccatcaggaagcagaagctgtgtgcccggcacgtgcagccccggcccctggtggtgaaccccccacctccaccccagttccagaatgtgtggaggaaccccaacacagagacctacctgcagccccagatcacccccaaccctgtgacccagcacgtgcagagcgctgccaaccctgagacccccaacagcaccatcagccgggaggccagcacccagagcagcagcgctgctgccagccagggctgggtgctgcctgagggcaagatcgtgcccaacacagtgtttgtgggcggcattgatgccaggatggatgaaacagagatcggcagctgcttcggccgctatggctctgtgaaggaggtgaagatcatcaccaacagaactggagtgtccaagggctacggctttgtgtcctttgtgaatgatgtggatgtgcagaagatcgtgggcagccagatccacttccacggcaagaagctgaagctgggccctgccatcaggaagcagaagctgtgtgcccggcacgtgcagccccggcccctggtggtgaaccccccacctccaccccagttccagaatgtgtggaggaaccccaacacagagacctacctgcagccccagatcacccccaaccctgtgacccagcacgtgcaggcctacagcgcctacccccacagccctggccaggtgatcaccggctgccagctgctggtgtacaactaccaggagtaccccacctacccagacagcgccttccaggtgaccaccggctaccagctgcctgtgtacaactaccagcccttccctgcctaccccaggagccccttccaggtgacagctggctaccagctgcctgtgtacaactaccaggccttccctgcctaccccaacagccccttccaggtggccaccggctaccagtttcctgtgtgtgagatctgcaagatcctggtgctgaagaatgctgctgccttcctgtgccacagcaaggtgaacagaagcatctag

SEQ ID NO: 143319 - DNA, 2235 bp, Artificial Sequence
  derived and/or modified sequence
atgtctgctgccaaccctgagacccccaacagcaccatcagccgggaggccagcacccagagcagcagcgctgctgccagccagggctgggtgctgcctgagggcaagatcgtgcccaacacagtgtttgtgggcggcattgatgccaggatggatgaaacagagatcggcagctgcttcggccgctatggctctgtgaaggaggtgaagatcatcaccaacagaactggagtgtccaagggctacggctttgtgtcctttgtgaatgatgtggatgtgcagaagatcgtgggcagccagatccacttccacggcaagaagctgaagctgggccctgccatcaggaagcagaagctgtgtgcccggcacgtgcagccccggcccctggtggtgaaccccccacctccaccccagttccagaatgtgtggaggaaccccaacacagagacctacctgcagccccagatcacccccaaccctgtgacccagcacgtgcagagcgctgccaaccctgagacccccaacagcaccatcagccgggaggccagcacccagagcagcagcgctgctgccagccagggctgggtgctgcctgagggcaagatcgtgcccaacacagtgtttgtgggcggcattgatgccaggatggatgaaacagaaattggcagctgcttcggccgctatggctctgtgaaggaggtgaagatcatcaccaacagaactggagtgtccaagggctacggctttgtgtcctttgtgaatgatgtggatgtgcagaagatcgtgggcagccagatccacttccacggcaagaagctgaagctgggccctgccatcaggaagcagaagctgtgtgcccggcacgtgcagccccggcccctggtggtgaaccccccacctccaccccagttccagaatgtgtggaggaaccccaacacagagacctacctgcagccccagatcacccccaaccctgtgacccagcacgtgcagagcgctgccaaccctgagacccccaacagcaccatcagccgggaggccagcacccagagcagcagcgctgctgccagccagggctgggtgctgcctgagggcaagatcgtgcccaacacagtgtttgtgggcggcattgatgccaggatggatgaaacagagatcggcagctgcttcggccgctatggctctgtgaaggaggtgaagatcatcaccaacagaactggagtgtccaagggctacggctttgtgtcctttgtgaatgatgtggatgtgcagaagatcgtgggcagccagatccacttccacggcaagaagctgaagctgggccctgccatcaggaagcagaagctgtgtgcccggcacgtgcagccccggcccctggtggtgaaccccccacctccaccccagttccagaatgtgtggaggaaccccaacacagagacctacctgcagccccagatcacccccaaccctgtgacccagcacgtgcaggcctacagcgcctacccccacagccctggccaggtgatcaccggctgccagctgctggtgtacaactaccaggagtaccccacctacccagacagcgccttccaggtgaccaccggctaccagctgcctgtgtacaactaccagcccttccctgcctaccccaggagccccttccaggtgacagctggctaccagctgcctgtgtacaactaccaggccttccctgcctaccccaacagccccttccaggtggccaccggctaccagtttcctgtgtacaactaccagcccttccctgcctaccccagcagccccttccaggtgacagctggctaccagctgcctgtgtacaactaccaggccttccctgcctaccccaacagccccttccaggtggccaccggctaccagtttcctgtgtacaactaccaggccttccctgcctaccccaacagccctgtgcaggtgaccaccggctaccagctgcctgtgtacaactaccaggccttccctgcctaccccagcagccccttccaggtgaccaccggctaccagctgcctgtgtacaactaccaggccttccctgcctaccccaacagcgctgtgcaggtgaccaccggctaccagttccacgtgtacaactaccagatgccaccccagtgccctgtgggggagcagaggaggaacctgtggacagaggcctacaagtggtggtacctggtgtgcctgatccagaggcgggactag

SEQ ID NO: 143320 - DNA, 2382 bp, Artificial Sequence
  derived and/or modified sequence
ctttgaccactcgaagccccacagcgtgttccagcggacttcaccagcagacccagaagtggtgggtgaaacactgcctctgttcctccttgagcctgtcgggagctgctgcctgccaccaccatgtctgctgcaaatcctgagactccaaactcaaccatctccagagaggccagcacccagtcttcatcagctgcagctagccaaggctgggtgttaccagaaggcaaaatcgtgccaaacactgtttttgttggtggaattgatgctaggatggatgaaactgagattggaagctgctttggtagatacggttcagtgaaagaagtgaagataatcacgaatcgaactggtgtgtccaaaggctatggatttgtttcgtttgttaatgacgtggatgtccagaagatagtaggatcacagatacatttccatggtaaaaagctgaagctgggccctgcaatcaggaaacaaaagttatgtgctcgtcatgtgcagccacgtcctttggtagttaatcctcctcctccaccacagtttcagaacgtctggcggaatccaaacactgaaacctacctgcagccccaaatcacgccgaatcctgtaactcagcacgttcagtctgctgcaaatcctgagactccaaactcaaccatctccagagaggccagcacccagtcttcatcagctgcagctagccaaggctgggtgttaccagaaggcaaaatcgtgccaaacactgtttttgttggtggaattgatgctaggatggatgaaactgagattggaagctgctttggtagatacggttcagtgaaagaagtgaagataatcacgaatcgaactggtgtgtccaaaggctatggatttgtttcgtttgttaatgacgtggatgtccagaagatagtaggatcacagatacatttccatggtaaaaagctgaagctgggccctgcaatcaggaaacaaaagttatgtgctcgtcatgtgcagccacgtcctttggtagttaatcctcctcctccaccacagtttcagaacgtctggcggaatccaaacactgaaacctacctgcagccccaaatcacgccgaatcctgtaactcagcacgttcagtctgctgcaaatcctgagactccaaactcaaccatctccagagaggccagcacccagtcttcatcagctgcagctagccaaggctgggtgttaccagaaggcaaaatcgtgccaaacactgtttttgttggtggaattgatgctaggatggatgaaactgagattggaagctgctttggtagatacggttcagtgaaagaagtgaagataatcacgaatcgaactggtgtgtccaaaggctatggatttgtttcgtttgttaatgacgtggatgtccagaagatagtaggatcacagatacatttccatggtaaaaagctgaagctgggccctgcaatcaggaaacaaaagttatgtgctcgtcatgtgcagccacgtcctttggtagttaatcctcctcctccaccacagtttcagaacgtctggcggaatccaaacactgaaacctacctgcagccccaaatcacgccgaatcctgtaactcagcacgttcaggcttactctgcttatccacattcaccaggtcaggtcatcactggatgtcagttgcttgtatataattatcaggaatatcctacttatcccgattcagcatttcaggtcaccactggatatcagttgcctgtatataattatcagccatttcctgcttatccaagatcaccatttcaggtcactgctggatatcagttgcctgtatataattatcaggcatttcctgcttatccaaattcaccatttcaagtcgccactggatatcagttccctgtatgtgaaatttgcaaaatactggtattaaagaacgctgcagcttttttatgtcactcaaaggttaatcggagtatctgaaaggaattgtttttataaaaacattgaagtattagttacttgctataaatagatttttatttttgttttttagcctgttatatttccttctgtaaaataaaatatgtccagaagaggcatgttgtttctagattaggtagtgtcctcattttatattgtgaccacacagctagagcaccagagcccttttgctatactcacagtcttgttttcccagcctcttttactagtctttcaggaggtttgctcttagaactggtgatgtaaagaatggaagtagctgtatgagcagttcaaaggccaagccgtggaatggtagcaatgggatataatacctttctaagggaaacatttgtatcagtatcatttgatctgccatggacatgtgtttaaagtggctttctggcccttctttca

SEQ ID NO: 143321 - DNA, 1842 bp, Artificial Sequence
  derived and/or modified sequence
atgagcgccgccaaccccgagacccccaacagcaccatcagccgggaagctagcacacagagttcatcagcagctgcgagccagggctgggtgctgcccgagggtaagatagtacctaataccgtcttcgtgggagggatcgacgccaggatggacgaaaccgagataggaagttgtttcggcagatacggaagcgttaaggaggttaagatcattactaacaggacaggggtgagcaagggctatggcttcgtgtctttcgtcaatgacgtggacgtgcagaagatcgtgggcagtcagatccacttccatgggaaaaaactcaaactggggcctgctatcaggaaacagaaattatgtgccaggcacgtgcaacctcggcctctggtcgtgaatccccctccacctccccagtttcagaacgtgtggcgaaaccccaacaccgaaacctacctgcagccgcaaataacccccaatccggtcactcagcacgtgcagtccgccgcgaaccctgagactcctaatagtactattagccgcgaggcgagcacgcaatcaagcagtgctgctgcaagtcaggggtgggttctccccgagggtaagatcgtgccgaacacagtcttcgtcgggggaatcgatgcacgtatggacgagacagagataggatcctgtttcggaaggtacgggagtgtgaaggaagttaagatcatcactaatcggactggtgtgtctaagggctatggtttcgtgtcctttgtcaacgacgtagacgtacagaagatcgtgggctcccagatacatttccatggtaagaaactgaagttaggccctgcaatccggaaacagaagctgtgtgcaagacatgtgcagcctcgccccttagtagtgaacccgcccccgcccccacagttccagaatgtttggcgaaaccccaacactgagacttatctgcagcctcagatcacccccaacccagtgacccaacatgtgcaatccgctgccaaccccgaaacacctaatagcacgataagcagagaagccagcactcagagcagctccgcggccgcaagccaggggtgggtgctccccgaaggtaagatagtcccgaacactgtgttcgtgggcggcatcgatgcccgaatggatgaaacagaaatcgggtcatgctttggccgctacggaagtgtgaaagaggtgaagatcattacaaacagaactggggtcagcaagggttatggatttgtaagctttgtgaacgacgtagacgtgcagaaaattgtgggcagtcaaatccactttcatgggaaaaaactcaagcttggacctgctattagaaagcagaagctctgtgcccgccacgtgcaacctcgtcccctggtggtcaatcccccccccccaccccaatttcagaatgtctggaggaatccaaatacggaaacctacctccagcctcagataacacctaaccccgtcacccaacatgtccaggcttatagtgcctacccgcactctcctgggcaggtgatcactggatgccaactgctggtctacaactaccaggagtatcctacctatccggacagtgcattccaggttacaactggatatcagctccccgtgtacaattaccagcctttccctgcctacccccgcagcccatttcaggtgactgctgggtaccagctgccagtgtacaactaccaagctttcccggcctacccaaactcccctttccaagttgcgacaggctaccagtttccagtgtgtgagatttgcaaaatcctcgtgttgaagaatgcggccgcattcctgtgccattctaaggtcaaccgaagcatatag

SEQ ID NO: 143322 - DNA, 2235 bp, Artificial Sequence
  derived and/or modified sequence
atgagcgccgccaaccccgagacccccaacagcaccatcagccgggaagcttccacccaaagctcgtctgctgccgcctctcagggatgggtcttgcctgagggaaagatcgtgccaaataccgtttttgtaggggggatcgacgcacgtatggacgaaaccgagatcggaagttgcttcggacgctacggatcggtgaaagaggtcaagatcataaccaacaggacaggcgtctccaaggggtatggttttgttagctttgtcaacgatgtggatgttcagaagattgtaggctctcaaattcactttcatggcaagaaattaaaacttgggcccgccattagaaaacagaagctgtgcgcacggcatgtccagccccgccccctggtcgtgaacccgcccccccctccacagtttcagaacgtgtggcggaatccaaacaccgagacctatctgcagccccagatcacaccgaaccccgttacccagcacgtgcagtctgccgctaaccctgaaacaccaaacagcacgatctccagagaggcgagtacccagagtagtagtgctgccgcgagccaagggtgggtgctgcctgaaggcaaaatagtgcccaataccgtgttcgtgggggggatagacgcacgaatggacgagacagagattggctcctgcttcggaagatatgggtcagtgaaggaggtgaagatcattactaaccgtactggtgtgagtaagggatatgggtttgtgtccttcgttaacgatgtcgacgttcagaaaattgtcggctcacagatccactttcatgggaagaagctgaagctgggccctgctatcagaaagcagaagctgtgcgctcgacacgtccagccaaggcccctcgtcgttaaccccccgccccctcctcagttccaaaacgtatggcgcaacccaaacacagagacttatcttcaaccccagatcacccccaaccccgtgactcagcacgtccagtccgccgccaatcctgagacccctaactctactattagtcgtgaagcctcaacacagtccagttctgctgcggcctcacagggatgggtgctgcctgaaggcaaaattgttcccaacactgtattcgtggggggcattgatgcacggatggacgaaacagagattggatcatgctttggacgttacggttctgtgaaggaagtgaaaatcataacaaataggactggtgtctccaaaggctacggattcgtgagtttcgtgaacgatgtcgatgtgcaaaagattgtgggtagccagatccatttccacggaaagaaattaaaactcggccctgcaataagaaaacagaagttgtgtgcccgccatgtgcaaccccgacctctggtcgtgaaccctccgccgcctcctcagttccagaatgtctggcggaacccaaacacagagacttatcttcaaccgcaaattacacccaacccagtgacccagcacgttcaggcctattccgcctacccacattcaccaggccaggttatcaccggctgtcagttattggtatacaattatcaggaatatccaacctatcctgactccgcattccaggtgaccacaggctatcagctgccagtatacaattaccagccattccctgcatacccccgaagtccgttccaggtcactgccggatatcaactgcctgtgtacaattatcaggccttccctgcctatccaaattctccatttcaggtcgccaccgggtatcagttccctgtctacaactaccagcccttcccggcatacccgagttccccatttcaggtaaccgctggttatcagctacctgtttataattaccaagcattcccagcctacccaaactcacccttccaagttgccaccggataccagtttccagtctataactaccaagcttttccggcttaccccaactcgccggtgcaggtcaccacaggataccagctccccgtttataattaccaggcttttcccgcttatccaagctccccattccaggtgacgaccggctaccagttgcccgtatacaactaccaagcattccccgcctacccaaactccgcggtgcaagttactactggataccagttccatgtctacaattaccaaatgccacctcagtgtcctgtcggagaacagcggaggaacttatggaccgaagcttataagtggtggtacctcgtctgtctgatacaacgcagggactag

SEQ ID NO: 143323 - DNA, 4421 bp, Artificial Sequence
  derived and/or modified sequence
gctgccacccattggctcaggccgataccacgcgccccgatacccggcacaggagccacctcccagagccccgcagtccatgcctcagtcggcctgcgctcctcagcctggcggttctacctccgagggttcgcccgcccttggttttccttacaccttagcctttggctcctttgaccactcgaagccccacagcgtgttccagcggacttcaccagcagacccagaagtggtgggtgaaacactgcctctgttcctccttgagcctgtcgggagctgctgcctgccaccaccatgtctgctgcaaatcctgagactccaaactcaaccatctccagagaggccagcacccagtcttcatcagctgcagctagccaaggctgggtgttaccagaaggcaaaatcgtgccaaacactgtttttgttggtggaattgatgctaggatggatgaaactgagattggaagctgctttggtagatacggttcagtgaaagaagtgaagataatcacgaatcgaactggtgtgtccaaaggctatggatttgtttcgtttgttaatgacgtggatgtccagaagatagtaggatcacagatacatttccatggtaaaaagctgaagctgggccctgcaatcaggaaacaaaagttatgtgctcgtcatgtgcagccacgtcctttggtagttaatcctcctcctccaccacagtttcagaacgtctggcggaatccaaacactgaaacctacctgcagccccaaatcacgccgaatcctgtaactcagcacgttcagtctgctgcaaatcctgagactccaaactcaaccatctccagagaggccagcacccagtcttcatcagctgcagctagccaaggctgggtgttaccagaaggcaaaatcgtgccaaacactgtttttgttggtggaattgatgctaggatggatgaaactgagattggaagctgctttggtagatacggttcagtgaaagaagtgaagataatcacgaatcgaactggtgtgtccaaaggctatggatttgtttcgtttgttaatgacgtggatgtccagaagatagtaggatcacagatacatttccatggtaaaaagctgaagctgggccctgcaatcaggaaacaaaagttatgtgctcgtcatgtgcagccacgtcctttggtagttaatcctcctcctccaccacagtttcagaacgtctggcggaatccaaacactgaaacctacctgcagccccaaatcacgccgaatcctgtaactcagcacgttcagtctgctgcaaatcctgagactccaaactcaaccatctccagagaggccagcacccagtcttcatcagctgcagctagccaaggctgggtgttaccagaaggcaaaatcgtgccaaacactgtttttgttggtggaattgatgctaggatggatgaaactgagattggaagctgctttggtagatacggttcagtgaaagaagtgaagataatcacgaatcgaactggtgtgtccaaaggctatggatttgtttcgtttgttaatgacgtggatgtccagaagatagtaggatcacagatacatttccatggtaaaaagctgaagctgggccctgcaatcaggaaacaaaagttatgtgctcgtcatgtgcagccacgtcctttggtagttaatcctcctcctccaccacagtttcagaacgtctggcggaatccaaacactgaaacctacctgcagccccaaatcacgccgaatcctgtaactcagcacgttcaggcttactctgcttatccacattcaccaggtcaggtcatcactggatgtcagttgcttgtatataattatcaggaatatcctacttatcccgattcagcatttcaggtcaccactggatatcagttgcctgtatataattatcagccatttcctgcttatccaagatcaccatttcaggtcactgctggatatcagttgcctgtatataattatcaggcatttcctgcttatccaaattcaccatttcaagtcgccactggatatcagttccctgtatacaattatcagccatttcctgcttatccaagttcaccatttcaggtcactgctggatatcagttgcctgtatataattatcaggcatttcctgcttatccaaattcaccatttcaagtcgccactggatatcagttccctgtatacaattatcaggcatttcctgcttatccaaattcaccagttcaggtcaccactggatatcagttgcctgtatacaattatcaggcatttcctgcttatccaagttcaccatttcaggtcaccactggatatcagttgcctgtatataattatcaggcatttcctgcttatccaaattcagcagttcaggtcaccactggatatcagttccatgtatacaattaccagatgccaccgcagtgccctgttggggagcaaaggagaaatctgtggaccgaagcatacaaatggtggtatcttgtctgtttaatccagagaagagactgataaattccgttgttactcaagatgactgcttcaagggtaaaagagtgcatcgctttagaagaagtttggcagtatttaaatctgttggatcctctcagctatctagtttcatgggaagttgctggttttgaatattaagctaaaagttttccactattacagaaattctgaattttggtaaatcacactgaaactttctgtataacttgtattattagactctctagttttatcttaacactgaaactgttcttcattagatgtttatttagaacctggttctgtgtttaatatatagtttaaagtaacaaataatcgagactgaaagaatgttaagatttatctgcaaggatttttaaaaaattgaaacttgcattttaagtgtttaaaagcaaatactgactttcaaaaaagtttttaaaacctgatttgaaagctaacaattttgatagtctgaacacaagcatttcacttctccaagaagtacctgtgaacagtacaatatttcagtattgagctttgcatttatgatttatctagaaatttacctcaaaagcagaatttttaaaactgcatttttaatcagtggaactcaatgtatagttagctttattgaagtcttatccaaacccagtaaaacagattctaagcaaacagtccaatcagtgagtcataatgtttattcaaagtattttatcttttatctagaatccacatatgtatgtccaatttgattgggatagtagttaggataactaaaattctgggcctaattttttaaagaatccaagacaaactaaactttactgggtatataaccttctcaatgagttaccattcttttttataaaaaaaattgttccttgaaatgctaaacttaatggctgtatgtgaaatttgcaaaatactggtattaaagaacgctgcagcttttttatgtcactcaaaggttaatcggagtatctgaaaggaattgtttttataaaaacattgaagtattagttacttgctataaatagatttttatttttgttttttagcctgttatatttccttctgtaaaataaaatatgtccagaagaggcatgttgtttctagattaggtagtgtcctcattttatattgtgaccacacagctagagcaccagagcccttttgctatactcacagtcttgttttcccagcctcttttactagtctttcaggaggtttgctcttagaactggtgatgtaaagaatggaagtagctgtatgagcagttcaaaggccaagccgtggaatggtagcaatgggatataatacctttctaagggaaacatttgtatcagtatcatttgatctgccatggacatgtgtttaaagtggctttctggcccttctttcaatggcttcttccctaaaacgtggagactctaagttaatgtcgttactatgggccatattactaatgcccactggggtctatgatttctcaaaattttcattcggaatccgaaggatacagtctttaaactttagaattcccaagaaggctttattacacctcagaaattgaaagcaccatgactttgtccattaaaaaattatccatagtttttttagtgcttttaacattccgacatacatcattctgtgattaaatctccagatttctgtaaatgatacctacattctaaagagttaattctaattattccgatatgaccttaaggaaaagtaaaggaataaatttttgtctttgttgaagtatttaatagagtaaggtaaagaagatattaagtccctttcaaaatggaaaattaattctaaactgagaaaaatgttcctactacctattgctgatactgtctttgcataaatgaataaaaataaactttttttcttcaaatgtg

SEQ ID NO: 143324 - DNA, 1842 bp, Artificial Sequence
  derived and/or modified sequence
atgtctgccgcaaaccctgagaccccaaactccacgatcagtcgggaagccagcacccagagctcctctgcagcagcgagccagggctgggttctgccggaagggaagattgttcccaacacagtgtttgtgggaggtattgatgccaggatggatgaaacagagatcggcagctgttttgggagatacggctccgtgaaagaagttaaaattatcaccaatcgtactggagtgtccaaaggatacgggtttgtctctttcgtaaacgatgttgatgtgcagaagatagtgggcagccagattcatttccatggaaaaaagttaaaactgggtcctgctatccgtaagcagaagctctgcgccagacatgtccagcctcgccctctagtggtcaatcctccgccaccaccacaatttcagaatgtgtggagaaacccaaatactgagacttacctccaaccacagatcactcctaacccggtgactcaacacgttcagtctgcagctaatccagaaacaccgaactctactattagccgggaggctagcacccagagctctagcgcagccgcaagtcaagggtgggtgctgccagagggcaagatcgtgccgaacacggtgtttgtgggcggaatagacgccagaatggatgaaacagagattggatcttgctttgggcgttacggttcagtcaaggaagtgaagattattaccaacagaacaggagtgtctaaaggatatggctttgtgtcctttgtgaatgacgtggacgtacaaaagattgtgggctcccagattcacttccacggcaaaaaactgaaattaggacccgcaattaggaaacagaagctgtgcgcgcgacatgtacagccccgacccttggtcgtgaaccctcctcccccaccacagttccagaacgtgtggcgcaaccctaatacggaaacatatctgcagccccagatcaccccgaacccagtaacacagcatgtgcagtccgccgctaacccagagactccaaactcgaccatctccagagaggctagtactcaatcctcctcagcagccgcttcacagggttgggtcctcccagagggaaagatcgttcccaatacagtgtttgtgggtggaatcgacgctcggatggatgaaacagagattggtagctgcttcgggcgatacggctctgtcaaggaggttaagatcattacgaatcggactggcgtctctaaagggtacgggtttgtgtctttcgtgaatgacgttgacgtgcagaagatcgtcggcagtcagatacatttccacggcaagaagttgaaactcggacctgctatccggaagcagaagctgtgtgccaggcacgtccagccccgtcccttggtggtgaatcctcctcctcccccacagtttcaaaacgtatggagaaaccctaacaccgagacatatcttcagccacagattacccctaatccagttactcagcacgttcaagcctattccgcctacccgcatagcccaggtcaggtcattactggatgccaattactggtctacaactaccaggaatatcccacctatcccgacagtgcattccaggtaactactggctatcagctgccagtatataactatcagccttttcccgcttacccaagaagccctttccaggtgaccgcaggctatcaactccctgtatacaactaccaagcgtttccagcctacccaaactctccgtttcaggtggccactggttaccagtttcccgtgtgtgaaatttgtaaaattctggttctgaagaatgccgctgccttcctctgtcatagcaaggtgaatcggtccatatag

SEQ ID NO: 143325 - DNA, 2235 bp, Artificial Sequence
  derived and/or modified sequence
atgagcgccgcaaatcccgagacgccaaattccacaatcagtagagaagcaagcactcagagctccagcgctgccgcaagtcaaggttgggttttacctgagggcaagattgtgccgaatactgtatttgtcggcggaatcgatgcacggatggacgagacagaaatcgggtcctgcttcggcagatatgggagcgttaaggaggtgaaaataatcaccaaccgcacaggtgttagcaagggctacggctttgtctcatttgttaatgacgtggatgtgcagaagatcgtgggaagtcagattcacttccacggcaaaaagctgaagcttggtccggcaattagaaaacagaagctatgtgcccgtcacgtccaacccagacccctggtggtgaaccccccacctccgccacaattccaaaacgtttggagaaaccctaacactgagacctacttacaacctcagatcacccccaaccccgtcacccagcatgtgcagtccgctgctaatccggagacgcccaatagtacaatttcccgcgaggcaagtacccagagttccagcgctgctgcttcccagggttgggttctgcccgaaggcaagattgttcctaacacagtgtttgtgggcggtatcgacgccaggatggacgaaactgagatcggctcttgtttcggcagatatggatccgtgaaggaagtcaagataatcaccaatcgaaccggagtatccaagggatacggatttgtttcctttgtaaatgatgtcgatgtccagaagattgtggggtcccagatccacttccacgggaagaagctgaaactcgggccagctatccggaagcagaaactgtgcgcgcgacacgtccaaccaaggccacttgtggtgaatccccctcccccaccacagtttcagaacgtctggcgcaatcctaatacagaaacgtaccttcagccgcagatcactcccaatccggtcacacagcacgtgcagagtgccgctaaccctgagacacccaacagtacaattagtagggaggcctcaacacagtcctcatccgccgctgcaagccaagggtgggtcctgccggagggcaagattgttcctaatacggtctttgtagggggtattgatgcaagaatggacgagacggagatagggtcttgcttcggcagatacggctccgtgaaagaagtcaagatcatcacaaatcgcaccggcgtttctaaaggctacgggtttgtgtcttttgtgaatgacgtagatgtgcagaaaattgtgggtagtcagatccattttcatggcaagaagctgaagcttggccctgctataaggaaacaaaagctgtgcgccaggcacgtccagcctagacctctcgtggtgaacccaccccctcctccccagtttcaaaacgtttggcggaaccccaatacagaaacgtacctgcagccccagataaccccaaacccagttacacaacatgtgcaggcatacagtgcctacccccattcacccggacaggtaattactgggtgtcagctgctggtgtataattaccaggagtatcccacgtaccctgattcagctttccaggtgacgacaggctatcaactgcctgtctacaactatcagccctttccagcatatcctaggagccccttccaggttactgcagggtaccagctgcccgtctataactaccaagcctttcccgcttatcccaactcaccgttccaggttgccacagggtatcagttcccggtctacaattaccagccctttcctgcctatccttcttccccttttcaggtcaccgccggataccagttgccagtatacaactaccaggcgtttcccgcataccccaattcgccttttcaggtggctaccgggtaccagtttccggtctataattaccaggcgtttcctgcatatccaaacagcccagtccaggtgaccactggatatcagctgcccgtctataactaccaggcatttccagcttatcccagtagccctttccaggtcacgacagggtaccaactgccggtctataattaccaagcctttcccgcataccccaactcagccgtgcaagtgactacgggctaccaatttcatgtctacaactatcagatgcccccacagtgtcccgtgggagagcagagacgcaatttatggacagaagcttacaagtggtggtatctggtttgcctgatccagcgtcgtgactag

SEQ ID NO: 143326 - protein, 1278 aa, Artificial Sequence
  derived and/or modified sequence
MAQSKRHVYSRTPSGSRMSAEASARPLRVGSRVEVIGKGHRGTVAYVGATLFATGKWVGVILDEAKGKNDGTVQGRKYFTCDEGHGIFVRQSQIQVFEDGADTTSPETPDSSASKVLKREGTDTTAKTSKLRGLKPKKAPTARKTTTRRPKPTRPASTGVAGASSSLGPSGSASAGELSSSEPSTPAQTPLAAPIIPTPVLTSPGAVPPLPSPSKEEEGLRAQVRDLEEKLETLRLKRAEDKAKLKELEKHKIQLEQVQEWKSKMQEQQADLQRRLKEARKEAKEALEAKERYMEEMADTADAIEMATLDKEMAEERAESLQQEVEALKERVDELTTDLEILKAEIEEKGSDGAASSYQLKQLEEQNARLKDALVRMRDLSSSEKQEHVKLQKLMEKKNQELEVVRQQRERLQEELSQAESTIDELKEQVDAALGAEEMVEMLTDRNLNLEEKVRELRETVGDLEAMNEMNDELQENARETELELREQLDMAGARVREAQKRVEAAQETVADYQQTIKKYRQLTAHLQDVNRELTNQQEASVERQQQPPPETFDFKIKFAETKAHAKAIEMELRQMEVAQANRHMSLLTAFMPDSFLRPGGDHDCVLVLLLMPRLICKAELIRKQAQEKFELSENCSERPGLRGAAGEQLSFAAGLVYSLSLLQATLHRYEHALSQCSVDVYKKVGSLYPEMSAHERSLDFLIELLHKDQLDETVNVEPLTKAIKYYQHLYSIHLAEQPEDCTMQLADHIKFTQSALDCMSVEVGRLRAFLQGGQEATDIALLLRDLETSCSDIRQFCKKIRRRMPGTDAPGIPAALAFGPQVSDTLLDCRKHLTWVVAVLQEVAAAAAQLIAPLAENEGLLVAALEELAFKASEQIYGTPSSSPYECLRQSCNILISTMNKLATAMQEGEYDAERPPSKPPPVELRAAALRAEITDAEGLGLKLEDRETVIKELKKSLKIKGEELSEANVRLSLLEKKLDSAAKDADERIEKVQTRLEETQALLRKKEKEFEETMDALQADIDQLEAEKAELKQRLNSQSKRTIEGLRGPPPSGIATLVSGIAGEEQQRGAIPGQAPGSVPGPGLVKDSPLLLQQISAMRLHISQLQHENSILKGAQMKASLASLPPLHVAKLSHEGPGSELPAGALYRKTSQLLETLNQLSTHTHVVDITRTSPAAKSPSAQLMEQVAQLKSLSDTVEKLKDEVLKETVSQRPGATVPTDFATFPSSAFLRAKEEQQDDTVYMGKVTFSCAAGFGQRHRLVLTQEQLHQLHSRLIS

SEQ ID NO: 143327 - protein, 1261 aa, Artificial Sequence
  derived and/or modified sequence
MSAEASARPLRVGSRVEVIGKGHRGTVAYVGATLFATGKWVGVILDEAKGKNDGTVQGRKYFTCDEGHGIFVRQSQIQVFEDGADTTSPETPDSSASKVLKREGTDTTAKTSKLRGLKPKKAPTARKGRRVRTKPTRPASTGVAGASSSLGPSGSASAGELSSSEPSTPAQTPLAAPIIPTPVLTSPGAVPPLPSPSKEEEGLRAQVRDLEEKLETLRLKRAEDKAKLKELEKHKIQLEQVQEWKSKMQEQQADLQRRLKEARKEAKEALEAKERYMEEMADTADAIEMATLDKEMAEERAESLQQEVEALKERVDELTTDLEILKAEIEEKGSDGAASSYQLKQLEEQNARLKDALVRMRDLSSSEKQEHVKLQKLMEKKNQELEVVRQQRERLQEELSQAESTIDELKEQVDAALGAEEMVEMLTDRNLNLEEKVRELRETVGDLEAMNEMNDELQENARETELELREQLDMAGARVREAQKRVEAAQETVADYQQTIKKYRQLTAHLQDVNRELTNQQEASVERQQQPPPETFDFKIKFAETKAHAKAIEMELRQMEVAQANRHMSLLTAFMPDSFLRPGGDHDCVLVLLLMPRLICKAELIRKQAQEKFELSENCSERPGLRGAAGEQLSFAAGLVYSLSLLQATLHRYEHALSQCSVDVYKKVGSLYPEMSAHERSLDFLIELLHKDQLDETVNVEPLTKAIKYYQHLYSIHLAEQPEDCTMQLADHIKFTQSALDCMSVEVGRLRAFLQGGQEATDIALLLRDLETSCSDIRQFCKKIRRRMPGTDAPGIPAALAFGPQVSDTLLDCRKHLTWVVAVLQEVAAAAAQLIAPLAENEGLLVAALEELAFKASEQIYGTPSSSPYECLRQSCNILISTMNKLATAMQEGEYDAERPPSKPPPVELRAAALRAEITDAEGLGLKLEDRETVIKELKKSLKIKGEELSEANVRLSLLEKKLDSAAKDADERIEKVQTRLEETQALLRKKEKEFEETMDALQADIDQLEAEKAELKQRLNSQSKRTIEGLRGPPPSGIATLVSGIAGEEQQRGAIPGQAPGSVPGPGLVKDSPLLLQQISAMRLHISQLQHENSILKGAQMKASLASLPPLHVAKLSHEGPGSELPAGALYRKTSQLLETLNQLSTHTHVVDITRTSPAAKSPSAQLMEQVAQLKSLSDTVEKLKDEVLKETVSQRPGATVPTDFATFPSSAFLRAKEEQQDDTVYMGKVTFSCAAGFGQRHRLVLTQEQLHQLHSRLIS

SEQ ID NO: 143328 - protein, 1256 aa, Artificial Sequence
  derived and/or modified sequence
MSAEASARPLRVGSRVEVIGKGHRGTVAYVGATLFATGKWVGVILDEAKGKNDGTVQGRKYFTCDEGHGIFVRQSQIQVFEDGADTTSPETPDSSASKVLKREGTDTTAKTSKLRGLKPKKAPTARKTTTRRPKPTRPASTGVAGASSSLGPSGSASAGELSSSEPSTPAQTPLAAPIIPTPVLTSPGAVPPLPSPSKEEEGLRAQVRDLEEKLETLRLKRAEDKAKLKELEKHKIQLEQVQEWKSKMQEQQADLQRRLKEARKEAKEALEAKERYMEEMADTADAIEMATLDKEMAEERAESLQQEVEALKERVDELTTDLEILKAEIEEKGSDGAASSYQLKQLEEQNARLKDALVRMRDLSSSEKQEHVKLQKLMEKKNQELEVVRQQRERLQEELSQAESTIDELKEQVDAALGAEEMVEMLTDRNLNLEEKVRELRETVGDLEAMNEMNDELQENARETELELREQLDMAGARVREAQKRVEAAQETVADYQQTIKKYRQLTAHLQDVNRELTNQQEASVERQQQPPPETFDFKIKFAETKAHAKAIEMELRQMEVAQANRHMSLLTAFMPDSFLRPGGDHDCVLVLLLMPRLICKAELIRKQAQEKFELSENCSERPGLRGAAGEQLSFAAGLVYSLSLLQATLHRYEHALSQCSVDVYKKVGSLYPEMSAHERSLDFLIELLHKDQLDETVNVEPLTKAIKYYQHLYSIHLAEQPEDCTMQLADHIKFTQSALDCMSVEVGRLRAFLQGGQEATDIALLLRDLETSCSDIRQFCKKIRRRMPGTDAPGIPAALAFGPQVSDTLLDCRKHLTWVVAVLQEVAAAAAQLIAPLAENEGLLVAALEELAFKASEQIYGTPSSSPYECLRQSCNILISTMNKLATAMQEGEYDAERPPSKPPPVELRAAALRAEITDAEGLGLKLEDRETVIKELKKSLKIKGEELSEANVRLSLLEKKLDSAAKDADERIEKVQTRLEETQALLRKKEKEFEETMDALQADIDQLEAEKAELKQRLNSQSKRTIEGLRGPPPSGIATLVSGIAGGAIPGQAPGSVPGPGLVKDSPLLLQQISAMRLHISQLQHENSILKGAQMKASLASLPPLHVAKLSHEGPGSELPAGALYRKTSQLLETLNQLSTHTHVVDITRTSPAAKSPSAQLMEQVAQLKSLSDTVEKLKDEVLKETVSQRPGATVPTDFATFPSSAFLRAKEEQQDDTVYMGKVTFSCAAGFGQRHRLVLTQEQLHQLHSRLIS

SEQ ID NO: 143329 - protein, 186 aa, Artificial Sequence
  derived and/or modified sequence
MLMGLLRPYILGERGTVMTPSGSRMSAEASARPLRVGSRVEVIGKGHRGTVAYVGATLFATGKWVGVILDEAKGKNDGTVQGRKYFTCDEGHGIFVRQSQIQVFEDGADTTSPETPDSSASKVLKREGTDTTAKTSKLRGLKPKKAPTARKTTTRRPKPTRPASTGVAGASSSLGPSGSASAGELS

SEQ ID NO: 143330 - DNA, 3837 bp, Artificial Sequence
  derived and/or modified sequence
atggcccaatctaagaggcacgtatatagcagaactccttctggtagtagaatgtctgcagaagcctcggctcgccctctccgagtgggcagccgcgtcgaggtgatcggaaaaggtcaccggggaacagtcgcctacgttggcgcgacattgtttgcaaccggcaaatgggtaggggtgattcttgatgaggctaaaggcaagaacgacggtaccgtgcagggacggaagtatttcacttgcgacgagggtcatgggattttcgtgcggcaaagccaaattcaggttttcgaggacggggcggataccactagtcccgagacccctgattcctcagcttctaaggtgctgaaacgagagggcaccgacactactgcaaagactagtaagcttcgtggcctgaaacctaagaaggcacccacagcgcggaagacaactactagacgaccaaagccaacaaggcccgcaagtacaggtgtggccggtgcttcttcctcgttgggtcccagcgggtcagccagtgctggagagttgtcgtcgagcgagccatccacaccagctcaaacaccactcgccgcccccataattcctacccctgttctgacaagtcctggcgccgttccacctcttcccagccctagcaaggaggaggaggggctccgcgctcaggtccgcgaccttgaagaaaaactggagacccttcgcctgaaacgcgctgaggataaggcgaagttgaaggagcttgagaagcacaagattcagctcgagcaagtgcaggagtggaaatccaaaatgcaggagcagcaagccgacctgcagcggcgtcttaaggaggctcgtaaggaagctaaggaagcactggaggccaaagaaagatatatggaggaaatggctgataccgctgatgctatagaaatggcgaccctggacaaagaaatggccgaagaaagggccgaatccctgcagcaggaagtggaagctttgaaagaacgtgtcgatgagcttactacagatctggagatcctgaaggctgaaatcgaggaaaaaggcagcgatggggccgcgagttcctaccagctgaagcagctcgaggagcagaatgcccggctcaaggacgccttggtcaggatgcgggacctgagttcttccgaaaaacaagaacacgtgaagctccagaaactgatggagaaaaaaaatcaggaattggaggtcgtccgacagcaaagggagcgcctgcaagaggagctgagccaggcggagtccaccatcgatgagctcaaggaacaggtcgacgccgcattaggagcagaggaaatggtagagatgctgaccgaccggaacctcaacctggaggaaaaggtgagagagctgcgtgagaccgtgggagacttggaggccatgaatgagatgaatgatgaactgcaggagaacgctcgggagacggaacttgagctgagggaacagttagatatggctggggcacgcgtacgcgaggctcaaaaaagggtggaagccgcccaggagaccgtagcagattaccagcaaaccatcaaaaagtacaggcaactcaccgctcacctgcaggacgtcaaccgggagctgactaatcagcaagaggcaagcgtggagcggcagcagcagcccccacccgagacatttgattttaagataaaattcgccgaaaccaaagctcacgccaaagcaatcgagatggagttacgtcagatggaagtggcccaagccaatcgtcacatgagcttactgacagcgtttatgcccgattccttcctgcggccagggggagatcacgactgcgtgttggtcctgctcttaatgcccagactgatctgtaaggccgagctcatcagaaaacaagcccaggagaaattcgaattatccgagaattgcagtgaaaggccaggcctgaggggggctgcaggtgagcagctcagctttgcagccggcctggtttattccctgagcctcctccaggcgacactccaccgctacgagcacgcactatctcagtgctctgtggacgtgtacaaaaaggtcggctccctctacccagagatgtcagcgcacgagcgatcactcgattttctgatcgagttgctgcataaagaccagttagatgaaacggttaatgtggagcctcttacaaaagccatcaagtactaccagcatctttactccatccacctggctgagcaaccagaggactgtaccatgcagctggctgaccacatcaaattcactcagagcgcacttgactgtatgagtgtcgaagtaggaagactgagagcatttctacaaggggggcaggaagcaacagatatagcacttttgcttcgggacttggagacgtcatgctctgacattagacagttctgcaagaagatcaggaggcggatgcctggcactgacgcaccaggcatccccgccgccctggccttcgggcctcaggtatccgacacactactcgattgcagaaagcacctgacttgggtggtggccgtgctgcaggaagtcgccgccgccgctgcccagttgatcgcccccctcgctgagaacgaaggccttcttgttgcagctcttgaggaactggctttcaaggcctccgaacagatttacggtacgccctccagcagcccttacgagtgcttacggcaaagttgcaatattttgatctccaccatgaataagctggcgaccgcgatgcaggagggcgagtacgacgccgagcgccctccgtcaaagcctccgcccgtggagctcagggccgcagctctccgagcggagataacagatgccgagggtctggggctgaagctggaagaccgcgagaccgtgatcaaggaattgaaaaagagcctgaagatcaaaggagaggagctgtcggaggctaacgttcggcttagtctgctcgagaaaaaactcgattctgcagctaaggacgccgacgagcgtatcgagaaagtacagacgaggttggaggaaactcaagccctgctgagaaagaaggagaaggagttcgaagaaacgatggacgctctacaggctgatattgatcagttggaagcggaaaaagcggagttgaaacagaggttgaatagtcagtccaaacgcaccatagaagggctgagaggccctcccccgagcggaatcgccaccctggttagcggcattgccggcgaagagcagcagcgcggcgcaatacctggacaggctcccgggagtgtccctgggcctgggttggtaaaagatagtcccctgctgctgcagcaaatttctgcgatgagactgcacatctctcagctgcagcatgaaaactccatcctcaaaggagcccagatgaaggctagtctggcctccctgcccccccttcatgtcgccaagctgtcccatgagggccctggaagcgagctgcccgccggcgccctctacaggaaaaccagccagttgctggagaccctgaaccaactatcaacacatacccacgtggtggatataacccggacgtctcctgcggccaaaagtccctcagcacagctgatggagcaagttgctcagctaaaatccctgagcgatactgtcgagaagctgaaggacgaggtcctgaaagagacagtgtcgcagagacccggagcaactgtgccaaccgacttcgctactttcccctcatctgcattcctgagagcaaaagaagaacaacaggacgacacggtgtatatgggtaaggtcacattctcatgcgctgccggcttcggccagcgccacagactggtcctgacccaggagcagttgcaccagttacacagcaggctgatctcttag

SEQ ID NO: 143331 - DNA, 3786 bp, Artificial Sequence
  derived and/or modified sequence
atgtctgcagaagcctccgcgaggccactcagggttggatcaagggtcgaagttatcggcaaggggcaccgcggaactgtagcctacgtcggcgccacactatttgccaccggtaagtgggttggcgtcatccttgacgaggcgaaagggaagaatgatggtactgtacagggacggaaatatttcacctgtgatgaagggcacggcatctttgtgaggcagagtcaaatacaagtgtttgaggatggggccgacacgacgtcccccgaaaccccagattctagtgccagcaaagtgctgaaaagggagggtacagacaccacagccaagacctctaagctacgaggtctgaagccaaagaaagcacctaccgcccggaagggtaggagggtgcgaacgaagccaacccggcccgcttccactggtgtggcgggagcttcttcatctctcgggcctagcggatccgccagtgcgggggagttgagtagtagtgaaccgagcactccggcacagacgcctctcgccgctcccattataccaacccctgtcctgacctcaccaggcgctgtgccacccctgccttccccctccaaggaagaggaaggactcagggcccaggtgcgggatctggaggaaaaattggagactctccggcttaagcgcgccgaggacaaagccaaattaaaggaactggagaaacacaaaatccagttggaacaggtgcaggaatggaagtccaagatgcaggaacaacaggcagatctccagcggcgcctgaaagaagcccgaaaagaggccaaggaggccctcgaggcaaaggaaagatatatggaagagatggccgacaccgcagatgcgattgagatggctacactggacaaggagatggctgaggagagagcagagtcccttcagcaggaggttgaagctctgaaagaaagggtggacgagttaacaaccgatctggagattctcaaagccgaaatcgaggaaaaagggtccgacggggctgccagctcttatcaattgaaacagctggaggagcagaatgcacgtctgaaagatgcgttggtgagaatgagagatctttccagttcagagaagcaggagcacgtaaaactgcagaaacttatggaaaaaaagaatcaggaactcgaagtggtgaggcaacaaagagagaggcttcaggaggagttatcacaggctgaaagcactatcgatgagctgaaagagcaggttgatgccgctctgggtgccgaagaaatggtcgagatgttgactgacagaaatctcaaccttgaggaaaaggtgagagagctgcgagagactgtgggagatctggaggccatgaatgagatgaacgacgaattacaggaaaatgcccgagaaaccgaactagaattgagggagcagttagacatggcaggggcgcgagttcgcgaagcccaaaaaagagtggaagctgcacaggaaaccgtcgccgactaccaacagacgatcaaaaagtaccgtcagctgaccgcccatctgcaggacgtgaatagagagctcacaaatcaacaggaggcaagtgtcgaacgccaacagcagccaccacctgaaactttcgactttaaaattaagtttgctgagacaaaagcccatgcaaaagcaattgagatggagctccgccagatggaagttgcccaagccaaccgccatatgtcccttctgactgctttcatgcctgactcgttccttcgccccggcggagatcatgactgcgtacttgtgcttctgctaatgcctcgcctgatctgcaaggcggaattaattaggaaacaggcgcaggagaagttcgagctgtccgaaaactgttcagagcggcccggcctgcggggcgccgctggagagcagctgtcatttgccgcagggctggtttacagcctatctctgctccaggccacgttgcacaggtatgaacacgccctctctcagtgttcagtggacgtctataaaaaggtaggctccctttacccagaaatgtccgcccacgaaagatccctggattttctgatcgagctgttgcacaaggaccagcttgacgagacagtcaatgtggagcccctaactaaagccattaaatattaccagcacctctactctatccacttagcagagcagcccgaagactgcacaatgcagctcgccgaccacatcaagtttactcagtcggcacttgactgcatgtctgtggaggtgggcagactgcgtgcctttctgcaaggtggacaggaagcaacagatatcgctctgttgctgcgcgacttggagacatcttgcagtgacataaggcaattttgcaaaaagattcgaagacggatgcctggaacggacgccccgggaattcctgctgccttagcgtttgggccccaggtaagtgacacactgcttgattgtagaaagcacctcacgtgggtcgttgcagttctgcaggaagtcgccgctgccgctgctcaattgatcgctcctctggctgagaacgagggcctgttggtcgccgctctggaagagcttgccttcaaggcctccgaacaaatttacggtacgccgtcttcctctccgtatgaatgcctcagacagagctgtaatattttgatcagtaccatgaataaacttgctactgccatgcaggaaggggagtacgacgccgagaggccaccaagtaagcccccacccgtggaactgcgcgctgcagcgctgcgggctgagattactgatgccgagggactgggccttaagcttgaagaccgcgaaaccgtgatcaaagagttgaagaagagcctaaaaattaagggagaggagctgagcgaggcaaacgtgcgcctgagtctgttggagaagaaactggattccgcagccaaagacgcggacgaaaggatcgaaaaggttcagacgcggttggaggaaacccaagcccttttgcgcaagaaagaaaaggagtttgaggagaccatggatgcgctgcaggccgatatagaccaattagaagccgaaaaggcagagctgaagcagaggcttaacagccagtctaaacgtaccattgagggtttgagaggcccccccccgagcggcattgcaaccctggtgagcggcattgctggagaggaacaacagagaggcgcaatcccaggccaggctcctgggtccgtcccaggaccggggctggtgaaggacagccccctacttcttcagcaaatcagcgccatgagactccatattagtcaactccagcacgaaaactcaatcttaaaaggagcccagatgaaagcatcccttgccagcctccctcccttgcatgtggctaaattatcacatgaagggccaggtagcgagttgcccgccggcgctttgtaccgtaagacttctcaattgctggagacgctgaatcagctctcaactcatacccatgtggtagatataactagaacctctcctgccgccaagagtccatccgcgcagctgatggagcaggttgcgcagctgaaatccctgagcgacaccgtagagaagctgaaggatgaagtcctcaaggaaacggtatcgcagcgacctggcgctacagtgccgacagacttcgccacatttccctcttcggctttcttgagagctaaggaagagcagcaggatgatacagtatacatgggcaaggtgacctttagttgtgccgccgggtttgggcaacggcataggttagtgttaactcaggaacagcttcaccagttgcatagccgcttgataagctag

SEQ ID NO: 143332 - DNA, 3435 bp, Artificial Sequence
  derived and/or modified sequence
atgatgcgacaagcgcccactgcgaggaaaaccacaacccgtcggcctaagcccacaagacccgctagcaccggagtcgctggggcttccagctctctgggcccgtcagggagtgccagcgccggcgagttgagcagcagcgagccctccacccccgcacaaactcctctggccgccccaatcataccaactccagtgctgacgtccccaggtgccgtgcccccattgccctctccctcaaaggaggaggaggggttgcgcgctcaggtgagagatttggaagaaaagcttgagaccctcaggctcaagagagccgaggacaaagccaaattgaaggaactggagaaacacaaaattcagctggaacaagtgcaggagtggaaatcaaagatgcaggaacagcaggcagacttgcagaggcggttgaaggaagctcggaaagaagctaaggaggcactggaggccaaagaacgctacatggaggaaatggcggataccgccgacgcaattgagatggcgaccctggataaggagatggctgaagaacgagctgagtcattgcagcaggaggtagaggccttgaaggaacgcgtggatgaactcaccactgacctggagatccttaaggccgaaattgaggaaaagggctcagatggagctgcaagttcctatcagttgaagcaactggaagaacagaatgcccgattgaaagacgctctggtgaggatgcgcgatctgagctcgagcgaaaagcaagagcacgtgaagctgcagaaactcatggagaaaaagaatcaggaactcgaagtagttcgccagcagagggaaaggcttcaggaagaactcagccaagcggaaagcactattgatgagctgaaggagcaagtcgatgctgccttaggtgcagaggagatggttgaaatgctgaccgatagaaatctgaatctggaggagaaggtgcgggagttgcgcgagacggtgggggatttagaggccatgaatgaaatgaacgatgagctgcaggagaacgctagagagaccgaactggaactacgagaacaactcgatatggctggcgcaagggttcgagaagcccaaaagcgggtagaggccgcccaggagaccgtcgccgactaccaacagacaattaagaagtaccggcaacttaccgcccacctgcaggatgtgaaccgggagctaactaaccagcaggaggctagcgtggagagacagcagcaaccaccaccagaaaccttcgattttaagataaaatttgccgaaactaaagcgcatgctaaggcgatcgaaatggaactgagacagatggaagtggcacaagcaaatcggcatatgtcactccttacggccttcatgccagactcgtttctcagaccagggggtgatcacgattgtgtcctggtgcttctgctgatgcccaggttgatttgcaaggcggaactgattcgtaagcaggcccaggaaaagttcgaactttcagagaactgctcggagcgaccaggcctgcggggagctgctggagagcagttgagcttcgcagctgggcttgtgtactccctatccctgctacaggccacccttcacaggtatgaacatgcgttatcccagtgctcagtcgatgtctacaaaaaagttggctccctctatcctgaaatgtctgcacatgaacgctcactggattttctgattgagctcctccataaagatcaattggatgaaaccgtgaacgtcgaaccgttgacaaaagcgattaaatattatcagcatctgtattcgatacacctggcagaacagcccgaagattgtactatgcagctcgcagaccatattaaattcacccagagcgccctggattgtatgtcagtcgaagtgggtcgactgagggcctttctccagggcggtcaagaggcaactgatatcgccctgctgctccgcgatcttgagacatcatgctccgatatcaggcagttctgtaaaaagattaggcgcaggatgccaggcaccgatgcacctggcattccagctgcactcgctttcggtccccaggtgagcgacacactcttggactgtagaaaacacctgacctgggtggttgctgtcctgcaggaagtggcagcagctgccgcccagcttattgcacccctggcagagaatgagggacttctggtagcagcacttgaggaattggcgttcaaagcctctgaacagatttatggtacaccctcctcatctccatacgagtgtttacggcagtcgtgtaacattctgatctccacgatgaataaactcgctactgctatgcaagagggggagtacgatgccgagaggccaccctccaaaccgccccctgtggaactcagagcggcggccttgagggccgagattacagatgcggaaggcctcggactgaaactggaagatcgggagacggtcataaaggaattgaagaagtccctgaaaataaagggagaggaactgtccgaagctaatgtgcgcctctctctcttagagaagaagttggactcagctgcaaaggacgctgatgaaagaattgaaaaagtacagacccgtctggaggaaacacaggcgcttctccggaagaaggagaaggaattcgaagaaacaatggacgctctgcaggctgacattgaccaactcgaggctgagaaagctgaactgaagcaacgtctcaacagtcagtccaagaggacaatcgagggtttgcgggggccgccacccagcggcattgccaccctcgtcagcggcatcgcaggcgaagagcagcagagaggcgcgattcccggtcaagcacctggaagcgtgccaggacctggcctcgtcaaagattcacctctcctgctgcagcagatcagcgctatgaggctgcacataagccagctgcagcacgagaacagcatacttaagggggctcagatgaaggcttctttggcatccctccctccactgcacgtcgccaaattatcccacgagggaccggggtcagagctccccgcaggggccctgtataggaaaacctcccagctgctggagaccttgaaccagctgtctacgcatacgcatgtggtggatatcacccgcacctcccccgcagccaagtcaccttcagctcaattgatggaacaagttgcccagctcaagtccctgagcgacactgtcgagaaactcaaggacgaggttctgaaagagacagtatctcagagacctggcgccaccgtcccaaccgatttcgctactttccctagttctgcgttcctgcgtgctaaggaggagcagcaggacgacactgtgtacatgggtaaagtgaccttctcatgcgcagccgggtttggacagcgtcataggttagtactgactcaggaacaattgcatcagctgcactcgcggctgatttcatag

SEQ ID NO: 143333 - DNA, 3771 bp, Artificial Sequence
  derived and/or modified sequence
atgtccgcggaagcctctgcgagacctcttcgcgtgggatcaagagtagaggtgatcggcaagggccacagggggaccgtggcttacgttggcgccacattgttcgctacagggaaatgggtcggggtgattctggacgaggcaaagggtaagaacgacgggacagtgcaaggtcgcaagtactttacttgtgatgaaggccacggaattttcgtgcggcagtcacagattcaggtgttcgaggacggagctgacactacttctcctgagacgcccgactcttctgccagcaaagtcctgaagcgcgaaggcacagacacaacggccaagacctcaaagctgagaggattgaagccaaagaaggcaccaacagccaggaagaccacgacacgcaggcccaaaccaacgcgccccgcgtctactggcgtggccggtgcctccagttccctcggtccctctggtagtgcctcggccggtgaactcagctcgagtgagccctccacccccgcacagactcccctcgcagcccctatcatacctacacctgttctgacttctccgggcgctgtgccacctctgccatcaccatctaaggaggaggagggcctgagagcacaggtgcgggatttggaagagaaactggaaaccttgcgcctgaagcgtgccgaggacaaggcaaagctgaaggaacttgaaaagcataagatccagcttgagcaggtgcaggagtggaaatctaagatgcaggagcagcaagcagacctgcagcgaagactcaaggaagctcgcaaagaggctaaagaagcgttagaggccaaagagagatacatggaggaaatggccgacacagcagatgccatcgagatggcgactctggacaaggagatggctgaggagcgggccgagagcctccagcaggaggtggaagcgctaaaagagcgtgtcgacgaattgaccacagacttggaaattctgaaggccgaaatagaggagaaaggaagtgatggagcagcctcttcttaccagcttaagcagctggaagaacagaacgctaggctgaaggatgccttggttcggatgcgtgatttaagcagctctgaaaaacaggagcacgtgaaattacagaagcttatggagaagaagaaccaggaactggaagtagtgcggcagcagagagagcgtctccaagaggagctgtcccaggctgagagcacaattgacgagctcaaagagcaggtagacgccgctttgggggcagaggagatggtggagatgctgacagaccgaaacctgaacctggaagagaaggtgcgggaacttagggagacggtcggagatctcgaggccatgaacgaaatgaatgacgagcttcaggagaacgcccgcgaaacggagttggaactgcgcgagcagttagatatggccggggcccgagtgcgtgaagcccagaagcgagttgaagccgcacaggaaacagtggccgactatcagcagactattaagaagtaccggcagttgacggcacatctgcaagatgtaaatcgtgagctcaccaatcagcaagaagcatccgtggagcgccagcagcagcccccccccgaaaccttcgacttcaaaatcaagtttgctgagacaaaagcacacgccaaggctattgaaatggaacttaggcaaatggaggtagctcaggcaaatcgtcatatgtccttacttaccgcctttatgcccgacagtttcctccggcccggcggggaccacgattgcgtgttagttctgctgctcatgcctcggctgatctgcaaagcagagcttatcaggaaacaggcacaggaaaagttcgagctaagtgaaaactgttctgagcggccaggcctgaggggcgcagccggggagcagctgagctttgccgctggacttgtgtactctctgtctctgcttcaagctacactgcacagatatgagcacgccctgtcacagtgctctgtcgatgtgtacaaaaaagtcggcagtttatatcccgaaatgtctgcccatgaacggtccttagactttctgatcgagctgctgcataaagaccaactggatgaaaccgtgaacgtggaacctctcactaaggccatcaaatactaccaacacctgtattccatccacctggcagagcaacccgaggactgcacgatgcagctcgccgaccatatcaaattcacacagagtgcgctagactgcatgtctgtggaggtgggtcgtcttcgggctttccttcagggcgggcaggaggccacggacatcgcactgttgctgcgggatcttgagacttcctgtagcgacattcgacaattctgcaaaaagattaggagaaggatgcctggaaccgacgctcccggtattcccgccgcactggccttcggcccgcaggtgtcagatactctcctggactgtcgtaagcatctgacctgggtggtggctgtgctgcaggaagtagccgctgctgcggcccagctgatcgcccccctagcagaaaatgaaggcctcttggtggcggctttagaagaactggccttcaaggcatcagagcaaatatatggcactcctagttccagcccctatgagtgtctccggcagtcttgcaatattcttataagcaccatgaataagctcgctaccgcaatgcaggagggcgaatacgatgccgaacggcctccttccaaaccgccaccggtggaactcagggcagccgcactgcgggccgagattacagatgcagagggattaggcctaaagcttgaagacagagagacggtcatcaaagaattaaaaaagtctctcaaaataaagggcgaggaattgagtgaggcgaacgtcaggctctcacttctggagaaaaagttggacagtgccgccaaggatgccgatgaaagaattgaaaaagtccagaccaggctagaggagacccaggcactactaagaaagaaagaaaaggaattcgaggaaactatggatgcactgcaggctgacattgaccaactggaggctgaaaaggccgagcttaagcagagactcaattctcaatccaagaggaccatcgaaggactccggggacctccaccttcaggtattgcaaccctcgtctctggcatcgccggcggcgcaattcctggacaggccccaggcagcgttccgggacccgggttagtaaaggactcacctttgctcctccaacagattagcgctatgaggctccatatctcgcaattacagcatgagaactcaattttgaaaggcgcccaaatgaaggctagcctcgcatcattacccccgcttcacgtcgcaaaactctctcacgagggcccgggctccgaactccctgcaggcgccctgtatcggaaaacgtcccaactgctcgaaaccttgaatcagctcagcacgcacactcacgtcgtcgacattacacgcacaagcccagccgcaaagagtccatccgcccagctaatggagcaggtggcccaactgaagagcctgtctgacaccgttgaaaagcttaaagatgaggttctcaaagagaccgtaagtcagcggccgggagcaaccgttccgaccgattttgctaccttccctagtagtgcgtttctccgcgctaaggaagagcagcaggacgacacagtctacatggggaaggtaactttcagctgcgccgcagggttcggacagaggcaccggctcgtcctgactcaggagcaactccatcagctgcattcccggctcatttcctag

SEQ ID NO: 143334 - DNA, 561 bp, Artificial Sequence
  derived and/or modified sequence
atgctgatgggactcttacgaccctacatcttaggagaacgaggaactgtcatgaccccgagcggatcccgcatgtcggcagaggcctccgcacggccattgagagtgggtagccgcgtggaagtgatcgggaaggggcaccgcggaaccgtcgcatacgtgggggccacactgtttgccacagggaaatgggtgggcgtcattttagacgaagccaaaggaaagaacgacggcactgtccaggggcggaagtactttacgtgcgacgaggggcatggcatttttgtgcgccaatcacaaattcaggtgttcgaggatggagccgatactacctcaccagagacgcctgatagcagcgcctctaaagtgttgaagcgcgaaggcacagatactaccgccaagacgtccaagctaagaggcctcaaaccgaagaaagctcctactgctaggaagactaccactcgacgccccaagcctacccggccagcgtcaactggcgtggccggggcctcttcaagccttggaccatctggctccgcatcagctggcgaactgagctag

SEQ ID NO: 143335 - DNA, 3837 bp, Artificial Sequence
  derived and/or modified sequence
atggcccagagcaagagacatgtgtacagcaggacccccagcggcagcaggatgtctgctgaggccagcgcccggcccctgcgggtgggcagccgggtggaggtgattggcaagggccaccggggcaccgtggcctacgtgggcgccaccctgtttgccaccgggaagtgggtgggcgtcatcctggatgaggccaagggcaagaatgatggcaccgtgcagggcaggaagtacttcacctgtgatgagggccacggcatctttgtgcggcagagccagatccaggtgtttgaagatggagctgacaccaccagccctgagaccccagacagcagcgccagcaaggtgctgaagcgggagggcacagacaccacagccaagaccagcaagctgcggggcctgaagcccaagaaggcccccacagccaggaagaccaccacccggcggcccaagcccaccaggcctgccagcactggagtggccggggccagcagcagcctgggccccagcggcagcgccagcgctggggagctgagcagcagcgagcccagcaccccagcccagacccccctggccgcccccatcatccccacccctgtgctgaccagccctggagctgtgccccccctgcccagccccagcaaggaggaggagggcctgcgggcccaggtgcgggacctggaggagaagctggagaccctgcggctgaagagagctgaggacaaggccaagctgaaggagctggagaagcacaagatccagctggagcaggtgcaggagtggaagagcaagatgcaggagcagcaggccgacctgcagaggcggctgaaggaggccaggaaggaggccaaggaggccctggaggccaaggagcgctacatggaggagatggctgacacagcagatgccatcgagatggccaccctggacaaggagatggccgaggagcgggcagagagcctgcagcaggaggtggaggccctgaaggagcgggtggatgagctgaccacagacctggagatcctgaaggccgagattgaggagaagggcagtgatggagctgccagcagctaccagctgaagcagctggaggagcagaatgcccggctgaaggatgccctggtgaggatgagggacctgagcagcagcgagaagcaggagcacgtgaagctgcagaagctgatggagaagaagaaccaggagctggaggtggtgcggcagcagcgggagcggctgcaggaggagctgagccaggccgagagcaccattgatgagctgaaggagcaggtggatgctgccctgggcgctgaggagatggtggagatgctgacagacaggaacctgaacctggaggagaaggtgcgggagctgcgggagaccgtgggggacctggaggccatgaatgagatgaatgatgagctgcaggagaatgcccgggagacagagctggagctgcgggagcagctggacatggccggggcccgggtgcgggaggcccagaagagggtggaggccgcccaggagaccgtggccgactaccagcagaccatcaagaagtaccggcagctgacagcccacctgcaggatgtgaaccgggagctgaccaaccagcaggaggcctctgtggagcggcagcagcagcccccacctgagacctttgacttcaagatcaagtttgctgagaccaaggcccacgccaaggccatcgagatggagctgcggcagatggaggtggcccaggccaacagacacatgagcctgctgacagccttcatgccagacagcttcctgcggcctggaggagaccatgactgtgtgctggtgctgctgctgatgcccaggctcatctgcaaggccgagctgatcaggaagcaggcccaggagaagtttgagctgtctgagaactgcagcgagcggcccggcctgcggggagctgctggggagcagctgagctttgctgctggcctggtgtacagcctgagcctgctgcaggccaccctgcacagatatgagcacgccctgagccagtgcagcgtggatgtgtacaagaaggtgggcagcctgtacccagagatgtctgcccacgagaggagcctggacttcctgattgagctgctgcacaaggaccagctggatgagaccgtgaatgtggagcccctgaccaaggccatcaagtactaccagcacctgtacagcatccacctggccgagcagcctgaggactgcaccatgcagctggccgaccacatcaagttcacccagagcgccctggactgcatgtctgtggaggtgggccgcctgcgggccttcctgcagggcggccaggaggccacagacatcgccctgctgctgcgggacctggagaccagctgcagcgacatccggcagttctgcaagaagatcagaagaaggatgcctggaacagatgcccctggcatcccagctgccctggccttcggcccccaggtgtctgacaccctgctggactgcaggaagcacctgacctgggtggtggccgtgctgcaggaggtggccgctgctgctgcccagctgattgcccccctggctgaaaatgaaggcctgctggtggccgccctggaggagctggccttcaaggccagcgagcagatctacggcacccccagcagcagcccctatgaatgtctgcggcagagctgcaacatcctgatcagcaccatgaacaagctggccacagccatgcaggagggggagtatgatgctgagaggcctcccagcaagcccccacctgtggagctgcgggctgctgccctgcgggcagagatcacagatgctgagggcctgggcctgaagctggaggaccgggagaccgtcatcaaggagctgaagaagagcctgaagatcaagggggaggagctgtctgaggccaacgtgcggctgagcctgctggagaagaagctggacagcgctgccaaggatgctgatgaaagaattgagaaggtgcagacccggctggaggagacccaggccctgctgaggaagaaggagaaggagtttgaggagaccatggatgccctgcaggccgacatcgaccagctggaggccgagaaggccgagctgaagcagaggctgaacagccagagcaagaggaccatcgagggcctgcggggccccccacccagcggcatcgccaccctggtgtctggaattgctggggaggagcagcagagaggagccatccctggccaggcccctggctctgtgcccggccctggcctggtgaaggacagccccctgctgctgcagcagatcagcgccatgaggctgcacatcagccagctgcagcacgagaacagcatcctgaagggggcccagatgaaggccagcctggccagcctgccccccctgcacgtggccaagctgagccatgagggccctggcagcgagctgcctgctggggccctgtacaggaagaccagccagctgctggagaccctgaaccagctgagcacccacacccacgtggtggacatcaccaggaccagccctgctgccaagagccccagcgcccagctgatggagcaggtggcccagctgaagagcctgagtgacacagtggagaagctgaaggatgaggtgctgaaggagaccgtgtcccagaggcctggggccaccgtgcccacagactttgccaccttccccagcagcgccttcctgcgggccaaggaggagcagcaggatgacacagtgtacatgggcaaggtgaccttcagctgtgccgccggcttcggccagaggcaccggctggtgctgacccaggagcagctgcaccagctgcacagccgcctcatctcctag

SEQ ID NO: 143336 - DNA, 3786 bp, Artificial Sequence
  derived and/or modified sequence
atgtctgctgaggccagcgcccggcccctgcgggtgggcagccgggtggaggtgattggcaagggccaccggggcaccgtggcctacgtgggcgccaccctgtttgccaccgggaagtgggtgggcgtcatcctggatgaggccaagggcaagaatgatggcaccgtgcagggcaggaagtacttcacctgtgatgagggccacggcatctttgtgcggcagagccagatccaggtgtttgaagatggagctgacaccaccagccctgagaccccagacagcagcgccagcaaggtgctgaagcgggagggcacagacaccacagccaagaccagcaagctgcggggcctgaagcccaagaaggcccccacagccaggaaaggaagaagagtgaggaccaagcccaccaggcctgccagcactggagtggccggggccagcagcagcctgggccccagcggcagcgccagcgctggggagctgagcagcagcgagcccagcaccccagcccagacccccctggccgcccccatcatccccacccctgtgctgaccagccctggagctgtgccccccctgcccagccccagcaaggaggaggagggcctgcgggcccaggtgcgggacctggaggagaagctggagaccctgcggctgaagagagctgaggacaaggccaagctgaaggagctggagaagcacaagatccagctggagcaggtgcaggagtggaagagcaagatgcaggagcagcaggccgacctgcagaggcggctgaaggaggccaggaaggaggccaaggaggccctggaggccaaggagcgctacatggaggagatggctgacacagcagatgccatcgagatggccaccctggacaaggagatggccgaggagagagctgagagcctgcagcaggaggtggaggccctgaaggagcgggtggatgagctgaccacagacctggagatcctgaaggccgagattgaggagaagggcagtgatggagctgccagcagctaccagctgaagcagctggaggagcagaatgcccggctgaaggatgccctggtgaggatgagggacctgagcagcagcgagaagcaggagcacgtgaagctgcagaagctgatggagaagaagaaccaggagctggaggtggtgcggcagcagcgggagcggctgcaggaggagctgagccaggccgagagcaccattgatgagctgaaggagcaggtggatgctgccctgggcgctgaggagatggtggagatgctgacagacaggaacctgaacctggaggagaaggtgcgggagctgcgggagaccgtgggggacctggaggccatgaatgagatgaatgatgagctgcaggagaatgcccgggagacagagctggagctgcgggagcagctggacatggccggggcccgggtgcgggaggcccagaagagggtggaggccgcccaggagaccgtggccgactaccagcagaccatcaagaagtaccggcagctgacagcccacctgcaggatgtgaaccgggagctgaccaaccagcaggaggcctctgtggagcggcagcagcagcccccacctgagacctttgacttcaagatcaagtttgctgagaccaaggcccacgccaaggccatcgagatggagctgcggcagatggaggtggcccaggccaacagacacatgagcctgctgacagccttcatgccagacagcttcctgcggcctggaggagaccatgactgtgtgctggtgctgctgctgatgcccaggctcatctgcaaggccgagctgatcaggaagcaggcccaggagaagtttgagctgtctgagaactgcagcgagaggcctggcctgcggggagctgctggggagcagctgagctttgctgctggcctggtgtacagcctgagcctgctgcaggccaccctgcacagatatgaacatgccctgagccagtgcagcgtggatgtgtacaagaaggtgggcagcctgtacccagagatgtctgcccacgagaggagcctggacttcctgattgagctgctgcacaaggaccagctggatgaaacagtgaatgtggagcccctgaccaaggccatcaagtactaccagcacctgtacagcatccacctggccgagcagcctgaggactgcaccatgcagctggccgaccacatcaagttcacccagagcgccctggactgcatgtctgtggaggtgggccgcctgcgggccttcctgcagggcggccaggaggccacagacatcgccctgctgctgcgggacctggagaccagctgcagcgacatccggcagttctgcaagaagatcagaagaaggatgcctggaacagatgcccctggcatcccagctgccctggccttcggcccccaggtgtctgacaccctgctggactgcaggaagcacctgacctgggtggtggccgtgctgcaggaggtggccgctgctgctgcccagctgattgcccccctggccgagaatgaaggcctgctggtggccgccctggaggagctggccttcaaggccagcgagcagatctacggcacccccagcagcagcccctatgagtgcctgcggcagagctgcaacatcctgatcagcaccatgaacaagctggccacagccatgcaggagggggagtatgatgctgagcggccccccagcaagcccccacctgtggagctgcgggccgccgccctgcgggcagagatcacagatgctgagggcctgggcctgaagctggaggaccgggagaccgtcatcaaggagctgaagaagagcctgaagatcaagggggaggagctgtctgaggccaacgtgcggctgagcctgctggagaagaagctggacagcgctgccaaggatgctgatgagcgcatcgagaaggtgcagacccggctggaggagacccaggccctgctgaggaagaaggagaaggagtttgaggagaccatggatgccctgcaggccgacatcgaccagctggaggccgagaaggccgagctgaagcagaggctgaacagccagagcaagaggaccatcgagggcctgcggggccccccaccttctggaattgccaccctggtgtctggaattgctggggaggagcagcagagaggagccatccctggccaggcccctggctctgtgcccggccctggcctggtgaaggacagccccctgctgctgcagcagatcagcgccatgaggctgcacatcagccagctgcagcatgaaaattccatcctgaagggggcccagatgaaggccagcctggccagcctgccccccctgcacgtggccaagctgagccatgagggccctggcagcgagctgcctgctggggccctgtacaggaagaccagccagctgctggagaccctgaaccagctgagcacccacacccacgtggtggacatcaccaggaccagccctgctgccaagagccccagcgcccagctgatggagcaggtggcccagctgaagagcctgagtgacacagtggagaagctgaaggatgaggtgctgaaggagaccgtgtcccagaggcctggggccaccgtgcccacagactttgccaccttccccagcagcgccttcctgcgggccaaggaggagcagcaggatgacacagtgtacatgggcaaggtgaccttcagctgtgccgccggcttcggccagaggcaccggctggtgctgacccaggagcagctgcaccagctgcacagccgcctcatctcctag

SEQ ID NO: 143337 - DNA, 3435 bp, Artificial Sequence
  derived and/or modified sequence
atgatgaggcaggcccccacagccaggaagaccaccacccggcggcccaagcccaccaggcctgccagcactggagtggccggggccagcagcagcctgggccccagcggcagcgccagcgctggggagctgagcagcagcgagcccagcaccccagcccagacccccctggccgcccccatcatccccacccctgtgctgaccagccctggagctgtgccccccctgcccagccccagcaaggaggaggagggcctgcgggcccaggtgcgggacctggaggagaagctggagaccctgcggctgaagagagctgaggacaaggccaagctgaaggagctggagaagcacaagatccagctggagcaggtgcaggagtggaagagcaagatgcaggagcagcaggccgacctgcagaggcggctgaaggaggccaggaaggaggccaaggaggccctggaggccaaggagcgctacatggaggagatggctgacacagcagatgccatcgagatggccaccctggacaaggagatggccgaggagcgggcagagagcctgcagcaggaggtggaggccctgaaggagcgggtggatgagctgaccacagacctggagatcctgaaggccgagattgaggagaagggcagtgatggagctgccagcagctaccagctgaagcagctggaggagcagaatgcccggctgaaggatgccctggtgaggatgagggacctgagcagcagcgagaagcaggagcacgtgaagctgcagaagctgatggagaagaagaaccaggagctggaggtggtgcggcagcagcgggagcggctgcaggaggagctgagccaggccgagagcaccattgatgagctgaaggagcaggtggatgctgccctgggcgctgaggagatggtggagatgctgacagacaggaacctgaacctggaggagaaggtgcgggagctgcgggagaccgtgggggacctggaggccatgaatgagatgaatgatgagctgcaggagaatgcccgggagacagagctggagctgcgggagcagctggacatggccggggcccgggtgcgggaggcccagaagagggtggaggccgcccaggagaccgtggccgactaccagcagaccatcaagaagtaccggcagctgacagcccacctgcaggatgtgaaccgggagctgaccaaccagcaggaggcctctgtggagcggcagcagcagcccccacctgagacctttgacttcaagatcaagtttgctgagaccaaggcccacgccaaggccatcgagatggagctgcggcagatggaggtggcccaggccaacagacacatgagcctgctgacagccttcatgccagacagcttcctgcggcctggaggagaccatgactgtgtgctggtgctgctgctgatgcccaggctcatctgcaaggccgagctgatcaggaagcaggcccaggagaagtttgagctgtctgagaactgcagcgagcggcccggcctgcggggagctgctggggagcagctgagctttgctgctggcctggtgtacagcctgagcctgctgcaggccaccctgcacagatatgagcacgccctgagccagtgcagcgtggatgtgtacaagaaggtgggcagcctgtacccagagatgtctgcccacgagaggagcctggacttcctgattgagctgctgcacaaggaccagctggatgagaccgtgaatgtggagcccctgaccaaggccatcaagtactaccagcacctgtacagcatccacctggccgagcagcctgaggactgcaccatgcagctggccgaccacatcaagttcacccagagcgccctggactgcatgtctgtggaggtgggccgcctgcgggccttcctgcagggcggccaggaggccacagacatcgccctgctgctgcgggacctggagaccagctgcagcgacatccggcagttctgcaagaagatcagaagaaggatgcctggaacagatgcccctggcatcccagctgccctggccttcggcccccaggtgtctgacaccctgctggactgcaggaagcacctgacctgggtggtggccgtgctgcaggaggtggccgctgctgctgcccagctgattgcccccctggctgaaaatgaaggcctgctggtggccgccctggaggagctggccttcaaggccagcgagcagatctacggcacccccagcagcagcccctatgaatgtctgcggcagagctgcaacatcctgatcagcaccatgaacaagctggccacagccatgcaggagggggagtatgatgctgagaggcctcccagcaagcccccacctgtggagctgcgggctgctgccctgcgggcagagatcacagatgctgagggcctgggcctgaagctggaggaccgggagaccgtcatcaaggagctgaagaagagcctgaagatcaagggggaggagctgtctgaggccaacgtgcggctgagcctgctggagaagaagctggacagcgctgccaaggatgctgatgaaagaattgagaaggtgcagacccggctggaggagacccaggccctgctgaggaagaaggagaaggagtttgaggagaccatggatgccctgcaggccgacatcgaccagctggaggccgagaaggccgagctgaagcagaggctgaacagccagagcaagaggaccatcgagggcctgcggggccccccacccagcggcatcgccaccctggtgtctggaattgctggggaggagcagcagagaggagccatccctggccaggcccctggctctgtgcccggccctggcctggtgaaggacagccccctgctgctgcagcagatcagcgccatgaggctgcacatcagccagctgcagcacgagaacagcatcctgaagggggcccagatgaaggccagcctggccagcctgccccccctgcacgtggccaagctgagccatgagggccctggcagcgagctgcctgctggggccctgtacaggaagaccagccagctgctggagaccctgaaccagctgagcacccacacccacgtggtggacatcaccaggaccagccctgctgccaagagccccagcgcccagctgatggagcaggtggcccagctgaagagcctgagtgacacagtggagaagctgaaggatgaggtgctgaaggagaccgtgtcccagaggcctggggccaccgtgcccacagactttgccaccttccccagcagcgccttcctgcgggccaaggaggagcagcaggatgacacagtgtacatgggcaaggtgaccttcagctgtgccgccggcttcggccagaggcaccggctggtgctgacccaggagcagctgcaccagctgcacagccgcctcatctcctag

SEQ ID NO: 143338 - DNA, 3771 bp, Artificial Sequence
  derived and/or modified sequence
atgtctgctgaggccagcgcccggcccctgcgggtgggcagccgggtggaggtgattggcaagggccaccggggcaccgtggcctacgtgggcgccaccctgtttgccaccgggaagtgggtgggcgtcatcctggatgaggccaagggcaagaatgatggcaccgtgcagggcaggaagtacttcacctgtgatgagggccacggcatctttgtgcggcagagccagatccaggtgtttgaagatggagctgacaccaccagccctgagaccccagacagcagcgccagcaaggtgctgaagcgggagggcacagacaccacagccaagaccagcaagctgcggggcctgaagcccaagaaggcccccacagccaggaagaccaccacccggcggcccaagcccaccaggcctgccagcactggagtggccggggccagcagcagcctgggccccagcggcagcgccagcgctggggagctgagcagcagcgagcccagcaccccagcccagacccccctggccgcccccatcatccccacccctgtgctgaccagccctggagctgtgccccccctgcccagccccagcaaggaggaggagggcctgcgggcccaggtgcgggacctggaggagaagctggagaccctgcggctgaagagagctgaggacaaggccaagctgaaggagctggagaagcacaagatccagctggagcaggtgcaggagtggaagagcaagatgcaggagcagcaggccgacctgcagaggcggctgaaggaggccaggaaggaggccaaggaggccctggaggccaaggagcgctacatggaggagatggctgacacagcagatgccatcgagatggccaccctggacaaggagatggccgaggagagagctgagagcctgcagcaggaggtggaggccctgaaggagcgggtggatgagctgaccacagacctggagatcctgaaggccgagattgaggagaagggcagtgatggagctgccagcagctaccagctgaagcagctggaggagcagaatgcccggctgaaggatgccctggtgaggatgagggacctgagcagcagcgagaagcaggagcacgtgaagctgcagaagctgatggagaagaagaaccaggagctggaggtggtgcggcagcagcgggagcggctgcaggaggagctgagccaggccgagagcaccattgatgagctgaaggagcaggtggatgctgccctgggcgctgaggagatggtggagatgctgacagacaggaacctgaacctggaggagaaggtgcgggagctgcgggagaccgtgggggacctggaggccatgaatgagatgaatgatgagctgcaggagaatgcccgggagacagagctggagctgcgggagcagctggacatggccggggcccgggtgcgggaggcccagaagagggtggaggccgcccaggagaccgtggccgactaccagcagaccatcaagaagtaccggcagctgacagcccacctgcaggatgtgaaccgggagctgaccaaccagcaggaggcctctgtggagcggcagcagcagcccccacctgagacctttgacttcaagatcaagtttgctgagaccaaggcccacgccaaggccatcgagatggagctgcggcagatggaggtggcccaggccaacagacacatgagcctgctgacagccttcatgccagacagcttcctgcggcctggaggagaccatgactgtgtgctggtgctgctgctgatgcccaggctcatctgcaaggccgagctgatcaggaagcaggcccaggagaagtttgagctgtctgagaactgcagcgagaggcctggcctgcggggagctgctggggagcagctgagctttgctgctggcctggtgtacagcctgagcctgctgcaggccaccctgcacagatatgaacatgccctgagccagtgcagcgtggatgtgtacaagaaggtgggcagcctgtacccagagatgtctgcccacgagaggagcctggacttcctgattgagctgctgcacaaggaccagctggatgaaacagtgaatgtggagcccctgaccaaggccatcaagtactaccagcacctgtacagcatccacctggccgagcagcctgaggactgcaccatgcagctggccgaccacatcaagttcacccagagcgccctggactgcatgtctgtggaggtgggccgcctgcgggccttcctgcagggcggccaggaggccacagacatcgccctgctgctgcgggacctggagaccagctgcagcgacatccggcagttctgcaagaagatcagaagaaggatgcctggaacagatgcccctggcatcccagctgccctggccttcggcccccaggtgtctgacaccctgctggactgcaggaagcacctgacctgggtggtggccgtgctgcaggaggtggccgctgctgctgcccagctgattgcccccctggccgagaatgaaggcctgctggtggccgccctggaggagctggccttcaaggccagcgagcagatctacggcacccccagcagcagcccctatgagtgcctgcggcagagctgcaacatcctgatcagcaccatgaacaagctggccacagccatgcaggagggggagtatgatgctgagcggccccccagcaagcccccacctgtggagctgcgggccgccgccctgcgggcagagatcacagatgctgagggcctgggcctgaagctggaggaccgggagaccgtcatcaaggagctgaagaagagcctgaagatcaagggggaggagctgtctgaggccaacgtgcggctgagcctgctggagaagaagctggacagcgctgccaaggatgctgatgagcgcatcgagaaggtgcagacccggctggaggagacccaggccctgctgaggaagaaggagaaggagtttgaggagaccatggatgccctgcaggccgacatcgaccagctggaggccgagaaggccgagctgaagcagaggctgaacagccagagcaagaggaccatcgagggcctgcggggccccccaccttctggaattgccaccctggtgtctggaattgctggaggagccatccctggccaggcccctggctctgtgcccggccctggcctggtgaaggacagccccctgctgctgcagcagatcagcgccatgaggctgcacatcagccagctgcagcacgagaacagcatcctgaagggggcccagatgaaggccagcctggccagcctgccccccctgcacgtggccaagctgagccatgagggccctggcagcgagctgcctgctggggccctgtacaggaagaccagccagctgctggagaccctgaaccagctgagcacccacacccacgtggtggacatcaccaggaccagccctgctgccaagagccccagcgcccagctgatggagcaggtggcccagctgaagagcctgagtgacacagtggagaagctgaaggatgaggtgctgaaggagaccgtgtcccagaggcctggggccaccgtgcccacagactttgccaccttccccagcagcgccttcctgcgggccaaggaggagcagcaggatgacacagtgtacatgggcaaggtgaccttcagctgtgccgccggcttcggccagaggcaccggctggtgctgacccaggagcagctgcaccagctgcacagccgcctcatctcctag

SEQ ID NO: 143339 - DNA, 561 bp, Artificial Sequence
  derived and/or modified sequence
atgctgatgggcctgctgcggccctacatcctgggggagcggggcaccgtgatgaccccatctggcagcaggatgtctgctgaggccagcgcccggcccctgcgggtgggcagccgggtggaggtgattggcaagggccaccggggcaccgtggcctacgtgggcgccaccctgtttgccaccgggaagtgggtgggcgtcatcctggatgaggccaagggcaagaatgatggcaccgtgcagggcaggaagtacttcacctgtgatgagggccacggcatctttgtgcggcagagccagatccaggtgtttgaagatggagctgacaccaccagccctgagaccccagacagcagcgccagcaaggtgctgaagcgggagggcacagacaccacagccaagaccagcaagctgcggggcctgaagcccaagaaggcccccacagccaggaagaccaccacccggcggcccaagcccaccaggcctgccagcactggagtggccggggccagcagcagcctgggccccagcggcagcgccagcgctggggagctgtcctag

SEQ ID NO: 143340 - DNA, 3837 bp, Artificial Sequence
  derived and/or modified sequence
atggcccagagcaagcggcacgtgtacagccggacccccagcggctctcgtatgtcagcagaggcttccgcccgacctcttcgggtggggtcccgggtggaggtcattggcaaggggcaccgcggcactgtggcatacgtgggcgctaccctcttcgctaccgggaagtgggtcggggtgattttggacgaagcgaagggcaagaacgacggaactgttcagggacgcaaatacttcacttgcgacgagggccatggaattttcgttcgtcaatcacagattcaggtattcgaggacggtgctgacacaacgtcaccagagactcctgacagcagtgcaagtaaggtactcaagcgcgaaggcaccgacacaacagcaaagacatccaagttgagagggctgaaacccaagaaagcaccaactgcgcggaagacaacaacacgcagacccaaaccgactaggcccgctagtaccggtgtcgccggggcctcatcaagcctcgggccatccggctccgcgtcagcaggcgaattgagttcttccgaaccaagcacacccgcccagacaccactggcagcccccattatacctacccccgtgctgacctctcccggcgccgttccccctctaccttctccaagcaaggaggaggagggattaagggctcaagttagagatcttgaggagaagttggagacactgcgactgaagcgcgcagaggacaaggctaaactgaaggaattggagaagcacaagattcagcttgaacaggtccaggagtggaagagtaaaatgcaagagcagcaggccgacttgcagaggcgtttgaaggaagcccgaaaagaagcaaaggaggccctagaagcgaaagagaggtatatggaggagatggcagacacagccgatgcaatcgaaatggcaacactggacaaggaaatggctgaggaacgcgctgaatctcttcagcaggaggtagaagccttgaaggaacgagtcgatgaactgactaccgaccttgaaatcctgaaggccgagattgaagagaagggctccgacggcgcggcttcaagttaccagctaaagcaactagaagaacagaatgcccgcctgaaagacgccctcgtaagaatgcgcgatctgtcctcttccgaaaaacaggaacatgttaagctgcagaagctgatggaaaaaaagaatcaggagctcgaagttgttaggcagcagcgcgagcggctgcaagaggaactgagtcaagccgagagcacgatcgacgagcttaaagaacaggtggacgctgccctgggcgcggaagaaatggtggagatgttgaccgaccggaacctgaatctcgaggagaaggtacgggaactccgcgagactgtgggtgacctcgaggccatgaatgagatgaatgacgagcttcaggagaatgccagggagacagaacttgaactgcgcgaacaactggacatggcaggggccagagtccgggaagctcagaagagagtagaggccgctcaggaaaccgtcgccgattaccagcagaccattaagaagtaccgccagcttacagcccacttacaagacgtgaacagagagcttacaaaccaacaagaggcttccgtggaacgccaacagcagcctcccccggagacttttgactttaagatcaagtttgcagagacaaaggcccacgccaaagccattgaaatggaactgcgccaaatggaagtggctcaggccaatcgacatatgtccttattgaccgccttcatgcctgacagcttcctgcggcctggcggagatcatgactgtgtcctggttctactgcttatgcctcgcttaatttgtaaagcggaattgatcagaaagcaagcccaagaaaaattcgagctgagtgagaactgttccgaacggccaggtctgcgaggtgcggccggggaacaactttcatttgccgcaggtctcgtgtactcacttagcctcctgcaggccacattgcatcggtacgagcacgctctttcccagtgctccgtagatgtttataagaaggttggtagtctgtaccctgagatgtccgcacacgagcgctctctcgactttctgatcgagctccttcacaaggatcagttggacgaaaccgtcaatgtcgaacctctaactaaagctattaaatactaccaacatctgtacagcatacaccttgccgaacagcccgaagattgcactatgcagctcgctgatcacatcaagttcacgcaatccgccctggattgtatgtccgtggaggtcgggcgactgagagccttccttcaggggggtcaggaggccaccgacattgcgctgttgcttagggatctggaaacctcctgctcagacatcagacagttttgcaagaagattaggagacgtatgcctggaaccgacgcgcccggcatacctgccgccctggcctttggcccgcaggtctcagataccttgctcgactgtagaaaacacctcacctgggtggtggccgtgctgcaggaagtggcagcagctgctgcacagttgatcgctccgctggcagagaatgaggggctgctcgttgccgctctcgaggagctcgccttcaaggcctcagagcagatctacgggactccctcaagcagcccttacgaatgtttaagacagtcatgcaatatactcatctccactatgaataagcttgcgacagcgatgcaagagggggagtatgatgcagagcgaccaccatccaagcccccacccgtggaactgcgggctgctgcactgagagcagagatcacggacgccgagggactgggattgaagctggaagacagggagaccgtgattaaggaactcaagaagtctctaaaaataaaaggagaagagctgtccgaagccaacgtgcgcctctcccttcttgagaagaagttggactctgctgccaaggatgccgacgaaagaatagaaaaggtgcagacaagactggaggaaactcaggctctccttcgaaaaaaagagaaagagttcgaggaaacgatggacgctttgcaagctgacatcgatcagttggaggcggaaaaagcggagctcaaacagcggctgaatagccagtctaagcggaccattgaggggctgaggggacccccaccaagcgggatcgcaactctggtctccggaatcgccggcgaggagcaacagaggggtgctattcctggtcaggcaccaggaagcgtcccagggcccggccttgtgaaggactcacccctccttctccagcagataagcgccatgcggctgcatatcagtcagctgcagcacgagaatagcattcttaagggtgcacagatgaaagcatcccttgcatccctgcctcccctacatgtagcgaaactgtctcacgagggccctgggtcagaacttccagcaggagcgctttaccgaaagacttctcagcttctagaaaccctaaaccagttatccacccacacccacgtcgtggacatcacccggaccagtcccgccgcaaaatccccatccgcacagcttatggagcaagtggcccagttgaaaagccttagcgacactgtggagaagctgaaggacgaagtcctcaaggagacagtgagtcagcggcctggcgccaccgtccccaccgatttcgctacatttccatcctccgctttccttagagcaaaagaggaacaacaggacgacactgtctacatgggtaaggtgacattttcatgcgctgccggttttggccagagacataggcttgtgctgacacaagagcagttgcaccagctgcattcgcgcttaatatcttag

SEQ ID NO: 143341 - DNA, 3786 bp, Artificial Sequence
  derived and/or modified sequence
atgagcgccgaggccagcgcccggcccctgcgggtgggcagccgggtggaagtgattggaaaaggacaccgcggtaccgtggcttatgtaggcgctacccttttcgctactggcaaatgggtgggtgtgatcttagatgaagcgaaagggaaaaacgatggcactgtgcagggccgaaaatacttcacatgcgacgagggccacggcatttttgttaggcagagccagatccaagtgtttgaagatggggcagatacgactagccctgaaactccggactcttctgcttctaaggttctaaaacgcgaggggaccgacacaaccgccaaaacaagcaaattacgcggcctgaagcccaagaaagcaccaacagcgcggaagggccggcgtgtgaggactaagcccaccagacccgcaagtactggtgtcgctggcgcctcctcaagcctgggcccctccggaagcgcaagcgccggggaattatcctcttctgagcctagcacacctgcacaaacaccgctggccgcccccattattcccaccccagttctcacaagtcccggcgctgtccctccattaccaagcccaagcaaagaggaggaaggtctcagggctcaggttagagatctcgaggagaagctcgagactcttagattgaagagggccgaagataaggctaaactgaaagaattggagaagcacaaaatacaactggagcaggtacaggagtggaagtcaaagatgcaggaacagcaggcagacctgcagcgtaggctgaaagaagcaagaaaggaggcaaaggaagccctggaggcgaaagagcggtacatggaggagatggctgatactgcagacgccatagagatggccaccctcgacaaagaaatggcggaggagcgggccgaatctctccagcaggaggtggaggcactgaaagagagagtcgatgaactgactactgatttggaaatactgaaggcagaaatagaagaaaagggcagtgatggtgcagcgtcatcataccaactcaagcagcttgaggagcaaaatgctagattgaaggacgcccttgttcggatgcgagacctaagcagctctgaaaagcaggagcacgtgaagctccaaaaactgatggagaagaaaaatcaggagctggaagtcgtgcgacagcagcgcgagcgcctacaagaagaactttcccaggcagaaagtaccatcgacgagcttaaggagcaggtggacgccgccctgggcgcagaagagatggtagagatgctcaccgacaggaatcttaacctggaggagaaggtgagggagctcagagaaacagttggagacctagaggctatgaatgaaatgaacgacgaattacaggagaatgctcgcgaaaccgagttggaactcagagagcagctcgacatggccggagcgagggtgagggaggctcagaagagagttgaagctgcacaagagaccgtagctgactaccaacagactataaagaaatataggcagctgaccgcccatctgcaagacgtgaaccgggagttaacaaaccagcaggaggcatccgtggagaggcaacagcagccacctcccgaaacctttgatttcaagattaaattcgcagagactaaggcacacgccaaggccatcgaaatggaacttcgacaaatggaggttgcccaggccaacagacacatgtctcttttgaccgcattcatgcctgattcctttctgcgccctggcggggatcacgattgtgtgttggttctgctcctcatgcctcgattgatttgtaaggcggaactgatcagaaaacaggcccaagaaaagttcgagctgtccgagaactgcagtgagaggcccggcttaaggggagccgccggagaacagctttcctttgcagctgggctagtttacagcttgtctctcctgcaggctactctacaccgatatgaacacgcactgagtcagtgcagcgtggacgtctataagaaggtcggcagcctgtatccggaaatgtctgctcacgagaggagcctcgatttcctgatcgaattacttcacaaagatcaacttgatgaaacagttaacgtggaacccctcacaaaagccattaagtactaccagcatctatacagcatccacctggccgaacaacctgaggactgtacaatgcaactggccgaccatataaaattcacccagtcagcactcgactgtatgtcggtggaagtcggccgactgagagcgtttctgcaggggggacaagaggctactgatattgctctgctgctgcgggacctggagacctcctgcagcgacattcgccaattttgtaagaagattcgcagacggatgccaggaactgacgcccctggcatcccggccgccctggccttcggtccccaggtctctgacacactattagactgtcgtaaacacctcacctgggtcgtagccgttctgcaggaggtggctgccgccgccgcacaactgatcgccccactcgcagagaatgaaggactgttggtagcggcattggaagagctggccttcaaagcctcggaacaaatctacggaacgccatcgagctctccctacgagtgcctcagacagtcctgtaacatcttaatcagtactatgaacaagctggcaaccgcaatgcaagagggcgagtatgacgcggagcgccctccctcaaaaccgccccccgtggaactccgagcagcggccctgagagctgagatcacggatgccgaggggctcggacttaaactagaagatagggaaactgtaatcaaggagttgaagaagagtctgaagattaaaggcgaggagctctccgaagcaaacgtccgtctttcccttctggaaaagaagcttgatagcgccgccaaagacgctgacgaacgcatcgaaaaggtgcagactagactcgaagaaacccaggctttacttcgaaagaaagagaaagagtttgaggagactatggacgctctgcaggctgatatcgaccagctggaagctgagaaggcagaattgaagcagcgcttgaactctcagtccaagcgaaccatcgagggcctgaggggaccccctccttccggtattgctaccttagtgtcaggaatcgctggtgaagagcagcagagaggagctattccagggcaagccccggggtcagtccctgggccaggactggtgaaagacagtcccctgctgctgcagcagatttctgctatgcggttacacatttctcagctgcagcacgaaaattccattctcaagggagctcagatgaaggccagtctagcttcattacctccactccatgttgccaagctgagccatgaggggcccggctctgagttaccagccggagcactctacagaaagacctcacaactcctggagacgttgaaccagctgtccactcatacgcacgtggtcgacatcacccgcactagccccgcggccaaatccccaagtgcccagctgatggagcaagtggcacagttgaagtcgcttagcgatacagttgagaagctgaaggacgaggttttgaaagagactgtttcacaacgtcccggtgcaactgtgccaacagattttgcgacattcccatcatctgccttcctgcgggccaaagaagaacaacaagatgacacagtatatatgggcaaagtgaccttctcttgtgctgcgggatttggacaacggcaccgactggtgttaacgcaggagcagttacaccagctccacagtaggctcattagctag

SEQ ID NO: 143342 - DNA, 3435 bp, Artificial Sequence
  derived and/or modified sequence
atgatgcggcaggcccccaccgcccggaagaccaccacccggcggcctaaacctacacgacccgcaagtaccggagtcgccggtgcctcttcgtcactgggccccagtggctcagccagtgccggcgagctgagtagcagtgagccaagcactcccgctcagaccccgttagccgcacccattataccgactcctgtgttgaccagcccgggagccgtgcctcccctgcctagcccttctaaagaagaggaaggcctgagggcacaagttcgggatttggaggaaaagttggagacacttaggctaaaacgtgcagaagataaagcaaagcttaaggaactggaaaagcataaaatccaactggagcaagttcaagaatggaagtcaaagatgcaggaacagcaagccgatttgcagcgtcgattaaaagaggcccggaaagaggccaaggaagctctggaggcaaaggagaggtacatggaggaaatggccgatacagccgatgccattgagatggctactctggacaaggagatggcggaggagagggctgagtcactgcagcaagaggtggaggcgctcaaagaacgggtggatgaacttaccactgatctggagatcttgaaagcagagatcgaagagaaggggtctgacggcgctgctagttcttaccaattaaaacagttagaggaacagaatgcacgattaaaagacgcactggtgcggatgcgcgacctgtcttcgtctgagaagcaggaacatgtgaagcttcagaaacttatggagaaaaagaaccaggaactggaggtggtgcggcagcaaagggagagattgcaagaggaattaagtcaggccgagtcaacgattgacgagctcaaggagcaggtggacgcagccctgggcgcggaggaaatggtggaaatgcttacggacagaaatctgaatctggaggaaaaagtgcgtgagctgcgagagacagtaggagacttagaggctatgaatgaaatgaatgacgaactgcaggagaacgctcgggagacagagctggagctccgagagcagttggatatggccggcgcccgagtgagagaagctcagaagcgggtagaagcggcccaagagacggtggccgattaccagcagaccattaagaaatacagacagttgactgcccatttgcaggacgttaatagagagctgaccaatcagcaagaggccagcgtcgaaagacagcagcaaccacccccagagacctttgattttaagattaagttcgcagaaaccaaggcccacgcgaaggcaatcgaaatggagttaagacagatggaagtggcacaagcgaatcgccatatgagcctgctaaccgcttttatgcccgatagcttcttaagaccaggcggagaccacgactgcgtgctcgtgttgctgttaatgcctaggctgatctgtaaggccgagctgattcgcaagcaggcacaggaaaagttcgagctttctgagaactgttccgaaaggcctggcctgcgtggagcagctggagagcagctctctttcgcagcaggcctagtttactctcttagtctgcttcaagcaactctgcacaggtacgagcacgccctgagccagtgttctgtcgacgtctacaaaaaggtcgggtcactgtaccccgaaatgtccgcacacgagcggtccctcgatttcctgatcgaactgctacataaggatcagctcgatgaaacagtgaacgtcgaaccactgactaaagctattaaatattaccagcacttgtactctattcatctagcagaacagcctgaggactgtacaatgcagctggccgaccacattaaatttacgcaatccgcgctagactgcatgtcagttgaggtagggcggcttcgggcgtttcttcaagggggtcaggaagccacagatattgctctgctgctcagagacctcgagacttcctgttcagacataaggcagttctgcaagaaaatccggaggagaatgcctggcaccgatgcccctgggattcctgctgcattagccttcgggccacaggtttctgacaccctgttagattgcaggaagcacctgacatgggtggttgccgtcttacaagaggtagccgccgccgccgcacagctgattgcacccttggctgaaaatgaagggctccttgttgccgcactcgaggaattagcatttaaggcttcggagcaaatttacggaaccccttcttccagtccatatgagtgtttgcgacagagctgtaatatcctcatatccacgatgaacaagctcgctacagctatgcaggagggcgaatatgacgcggagaggccgccgtccaagccacctcctgtcgagttaagagcagccgcactgagagcggaaatcacagatgccgaaggattaggcctgaagctggaggacagagagacagtcattaaggaactaaagaagtccctgaagatcaagggggaagagttgagcgaagctaacgttcgtctttcattactcgaaaagaaactcgactcagcagctaaagatgccgacgaaagaatcgagaaggttcagaccagattagaagaaacacaagccctgctccggaagaaggagaaagagttcgaagaaacaatggatgccctgcaagccgacattgaccaactggaggcagagaaggcagaactgaaacagagactgaattctcagtcgaaacggaccattgaaggtctgcgggggcctccacccagcggaattgcaacactggtatccggcatcgccggtgaggagcagcagcgcggtgccattcccggtcaggcccccggatcagttccggggcctggcctggtgaaagattcccctctgctgctgcaacaaattagcgctatgcgcctacacatctcccagctccagcacgaaaactctattctgaagggcgcccagatgaaagcatctctcgcgtcacttcctccgctgcacgttgccaaactcagtcatgaagggcctggcagtgagctgccggccggggccttataccgcaagactagtcaactgctggagactttgaaccagttgtcaacgcacacacacgttgtggatatcacccggaccagccccgctgccaaatccccctcagcccagctcatggaacaggtagctcaattaaagtccctcagcgacacagtggagaagcttaaagacgaggtcttaaaggaaacagtgtctcagcggcctggagcaaccgtacctactgacttcgccaccttccctagtagtgccttcctccgcgcaaaagaggaacagcaggatgacactgtgtatatggggaaagtcacatttagttgtgctgctgggtttgggcagcgccacagattggttctgacacaagagcagctccatcagctccactctagattaatctcatag

SEQ ID NO: 143343 - DNA, 3771 bp, Artificial Sequence
  derived and/or modified sequence
atgagcgccgaggccagcgcccggcccctgcgggtgggcagccgggtggaggtgatcggtaagggccataggggcactgtggcctatgtcggcgcgactcttttcgccacagggaagtgggttggcgtcattctggatgaagcgaaaggcaaaaacgatggaacagtgcaaggtcgcaagtactttacttgtgatgagggacacggcatattcgtgagacagtcccagattcaagtgtttgaggacggcgcggatacaacttctccggagacccccgattcgagtgccagcaaggttcttaaaagagaaggcaccgataccacagctaagacaagtaagttacgcggacttaagcccaaaaaagcgccaacggcgcgcaaaactaccacacgacggccaaagccgaccaggcccgcttcgacaggagtcgctggcgcttcctccagcctggggccatctggctctgcctctgctggggagttgagctcatcagagccatccacgccagcccagaccccactggcagccccaattattcccacccccgtgttaacatcccctggtgctgtgcccccccttccttctcctagtaaggaggaggagggactgagggcccaggtgcgcgaccttgaggagaagttagagacacttcggttgaaacgggcggaggacaaggcaaagctgaaagagctggaaaaacataagatccaactcgaacaggtgcaggagtggaaaagcaaaatgcaggaacagcaggcggatttgcagagacgcttgaaggaggcacggaaggaagcgaaggaggctctggaggccaaagagcggtacatggaggaaatggccgataccgctgatgccatcgaaatggccaccctcgataaagaaatggccgaagaaagggctgaatcgctccagcaggaggtcgaggccctcaaggaacgcgtggatgagctgactacagacctcgagattctgaaggcggagattgaggagaagggctcagacggcgctgcaagctcttatcagttgaaacaactagaggaacaaaatgcgagattaaaggacgcacttgtgagaatgcgagatctgagctcatccgaaaagcaggaacatgtcaagctgcagaagctcatggagaaaaaaaaccaggaacttgaagtggtgcggcaacagcgagagagactccaggaggaattatctcaggctgagagcacaattgatgaacttaaagagcaagtagatgcggcgctgggggcagaagaaatggtagaaatgctcacggatcgaaatctaaacctcgaggagaaagttcgggagttgagagaaactgtcggggacttagaagccatgaatgagatgaacgacgaattacaggaaaatgcaagggagacagagctggagctaagagagcagctagacatggcgggagcacgcgtgcgtgaggctcagaaacgagtcgaggccgctcaggaaacagttgcagattaccagcaaactattaagaaatataggcagctaactgctcatctgcaggatgtgaacagagagctgacgaaccagcaggaggcctcagtggaacggcagcagcaacccccccccgagacattcgactttaagatcaagtttgccgaaactaaagcccatgcaaaagccatcgaaatggaactgcgacagatggaagtcgctcaggcgaaccggcacatgtccctgctgaccgctttcatgcccgacagttttctgcggccgggtggcgaccacgattgtgtcctggtattactgctgatgcctcggcttatttgtaaggccgaacttattaggaaacaggcgcaggaaaagtttgagctctccgagaattgctcagagagacctggactacgtggtgccgccggcgagcaactctcatttgcagccgggttggtgtactccctttctctgctgcaggcaaccctccatagatatgagcacgctttaagccagtgcagcgtcgatgtatataaaaaagtgggtagtctctacccggaaatgtccgcccacgaacgatctttggatttcctgatcgaactgcttcataaagatcagttggatgagactgtgaacgtcgagcctctgactaaggccatcaagtattaccagcatctctattccatccacctggcagagcagcccgaagattgtaccatgcaactagccgatcacatcaagttcactcagtcagccctggattgcatgtccgttgaggtgggtagactccgagcctttctacaggggggccaggaggccacggacatagcgttactgttgagggacctggagacttcttgcagcgacattaggcagttctgcaaaaaaataaggcgcaggatgcctgggactgacgcacccgggatcccagccgcgctggcttttggaccacaggtgtcagacactctgcttgactgccgcaaacatttgacttgggtggtggcagtgttgcaggaggtggcggccgccgccgcccagctaatagctcctctcgcggagaatgaaggccttctagtcgccgccctggaggagctggcctttaaagcgtccgagcagatatacggcacaccctcaagcagcccttatgaatgcctaaggcagagctgcaacatcctcatctcaactatgaacaaactggccacggccatgcaggagggggagtacgacgccgaacggcctccttccaagccaccccctgttgagctacgcgctgcggccctgcgcgctgaaataactgacgcggagggccttgggcttaaactcgaagatagagaaacagtcattaaagagctaaaaaaatccctgaaaataaaaggagaagagctcagcgaggccaacgtacgcctgtcccttctggagaagaaactggacagcgctgcgaaagacgctgatgaacggattgagaaagtgcagactcgcctggaagaaacccaggccctgctgagaaagaaagagaaggagttcgaagagactatggatgcactgcaagccgacatcgaccaactggaagccgaaaaggctgagctgaaacagagactgaacagccagtctaagcgcactatagagggactcaggggcccacctccctccgggatcgcgaccctggtgtccgggattgccggtggggctattcctggccaggctcctggaagcgtccccggcccaggccttgtgaaagatagcccgctactcctgcagcagatctctgcgatgcgactccatattagccaactgcagcatgagaacagcatactcaagggcgctcagatgaaagcatccctggcctcgcttccgcctttacatgtcgccaagctgagccatgaaggacctggctctgagctgccagctggcgcgttgtaccgaaagacctcacagttactcgagactctgaaccagctgtcgacccacacacacgtggtggacatcacacggacctcccctgccgccaagtcaccctcggcacagcttatggagcaagtcgctcagctgaagagcctatcagatacggtggagaagctgaaggacgaagtcttaaaggagaccgtttcccaaagacccggagctactgtcccgactgactttgcgacctttccttctagcgcttttctgcgagcaaaagaggagcaacaggatgacaccgtatacatggggaaagtcaccttctcctgtgcagccggatttggacagaggcaccggcttgtcttaacacaggaacaactgcatcaactgcattcgcgcctgatctcatag

SEQ ID NO: 143344 - DNA, 561 bp, Artificial Sequence
  derived and/or modified sequence
atgctgatgggcctgctgcggccctacatcctgggcgagcggggcactgtgatgaccccttcaggatcacgaatgtccgccgaagccagcgcccggcccctccgagtgggttcccgcgtggaggtcatcggtaagggccacagaggtacagtagcttacgtgggtgctacactcttcgccactggaaaatgggtcggcgtaatactcgatgaggccaagggcaagaacgatggtactgtgcagggccggaagtatttcacttgcgacgagggccacggcatatttgttcgccagagccaaatccaggtgtttgaggatggtgccgacacgacctcaccggagacccctgattcttcagcctctaaggtgttaaaacgagagggcaccgatacaaccgccaaaacatctaagttgaggggactgaagccaaagaaggctcctaccgccagaaagacaacaacccgtaggcctaagcccacccggcctgctagcacaggcgtcgcgggtgccagtagctccctgggcccctcaggctccgcctctgccggcgaactcagctag

SEQ ID NO: 143345 - DNA, 3837 bp, Artificial Sequence
  derived and/or modified sequence
atggcccaatccaaacgccacgtgtattcacggacaccaagcggctcacgcatgtctgccgaggccagtgccaggcccttgcgagtgggtagcagagtggaggttatcggaaagggacataggggtactgtcgcgtacgtcggcgctaccttgtttgcgactggtaagtgggtgggggtcatcttggacgaggcaaagggaaaaaatgatgggactgttcaagggcgtaagtacttcacttgcgatgagggtcatgggatcttcgttcggcagtcccagatccaggtttttgaggatggcgcagatacaactagccccgagactccagattcaagtgcttccaaagtactgaagagggagggtacagacactacagccaagacgagcaagctccggggtttaaaacccaaaaaggccccaacagctagaaagactaccacccggaggccgaaacctactcggccagcgtccacgggagtggctggagccagttcatcacttgggccatcaggctcggccagtgctggcgagctcagtagttccgagccgtctacacccgctcagactccgctagctgcccctattattcccacacccgtgctaacctcaccgggagcagttccacccctgccttctccatctaaggaggaggaaggcctgcgcgcacaggtccgagaccttgaggagaagttagagaccctccggttgaagcgagctgaagacaaggcaaaactgaaggagttggaaaagcataaaatccagctggaacaggtgcaggaatggaaatcaaagatgcaagaacagcaggctgatttacagaggaggctcaaggaggccagaaaagaggccaaagaggctctcgaagccaaagagaggtatatggaagagatggcggatacagcagacgccattgagatggctacgctggataaggagatggctgaggaacgtgccgagagtctccagcaggaggtggaggcattaaaggagagggtggacgagctcacaacagatttagagatcctgaaggccgagatcgaagagaaaggcagcgacggggctgcgtcgtcataccagcttaagcaacttgaggagcagaatgcccgactcaaggatgctttagttagaatgagggatctgagctcctcggagaaacaggagcacgtgaagctccagaaactcatggagaagaagaatcaggagctagaagtcgttcggcagcagagagagcggttgcaagaggagttgtcccaggccgagagcacaattgatgagctaaaagaacaggtcgatgcggcactgggcgcagaagaaatggttgagatgttgactgatagaaacctcaatctggaagaaaaggttagagaattgagagagaccgttggcgaccttgaggccatgaatgagatgaatgacgaacttcaagagaacgcaagggagactgagctggaactgcgggaacagctcgacatggccggtgccagggtgcgcgaggcgcagaagagagtggaagccgctcaggagaccgtcgcagattaccagcagaccataaagaagtatcgtcagctgaccgcccacctgcaggatgtcaaccgcgaactcacaaatcagcaagaggcttccgtcgaaaggcaacagcagcctccccctgaaacctttgattttaagatcaaatttgcagaaactaaggcccatgcaaaagctattgagatggaactccgccaaatggaagttgcccaggccaatcgccatatgagcttgctgacagcttttatgcccgactctttcctccggcctggaggggaccacgactgtgtacttgtgttgctcttgatgccccgactgatctgtaaggccgagttaatacgcaaacaggcacaggagaaatttgagctgagcgagaattgtagcgaacgacctggcctacgcggagccgctggagaacagctgagttttgccgctggcctcgtctactctttgagcctcctgcaagccaccctgcataggtacgaacacgcactgtcacagtgctctgtggatgtatacaaaaaagtgggttcattatatccagagatgtctgcccacgagcgcagccttgacttcttaattgaattacttcataaggatcagctggacgagacagtgaacgtcgaacccctcacgaaagccatcaagtattaccagcacctctactcaatccacctcgcagagcagccggaggactgcacaatgcagcttgctgatcacataaaattcacacagagcgctctcgattgtatgagtgtcgaggtcggccgattgcgcgcatttctccagggaggtcaggaagcaacagacatcgccctcctactacgggatctcgagacaagctgttccgacatacgacagttctgcaagaaaatcagacggagaatgcctggcaccgacgcacccggtatacctgccgctttggctttcgggccacaagtgagcgacactctgctggactgtagaaagcacctgacatgggtggtggcagtccttcaggaggtggctgccgcagccgcacagctgattgctcctttagctgagaatgagggcctactcgttgctgccctcgaggaacttgcgttcaaagcctctgaacaaatttatgggacaccgtctagctcaccttacgaatgcctgcggcagtcctgtaatattttaatatcaactatgaataagctggcaaccgctatgcaggaaggtgagtacgatgcagaacgccctcctagcaagccacccccagtggagctgcgggctgcagcactcagagccgagattaccgacgctgaaggactgggattgaagctcgaggatagagagactgtgattaaggagctgaagaagtctttgaagatcaagggcgaagagttgtcggaagccaatgtgcgcttgagtctgttggaaaaaaagctcgacagtgccgctaaggacgcggatgagaggattgaaaaggttcaaacccgattggaagaaactcaggcacttttgcgcaagaaggaaaaagaatttgaggagactatggatgccctgcaagccgatattgaccagttggaagccgagaaggctgagttaaagcagcgcttgaattcacaaagcaagagaacaattgagggccttaggggtccccctccatcaggaattgcaactctggtgagcggcatcgccggtgaagagcagcagcgaggggcaatccccggacaggcccctggctctgtccccggtcctggactggtgaaggattctcctcttctgttgcagcaaattagcgccatgagactgcacattagtcaactgcagcacgagaattcaattctaaaaggagctcagatgaaagctagccttgcttcacttcccccactgcacgtagcaaaactgtcacacgagggacccggtagtgagcttcctgccggtgcactttatcgtaaaacctcccagctgttagagactctgaaccagctgagcacccacacgcatgtggtggacatcacccgtacttccccagctgccaagagcccatctgcccaactgatggaacaggtcgcacagctcaaaagcctctcagacacagtggagaaactcaaggacgaggttctgaaggaaacagtgtcacagcggcctggggcaacagtgccaaccgattttgccacatttccatcttcggcctttctgcgcgctaaagaggagcagcaggatgatacggtttatatggggaaagtgaccttctcttgcgccgctggcttcgggcagcgtcatcgcctggttttgacgcaagaacagttgcaccagctgcattcacgtctgattagttag

SEQ ID NO: 143346 - DNA, 3786 bp, Artificial Sequence
  derived and/or modified sequence
atgagcgcggaggcctctgcaagaccactccgcgtcggctctcgggtggaggtcatcggtaaaggacatagaggaacagtggcatatgttggggcaacactctttgcaaccggcaagtgggtgggcgtgatcctagacgaggcaaaaggcaagaacgacgggaccgtgcaaggacgcaaatacttcacttgtgacgagggacatggtatatttgttagacaaagccaaatccaagtctttgaggacggggctgacacgacctcccctgagactcccgatagttccgccagcaaagttctcaagagggaggggactgacactactgccaagactagtaaattgagaggactgaaacctaagaaggcccctaccgccagaaagggcagacgcgttagaacgaagcctacccgacctgccagcacaggcgtagccggagcctcgtcttctctgggaccctcgggttccgcctccgctggcgagctctcttcctcggagccgtctactcctgctcagacgccactggcagctcccatcatcccaaccccagttcttacgtcgcctggcgcagtacctcctctgcccagtccttccaaggaggaggaaggactacgggctcaggttcgggatctcgaggaaaagctggagacgctgcgtttgaagcgggctgaggataaggcgaaactgaaagaactggaaaaacataaaatccaattggagcaggtccaagaatggaagtcaaagatgcaggagcagcaggccgatttacagaggcggctcaaggaggccaggaaagaagccaaggaggcacttgaagcaaaagagcgatacatggaggagatggctgatacagctgacgctatcgaaatggccactctggacaaagagatggctgaagagagggccgagtcactgcaacaggaggtggaagccctgaaggagagggttgatgagctgacaaccgacttggagatcctgaaggccgaaatcgaagagaagggaagcgacggcgctgcttcatcttatcagctgaagcagctggaggagcagaacgcaagattaaaagacgccctggtcaggatgcgggacctgtcctcatccgagaaacaagagcatgtgaagctgcagaaactcatggagaaaaagaatcaagaactggaggtggtgagacagcagcgcgagcggctccaggaggagctgtcccaggcagagagcacaatcgatgagctcaaagagcaggtagatgccgctttaggggcagaagagatggtggagatgttgacagaccgtaatctaaacttagaagagaaagtgcgagagttgagagaaacagtaggggacctcgaagccatgaacgagatgaacgacgaactacaggaaaatgctcgagagacagagctagaactcagagaacagctggatatggcaggcgcacgagtgcgggaagcgcagaagcgcgtggaggccgcacaggaaacagtggcggattaccaacagacaatcaagaagtacaggcagttaaccgctcacctacaggatgtgaacagggaactcactaaccagcaggaggcctccgtggagaggcaacagcagccccctccagagacttttgactttaaaatcaagtttgccgagactaaggctcatgctaaagcaatcgagatggagctgcgtcagatggaggtagcccaggcaaatcgccacatgtctctccttaccgcctttatgcccgatagctttctacggccaggaggagaccatgactgcgttctggtcctcttgctcatgcctcgccttatctgtaaggctgaactgatccgtaaacaggcccaggagaaattcgaactctcggaaaactgctctgaaaggcccggactacgtggcgctgctggtgaacaactgagcttcgccgctggcctagtgtacagcttaagcctgctgcaggctaccctgcacaggtacgagcacgccctttcgcagtgcagcgtggatgtttataaaaaagtcggaagtctgtacccggaaatgtctgctcacgaacgaagtctggacttcttaattgagctgcttcacaaagaccagttagatgagaccgtgaacgtcgaaccgttgacaaaagcaatcaaatactatcagcacctttatagtattcacttagcagaacaacccgaagattgtacaatgcaattagctgatcacattaagtttactcagagcgcattggactgcatgagcgtagaggtggggaggcttcgtgctttcctgcaggggggtcaggaggcaaccgatattgccctgttgctcagagacctggagacatcgtgtagcgatatcaggcagttttgcaaaaaaatacgcaggagaatgcctggcaccgatgcacccggaataccagccgctctcgccttcgggcctcaggtctccgatactctactcgattgtcggaaacatctcacgtgggtggtggcagtgctgcaagaggtagcagcggctgcagcgcagctaatagccccacttgccgaaaacgaggggctactggttgcagccctggaggaattggcgttcaaagcttccgagcagatttatggaaccccatcaagttccccttatgaatgcttgcgtcagtcctgcaatattctgatatctacgatgaacaagctggcgacagcaatgcaggaaggcgagtacgacgcagaacggcctccctctaagccccctcccgttgagttgcgcgctgccgctctccgggctgagattaccgacgcggaaggcctaggactgaaacttgaagatagggaaaccgtgatcaaggaacttaagaagtccctgaagatcaagggcgaggagctttctgaagcgaatgttcggctgtccctcctggaaaagaaactggatagcgcagctaaagacgcagacgaaaggatcgagaaggtccaaacgcgtttggaggagacacaagcactgctcagaaagaaagaaaaggaatttgaggagacaatggatgctctgcaggccgacatcgaccagctcgaagccgagaaagcagaactaaagcagcggctgaactctcagagcaagagaaccatcgaggggctccgcggacctccccctagcggcatcgctacactcgtgagtggtattgctggtgaggagcaacagagaggtgccattccaggccaagctcccggatctgtccccggtcctggcctcgtcaaagactctcctctgttattgcagcagatatcggccatgagattgcatatctcgcaactgcagcacgagaatagtatattaaagggcgcacagatgaaggctagtctggccagcctgcctcccctacatgttgccaagctgtcacacgagggaccgggaagcgaattaccagcaggtgcactgtaccggaaaacctcacaactgttagaaactctgaatcagctatccactcacactcatgtcgtcgatattacaaggacgagtccagccgcaaaatcaccaagcgcacaactgatggagcaggtggcccaactcaaatccctttctgacaccgtggagaagcttaaagacgaagtgcttaaggagacagtgagtcagagacccggtgccacagttccgaccgactttgccacttttcccagttccgcattcctccgagccaaggaggaacagcaggatgatacagtgtatatgggaaaagtgaccttttcgtgcgcggcaggttttgggcagaggcacaggctggtgctcacccaggagcagttgcaccagctgcacagtaggctgataagttag

SEQ ID NO: 143347 - DNA, 3435 bp, Artificial Sequence
  derived and/or modified sequence
atgatgcggcaagctccgacagcacgcaaaacaacaacacgccgtcccaaacccacccggccagcctccaccggcgtggcaggagctagttcttccctggggccttctgggagtgcctcagccggtgagttgagcagttctgagccctcgactcccgctcagacccctctcgccgctcctatcatccccacccccgttctcaccagccccggagcagtgcctcccctgccttccccttctaaagaggaggagggcttgcgcgctcaggtccgtgacttggaagagaaactggagacactgcgcctgaaaagggctgaagataaagcaaagctgaaagaactagaaaaacacaaaattcaactcgagcaggtccaggagtggaaaagtaagatgcaagaacagcaggccgacctccagaggagattgaaggaggctcgcaaggaagctaaagaggctctggaggccaaggaacgctacatggaagagatggctgacaccgccgatgctatcgagatggcaacactcgataaggagatggcagaagaacgcgctgaaagcctccagcaggaggtcgaggcacttaaggagcgggtggatgagctgactacggacctcgagatacttaaagcagagattgaggaaaagggatccgatggtgccgcttcctcataccagttgaagcaattggaagagcagaatgcccgtctgaaggacgctctggtgcgaatgcgcgacttatctagttccgagaagcaggagcatgttaagctgcagaagttaatggagaaaaagaatcaagaattggaagtggtgcggcagcagcgcgagcgccttcaggaggaactatcccaggctgaatcaacaattgatgaactgaaggagcaggtagacgcagcgctgggagctgaagaaatggtggaaatgctgactgaccgtaatctgaacctcgaagaaaaggtacgcgaactgcgagagaccgtgggggacctggaggccatgaacgaaatgaatgacgagttgcaggaaaacgctagagagactgaactcgaactccgggaacagctggatatggctggtgcccgagtgagggaggctcagaagcgtgtcgaggcggctcaggaaacagtcgctgattaccagcaaaccattaagaaatacagacagcttaccgcacacctgcaggacgtcaacagggagctgacgaatcagcaggaagcaagtgtggagagacagcagcagcctccgcctgagacctttgactttaagataaaatttgccgagaccaaggcccatgccaaagccattgaaatggaactccgtcagatggaggtggctcaggctaatagacacatgtctctgctgacagcttttatgccggactctttcctgagaccgggtggagaccacgactgcgtgctggtgctgctcctgatgccaaggttaatctgcaaggcagagctgatccgcaagcaagcacaagagaaattcgaactgtctgaaaactgtagtgagagacctggccttcgtggcgcagcaggcgaacagctgtcttttgcggctgggctcgtgtactcactgagcctccttcaggctaccctccaccgatacgaacacgccctgtcccagtgctccgtggatgtctacaagaaagtgggttccttatatccggaaatgtctgctcacgagaggtcccttgattttctgattgagctgctgcacaaggaccagctcgatgaaacagttaacgtggagcctttaaccaaggccattaagtactaccagcacctctatagtatccatcttgcggagcagccagaagattgcactatgcagcttgcagaccacatcaaattcactcagtctgctctggattgcatgagcgtggaggtcggcagactccgagctttcctgcagggcggacaagaggccacagacatagccctgctgctccgggatctggagactagttgttcagatatccgtcagttctgcaagaaaattcgcagaagaatgccaggcaccgacgccccagggataccagcggcactagccttcggtccacaagtatccgataccctactggactgtaggaagcacctgacgtgggtcgttgcagttctccaggaagtagccgctgccgctgcccagctgatcgcaccccttgccgagaacgaagggttactggtcgcagccctcgaggagttggccttcaaggcttctgagcaaatctacggaaccccctcttcttcaccctatgagtgcctgcggcagagctgcaacattttgatttctactatgaataaactggccacagcaatgcaggaaggggagtacgacgctgaacgaccaccctctaaaccacctcccgtggagctgcgagctgcagccctcagagccgaaatcaccgatgccgaagggctcggactgaagctggaagatagggagacagtgattaaggaactgaaaaaaagcttgaagattaagggtgaggagctcagtgaggccaatgtccggttgagcctgcttgagaagaaactggacagcgctgccaaggacgctgacgagcgaattgagaaggtccagacaaggctggaggagactcaagccctgcttcggaagaaagagaaagagtttgaggagacaatggacgctctacaagccgacatcgatcagctcgaagccgaaaaagctgagttgaaacagagactgaatagccaaagcaagaggaccatcgaagggttacgtggccctccccctagcggaattgcaacattggtgtccggtatcgccggagaagagcagcaacgcggagcaattccaggtcaagctccaggctcagtacctggcccaggactggtgaaagacagccctctgctgctgcagcaaatttcagctatgcgcctgcatatttctcagctccagcatgagaacagtattctgaagggtgcccaaatgaaagcctctcttgcaagtttgccgccactgcatgttgcgaaactctctcatgaggggccagggagcgagttgcctgccggagcactctatcgtaagacaagccagctgctggagaccctgaaccagctgtcaacgcacacccatgtggtggatatcacccggacaagcccagccgcaaaatccccctccgcacagctgatggagcaagttgcacagctgaaatccctgtccgacaccgtggagaagctcaaagacgaagtgttaaaggaaaccgtctctcaaagacccggagcgacagtgccaactgactttgcaacattcccctccagcgcattcctgagagcaaaggaagagcaacaagatgacaccgtgtatatgggaaaagttacattttcctgcgccgctggattcggccagcgccacaggttagttctgacacaagaacaacttcaccaattgcactctcgtcttattagctag

SEQ ID NO: 143348 - DNA, 3771 bp, Artificial Sequence
  derived and/or modified sequence
atgtccgctgaggccagtgccaggcctctgagggtcgggtcaagagtcgaagtcattggaaaaggccatcggggtactgtagcttacgtgggagcaacattatttgcaactggcaagtgggtgggtgtgatcctcgacgaggcgaaagggaagaacgacgggaccgtgcagggcagaaaatacttcacctgtgatgaggggcacggcatcttcgtaaggcagtcccagatacaggtcttcgaggacggagcagatacaacaagccctgagactccagacagttccgcgagcaaagttctgaaacgggaggggactgacacaactgccaaaactagtaaactccgtgggctgaagcctaagaaagctccaacagctcgaaaaactactacaaggagacccaagcccacacgacccgctagcactggggtggctggtgcttcctctagcctgggtccatctggctccgcttctgcgggagagctttcctcgagtgaacctagcactcccgcacagacccctctggccgctccaattatccccactccagttctgacctctccgggagcggttccacctcttcctagcccctctaaggaagaggaaggcctcagggcccaggtccgcgatttggaggaaaaactggaaacgcttcgactgaagagggcggaggataaggcgaagctcaaggaattagagaagcataagattcaacttgagcaagttcaagaatggaaatccaaaatgcaggagcagcaagccgacctccagcggaggttgaaggaagcaaggaaggaagcaaaggaggctcttgaggctaaagagaggtacatggaggaaatggctgatacagctgacgctattgaaatggcgacattagacaaagaaatggccgaggagcgcgctgaatcccttcaacaggaggtggaggccctgaaggagcgagtcgatgagcttacgaccgacctcgagatattgaaagccgaaatcgaagaaaaggggagcgacggcgctgcctcgagttaccagctgaaacaattagaggagcaaaacgcaaggctcaaggatgccctggtgcgaatgcgcgatctgtccagctctgaaaagcaagagcacgtgaagctacaaaagttaatggaaaagaagaatcaggaacttgaggttgttcgacagcagagggagcgtctacaggaggagctgagccaggccgagagtacgattgacgagttgaaggaacaggttgatgccgcactgggggcagaggagatggtggagatgcttacagatcggaaccttaatctggaggagaaagtccgcgaactgagggagaccgtgggtgacctcgaagctatgaacgagatgaatgatgagctgcaagaaaatgcacgcgaaacagagttggagttacgtgagcagctcgacatggcaggcgctcgcgtgagagaagctcagaagcgggttgaagccgcacaggaaaccgtggccgactaccagcaaactatcaaaaagtatcgccagttgactgcccatctccaggatgttaaccgggaactaaccaaccagcaagaagcttccgttgaaaggcagcaacagcccccacccgagaccttcgacttcaagatcaagtttgctgagacgaaagcgcatgccaaagcaattgagatggagctgcgacaaatggaggtggcccaggccaatcggcatatgtccctcctcaccgcattcatgcctgatagctttctgcgacccggtggggatcatgattgcgtacttgttctactcctgatgcctcgcctgatctgtaaagcagagttgattagaaaacaggctcaggaaaagtttgaactgtctgaaaattgtagcgaacggccagggctccggggagccgcaggggagcagctgtcttttgctgcaggccttgtgtattcactgtccttgctccaggccactctccaccggtacgagcacgcactgtcccaatgctcagttgacgtgtataagaaggtgggttccctttaccccgagatgtctgctcatgagaggtctctggacttccttatcgagttgctccataaggaccagctggacgagactgtaaatgtagagcctctgaccaaggctataaaatattaccagcatctgtatagtattcacctggccgagcagcccgaagattgcacaatgcagctggccgaccatatcaagtttacacaatctgcactggactgtatgtccgtcgaggtggggaggctcagggctttccttcagggagggcaggaagcaactgatatcgctctcctccttcgcgatctggaaacatcttgctcagatatccgccaattttgtaaaaaaataaggcgtaggatgcctggaaccgatgctccgggtatacccgctgctctcgctttcggccctcaggtcagcgatactttgttggattgtagaaaacatctgacctgggtcgtggctgtgttgcaagaagtggcggcagcagcggctcagctcatcgccccacttgctgagaacgagggactgctggtcgcagccctggaagaattggcattcaaggcctcagagcagatttatggcacccctagttcctccccttatgagtgcttgcgccagtcctgcaacattttaatttccacgatgaacaaactagcgacggctatgcaagagggggagtacgacgctgaacgtcctccctccaagccgccacctgtggagctgagggccgcagcacttcgtgcggagattaccgatgctgaagggctgggtctgaaactggaagaccgtgagacggtgattaaagagctgaagaagtcactgaagataaagggcgaggaactttccgaggcaaacgtgagactcagtctcctggagaaaaagttagattccgcagccaaggacgctgatgaacgcatagaaaaggtgcagactcgtctggaagaaactcaggcccttctccggaagaaggaaaaggaattcgaagagacgatggacgctctccaggccgatatagatcagctggaggctgagaaggccgagctgaagcagcgcctgaattcccagtcgaagcgaacaatcgaagggcttcgaggtcccccaccctccggcattgccacacttgtcagtggaatcgctggaggcgcaattccaggacaggccccaggatcagtgccaggcccagggctagtgaaggactcccctttgctgcttcaacagattagcgccatgcgcttgcatatcagccagcttcagcacgagaactctattctcaaaggtgcgcaaatgaaggctagcctggcttcattgccaccattgcacgtggcaaaactctcccatgaaggaccaggcagcgagctgccagccggagccttatatagaaagacttctcagctgctggagacattaaatcagctgagcacccatacacacgtggtggacattacccgcactagcccagcagccaaatcccccagcgcccagctcatggagcaggtggcacagctgaagtcattgtccgatacggtggagaaattgaaggacgaggtgctaaaagaaacggtgtcgcaacgaccaggtgccacagtgcccaccgactttgcaacgtttcctagttctgcttttctgagggccaaagaggagcaacaggacgacactgtatatatgggaaaggtgactttttcatgcgcggctggtttcgggcagagacaccggttagtactaacccaagagcagctccatcagctgcacagcaggcttattagctag

SEQ ID NO: 143349 - DNA, 561 bp, Artificial Sequence
  derived and/or modified sequence
atgctgatgggcttactccggccatacattcttggcgaacgcggtaccgtgatgactccctctggctccaggatgagcgccgaggcatctgcaagaccactcagagttggatcacgcgtggaagttattggaaaaggacacagaggaactgtcgcctatgtgggcgcaacactgtttgccaccggcaaatgggttggtgttattctggacgaggcaaaaggtaagaacgacggaacagtgcaggggagaaagtatttcacttgcgatgagggtcacggaatatttgttaggcaaagtcagatccaggtgttcgaggacggagcggacactacctctcccgagacacctgactcaagcgctagcaaggtgctgaagagagaaggcacagacactaccgcaaagacttcaaagcttcgagggctgaaaccgaaaaaggctcctactgctagaaagacaactacgagacggccaaagccgacaaggcccgcatccaccggcgtggcgggagcaagtagctcgttgggaccctccggcagtgcgtccgcaggggagctgtcctag

SEQ ID NO: 143350 - DNA, 3837 bp, Artificial Sequence
  derived and/or modified sequence
atggcccagagcaagagacacgtgtacagcagaacccccagcggcagcagaatgagcgccgaggccagcgccagacccctgagagtgggcagcagagtggaggtgatcggcaagggccacagaggcaccgtggcctacgtgggcgccaccctgttcgccaccggcaagtgggtgggcgtgatcctggacgaggccaagggcaagaacgacggcaccgtgcagggcagaaagtacttcacctgcgacgagggccacggcatcttcgtgagacagagccagatccaggtgttcgaggacggcgccgacaccaccagccccgagacccccgacagcagcgccagcaaggtgctgaagagagagggcaccgacaccaccgccaagaccagcaagctgagaggcctgaagcccaagaaggcccccaccgccagaaagaccaccaccagaagacccaagcccaccagacccgccagcaccggcgtggccggcgccagcagcagcctgggccccagcggcagcgccagcgccggcgagctgagcagcagcgagcccagcacccccgcccagacccccctggccgcccccatcatccccacccccgtgctgaccagccccggcgccgtgccccccctgcccagccccagcaaggaggaggagggcctgagagcccaggtgagagacctggaggagaagctggagaccctgagactgaagagagccgaggacaaggccaagctgaaggagctggagaagcacaagatccagctggagcaggtgcaggagtggaagagcaagatgcaggagcagcaggccgacctgcagagaagactgaaggaggccagaaaggaggccaaggaggccctggaggccaaggagagatacatggaggagatggccgacaccgccgacgccatcgagatggccaccctggacaaggagatggccgaggagagagccgagagcctgcagcaggaggtggaggccctgaaggagagagtggacgagctgaccaccgacctggagatcctgaaggccgagatcgaggagaagggcagcgacggcgccgccagcagctaccagctgaagcagctggaggagcagaacgccagactgaaggacgccctggtgagaatgagagacctgagcagcagcgagaagcaggagcacgtgaagctgcagaagctgatggagaagaagaaccaggagctggaggtggtgagacagcagagagagagactgcaggaggagctgagccaggccgagagcaccatcgacgagctgaaggagcaggtggacgccgccctgggcgccgaggagatggtggagatgctgaccgacagaaacctgaacctggaggagaaggtgagagagctgagagagaccgtgggcgacctggaggccatgaacgagatgaacgacgagctgcaggagaacgccagagagaccgagctggagctgagagagcagctggacatggccggcgccagagtgagagaggcccagaagagagtggaggccgcccaggagaccgtggccgactaccagcagaccatcaagaagtacagacagctgaccgcccacctgcaggacgtgaacagagagctgaccaaccagcaggaggccagcgtggagagacagcagcagcccccccccgagaccttcgacttcaagatcaagttcgccgagaccaaggcccacgccaaggccatcgagatggagctgagacagatggaggtggcccaggccaacagacacatgagcctgctgaccgccttcatgcccgacagcttcctgagacccggcggcgaccacgactgcgtgctggtgctgctgctgatgcccagactgatctgcaaggccgagctgatcagaaagcaggcccaggagaagttcgagctgagcgagaactgcagcgagagacccggcctgagaggcgccgccggcgagcagctgagcttcgccgccggcctggtgtacagcctgagcctgctgcaggccaccctgcacagatacgagcacgccctgagccagtgcagcgtggacgtgtacaagaaggtgggcagcctgtaccccgagatgagcgcccacgagagaagcctggacttcctgatcgagctgctgcacaaggaccagctggacgagaccgtgaacgtggagcccctgaccaaggccatcaagtactaccagcacctgtacagcatccacctggccgagcagcccgaggactgcaccatgcagctggccgaccacatcaagttcacccagagcgccctggactgcatgagcgtggaggtgggcagactgagagccttcctgcagggcggccaggaggccaccgacatcgccctgctgctgagagacctggagaccagctgcagcgacatcagacagttctgcaagaagatcagaagaagaatgcccggcaccgacgcccccggcatccccgccgccctggccttcggcccccaggtgagcgacaccctgctggactgcagaaagcacctgacctgggtggtggccgtgctgcaggaggtggccgccgccgccgcccagctgatcgcccccctggccgagaacgagggcctgctggtggccgccctggaggagctggccttcaaggccagcgagcagatctacggcacccccagcagcagcccctacgagtgcctgagacagagctgcaacatcctgatcagcaccatgaacaagctggccaccgccatgcaggagggcgagtacgacgccgagagaccccccagcaagcccccccccgtggagctgagagccgccgccctgagagccgagatcaccgacgccgagggcctgggcctgaagctggaggacagagagaccgtgatcaaggagctgaagaagagcctgaagatcaagggcgaggagctgagcgaggccaacgtgagactgagcctgctggagaagaagctggacagcgccgccaaggacgccgacgagagaatcgagaaggtgcagaccagactggaggagacccaggccctgctgagaaagaaggagaaggagttcgaggagaccatggacgccctgcaggccgacatcgaccagctggaggccgagaaggccgagctgaagcagagactgaacagccagagcaagagaaccatcgagggcctgagaggccccccccccagcggcatcgccaccctggtgagcggcatcgccggcgaggagcagcagagaggcgccatccccggccaggcccccggcagcgtgcccggccccggcctggtgaaggacagccccctgctgctgcagcagatcagcgccatgagactgcacatcagccagctgcagcacgagaacagcatcctgaagggcgcccagatgaaggccagcctggccagcctgccccccctgcacgtggccaagctgagccacgagggccccggcagcgagctgcccgccggcgccctgtacagaaagaccagccagctgctggagaccctgaaccagctgagcacccacacccacgtggtggacatcaccagaaccagccccgccgccaagagccccagcgcccagctgatggagcaggtggcccagctgaagagcctgagcgacaccgtggagaagctgaaggacgaggtgctgaaggagaccgtgagccagagacccggcgccaccgtgcccaccgacttcgccaccttccccagcagcgccttcctgagagccaaggaggagcagcaggacgacaccgtgtacatgggcaaggtgaccttcagctgcgccgccggcttcggccagagacacagactggtgctgacccaggagcagctgcaccagctgcacagcagactgatcagctag

SEQ ID NO: 143351 - DNA, 3786 bp, Artificial Sequence
  derived and/or modified sequence
atgagcgccgaggccagcgccagacccctgagagtgggcagcagagtggaggtgatcggcaagggccacagaggcaccgtggcctacgtgggcgccaccctgttcgccaccggcaagtgggtgggcgtgatcctggacgaggccaagggcaagaacgacggcaccgtgcagggcagaaagtacttcacctgcgacgagggccacggcatcttcgtgagacagagccagatccaggtgttcgaggacggcgccgacaccaccagccccgagacccccgacagcagcgccagcaaggtgctgaagagagagggcaccgacaccaccgccaagaccagcaagctgagaggcctgaagcccaagaaggcccccaccgccagaaagggcagaagagtgagaaccaagcccaccagacccgccagcaccggcgtggccggcgccagcagcagcctgggccccagcggcagcgccagcgccggcgagctgagcagcagcgagcccagcacccccgcccagacccccctggccgcccccatcatccccacccccgtgctgaccagccccggcgccgtgccccccctgcccagccccagcaaggaggaggagggcctgagagcccaggtgagagacctggaggagaagctggagaccctgagactgaagagagccgaggacaaggccaagctgaaggagctggagaagcacaagatccagctggagcaggtgcaggagtggaagagcaagatgcaggagcagcaggccgacctgcagagaagactgaaggaggccagaaaggaggccaaggaggccctggaggccaaggagagatacatggaggagatggccgacaccgccgacgccatcgagatggccaccctggacaaggagatggccgaggagagagccgagagcctgcagcaggaggtggaggccctgaaggagagagtggacgagctgaccaccgacctggagatcctgaaggccgagatcgaggagaagggcagcgacggcgccgccagcagctaccagctgaagcagctggaggagcagaacgccagactgaaggacgccctggtgagaatgagagacctgagcagcagcgagaagcaggagcacgtgaagctgcagaagctgatggagaagaagaaccaggagctggaggtggtgagacagcagagagagagactgcaggaggagctgagccaggccgagagcaccatcgacgagctgaaggagcaggtggacgccgccctgggcgccgaggagatggtggagatgctgaccgacagaaacctgaacctggaggagaaggtgagagagctgagagagaccgtgggcgacctggaggccatgaacgagatgaacgacgagctgcaggagaacgccagagagaccgagctggagctgagagagcagctggacatggccggcgccagagtgagagaggcccagaagagagtggaggccgcccaggagaccgtggccgactaccagcagaccatcaagaagtacagacagctgaccgcccacctgcaggacgtgaacagagagctgaccaaccagcaggaggccagcgtggagagacagcagcagcccccccccgagaccttcgacttcaagatcaagttcgccgagaccaaggcccacgccaaggccatcgagatggagctgagacagatggaggtggcccaggccaacagacacatgagcctgctgaccgccttcatgcccgacagcttcctgagacccggcggcgaccacgactgcgtgctggtgctgctgctgatgcccagactgatctgcaaggccgagctgatcagaaagcaggcccaggagaagttcgagctgagcgagaactgcagcgagagacccggcctgagaggcgccgccggcgagcagctgagcttcgccgccggcctggtgtacagcctgagcctgctgcaggccaccctgcacagatacgagcacgccctgagccagtgcagcgtggacgtgtacaagaaggtgggcagcctgtaccccgagatgagcgcccacgagagaagcctggacttcctgatcgagctgctgcacaaggaccagctggacgagaccgtgaacgtggagcccctgaccaaggccatcaagtactaccagcacctgtacagcatccacctggccgagcagcccgaggactgcaccatgcagctggccgaccacatcaagttcacccagagcgccctggactgcatgagcgtggaggtgggcagactgagagccttcctgcagggcggccaggaggccaccgacatcgccctgctgctgagagacctggagaccagctgcagcgacatcagacagttctgcaagaagatcagaagaagaatgcccggcaccgacgcccccggcatccccgccgccctggccttcggcccccaggtgagcgacaccctgctggactgcagaaagcacctgacctgggtggtggccgtgctgcaggaggtggccgccgccgccgcccagctgatcgcccccctggccgagaacgagggcctgctggtggccgccctggaggagctggccttcaaggccagcgagcagatctacggcacccccagcagcagcccctacgagtgcctgagacagagctgcaacatcctgatcagcaccatgaacaagctggccaccgccatgcaggagggcgagtacgacgccgagagaccccccagcaagcccccccccgtggagctgagagccgccgccctgagagccgagatcaccgacgccgagggcctgggcctgaagctggaggacagagagaccgtgatcaaggagctgaagaagagcctgaagatcaagggcgaggagctgagcgaggccaacgtgagactgagcctgctggagaagaagctggacagcgccgccaaggacgccgacgagagaatcgagaaggtgcagaccagactggaggagacccaggccctgctgagaaagaaggagaaggagttcgaggagaccatggacgccctgcaggccgacatcgaccagctggaggccgagaaggccgagctgaagcagagactgaacagccagagcaagagaaccatcgagggcctgagaggccccccccccagcggcatcgccaccctggtgagcggcatcgccggcgaggagcagcagagaggcgccatccccggccaggcccccggcagcgtgcccggccccggcctggtgaaggacagccccctgctgctgcagcagatcagcgccatgagactgcacatcagccagctgcagcacgagaacagcatcctgaagggcgcccagatgaaggccagcctggccagcctgccccccctgcacgtggccaagctgagccacgagggccccggcagcgagctgcccgccggcgccctgtacagaaagaccagccagctgctggagaccctgaaccagctgagcacccacacccacgtggtggacatcaccagaaccagccccgccgccaagagccccagcgcccagctgatggagcaggtggcccagctgaagagcctgagcgacaccgtggagaagctgaaggacgaggtgctgaaggagaccgtgagccagagacccggcgccaccgtgcccaccgacttcgccaccttccccagcagcgccttcctgagagccaaggaggagcagcaggacgacaccgtgtacatgggcaaggtgaccttcagctgcgccgccggcttcggccagagacacagactggtgctgacccaggagcagctgcaccagctgcacagcagactgatcagctag

SEQ ID NO: 143352 - DNA, 3435 bp, Artificial Sequence
  derived and/or modified sequence
atgatgagacaggcccccaccgccagaaagaccaccaccagaagacccaagcccaccagacccgccagcaccggcgtggccggcgccagcagcagcctgggccccagcggcagcgccagcgccggcgagctgagcagcagcgagcccagcacccccgcccagacccccctggccgcccccatcatccccacccccgtgctgaccagccccggcgccgtgccccccctgcccagccccagcaaggaggaggagggcctgagagcccaggtgagagacctggaggagaagctggagaccctgagactgaagagagccgaggacaaggccaagctgaaggagctggagaagcacaagatccagctggagcaggtgcaggagtggaagagcaagatgcaggagcagcaggccgacctgcagagaagactgaaggaggccagaaaggaggccaaggaggccctggaggccaaggagagatacatggaggagatggccgacaccgccgacgccatcgagatggccaccctggacaaggagatggccgaggagagagccgagagcctgcagcaggaggtggaggccctgaaggagagagtggacgagctgaccaccgacctggagatcctgaaggccgagatcgaggagaagggcagcgacggcgccgccagcagctaccagctgaagcagctggaggagcagaacgccagactgaaggacgccctggtgagaatgagagacctgagcagcagcgagaagcaggagcacgtgaagctgcagaagctgatggagaagaagaaccaggagctggaggtggtgagacagcagagagagagactgcaggaggagctgagccaggccgagagcaccatcgacgagctgaaggagcaggtggacgccgccctgggcgccgaggagatggtggagatgctgaccgacagaaacctgaacctggaggagaaggtgagagagctgagagagaccgtgggcgacctggaggccatgaacgagatgaacgacgagctgcaggagaacgccagagagaccgagctggagctgagagagcagctggacatggccggcgccagagtgagagaggcccagaagagagtggaggccgcccaggagaccgtggccgactaccagcagaccatcaagaagtacagacagctgaccgcccacctgcaggacgtgaacagagagctgaccaaccagcaggaggccagcgtggagagacagcagcagcccccccccgagaccttcgacttcaagatcaagttcgccgagaccaaggcccacgccaaggccatcgagatggagctgagacagatggaggtggcccaggccaacagacacatgagcctgctgaccgccttcatgcccgacagcttcctgagacccggcggcgaccacgactgcgtgctggtgctgctgctgatgcccagactgatctgcaaggccgagctgatcagaaagcaggcccaggagaagttcgagctgagcgagaactgcagcgagagacccggcctgagaggcgccgccggcgagcagctgagcttcgccgccggcctggtgtacagcctgagcctgctgcaggccaccctgcacagatacgagcacgccctgagccagtgcagcgtggacgtgtacaagaaggtgggcagcctgtaccccgagatgagcgcccacgagagaagcctggacttcctgatcgagctgctgcacaaggaccagctggacgagaccgtgaacgtggagcccctgaccaaggccatcaagtactaccagcacctgtacagcatccacctggccgagcagcccgaggactgcaccatgcagctggccgaccacatcaagttcacccagagcgccctggactgcatgagcgtggaggtgggcagactgagagccttcctgcagggcggccaggaggccaccgacatcgccctgctgctgagagacctggagaccagctgcagcgacatcagacagttctgcaagaagatcagaagaagaatgcccggcaccgacgcccccggcatccccgccgccctggccttcggcccccaggtgagcgacaccctgctggactgcagaaagcacctgacctgggtggtggccgtgctgcaggaggtggccgccgccgccgcccagctgatcgcccccctggccgagaacgagggcctgctggtggccgccctggaggagctggccttcaaggccagcgagcagatctacggcacccccagcagcagcccctacgagtgcctgagacagagctgcaacatcctgatcagcaccatgaacaagctggccaccgccatgcaggagggcgagtacgacgccgagagaccccccagcaagcccccccccgtggagctgagagccgccgccctgagagccgagatcaccgacgccgagggcctgggcctgaagctggaggacagagagaccgtgatcaaggagctgaagaagagcctgaagatcaagggcgaggagctgagcgaggccaacgtgagactgagcctgctggagaagaagctggacagcgccgccaaggacgccgacgagagaatcgagaaggtgcagaccagactggaggagacccaggccctgctgagaaagaaggagaaggagttcgaggagaccatggacgccctgcaggccgacatcgaccagctggaggccgagaaggccgagctgaagcagagactgaacagccagagcaagagaaccatcgagggcctgagaggccccccccccagcggcatcgccaccctggtgagcggcatcgccggcgaggagcagcagagaggcgccatccccggccaggcccccggcagcgtgcccggccccggcctggtgaaggacagccccctgctgctgcagcagatcagcgccatgagactgcacatcagccagctgcagcacgagaacagcatcctgaagggcgcccagatgaaggccagcctggccagcctgccccccctgcacgtggccaagctgagccacgagggccccggcagcgagctgcccgccggcgccctgtacagaaagaccagccagctgctggagaccctgaaccagctgagcacccacacccacgtggtggacatcaccagaaccagccccgccgccaagagccccagcgcccagctgatggagcaggtggcccagctgaagagcctgagcgacaccgtggagaagctgaaggacgaggtgctgaaggagaccgtgagccagagacccggcgccaccgtgcccaccgacttcgccaccttccccagcagcgccttcctgagagccaaggaggagcagcaggacgacaccgtgtacatgggcaaggtgaccttcagctgcgccgccggcttcggccagagacacagactggtgctgacccaggagcagctgcaccagctgcacagcagactgatcagctag

SEQ ID NO: 143353 - DNA, 3771 bp, Artificial Sequence
  derived and/or modified sequence
atgagcgccgaggccagcgccagacccctgagagtgggcagcagagtggaggtgatcggcaagggccacagaggcaccgtggcctacgtgggcgccaccctgttcgccaccggcaagtgggtgggcgtgatcctggacgaggccaagggcaagaacgacggcaccgtgcagggcagaaagtacttcacctgcgacgagggccacggcatcttcgtgagacagagccagatccaggtgttcgaggacggcgccgacaccaccagccccgagacccccgacagcagcgccagcaaggtgctgaagagagagggcaccgacaccaccgccaagaccagcaagctgagaggcctgaagcccaagaaggcccccaccgccagaaagaccaccaccagaagacccaagcccaccagacccgccagcaccggcgtggccggcgccagcagcagcctgggccccagcggcagcgccagcgccggcgagctgagcagcagcgagcccagcacccccgcccagacccccctggccgcccccatcatccccacccccgtgctgaccagccccggcgccgtgccccccctgcccagccccagcaaggaggaggagggcctgagagcccaggtgagagacctggaggagaagctggagaccctgagactgaagagagccgaggacaaggccaagctgaaggagctggagaagcacaagatccagctggagcaggtgcaggagtggaagagcaagatgcaggagcagcaggccgacctgcagagaagactgaaggaggccagaaaggaggccaaggaggccctggaggccaaggagagatacatggaggagatggccgacaccgccgacgccatcgagatggccaccctggacaaggagatggccgaggagagagccgagagcctgcagcaggaggtggaggccctgaaggagagagtggacgagctgaccaccgacctggagatcctgaaggccgagatcgaggagaagggcagcgacggcgccgccagcagctaccagctgaagcagctggaggagcagaacgccagactgaaggacgccctggtgagaatgagagacctgagcagcagcgagaagcaggagcacgtgaagctgcagaagctgatggagaagaagaaccaggagctggaggtggtgagacagcagagagagagactgcaggaggagctgagccaggccgagagcaccatcgacgagctgaaggagcaggtggacgccgccctgggcgccgaggagatggtggagatgctgaccgacagaaacctgaacctggaggagaaggtgagagagctgagagagaccgtgggcgacctggaggccatgaacgagatgaacgacgagctgcaggagaacgccagagagaccgagctggagctgagagagcagctggacatggccggcgccagagtgagagaggcccagaagagagtggaggccgcccaggagaccgtggccgactaccagcagaccatcaagaagtacagacagctgaccgcccacctgcaggacgtgaacagagagctgaccaaccagcaggaggccagcgtggagagacagcagcagcccccccccgagaccttcgacttcaagatcaagttcgccgagaccaaggcccacgccaaggccatcgagatggagctgagacagatggaggtggcccaggccaacagacacatgagcctgctgaccgccttcatgcccgacagcttcctgagacccggcggcgaccacgactgcgtgctggtgctgctgctgatgcccagactgatctgcaaggccgagctgatcagaaagcaggcccaggagaagttcgagctgagcgagaactgcagcgagagacccggcctgagaggcgccgccggcgagcagctgagcttcgccgccggcctggtgtacagcctgagcctgctgcaggccaccctgcacagatacgagcacgccctgagccagtgcagcgtggacgtgtacaagaaggtgggcagcctgtaccccgagatgagcgcccacgagagaagcctggacttcctgatcgagctgctgcacaaggaccagctggacgagaccgtgaacgtggagcccctgaccaaggccatcaagtactaccagcacctgtacagcatccacctggccgagcagcccgaggactgcaccatgcagctggccgaccacatcaagttcacccagagcgccctggactgcatgagcgtggaggtgggcagactgagagccttcctgcagggcggccaggaggccaccgacatcgccctgctgctgagagacctggagaccagctgcagcgacatcagacagttctgcaagaagatcagaagaagaatgcccggcaccgacgcccccggcatccccgccgccctggccttcggcccccaggtgagcgacaccctgctggactgcagaaagcacctgacctgggtggtggccgtgctgcaggaggtggccgccgccgccgcccagctgatcgcccccctggccgagaacgagggcctgctggtggccgccctggaggagctggccttcaaggccagcgagcagatctacggcacccccagcagcagcccctacgagtgcctgagacagagctgcaacatcctgatcagcaccatgaacaagctggccaccgccatgcaggagggcgagtacgacgccgagagaccccccagcaagcccccccccgtggagctgagagccgccgccctgagagccgagatcaccgacgccgagggcctgggcctgaagctggaggacagagagaccgtgatcaaggagctgaagaagagcctgaagatcaagggcgaggagctgagcgaggccaacgtgagactgagcctgctggagaagaagctggacagcgccgccaaggacgccgacgagagaatcgagaaggtgcagaccagactggaggagacccaggccctgctgagaaagaaggagaaggagttcgaggagaccatggacgccctgcaggccgacatcgaccagctggaggccgagaaggccgagctgaagcagagactgaacagccagagcaagagaaccatcgagggcctgagaggccccccccccagcggcatcgccaccctggtgagcggcatcgccggcggcgccatccccggccaggcccccggcagcgtgcccggccccggcctggtgaaggacagccccctgctgctgcagcagatcagcgccatgagactgcacatcagccagctgcagcacgagaacagcatcctgaagggcgcccagatgaaggccagcctggccagcctgccccccctgcacgtggccaagctgagccacgagggccccggcagcgagctgcccgccggcgccctgtacagaaagaccagccagctgctggagaccctgaaccagctgagcacccacacccacgtggtggacatcaccagaaccagccccgccgccaagagccccagcgcccagctgatggagcaggtggcccagctgaagagcctgagcgacaccgtggagaagctgaaggacgaggtgctgaaggagaccgtgagccagagacccggcgccaccgtgcccaccgacttcgccaccttccccagcagcgccttcctgagagccaaggaggagcagcaggacgacaccgtgtacatgggcaaggtgaccttcagctgcgccgccggcttcggccagagacacagactggtgctgacccaggagcagctgcaccagctgcacagcagactgatcagctag

SEQ ID NO: 143354 - DNA, 561 bp, Artificial Sequence
  derived and/or modified sequence
atgctgatgggcctgctgagaccctacatcctgggcgagagaggcaccgtgatgacccccagcggcagcagaatgagcgccgaggccagcgccagacccctgagagtgggcagcagagtggaggtgatcggcaagggccacagaggcaccgtggcctacgtgggcgccaccctgttcgccaccggcaagtgggtgggcgtgatcctggacgaggccaagggcaagaacgacggcaccgtgcagggcagaaagtacttcacctgcgacgagggccacggcatcttcgtgagacagagccagatccaggtgttcgaggacggcgccgacaccaccagccccgagacccccgacagcagcgccagcaaggtgctgaagagagagggcaccgacaccaccgccaagaccagcaagctgagaggcctgaagcccaagaaggcccccaccgccagaaagaccaccaccagaagacccaagcccaccagacccgccagcaccggcgtggccggcgccagcagcagcctgggccccagcggcagcgccagcgccggcgagctgagctag

SEQ ID NO: 143355 - DNA, 4500 bp, Artificial Sequence
  derived and/or modified sequence
agaggctagcacggttcctgacaagtctagagcagcactagcgcagagtgagactcatcagctggcaagcaggattctgtgtctctgggttcaggaatcctcaggcagcagaggggacttgctcctcagcccccatcactgcccccacccctacccgtgtaggccaccgagtgaggcccatggactggggagggctgtgcctgacgactcctgtgtccctctatgagggcccagcgccctgaccctcctgcctaggtttctaccttttctctctgtctttggccagctgggggagggggtagaggccgggtgagcaacatggcacagagcaagaggcacgtgtacagccggacgcccagcggcagcaggatgagtgcggaggcaagcgcccggcctctgcgggtgggctcccgtgtagaggtgattggaaaaggccaccgaggcactgtggcctatgttggagccacactgtttgccactggcaaatgggtaggcgtgattctggatgaagcaaagggcaaaaatgatggaactgttcaaggcaggaagtacttcacttgtgatgaagggcatggcatctttgtgcgccagtcccagatccaggtatttgaagatggagcagatactacttccccagagacacctgattcttctgcttcaaaagtcctcaaaagagagggaactgatacaactgcaaagactagcaaactgcggggactgaagcctaagaaggcaccgacagcccgaaagaccacaactcggcgacccaagcccacgcgcccagccagtactggggtggctggggccagtagctccctgggcccctctggctcagcgtcagcaggtgagctgagcagcagtgagcccagcaccccggctcagactccgctggcagcacccatcatccccacgccggtcctcacctctcctggagcagtccccccgcttccttccccatccaaggaggaggagggactaagggctcaggtgcgggacctggaggagaaactagagaccctgagactgaaacgggcagaagacaaagcaaagctaaaagagctggagaaacacaaaatccagctggagcaggtgcaggaatggaagagcaaaatgcaggagcagcaggccgacctgcagcggcgcctcaaggaggcgagaaaggaagccaaggaggcgctggaggcaaaggaacgctatatggaggagatggctgatactgctgatgccattgagatggccactttggacaaggagatggctgaagagcgggctgagtccctgcagcaggaggtggaggcactgaaggagcgggtggacgagctcactactgacttagagatcctcaaggctgagattgaagagaagggctcagatggcgctgcatccagttatcagctcaagcagcttgaggagcagaatgcccgcctgaaggatgccctggtgaggatgcgggatctttcttcctcagagaagcaggagcatgtgaagctccagaagctcatggaaaagaagaaccaagagctggaagttgtgaggcaacagcgggagcgtctgcaggaggagctaagccaggcagagagcaccattgatgagctcaaggagcaggtggatgctgctctgggtgctgaggagatggtggagatgctgacagatcggaacctgaatctggaagagaaagtgcgcgagttgagggagactgtgggagacttggaagcgatgaatgagatgaacgatgagctgcaggagaatgcacgtgagacagaactggagctgcgggagcagctggacatggcaggcgcgcgggttcgtgaggcccagaagcgtgtggaggcagcccaggagacggttgcagactaccagcagaccatcaagaagtaccgccagctgaccgcccatctacaggatgtgaatcgggaactgacaaaccagcaggaagcatctgtggagaggcaacagcagccacctccagagacctttgacttcaaaatcaagtttgctgagactaaggcccatgccaaggcaattgagatggaattgaggcagatggaggtggcccaggccaatcgacacatgtccctgctgacagccttcatgcctgacagcttccttcggccaggtggggaccatgactgcgttctggtgctgttgctcatgcctcgtctcatttgcaaggcagagctgatccggaagcaggcccaggagaagtttgaactaagtgagaactgttcagagcggcctgggctgcgaggagctgctggggagcaactcagctttgctgctggactggtgtactcgctgagcctgctgcaggccacgctacaccgctatgagcatgccctctctcagtgcagtgtggatgtgtataagaaagtgggcagcctgtaccctgagatgagtgcccatgagcgctccttggatttcctcattgaactgctgcacaaggatcagctggatgagactgtcaatgtggagcctctcaccaaggccatcaagtactatcagcatctgtacagcatccaccttgccgaacagcctgaggactgtactatgcagctggctgaccacattaagttcacgcagagtgctctggactgcatgagtgtggaggtaggacggctgcgtgccttcttgcagggtgggcaggaggctacagatattgccctcctgctccgggatctggaaacttcatgcagtgacatccgccagttctgcaagaagatccgaaggcgaatgccagggacagatgctcctgggatcccagctgcactggcctttggaccacaggtatctgacacgctcctagactgcaggaaacacttgacgtgggtcgtggctgtgctgcaggaggtggcagctgctgctgcccagctcattgccccactggcagagaatgaggggctacttgtggctgctctggaggaactggctttcaaagcaagcgagcagatctatgggaccccctccagcagcccctatgagtgtctgcgccagtcatgcaacatcctcatcagtaccatgaacaagctggccacagccatgcaggagggggagtatgatgcagagcggccccccagcaagcctccaccggttgaactgcgggctgctgcccttcgtgcagagatcacagatgctgaaggcctgggtttgaagctcgaagatcgagagacagttattaaggagttgaagaagtcactcaagattaagggagaggagctaagtgaggccaatgtgcggctgagcctcctggagaagaagttggacagtgctgccaaggatgcagatgagcgcatcgagaaagtccagactcggctggaggagacccaggcactgctgcgaaagaaggagaaagagtttgaggagacaatggatgcactccaggctgacatcgaccagctggaggcagagaaggcagaactaaagcagcgtctgaacagccagtccaaacgcacgattgagggactccggggccctcctccttcaggcattgctactctggtctctggcattgctggtgaagaacagcagcgaggagccatccctgggcaggctccagggtctgtgccaggcccagggctggtgaaggactcaccactgctgcttcagcagatctctgccatgaggctgcacatctcccagctccagcatgagaacagcatcctcaagggagcccagatgaaggcatccttggcatccctgccccctctgcatgttgcaaagctatcccatgagggccctggcagtgagttaccagctggagcgctgtatcgtaagaccagccagctgctggagacattgaatcaattgagcacacacacgcacgtagtagacatcactcgcaccagccctgctgccaagagcccgtcggcccaacttatggagcaagtggctcagcttaagtccctgagtgacaccgtcgagaagctcaaggatgaggtcctcaaggagacagtatctcagcgccctggagccacagtacccactgactttgccaccttcccttcatcagccttcctcagggccaaggaggagcagcaggatgacacagtctacatgggcaaagtgaccttctcatgtgcggctggttttggacagcgacaccggctggtgctgacccaggagcagctgcaccagcttcacagtcgcctcatctcctaagcactcctttcccctgctgtccccttcgaccctcagccctctggtgccgctctgcccgatgcacagccacctcagccagcccccaggtagaaacgtgggttaagctcttcctgccccgttcagcttcactcccaccctttcagcgtcctgccccttcaccttgacccgggttcccccactcccattccctggcctctgccataatttgttgttcaactgctccctccttcctgaggggcctcagggcttgtggggggtaggctgagaccccaccaccaaaggttaagtgaggtccccttgattgaggacttcaccccttgattaaagcaacttctgcttcagtgc

SEQ ID NO: 143356 - DNA, 4492 bp, Artificial Sequence
  derived and/or modified sequence
agcacggttcctgacaagtctagagcagcactagcgcagagtgagactcatcagctggcaagcaggattctgtgtctctgggttcaggaatcctcaggcagcagaggggacttgctcctcagcccccatcactgcccccacccctacccgtgtaggccaccgagtgaggcccatggactggggagggctgtgcctgacgactcctgtgtccctctatgagggcccagcgccctgaccctcctgcctaggtttctaccttttctctctgtctttggccagctgggggagggggtagaggccgggtgagcaacatggcacagagcaagaggcacgtgtacagccggacgcccagcggcagcaggatgagtgcggaggcaagcgcccggcctctgcgggtgggctcccgtgtagaggtgattggaaaaggccaccgaggcactgtggcctatgttggagccacactgtttgccactggcaaatgggtaggcgtgattctggatgaagcaaagggcaaaaatgatggaactgttcaaggcaggaagtacttcacttgtgatgaagggcatggcatctttgtgcgccagtcccagatccaggtatttgaagatggagcagatactacttccccagagacacctgattcttctgcttcaaaagtcctcaaaagagagggaactgatacaactgcaaagactagcaaactgcggggactgaagcctaagaaggcaccgacagcccgaaaggggaggcgggtgaggacgaagcccacgcgcccagccagtactggggtggctggggccagtagctccctgggcccctctggctcagcgtcagcaggtgagctgagcagcagtgagcccagcaccccggctcagactccgctggcagcacccatcatccccacgccggtcctcacctctcctggagcagtccccccgcttccttccccatccaaggaggaggagggactaagggctcaggtgcgggacctggaggagaaactagagaccctgagactgaaacgggcagaagacaaagcaaagctaaaagagctggagaaacacaaaatccagctggagcaggtgcaggaatggaagagcaaaatgcaggagcagcaggccgacctgcagcggcgcctcaaggaggcgagaaaggaagccaaggaggcgctggaggcaaaggaacgctatatggaggagatggctgatactgctgatgccattgagatggccactttggacaaggagatggctgaagagcgggctgagtccctgcagcaggaggtggaggcactgaaggagcgggtggacgagctcactactgacttagagatcctcaaggctgagattgaagagaagggctcagatggcgctgcatccagttatcagctcaagcagcttgaggagcagaatgcccgcctgaaggatgccctggtgaggatgcgggatctttcttcctcagagaagcaggagcatgtgaagctccagaagctcatggaaaagaagaaccaagagctggaagttgtgaggcaacagcgggagcgtctgcaggaggagctaagccaggcagagagcaccattgatgagctcaaggagcaggtggatgctgctctgggtgctgaggagatggtggagatgctgacagatcggaacctgaatctggaagagaaagtgcgcgagttgagggagactgtgggagacttggaagcgatgaatgagatgaacgatgagctgcaggagaatgcacgtgagacagaactggagctgcgggagcagctggacatggcaggcgcgcgggttcgtgaggcccagaagcgtgtggaggcagcccaggagacggttgcagactaccagcagaccatcaagaagtaccgccagctgaccgcccatctacaggatgtgaatcgggaactgacaaaccagcaggaagcatctgtggagaggcaacagcagccacctccagagacctttgacttcaaaatcaagtttgctgagactaaggcccatgccaaggcaattgagatggaattgaggcagatggaggtggcccaggccaatcgacacatgtccctgctgacagccttcatgcctgacagcttccttcggccaggtggggaccatgactgcgttctggtgctgttgctcatgcctcgtctcatttgcaaggcagagctgatccggaagcaggcccaggagaagtttgaactaagtgagaactgttcagagcggcctgggctgcgaggagctgctggggagcaactcagctttgctgctggactggtgtactcgctgagcctgctgcaggccacgctacaccgctatgagcatgccctctctcagtgcagtgtggatgtgtataagaaagtgggcagcctgtaccctgagatgagtgcccatgagcgctccttggatttcctcattgaactgctgcacaaggatcagctggatgagactgtcaatgtggagcctctcaccaaggccatcaagtactatcagcatctgtacagcatccaccttgccgaacagcctgaggactgtactatgcagctggctgaccacattaagttcacgcagagtgctctggactgcatgagtgtggaggtaggacggctgcgtgccttcttgcagggtgggcaggaggctacagatattgccctcctgctccgggatctggaaacttcatgcagtgacatccgccagttctgcaagaagatccgaaggcgaatgccagggacagatgctcctgggatcccagctgcactggcctttggaccacaggtatctgacacgctcctagactgcaggaaacacttgacgtgggtcgtggctgtgctgcaggaggtggcagctgctgctgcccagctcattgccccactggcagagaatgaggggctacttgtggctgctctggaggaactggctttcaaagcaagcgagcagatctatgggaccccctccagcagcccctatgagtgtctgcgccagtcatgcaacatcctcatcagtaccatgaacaagctggccacagccatgcaggagggggagtatgatgcagagcggccccccagcaagcctccaccggttgaactgcgggctgctgcccttcgtgcagagatcacagatgctgaaggcctgggtttgaagctcgaagatcgagagacagttattaaggagttgaagaagtcactcaagattaagggagaggagctaagtgaggccaatgtgcggctgagcctcctggagaagaagttggacagtgctgccaaggatgcagatgagcgcatcgagaaagtccagactcggctggaggagacccaggcactgctgcgaaagaaggagaaagagtttgaggagacaatggatgcactccaggctgacatcgaccagctggaggcagagaaggcagaactaaagcagcgtctgaacagccagtccaaacgcacgattgagggactccggggccctcctccttcaggcattgctactctggtctctggcattgctggtgaagaacagcagcgaggagccatccctgggcaggctccagggtctgtgccaggcccagggctggtgaaggactcaccactgctgcttcagcagatctctgccatgaggctgcacatctcccagctccagcatgagaacagcatcctcaagggagcccagatgaaggcatccttggcatccctgccccctctgcatgttgcaaagctatcccatgagggccctggcagtgagttaccagctggagcgctgtatcgtaagaccagccagctgctggagacattgaatcaattgagcacacacacgcacgtagtagacatcactcgcaccagccctgctgccaagagcccgtcggcccaacttatggagcaagtggctcagcttaagtccctgagtgacaccgtcgagaagctcaaggatgaggtcctcaaggagacagtatctcagcgccctggagccacagtacccactgactttgccaccttcccttcatcagccttcctcagggccaaggaggagcagcaggatgacacagtctacatgggcaaagtgaccttctcatgtgcggctggttttggacagcgacaccggctggtgctgacccaggagcagctgcaccagcttcacagtcgcctcatctcctaagcactcctttcccctgctgtccccttcgaccctcagccctctggtgccgctctgcccgatgcacagccacctcagccagcccccaggtagaaacgtgggttaagctcttcctgccccgttcagcttcactcccaccctttcagcgtcctgccccttcaccttgacccgggttcccccactcccattccctggcctctgccataatttgttgttcaactgctccctccttcctgaggggcctcagggcttgtggggggtaggctgagaccccaccaccaaaggttaagtgaggtccccttgattgaggacttcaccccttgattaaagcaacttctgcttcagtg

SEQ ID NO: 143357 - DNA, 4162 bp, Artificial Sequence
  derived and/or modified sequence
agtggctccacccccatggagcagaggagggtgggtgcatgacgtcaggtggagctggtgctgcggccactgaggctgccatcagcctaagctggtgaactgggccaggcaccgctccggtgcctgccggagcctggcgatccagctgcacgtctgcgggggcctctgtgtcagagcggcggccgtttgcaggctgggaagctgccgcaccgggaggctgagactgcattgttgggatttgatgcactaatctcctgtctccgccgcctttccctctgttcggtctcttgccctccctcccttcgtctgtccttcctccgtgtgtttgtctatcctcctctgtccctcctctttcctctccttgctttctttggttttctgcaatgatgagacaggcaccgacagcccgaaagaccacaactcggcgacccaagcccacgcgcccagccagtactggggtggctggggccagtagctccctgggcccctctggctcagcgtcagcaggtgagctgagcagcagtgagcccagcaccccggctcagactccgctggcagcacccatcatccccacgccggtcctcacctctcctggagcagtccccccgcttccttccccatccaaggaggaggagggactaagggctcaggtgcgggacctggaggagaaactagagaccctgagactgaaacgggcagaagacaaagcaaagctaaaagagctggagaaacacaaaatccagctggagcaggtgcaggaatggaagagcaaaatgcaggagcagcaggccgacctgcagcggcgcctcaaggaggcgagaaaggaagccaaggaggcgctggaggcaaaggaacgctatatggaggagatggctgatactgctgatgccattgagatggccactttggacaaggagatggctgaagagcgggctgagtccctgcagcaggaggtggaggcactgaaggagcgggtggacgagctcactactgacttagagatcctcaaggctgagattgaagagaagggctcagatggcgctgcatccagttatcagctcaagcagcttgaggagcagaatgcccgcctgaaggatgccctggtgaggatgcgggatctttcttcctcagagaagcaggagcatgtgaagctccagaagctcatggaaaagaagaaccaagagctggaagttgtgaggcaacagcgggagcgtctgcaggaggagctaagccaggcagagagcaccattgatgagctcaaggagcaggtggatgctgctctgggtgctgaggagatggtggagatgctgacagatcggaacctgaatctggaagagaaagtgcgcgagttgagggagactgtgggagacttggaagcgatgaatgagatgaacgatgagctgcaggagaatgcacgtgagacagaactggagctgcgggagcagctggacatggcaggcgcgcgggttcgtgaggcccagaagcgtgtggaggcagcccaggagacggttgcagactaccagcagaccatcaagaagtaccgccagctgaccgcccatctacaggatgtgaatcgggaactgacaaaccagcaggaagcatctgtggagaggcaacagcagccacctccagagacctttgacttcaaaatcaagtttgctgagactaaggcccatgccaaggcaattgagatggaattgaggcagatggaggtggcccaggccaatcgacacatgtccctgctgacagccttcatgcctgacagcttccttcggccaggtggggaccatgactgcgttctggtgctgttgctcatgcctcgtctcatttgcaaggcagagctgatccggaagcaggcccaggagaagtttgaactaagtgagaactgttcagagcggcctgggctgcgaggagctgctggggagcaactcagctttgctgctggactggtgtactcgctgagcctgctgcaggccacgctacaccgctatgagcatgccctctctcagtgcagtgtggatgtgtataagaaagtgggcagcctgtaccctgagatgagtgcccatgagcgctccttggatttcctcattgaactgctgcacaaggatcagctggatgagactgtcaatgtggagcctctcaccaaggccatcaagtactatcagcatctgtacagcatccaccttgccgaacagcctgaggactgtactatgcagctggctgaccacattaagttcacgcagagtgctctggactgcatgagtgtggaggtaggacggctgcgtgccttcttgcagggtgggcaggaggctacagatattgccctcctgctccgggatctggaaacttcatgcagtgacatccgccagttctgcaagaagatccgaaggcgaatgccagggacagatgctcctgggatcccagctgcactggcctttggaccacaggtatctgacacgctcctagactgcaggaaacacttgacgtgggtcgtggctgtgctgcaggaggtggcagctgctgctgcccagctcattgccccactggcagagaatgaggggctacttgtggctgctctggaggaactggctttcaaagcaagcgagcagatctatgggaccccctccagcagcccctatgagtgtctgcgccagtcatgcaacatcctcatcagtaccatgaacaagctggccacagccatgcaggagggggagtatgatgcagagcggccccccagcaagcctccaccggttgaactgcgggctgctgcccttcgtgcagagatcacagatgctgaaggcctgggtttgaagctcgaagatcgagagacagttattaaggagttgaagaagtcactcaagattaagggagaggagctaagtgaggccaatgtgcggctgagcctcctggagaagaagttggacagtgctgccaaggatgcagatgagcgcatcgagaaagtccagactcggctggaggagacccaggcactgctgcgaaagaaggagaaagagtttgaggagacaatggatgcactccaggctgacatcgaccagctggaggcagagaaggcagaactaaagcagcgtctgaacagccagtccaaacgcacgattgagggactccggggccctcctccttcaggcattgctactctggtctctggcattgctggtgaagaacagcagcgaggagccatccctgggcaggctccagggtctgtgccaggcccagggctggtgaaggactcaccactgctgcttcagcagatctctgccatgaggctgcacatctcccagctccagcatgagaacagcatcctcaagggagcccagatgaaggcatccttggcatccctgccccctctgcatgttgcaaagctatcccatgagggccctggcagtgagttaccagctggagcgctgtatcgtaagaccagccagctgctggagacattgaatcaattgagcacacacacgcacgtagtagacatcactcgcaccagccctgctgccaagagcccgtcggcccaacttatggagcaagtggctcagcttaagtccctgagtgacaccgtcgagaagctcaaggatgaggtcctcaaggagacagtatctcagcgccctggagccacagtacccactgactttgccaccttcccttcatcagccttcctcagggccaaggaggagcagcaggatgacacagtctacatgggcaaagtgaccttctcatgtgcggctggttttggacagcgacaccggctggtgctgacccaggagcagctgcaccagcttcacagtcgcctcatctcctaagcactcctttcccctgctgtccccttcgaccctcagccctctggtgccgctctgcccgatgcacagccacctcagccagcccccaggtagaaacgtgggttaagctcttcctgccccgttcagcttcactcccaccctttcagcgtcctgccccttcaccttgacccgggttcccccactcccattccctggcctctgccataatttgttgttcaactgctccctccttcctgaggggcctcagggcttgtggggggtaggctgagaccccaccaccaaaggttaagtgaggtccccttgattgaggacttcaccccttgattaaagcaacttctgcttcagtg

SEQ ID NO: 143358 - DNA, 4202 bp, Artificial Sequence
  derived and/or modified sequence
ccggccccgcagggtcttgggcgtcggtcgtcggtggggtcggagctgggcgcggagcccctcacagtgcagacgcccagcggcagcaggatgagtgcggaggcaagcgcccggcctctgcgggtgggctcccgtgtagaggtgattggaaaaggccaccgaggcactgtggcctatgttggagccacactgtttgccactggcaaatgggtaggcgtgattctggatgaagcaaagggcaaaaatgatggaactgttcaaggcaggaagtacttcacttgtgatgaagggcatggcatctttgtgcgccagtcccagatccaggtatttgaagatggagcagatactacttccccagagacacctgattcttctgcttcaaaagtcctcaaaagagagggaactgatacaactgcaaagactagcaaactgcggggactgaagcctaagaaggcaccgacagcccgaaagaccacaactcggcgacccaagcccacgcgcccagccagtactggggtggctggggccagtagctccctgggcccctctggctcagcgtcagcaggtgagctgagcagcagtgagcccagcaccccggctcagactccgctggcagcacccatcatccccacgccggtcctcacctctcctggagcagtccccccgcttccttccccatccaaggaggaggagggactaagggctcaggtgcgggacctggaggagaaactagagaccctgagactgaaacgggcagaagacaaagcaaagctaaaagagctggagaaacacaaaatccagctggagcaggtgcaggaatggaagagcaaaatgcaggagcagcaggccgacctgcagcggcgcctcaaggaggcgagaaaggaagccaaggaggcgctggaggcaaaggaacgctatatggaggagatggctgatactgctgatgccattgagatggccactttggacaaggagatggctgaagagcgggctgagtccctgcagcaggaggtggaggcactgaaggagcgggtggacgagctcactactgacttagagatcctcaaggctgagattgaagagaagggctcagatggcgctgcatccagttatcagctcaagcagcttgaggagcagaatgcccgcctgaaggatgccctggtgaggatgcgggatctttcttcctcagagaagcaggagcatgtgaagctccagaagctcatggaaaagaagaaccaagagctggaagttgtgaggcaacagcgggagcgtctgcaggaggagctaagccaggcagagagcaccattgatgagctcaaggagcaggtggatgctgctctgggtgctgaggagatggtggagatgctgacagatcggaacctgaatctggaagagaaagtgcgcgagttgagggagactgtgggagacttggaagcgatgaatgagatgaacgatgagctgcaggagaatgcacgtgagacagaactggagctgcgggagcagctggacatggcaggcgcgcgggttcgtgaggcccagaagcgtgtggaggcagcccaggagacggttgcagactaccagcagaccatcaagaagtaccgccagctgaccgcccatctacaggatgtgaatcgggaactgacaaaccagcaggaagcatctgtggagaggcaacagcagccacctccagagacctttgacttcaaaatcaagtttgctgagactaaggcccatgccaaggcaattgagatggaattgaggcagatggaggtggcccaggccaatcgacacatgtccctgctgacagccttcatgcctgacagcttccttcggccaggtggggaccatgactgcgttctggtgctgttgctcatgcctcgtctcatttgcaaggcagagctgatccggaagcaggcccaggagaagtttgaactaagtgagaactgttcagagcggcctgggctgcgaggagctgctggggagcaactcagctttgctgctggactggtgtactcgctgagcctgctgcaggccacgctacaccgctatgagcatgccctctctcagtgcagtgtggatgtgtataagaaagtgggcagcctgtaccctgagatgagtgcccatgagcgctccttggatttcctcattgaactgctgcacaaggatcagctggatgagactgtcaatgtggagcctctcaccaaggccatcaagtactatcagcatctgtacagcatccaccttgccgaacagcctgaggactgtactatgcagctggctgaccacattaagttcacgcagagtgctctggactgcatgagtgtggaggtaggacggctgcgtgccttcttgcagggtgggcaggaggctacagatattgccctcctgctccgggatctggaaacttcatgcagtgacatccgccagttctgcaagaagatccgaaggcgaatgccagggacagatgctcctgggatcccagctgcactggcctttggaccacaggtatctgacacgctcctagactgcaggaaacacttgacgtgggtcgtggctgtgctgcaggaggtggcagctgctgctgcccagctcattgccccactggcagagaatgaggggctacttgtggctgctctggaggaactggctttcaaagcaagcgagcagatctatgggaccccctccagcagcccctatgagtgtctgcgccagtcatgcaacatcctcatcagtaccatgaacaagctggccacagccatgcaggagggggagtatgatgcagagcggccccccagcaagcctccaccggttgaactgcgggctgctgcccttcgtgcagagatcacagatgctgaaggcctgggtttgaagctcgaagatcgagagacagttattaaggagttgaagaagtcactcaagattaagggagaggagctaagtgaggccaatgtgcggctgagcctcctggagaagaagttggacagtgctgccaaggatgcagatgagcgcatcgagaaagtccagactcggctggaggagacccaggcactgctgcgaaagaaggagaaagagtttgaggagacaatggatgcactccaggctgacatcgaccagctggaggcagagaaggcagaactaaagcagcgtctgaacagccagtccaaacgcacgattgagggactccggggccctcctccttcaggcattgctactctggtctctggcattgctggtggagccatccctgggcaggctccagggtctgtgccaggcccagggctggtgaaggactcaccactgctgcttcagcagatctctgccatgaggctgcacatctcccagctccagcatgagaacagcatcctcaagggagcccagatgaaggcatccttggcatccctgccccctctgcatgttgcaaagctatcccatgagggccctggcagtgagttaccagctggagcgctgtatcgtaagaccagccagctgctggagacattgaatcaattgagcacacacacgcacgtagtagacatcactcgcaccagccctgctgccaagagcccgtcggcccaacttatggagcaagtggctcagcttaagtccctgagtgacaccgtcgagaagctcaaggatgaggtcctcaaggagacagtatctcagcgccctggagccacagtacccactgactttgccaccttcccttcatcagccttcctcagggccaaggaggagcagcaggatgacacagtctacatgggcaaagtgaccttctcatgtgcggctggttttggacagcgacaccggctggtgctgacccaggagcagctgcaccagcttcacagtcgcctcatctcctaagcactcctttcccctgctgtccccttcgaccctcagccctctggtgccgctctgcccgatgcacagccacctcagccagcccccaggtagaaacgtgggttaagctcttcctgccccgttcagcttcactcccaccctttcagcgtcctgccccttcaccttgacccgggttcccccactcccattccctggcctctgccataatttgttgttcaactgctccctccttcctgaggggcctcagggcttgtggggggtaggctgagaccccaccaccaaaggttaagtgaggtccccttgattgaggacttcaccccttgattaaagcaacttctgcttca

SEQ ID NO: 143359 - DNA, 565 bp, Artificial Sequence
  derived and/or modified sequence
acttgatgcttatgggcctgctgaggccttacatcctgggggagaggggaacagtgatgacgcccagcggcagcaggatgagtgcggaggcaagcgcccggcctctgcgggtgggctcccgtgtagaggtgattggaaaaggccaccgaggcactgtggcctatgttggagccacactgtttgccactggcaaatgggtaggcgtgattctggatgaagcaaagggcaaaaatgatggaactgttcaaggcaggaagtacttcacttgtgatgaagggcatggcatctttgtgcgccagtcccagatccaggtatttgaagatggagcagatactacttccccagagacacctgattcttctgcttcaaaagtcctcaaaagagagggaactgatacaactgcaaagactagcaaactgcggggactgaagcctaagaaggcaccgacagcccgaaagaccacaactcggcgacccaagcccacgcgcccagccagtactggggtggctggggccagtagctccctgggcccctctggctcagcgtcagcaggtgagctgagcag

SEQ ID NO: 143360 - protein, 97 aa, Artificial Sequence
  derived and/or modified sequence
MDSSSSSSAAGLGAVDPQLQHFIEVETQKQRFQQLVHQMTELCWEKCMDKPGPKLDSRAEACFVNCVERFIDTSQFILNRLEQTQKSKPVFSESLSD

SEQ ID NO: 143361 - DNA, 294 bp, Artificial Sequence
  derived and/or modified sequence
atggacagcagcagcagcagcagcgccgccggcctgggcgccgtggacccccagctgcagcacttcatcgaggtggagacccagaagcagagattccagcagctggtgcaccagatgaccgagctgtgctgggagaagtgcatggacaagcccggccccaagctggacagcagagccgaggcctgcttcgtgaactgcgtggagagattcatcgacaccagccagttcatcctgaacagactggagcagacccagaagagcaagcccgtgttcagcgagagcctgagcgactag

SEQ ID NO: 143362 - DNA, 294 bp, Artificial Sequence
  derived and/or modified sequence
atggacagctcctccagtagttctgcggccgggctgggagcagttgacccccagctgcagcactttatcgaggtagagactcagaagcagcggtttcagcagttagttcatcagatgaccgaattgtgttgggagaagtgtatggataagcctggccctaagctcgatagtagagcggaggcctgctttgtcaattgcgtcgaaaggttcatagatacgtcacagttcatactgaatagactggaacagacccaaaaatctaagcccgtattctctgagtctctaagtgattag

SEQ ID NO: 143363 - DNA, 294 bp, Artificial Sequence
  derived and/or modified sequence
atggacagcagcagcagcagcagcgctgctggcctgggcgctgtggacccccagctgcagcacttcatcgaggtggagacccagaagcagcgcttccagcagctggtgcaccagatgacagagctgtgctgggagaagtgcatggacaagccaggccccaagctggacagcagagctgaggcctgctttgtgaactgtgtggagcgcttcatcgacaccagccagttcatcctgaaccggctggagcagacccagaagagcaagcctgtgttcagcgagagcctgagtgactag

SEQ ID NO: 143364 - DNA, 294 bp, Artificial Sequence
  derived and/or modified sequence
atggacagcagcagcagcagcagcgccgccggcctgggcgccgtggatcctcagctccagcatttcatcgaggtggagacacagaagcaaagattccagcagctcgtgcaccagatgactgagctgtgctgggaaaagtgcatggacaagccaggcccaaaactggactctcgggctgaagcctgctttgtcaactgcgtcgagagattcatcgacacaagccagttcatcctgaatcgcctggagcaaacccaaaaatcaaagcctgttttctcggagagcctgtcggactag

SEQ ID NO: 143365 - DNA, 294 bp, Artificial Sequence
  derived and/or modified sequence
atggactcttcctcatcaagttctgcagcaggtctgggtgctgtagatcctcagctgcagcattttattgaagtggaaacacaaaaacaacggttccagcagttggttcaccaaatgacagagctgtgctgggagaaatgtatggataaaccaggacccaaactggactccagggcagaagcctgtttcgtgaactgcgtcgaacggttcattgatactagccagttcatcttgaaccgcctcgaacagacacaaaagtccaaacccgtgttttcagaatctctgagcgactag

SEQ ID NO: 143366 - DNA, 1664 bp, Artificial Sequence
  derived and/or modified sequence
ttccctacgtcgggagaggaaaactccatcaaaaaacgaaagccaggggcccaggatagccaactaatcgacccagtcaactaactgacccagtgcacaactctggtagctcagaaaacgcgggctaatttggaagtggacaggggcggagctgtggggccagcacggaatggatcacgtggtctgaagtaacttccttttctcctttcttttctttttggagtaacatctcaacggcacctcggctctgggctgtaagccctgcgatctcaaggcgcaaggctgggcgcaacggcagggttgcggggttacgggattgcggggtccggggagtggaacccgccgactccgggaacgaagcaccggcgccaaggtgtgggaggcggcggggtggagttggacgcctgcctcgcgccgacgcagtgcactcacgggggcggtcccagaggcagctagctgtggttccggttccgtcgcggagacacgtgaaggtcggtgcggagttcgtctctgcaagcttggtcgccctgggatggattcctcctcctcttcctccgcggcgggtttgggtgcagtggacccgcagttgcagcatttcatcgaggtagagactcaaaagcagcgcttccagcagctggtgcaccagatgactgaactttgttgggagaagtgcatggacaagcctgggccaaagttggacagtcgggctgaggcctgttttgtgaactgcgttgagcgcttcattgatacaagccagttcatcttgaatcgactggaacagacccagaaatccaagccagttttctcagaaagcctttctgactgatctcagcattacctctttggaaaaggaaggtagttcaagaaatgaagagctgttgatgggatgattgaagaaacagctatgagaggattggctcccatcttttgttactcttgggacatcctgtcatctgagaatgaacaaagaccaattttttgtgtgtgaagcttaagggtcatatgtttgcttgtattttttaatgctaatcttgtgaaaataattgacaggcgaaagaaaactctatttagatgcatattactgtacatgggactatgcttttctcaaagccccattaactgcttcctataattttgatagtgggaccacatacgtaaaaatctctcatttgtgtggagtcatttctgatttcaggggagatccttgtgtttatcagaaagggcagaagtaggggaagaataatttggtatccttatctagtgtttgattgtcaatgctggagaaaaatatctgtaagagtgtttatacagtacacttcagttatcttgatctccctttcctatatgatgatttgcttaaatatccatattaagtaagtctcaaggtagggtaggcagcctgagagtctagaggcctttagttataaaggaatctagccagtgaacataattcttattactagactgccacaaggaagaaattaacttaccctgtatatcagggtacaaaaaattcagtgatgtgcctaaataagttataaagatttaggccaatcagaagctaacagcagtttcaggtagaggtgcatgcctaatgttagttagtgtagattccatttactgcattcttctgatcactgaaataaaagctatataagattcaa

SEQ ID NO: 143367 - protein, 926 aa, Artificial Sequence
  derived and/or modified sequence
MPVRKQDTQRALHLLEEYRSKLSQTEDRQLRSSIERVINIFQSNLFQALIDIQEFYEVTLLDNPKCIDRSKPSEPIQPVNTWEISSLPSSTVTSETLPSSLSPSVEKYRYQDEDTPPQEHISPQITNEVIGPELVHVSEKNLSEIENVHGFVSHSHISPIKPTEAVLPSPPTVPVIPVLPVPAENTVILPTIPQANPPPVLVNTDSLETPTYVNGTDADYEYEEITLERGNSGLGFSIAGGTDNPHIGDDSSIFITKIITGGAAAQDGRLRVNDCILRVNEVDVRDVTHSKAVEALKEAGSIVRLYVKRRKPVSEKIMEIKLIKGPKGLGFSIAGGVGNQHIPGDNSIYVTKIIEGGAAHKDGKLQIGDKLLAVNNVCLEEVTHEEAVTALKNTSDFVYLKVAKPTSMYMNDGYAPPDITNSSSQPVDNHVSPSSFLGQTPASPARYSPVSKAVLGDDEITREPRKVVLHRGSTGLGFNIVGGEDGEGIFISFILAGGPADLSGELRKGDRIISVNSVDLRAASHEQAAAALKNAGQAVTIVAQYRPEEYSRFEAKIHDLREQMMNSSISSGSGSLRTSQKRSLYVRALFDYDKTKDSGLPSQGLNFKFGDILHVINASDDEWWQARQVTPDGESDEVGVIPSKRRVEKKERARLKTVKFNSKTRDKGQSFNDKRKKNLFSRKFPFYKNKDQSEQETSDADQHVTSNASDSESSYRGQEEYVLSYEPVNQQEVNYTRPVIILGPMKDRINDDLISEFPDKFGSCVPHTTRPKRDYEVDGRDYHFVTSREQMEKDIQEHKFIEAGQYNNHLYGTSVQSVREVAEKGKHCILDVSGNAIKRLQIAQLYPISIFIKPKSMENIMEMNKRLTEEQARKTFERAMKLEQEFTEHFTAIVQGDTLEDIYNQVKQIIEEQSGSYIWVPAKEKL

SEQ ID NO: 143368 - DNA, 2781 bp, Artificial Sequence
  derived and/or modified sequence
atgcctgtgaggaaacaggatacgcagagagccctccacctgcttgaggagtaccgaagtaagctctcccaaacagaagacagacagcttcggagtagcatcgaaagggtcatcaatatttttcagtccaacttattccaggcccttattgacatccaggagttttacgaggttacattattggataatcccaagtgtattgaccgcagtaaacccagcgagccaatccagcctgttaacacctgggaaatttcctctctgccatctagcaccgtaacttccgagactctcccctcaagtctatctccttcagtggagaagtatcgataccaggatgaagacacacctccccaggagcatataagccctcagatcactaacgaggtgatcgggcctgagctcgtccatgtgtctgaaaagaacctgtccgagattgagaacgtgcatgggtttgtgtcccattcacacatctctcccattaagccaactgaggctgtgctgccaagccccccaaccgtgccagttattcctgtcctcccggtgcctgctgagaacacagtgattctgccgaccataccccaagctaatccccccccagtcctggttaatacagactcgctggaaacccccacttacgtgaatgggacagacgcagactatgagtacgaggagatcaccctggaacgggggaattcaggcttgggattttccatcgccggggggactgacaatccacatatcggagatgactcctcgatattcatcactaaaattatcaccgggggcgccgcagcccaggacggcagactgcgggtgaatgactgtattcttcgcgtcaatgaggtggacgtccgcgacgtgacccacagtaaggcagtggaggcgcttaaggaagctggaagcatcgtgcgtctttatgtcaagagacgaaaacccgtgagtgagaagatcatggagattaaactgattaaggggccaaaaggattaggtttctcaatcgccgggggcgtcggaaaccagcatatccccggcgacaatagtatctacgttacaaaaattatcgagggaggggctgcccataaggatgggaagctacagatcggagacaagctattagctgtcaataatgtgtgcctcgaggaggtcacacacgaagaggctgttaccgccttgaaaaacactagcgacttcgtctatcttaaggtggcaaagcccacctctatgtacatgaatgatggctacgctccgccagacatcaccaactcatctagtcagcccgtggataaccacgttagtccgtccagtttcttagggcaaactccagcctctccagccagatattcccctgtgagtaaggcagtgcttggggatgacgagattacgcgggagcctcgcaaagttgtgctgcaccgcgggagcaccggtctgggttttaacatcgtggggggagaggatggagaagggatcttcatctcctttattctggcaggagggccagccgacctcagcggggagctgcgcaaaggcgaccggatcattagcgtgaacagcgtggacttgcgtgccgcctcccacgagcaggcagcggccgctctaaagaacgcaggacaagcagtgacaattgtggctcaataccggccagaggagtacagtcggttcgaagccaagattcatgacctaagggagcaaatgatgaattcatctatatcaagcggatctggttccctccgcacttctcagaaaagatctctgtatgttcgcgcattgtttgactatgataagactaaagactctggacttcccagtcagggcctcaactttaagtttggcgatattttacacgtcattaatgctagcgacgacgaatggtggcaagccaggcaggtgacacctgatggcgaatcagacgaggtcggcgtcatccccagcaaaaggcgggtagaaaagaaggaaagagccaggctgaaaacagtgaaattcaacagtaagacacgggataaaggacagagttttaacgacaaacgaaaaaagaatttgttctcccgaaaatttccgttctacaaaaacaaagatcagtcagagcaggaaacaagcgacgccgaccagcacgtaacttccaatgcttcagacagcgaatcttcttacagagggcaggaggaatacgtgctgagctatgagcccgttaaccagcaggaggtcaattacacccggccggtcattatacttggacccatgaaagacagaataaatgatgacctcatttcagagttcccagacaaatttggatcctgtgtccctcataccactcggcctaagcgggactacgaggtggacggtagagactatcactttgtgacctccagagagcagatggagaaagacattcaagagcataagttcattgaggccggacaatacaacaatcatttatatggaacttccgtgcaaagtgtacgtgaagtggccgagaaagggaaacactgcattttagacgtctccgggaacgccattaaaaggctgcagatcgcacagctgtatcccatctcaatctttatcaaaccaaaaagtatggagaatataatggagatgaacaaaaggctaaccgaagaacaagctagaaagacctttgagcgagccatgaagctcgagcaggaatttacagaacatttcacagcaatcgtgcagggagacaccctggaagatatttacaaccaggtcaaacagatcatcgaggaacagtctgggagttacatctgggtgccggccaaggagaagttgtag

SEQ ID NO: 143369 - DNA, 2781 bp, Artificial Sequence
  derived and/or modified sequence
atgcctgtgaggaagcaggacacccagagggccctgcacctgctggaggagtaccgcagcaagctgagccagacagaggaccggcagctgcggagcagcattgaaagagtcatcaacatcttccagagcaacctcttccaggccctgattgacatccaggagttctatgaggtgaccctgctggacaaccccaagtgcatcgacaggagcaagcccagcgagcccatccagcctgtgaacacctgggagatcagcagcctgcccagcagcacagtgaccagcgagaccctgcccagcagcctgagccccagcgtggagaagtaccgctaccaggatgaggacaccccaccccaggagcacatcagcccccagatcaccaatgaagtcatcggccctgagctggtgcacgtgtctgagaagaacctgtctgaaattgaaaatgtgcacggctttgtgagccacagccacatcagccccatcaagcccacagaagctgtgctgcccagcccccccaccgtgcctgtgattcctgtgctgcctgtgcctgctgagaacacagtcatcctgcccaccatcccccaggccaaccccccacctgtgctggtgaacacagacagcctggagacccccacctacgtgaatggaacagatgctgactatgaatatgaggagatcaccctggagcggggcaacagcggcctgggcttcagcattgctgggggcacagacaacccccacatcggagatgacagcagcatcttcatcaccaagatcatcaccggcggggccgccgcccaggacggccgcctgcgggtgaatgactgcatcctgcgggtgaatgaggtggatgtgagagatgtgacccacagcaaggctgtggaggccctgaaggaggccggcagcatcgtgcggctgtatgtgaagaggaggaagcctgtgtctgagaagatcatggagatcaagctgatcaagggccccaagggcctgggcttcagcattgctgggggcgtgggcaaccagcacatccctggggacaacagcatctacgtgaccaagatcatcgagggcggggccgcccacaaggatggcaagctgcagattggagacaagctgctggccgtgaacaacgtgtgcctggaggaggtgacccatgaggaggccgtgacagccctgaagaacaccagtgactttgtgtacctgaaggtggccaagcccacctccatgtacatgaatgatggctacgcccccccagacatcaccaacagcagcagccagcctgtggacaaccacgtgagccccagcagcttcctgggccagaccccagccagccctgcccgctacagccctgtgtccaaggctgtgctgggagatgatgagatcacccgggagcccaggaaggtggtgctgcaccggggcagcacaggcctgggcttcaacatcgtgggcggggaggatggagagggcatcttcatctccttcatcctggccggcggccctgctgacctgtctggagagctgaggaagggggaccgcatcatctctgtgaacagcgtggacctgcgggccgccagccatgagcaggccgccgccgccctgaagaatgccggccaggccgtgaccatcgtggcccagtacagacctgaggagtacagcagatttgaggccaagatccatgacctgcgggagcagatgatgaacagcagcatcagcagcggcagcggcagcctgcggaccagccagaagaggagcctgtatgtgcgggccctgtttgattatgacaagaccaaggacagcggcctgcccagccagggcctgaacttcaagtttggagacatcctgcacgtgatcaatgccagtgatgatgagtggtggcaggcccggcaggtgaccccagatggagagagtgatgaggtgggcgtcatccccagcaagagaagagtggagaagaaggagcgggcccggctgaagacagtgaagttcaacagcaagacccgggacaagggccagagcttcaatgacaagaggaagaagaacctcttcagcaggaagttccccttctacaagaacaaggaccagagcgagcaggagaccagtgatgctgaccagcacgtgaccagcaatgccagtgacagcgagagcagctaccggggccaggaggagtatgtgctgtcctatgagcctgtgaaccagcaggaggtgaactacaccaggcctgtgatcatcctgggccccatgaaggaccgcatcaatgatgacctgatcagcgagttcccagacaagtttggcagctgtgtgccccacaccacccggcccaagagggactatgaggtggatggccgggactaccactttgtgaccagccgggagcagatggagaaggacatccaggagcacaagttcattgaagctggccagtacaacaaccacctgtatggcacctctgtgcagagcgtgcgggaggtggccgagaagggcaagcactgcatcctggatgtgtctggaaatgccatcaagaggctgcagatcgcccagctgtaccccatcagcatcttcatcaagcccaagtccatggagaacatcatggagatgaacaagaggctgacagaggagcaggccaggaagacctttgagcgggccatgaagctggagcaggagttcacagagcacttcaccgccatcgtgcagggcgacaccctggaggacatctacaaccaggtgaagcagatcatcgaggagcagagcggcagctacatctgggtgcctgccaaggagaagctgtag

SEQ ID NO: 143370 - DNA, 2781 bp, Artificial Sequence
  derived and/or modified sequence
atgcccgtgcggaagcaggacacccagcgggccctgcacctgctggaggagtacagatcaaaactttctcaaactgaggaccgccaactccgctccagtatcgaacgagtgattaatatttttcaatctaacctatttcaagcactgatcgacatccaggagttctacgaggtgacattgctggacaaccccaagtgcatagaccgttcaaagccgagtgaaccgatccagcctgttaatacttgggaaatctcatcacttcctagttccactgtcacctccgagaccctgccatcatccctgtcaccatcggtggaaaagtaccgctatcaggatgaggacacacctccgcaagaacatatctctccccagatcactaatgaagtcatcggacctgaactggttcatgtcagcgaaaagaacttgagcgaaatagagaacgtgcatggctttgtctcccactcacacatcagtcccatcaagccaacagaggcagtgctcccctccccacccaccgtcccagtgattcctgttctgcccgtgcccgctgaaaataccgtgattctccctacaattccacaggcaaatccacctcctgtgttggtcaacaccgactctctggaaacccccacttacgtaaatggaactgatgcagattatgagtatgaggagatcactctggagcgtgggaacagtggactgggattctcaatcgccgggggaacggataatccccatatcggcgacgactccagtatcttcattaccaagattataaccggtggcgccgcagctcaagacggacgcttgcgggtcaatgactgcatcctgagagttaacgaagttgatgtgagagatgttacccactcaaaagccgtcgaggcccttaaggaggctgggagtatcgttcgtctttacgtgaaacggcgcaaacccgtcagtgagaaaattatggagatcaaactgatcaaggggcctaaggggctggggttctcaattgcaggtggggtcggaaaccagcatattcctggcgataactccatctacgttaccaaaattattgaaggtggggcagcccataaggacggcaagcttcaaattggtgacaaactcctcgctgtgaataacgtttgtttggaagaggtgacgcatgaggaggccgtgacagctctaaaaaacacttccgacttcgtgtacctgaaggtagccaagcctacttctatgtatatgaatgatggatatgccccacccgacattacaaactcttcttcccaacctgtcgataatcacgtctctcctagtagtttcttgggccagacccccgcttcaccggccaggtatagtcccgtgagtaaggcagttctcggagacgacgaaataaccagagagccacgcaaagtcgtgttgcatcgtggctcaaccggactgggcttcaatatcgtgggtggggaagacggcgagggcatatttattagcttcatactggccgggggcccagcggatctgtctggcgaactgcgaaaaggcgacagaattatttctgtgaattctgtggacctccgggccgcatcacatgagcaagcggccgcagcgttgaagaatgctggacaggccgtgaccatcgtggcccagtacaggccagaagagtattcccgtttcgaagcaaaaatccacgatttgcgcgagcaaatgatgaacagtagcattagcagcggcagtggctctctccgcacatctcagaaacgaagcctgtacgtgagggcgctgtttgactatgacaaaaccaaagactctgggcttccctctcagggactcaactttaagttcggggacattctgcatgttataaacgcctccgatgatgagtggtggcaggcaagacaagtgacacccgacggcgaatcagacgaagtcggtgtcatcccgtccaaacggagggtagagaagaaagaacgtgcccgattgaaaacagtcaagttcaacagtaaaactagagacaaggggcagagctttaacgacaaaagaaagaagaacttgtttagtcgaaaattccccttctataagaataaagaccagagtgagcaggaaactagtgatgccgaccaacacgtgacatccaacgcttcagactccgagagctcctaccgtgggcaggaagagtatgtcctgtcatacgaacctgtgaatcagcaggaggttaactatacaagacctgtcataattttgggacccatgaaagaccggatcaatgacgacctcatatccgagttccctgataaatttgggagctgcgttccacacaccaccagacctaagagagattacgaagtggacggtagggactatcacttcgtaacaagcagggagcagatggagaaggacatccaggagcacaaattcatagaagctggacagtataacaaccacctgtacggcacatctgttcaatccgttcgggaggtggccgagaaggggaagcactgtatcttggatgtctcaggcaatgccattaagagactccagatagcacagctctaccccatcagtatttttatcaagccaaaatccatggagaacatcatggagatgaacaagcggctgactgaagagcaagcacggaaaaccttcgagcgcgccatgaagttggagcaggaatttaccgaacactttaccgccattgtgcagggtgataccctcgaagacatctataatcaggttaagcaaatcattgaagagcaatcaggttcctacatttgggtccctgccaaagaaaaactgtag

SEQ ID NO: 143371 - DNA, 2781 bp, Artificial Sequence
  derived and/or modified sequence
atgcctgttcgtaagcaggacacccagagagccctgcacctgctggaagagtataggtccaaactcagccagacagaggacagacagctcaggagctccatcgagcgagtgattaatatcttccaaagtaatctgttccaggccctaattgatattcaggaattttatgaggtaaccctgctcgacaatcctaaatgcatcgaccgctctaaaccaagtgagccgattcaacctgtgaacacctgggagatctcgtcgctccccagctcaaccgtcacctccgagacactgccaagcagtctgtcgccctctgtagagaagtaccggtatcaggacgaggatacaccaccacaagagcatatttcgccacagatcaccaatgaagtgataggcccagagctggtgcacgtgtccgaaaagaatctatccgaaatagaaaatgttcacggcttcgtgtctcattcgcacatctctcctatcaaacccacggaagcggtccttccaagcccgccaactgtaccagtcatcccagttttacccgtgccggctgagaatacagttatcctccccactataccccaggccaatccacctcccgtcctggtcaacactgatagtctagagaccccgacatatgttaacggcacagatgccgactacgaatatgaagaaattacgttagaaaggggcaattccggactcggattctcaatcgctggcggaacagataaccctcacatcggagacgactcatctatttttattacaaaaatcattaccggcggtgccgctgcccaggatggcaggctacgggtgaatgactgcatactcagggttaacgaggtcgatgtgagagacgtgacccactccaaagccgtggaggcactgaaggaggcaggttcaattgtgaggctgtatgtaaagcggagaaagcccgtctcggagaagatcatggagattaaactgattaaaggccctaagggcctgggcttttcgatagcgggtggtgttgggaatcaacatatccccggtgacaacagcatctatgttacgaagataatcgagggaggcgctgcccataaggacggaaaattgcagattggagacaaattactcgccgtgaacaatgtgtgtttagaggaagtcacacacgaggaagctgtgacagccctgaagaacacttccgactttgtttacctcaaggtggctaagcccaccagtatgtatatgaacgacggatacgcccctccagatataaccaactcttcttctcaacctgtcgacaaccatgtcagtcctagttctttcctggggcagacccctgcatccccggctagatactccccggtatctaaagcggtcctgggcgacgacgaaattaccagagagcctcggaaagtcgtattgcacagaggcagtaccggcctcggattcaacatcgtgggcggtgaggacggggagggcatctttatcagtttcatacttgcaggcggtccggcagatctgagtggagaacttcgaaagggcgaccgaatcatctctgtgaactctgtggatttaagggccgctagtcacgaacaggcagccgcagccctcaagaacgccggacaggcagtgaccatcgtggcacaataccgcccagaggagtattcccgcttcgaagccaaaatacacgatctgagagagcagatgatgaacagtagcatctcaagtggcagcggctccctacgaactagtcagaagcgtagcctgtatgtccgcgctctgttcgattatgacaagaccaaagactcaggcctgccaagtcagggactgaatttcaagtttggtgacatcctgcacgtgattaacgcttcagatgacgaatggtggcaggccaggcaggtgacccctgatggcgagagcgatgaggtcggcgtcattccatccaaaaggcgcgtggagaagaaagaacgagcaaggcttaagacggtaaagtttaattctaaaacgagggacaaagggcagtctttcaatgacaagaggaagaaaaacctgttcagtcggaagtttcctttttataagaataaggatcagagtgaacaggagacctcagatgctgaccaacacgttacttctaacgcgagcgactccgagtccagctataggggccaggaagagtatgtcttgtcatatgaacctgttaatcaacaggaagtgaattatacgcgacctgtgatcattctcggccctatgaaggaccgcatcaacgacgacctgatctccgagttccccgacaagttcggctcttgtgtgccccacaccactagacccaaaagagactacgaagtcgacggtagagactaccatttcgtgacttcgcgcgagcagatggaaaaggatatccaagagcataagttcatcgaagccggacagtacaacaaccacctctatgggacatccgtgcagagcgttagggaagtggccgaaaagggcaagcactgcatcctggacgtaagtgggaacgctatcaagcgactgcagattgcacagctatacccaatctctatctttatcaagcccaagagtatggaaaatatcatggaaatgaacaagagactgactgaggaacaggcccgtaagacattcgaacgtgctatgaagcttgagcaagagttcaccgaacacttcaccgcaattgtgcagggggacacactagaagatatctacaatcaggtgaagcagattatcgaagaacaaagtggctcttacatctgggtgcccgcaaaagaaaagctctag

SEQ ID NO: 143372 - DNA, 2781 bp, Artificial Sequence
  derived and/or modified sequence
atgcccgtgagaaagcaggacacccagagagccctgcacctgctggaggagtacagaagcaagctgagccagaccgaggacagacagctgagaagcagcatcgagagagtgatcaacatcttccagagcaacctgttccaggccctgatcgacatccaggagttctacgaggtgaccctgctggacaaccccaagtgcatcgacagaagcaagcccagcgagcccatccagcccgtgaacacctgggagatcagcagcctgcccagcagcaccgtgaccagcgagaccctgcccagcagcctgagccccagcgtggagaagtacagataccaggacgaggacacccccccccaggagcacatcagcccccagatcaccaacgaggtgatcggccccgagctggtgcacgtgagcgagaagaacctgagcgagatcgagaacgtgcacggcttcgtgagccacagccacatcagccccatcaagcccaccgaggccgtgctgcccagcccccccaccgtgcccgtgatccccgtgctgcccgtgcccgccgagaacaccgtgatcctgcccaccatcccccaggccaaccccccccccgtgctggtgaacaccgacagcctggagacccccacctacgtgaacggcaccgacgccgactacgagtacgaggagatcaccctggagagaggcaacagcggcctgggcttcagcatcgccggcggcaccgacaacccccacatcggcgacgacagcagcatcttcatcaccaagatcatcaccggcggcgccgccgcccaggacggcagactgagagtgaacgactgcatcctgagagtgaacgaggtggacgtgagagacgtgacccacagcaaggccgtggaggccctgaaggaggccggcagcatcgtgagactgtacgtgaagagaagaaagcccgtgagcgagaagatcatggagatcaagctgatcaagggccccaagggcctgggcttcagcatcgccggcggcgtgggcaaccagcacatccccggcgacaacagcatctacgtgaccaagatcatcgagggcggcgccgcccacaaggacggcaagctgcagatcggcgacaagctgctggccgtgaacaacgtgtgcctggaggaggtgacccacgaggaggccgtgaccgccctgaagaacaccagcgacttcgtgtacctgaaggtggccaagcccaccagcatgtacatgaacgacggctacgccccccccgacatcaccaacagcagcagccagcccgtggacaaccacgtgagccccagcagcttcctgggccagacccccgccagccccgccagatacagccccgtgagcaaggccgtgctgggcgacgacgagatcaccagagagcccagaaaggtggtgctgcacagaggcagcaccggcctgggcttcaacatcgtgggcggcgaggacggcgagggcatcttcatcagcttcatcctggccggcggccccgccgacctgagcggcgagctgagaaagggcgacagaatcatcagcgtgaacagcgtggacctgagagccgccagccacgagcaggccgccgccgccctgaagaacgccggccaggccgtgaccatcgtggcccagtacagacccgaggagtacagcagattcgaggccaagatccacgacctgagagagcagatgatgaacagcagcatcagcagcggcagcggcagcctgagaaccagccagaagagaagcctgtacgtgagagccctgttcgactacgacaagaccaaggacagcggcctgcccagccagggcctgaacttcaagttcggcgacatcctgcacgtgatcaacgccagcgacgacgagtggtggcaggccagacaggtgacccccgacggcgagagcgacgaggtgggcgtgatccccagcaagagaagagtggagaagaaggagagagccagactgaagaccgtgaagttcaacagcaagaccagagacaagggccagagcttcaacgacaagagaaagaagaacctgttcagcagaaagttccccttctacaagaacaaggaccagagcgagcaggagaccagcgacgccgaccagcacgtgaccagcaacgccagcgacagcgagagcagctacagaggccaggaggagtacgtgctgagctacgagcccgtgaaccagcaggaggtgaactacaccagacccgtgatcatcctgggccccatgaaggacagaatcaacgacgacctgatcagcgagttccccgacaagttcggcagctgcgtgccccacaccaccagacccaagagagactacgaggtggacggcagagactaccacttcgtgaccagcagagagcagatggagaaggacatccaggagcacaagttcatcgaggccggccagtacaacaaccacctgtacggcaccagcgtgcagagcgtgagagaggtggccgagaagggcaagcactgcatcctggacgtgagcggcaacgccatcaagagactgcagatcgcccagctgtaccccatcagcatcttcatcaagcccaagagcatggagaacatcatggagatgaacaagagactgaccgaggagcaggccagaaagaccttcgagagagccatgaagctggagcaggagttcaccgagcacttcaccgccatcgtgcagggcgacaccctggaggacatctacaaccaggtgaagcagatcatcgaggagcagagcggcagctacatctgggtgcccgccaaggagaagctgtag

SEQ ID NO: 143373 - DNA, 5034 bp, Artificial Sequence
  derived and/or modified sequence
gttggaaacggcactgctgagtgaggttgaggggtgtctcggtatgtgcgccttggatctggtgtaggcgaggtcacgcctctcttcagacagcccgagccttcccggcctggcgcgtttagttcggaactgcgggacgcgccggtgggctagggcaaggtgtgtgccctcttcctgattctggagaaaaatgccggtccggaagcaagatacccagagagcattgcaccttttggaggaatatcgttcaaaactaagccaaactgaagacagacagctcagaagttccatagaacgggttattaacatatttcagagcaacctctttcaggctttaatagatattcaagaattttatgaagtgaccttactggataatccaaaatgtatagatcgttcaaagccgtctgaaccaattcaacctgtgaatacttgggagatttccagccttccaagctctactgtgacttcagagacactgccaagcagccttagccctagtgtagagaaatacaggtatcaggatgaagatacacctcctcaagagcatatttccccacaaatcacaaatgaagtgataggtccagaattggttcatgtctcagagaagaacttatcagagattgagaatgtccatggatttgtttctcattctcatatttcaccaataaagccaacagaagctgttcttccctctcctcccactgtccctgtgatccctgtcctgccagtccctgctgagaatactgtcatcctacccaccataccacaggcaaatcctcccccagtactggtcaacacagatagcttggaaacaccaacttacgttaatggcacagatgcagattatgaatatgaagaaatcacacttgaaaggggaaattcagggcttggtttcagcattgcaggaggtacggacaacccacacattggagatgactcaagtattttcattaccaaaattatcacagggggagcagccgcccaagatggaagattgcgggtcaatgactgtatattacgagtaaatgaagtagatgttcgtgatgtaacacatagcaaagcagttgaagcgttgaaagaagcagggtctattgtacgcttgtatgtaaaaagaaggaaaccagtgtcagaaaaaataatggaaataaagctcattaaaggtcctaaaggtcttgggtttagcattgctggaggtgttggaaatcagcatattcctggggataatagcatctatgtaaccaaaataattgaaggaggtgcagcacataaggatggcaaacttcagattggagataaacttttagcagtgaataacgtatgtttagaagaagttactcatgaagaagcagtaactgccttaaagaacacatctgattttgtttatttgaaagtggcaaaacccacaagtatgtatatgaatgatggctatgcaccacctgatatcaccaactcttcttctcagcctgttgataaccatgttagcccatcttccttcttgggccagacaccagcatctccagccagatactccccagtttctaaagcagtacttggagatgatgaaattacaagggaacctagaaaagttgttcttcatcgtggctcaacgggccttggtttcaacattgtaggaggagaagatggagaaggaatatttatttcctttatcttagccggaggacctgctgatctaagtggagagctcagaaaaggagatcgtattatatcggtaaacagtgttgacctcagagctgctagtcatgagcaggcagcagctgcattgaaaaatgctggccaggctgtcacaattgttgcacaatatcgacctgaagaatacagtcgttttgaagctaaaatacatgatttacgggagcagatgatgaatagtagtattagttcagggtcaggttctcttcgaactagccagaagcgatccctctatgtcagagccctttttgattatgacaagactaaagacagtgggcttcccagtcagggactgaacttcaaatttggagatatcctccatgttattaatgcttctgatgatgaatggtggcaagccaggcaggttacaccagatggtgagagcgatgaggtcggagtgattcccagtaaacgcagagttgagaagaaagaacgagcccgattaaaaacagtgaaattcaattctaaaacgagagataaagggcagtcattcaatgacaagcgtaaaaagaacctcttttcccgaaaattccccttctacaagaacaaggaccagagtgagcaggaaacaagtgatgctgaccagcatgtaacttctaatgccagcgatagtgaaagtagttaccgtggtcaagaagaatacgtcttatcttatgaaccagtgaatcaacaagaagttaattatactcgaccagtgatcatattgggacctatgaaagacaggataaatgatgacttgatctcagaatttcctgacaaatttggatcctgtgttcctcatacaactagaccaaaacgagattatgaggtagatggaagagattatcattttgtgacttcaagagagcagatggaaaaagatatccaggaacataaattcattgaagctggccagtataacaatcatctatatggaacaagtgttcagtctgtacgagaagtagcagaaaagggcaaacactgtatccttgatgtgtctggaaatgccataaagagattacagattgcacagctttaccctatctccatttttattaaacccaaatccatggaaaatatcatggaaatgaataagcgtctaacagaagaacaagccagaaaaacatttgagagagccatgaaactggaacaggagtttactgaacatttcacagctattgtacagggggatacgctggaagacatttacaaccaagtgaaacagatcatagaagaacaatctggttcttacatctgggttccggcaaaagaaaagctatgaaaactcatgtttctctgtttctcttttccacaattccattttctttggcatctctttgccctttcctctggagtctttcttgagtactgatttcatgttgaattgtatcccacacatcatggtctgcagcttctttttcacatgtagtgtctccttcaagttacatcgtgtgtattatttaatgtcactattggttagtggccatttttcagaactgaagatggaatggcctgaccagctattaagaacgtggggagacgcagaaattgtggtaaaattccttaatgtttaagggaaagtaactttaagagatttttggaaaagctttatatacattcttttcaaatttcagtacaaatgaaaaagtggttttaatcagtgatttagtagactttgagcaactgtgcacgcttcagtttaatagcatggtttggccagtgtattactctcaagtccttttctcaatcaacttctatcatcaaagcaattgtttcattatagataaataaggacattttttaatttaaaaattcatgtctgagttgactttcataagggatttcattttttcctcaacattcttaaagccttttagtatttgacggttcttttttcccaggacatttgctaggaataacaacgtttcaatgtttttaatctacttgagcaacactatcgtgtcttacaaaagttgttcatatgtaaatgatcatcacatttcgtgaattgaggccatgttcaggtgctaaggaagttcgccttttacacagaagattgagaaaatttcctagatataaatacagataaatcagacgttacagtggtgacgtagtaaccatcatggcaatggaaaggagtccaattcatagcctaaaacttcaaatgtattcttaggagtcagattttactgaatattttacccacaatagctgcctattttgttataataaaatatatataaatatatatataaaactttctttaaactgtaactatgggaattattttctttacatagttgcgcacacacacaaacatatatatatatttaaaatatattttgtttcttttgccacctactcctaactttttgtttggtttttaaattaaatattaattgaatagacttatcttccttaatcatgtgaactgaaaatgggggcatggtggtcatgaggaggaaacatttagggaaattagattataagtaaaagtgtgggcatattctcctcttttctacaaaggttttcaaatggttcctgaggttttttgttgttgtccgtgttgttactgttgttcttgtcatcaggtttgattttggtccttgccctttccttctagttctccttttattaataggaaggcaggcaaaagccccatttatgtgtgtgttttcccctcagacagctttcatccactgctctgcactagaattgcacaaatcttcatggtgagcaattttaagaaatgttagtgaaaggtagaaattatttcacaaatcagtttctctggtccttcatattaataataatatttggcttcccattgctctttggagttgtttattaaatatgtgtttttgacaacctcctcattagtttcttaaatgagtactggtttgtaaagaattatcaacattatccattccatttatgaagaagaggagaacagctaataaactgtattgtaaaatccatatgttaagtgtgtcttgaattttgaaagaaaaaatatattttgcaagctaacattttcttgaaacaatttgaggcatcatgtaacttataaccgaatccaagagccgttaggcagcagagtgtgttaccacattgaaatacacagtgctgctgttagactaaatgtcgtaggttgttaaccacatagaaacacactagtatgaagaaaactgttgtaaaatctcaagagcttcagaaactgccttacaagaccgcagcataagctattttgaagtatttaccaaatagtcacatgttgtaaaatatcaagtggttataaaaggatgccatttatatattaaaatttacataacattgttttctgga

SEQ ID NO: 143374 - protein, 509 aa, Artificial Sequence
  derived and/or modified sequence
MDPPRASHLSPRKKRPRQTGALMASSPQDIKFQDLVVFILEKKMGTTRRAFLMELARRKGFRVENELSDSVTHIVAENNSGSDVLEWLQAQKVQVSSQPELLDVSWLIECIRAGKPVEMTGKHQLVVRRDYSDSTNPGPPKTPPIAVQKISQYACQRRTTLNNCNQIFTDAFDILAENCEFRENEDSCVTFMRAASVLKSLPFTIISMKDTEGIPCLGSKVKGIIEEIIEDGESSEVKAVLNDERYQSFKLFTSVFGVGLKTSEKWFRMGFRTLSKVRSDKSLKFTRMQKAGFLYYEDLVSCVTRAEAEAVSVLVKEAVWAFLPDAFVTMTGGFRRGKKMGHDVDFLITSPGSTEDEEQLLQKVMNLWEKKGLLLYYDLVESTFEKLRLPSRKVDALDHFQKCFLIFKLPRQRVDSDQSSWQEGKTWKAIRVDLVLCPYERRAFALLGWTGSRQFERDLRRYATHERKMILDNHALYDKTKRIFLKAESEEEIFAHLGLDYIEPWERNA

SEQ ID NO: 143375 - DNA, 1530 bp, Artificial Sequence
  derived and/or modified sequence
atggacccccccagagccagccacctgagccccagaaagaagagacccagacagaccggcgccctgatggccagcagcccccaggacatcaagttccaggacctggtggtgttcatcctggagaagaagatgggcaccaccagaagagccttcctgatggagctggccagaagaaagggcttcagagtggagaacgagctgagcgacagcgtgacccacatcgtggccgagaacaacagcggcagcgacgtgctggagtggctgcaggcccagaaggtgcaggtgagcagccagcccgagctgctggacgtgagctggctgatcgagtgcatcagagccggcaagcccgtggagatgaccggcaagcaccagctggtggtgagaagagactacagcgacagcaccaaccccggcccccccaagaccccccccatcgccgtgcagaagatcagccagtacgcctgccagagaagaaccaccctgaacaactgcaaccagatcttcaccgacgccttcgacatcctggccgagaactgcgagttcagagagaacgaggacagctgcgtgaccttcatgagagccgccagcgtgctgaagagcctgcccttcaccatcatcagcatgaaggacaccgagggcatcccctgcctgggcagcaaggtgaagggcatcatcgaggagatcatcgaggacggcgagagcagcgaggtgaaggccgtgctgaacgacgagagataccagagcttcaagctgttcaccagcgtgttcggcgtgggcctgaagaccagcgagaagtggttcagaatgggcttcagaaccctgagcaaggtgagaagcgacaagagcctgaagttcaccagaatgcagaaggccggcttcctgtactacgaggacctggtgagctgcgtgaccagagccgaggccgaggccgtgagcgtgctggtgaaggaggccgtgtgggccttcctgcccgacgccttcgtgaccatgaccggcggcttcagaagaggcaagaagatgggccacgacgtggacttcctgatcaccagccccggcagcaccgaggacgaggagcagctgctgcagaaggtgatgaacctgtgggagaagaagggcctgctgctgtactacgacctggtggagagcaccttcgagaagctgagactgcccagcagaaaggtggacgccctggaccacttccagaagtgcttcctgatcttcaagctgcccagacagagagtggacagcgaccagagcagctggcaggagggcaagacctggaaggccatcagagtggacctggtgctgtgcccctacgagagaagagccttcgccctgctgggctggaccggcagcagacagttcgagagagacctgagaagatacgccacccacgagagaaagatgatcctggacaaccacgccctgtacgacaagaccaagagaatcttcctgaaggccgagagcgaggaggagatcttcgcccacctgggcctggactacatcgagccctgggagagaaacgcctag

SEQ ID NO: 143376 - DNA, 1972 bp, Artificial Sequence
  derived and/or modified sequence
gtgagatgacatcaaaacccttcgtgtaggagggtggcagtctccctcccttctggagacaccaccagatgggccagccagaggcagcagcagcctcttcccatggatccaccacgagcgtcccacttgagccctcggaagaagagaccccggcagacgggtgccttgatggcctcctctcctcaagacatcaaatttcaagatttggtcgtcttcattttggagaagaaaatgggaaccacccgcagagcgttcctcatggagctggcccgcaggaaagggttcagggttgaaaatgagctcagtgattctgtcacccacatcgtagcagagaacaactcgggttcggatgttctggagtggcttcaagcacagaaagtacaagtcagctcacaaccagagctcctcgatgtctcctggctgatcgaatgcataagagcagggaaaccggtggaaatgacaggaaaacaccagcttgttgtgagaagagactattcagatagcaccaacccaggccccccgaagactccaccaattgctgtacaaaagatctcccagtatgcgtgtcagagaagaaccactttaaacaactgtaaccagatattcacggatgcctttgatatactggctgaaaactgtgagtttagagaaaatgaagactcctgtgtgacatttatgagagcagcttctgtattgaaatctctgccattcacaatcatcagtatgaaggacacagaaggaattccctgcctggggtccaaggtgaagggtatcatagaggagattattgaagatggagaaagttctgaagttaaagctgtgttaaatgatgaacgatatcaatccttcaaactctttacttctgtatttggagtggggctgaagacttctgagaagtggttcaggatgggtttcagaactctgagtaaagtaaggtcggacaaaagcctgaaatttacacgaatgcagaaagcaggatttctgtattatgaagaccttgtcagctgtgtgaccagggcagaagcagaggccgtcagtgtgctggttaaagaggctgtctgggcatttcttccggatgctttcgtcaccatgacaggagggttccggaggggtaagaagatggggcatgatgtagattttttaattaccagcccaggatcaacagaggatgaagagcaacttttacagaaagtgatgaacttatgggaaaagaagggattacttttatattatgaccttgtggagtcaacatttgaaaagctcaggttgcctagcaggaaggttgatgctttggatcattttcaaaagtgctttctgattttcaaattgcctcgtcaaagagtggacagtgaccagtccagctggcaggaaggaaagacctggaaggccatccgtgtggatttagttctgtgcccctacgagcgtcgtgcctttgccctgttgggatggactggctcccggcagtttgagagagacctccggcgctatgccacacatgagcggaagatgattctggataaccatgctttatatgacaagaccaagaggatattcctcaaagcagaaagtgaagaagaaatttttgcgcatctgggattggattatattgaaccgtgggaaagaaatgcctaggaaagtgttgtcaacatttttttcctattcttttcaagttaaataaattatgcttcatattagtaaaagatgccataggagagtttggggttatttaggtcttattgaaatgcagattgctactagaaataaataactttggaaacatgggaaggtgccactggtaatgggtaaggttctaataggccatgtttatgactgttgcatagaattcacaatgcatttttcaagagaaatgatgttgtcactggtggctcattcagggaagctcatcaaagcccactttgttcgcagtgtagctgaaatactgtctatctctaataaaaacaggaggaaacaa

SEQ ID NO: 143377 - DNA, 1530 bp, Artificial Sequence
  derived and/or modified sequence
atggaccctccacgcgcctcccacctgtctccacgaaaaaaacgccctagacagaccggcgcccttatggccagcagccctcaggatatcaaattccaggatctggtagtgttcattttggagaaaaagatgggcaccacacgacgagccttcctgatggagctggccaggcggaaggggttcagggtggagaatgagctctctgattcagtgacccatatcgtcgctgagaacaactccgggtccgatgtcttggagtggctccaggcacaaaaagtacaggtgtcatcacagcctgagctgttggatgtcagctggttgatcgagtgtattcgagcaggaaagcccgttgaaatgaccggcaaacaccagctcgtggtcaggcgggactacagtgattctaccaatcccggcccgcctaagacaccccctatcgctgttcagaagatttcacagtatgcttgccagcgccgcacaaccctcaataactgtaaccagatctttaccgacgccttcgatatcctggccgagaattgtgaatttagggagaatgaggacagctgtgtgacgttcatgcgcgcagctagcgtacttaaaagtctgccattcactatcatctccatgaaagacacagagggaattccatgtttgggatccaaagttaaagggatcatagaggagatcattgaggacggtgagagcagcgaggtcaaggccgtcttaaatgacgagaggtaccagtccttcaaactgtttactagcgtgttcggcgtcgggttaaagactagcgaaaagtggtttcggatggggttccggacactgtcgaaagtcaggtctgacaagagtctcaagttcacccggatgcagaaggccggcttcctgtattacgaggacttagtctcctgtgtgacacgggccgaggccgaagctgtgtcagttctggtgaaagaagcggtttgggcgttcttgccagacgcattcgtgaccatgacggggggctttagaaggggcaaaaagatggggcatgatgtggactttttgattacctcccccggctctaccgaagacgaggaacaactgcttcagaaagttatgaacctatgggaaaagaaagggctgctcttgtactacgatttagtcgagtcaacctttgagaaacttaggctgccatcacgcaaggtagatgctctagatcactttcagaaatgtttcttgatcttcaagctcccccgccagagggtggacagtgaccagtcatcttggcaggaaggtaagacgtggaaggcgattagagtcgacctcgttctctgtccttacgagcgcagagccttcgctctcctgggctggacaggatcccggcagtttgagcgtgatttgcgtcgatatgccacacatgagaggaagatgatcctggataaccatgccctgtacgataaaacaaaaaggatattcttaaaggctgaaagcgaagaggagatatttgcccatctcggcttggactacatagaaccttgggaaagaaacgcgtag

SEQ ID NO: 143378 - DNA, 1530 bp, Artificial Sequence
  derived and/or modified sequence
atggaccccccccgggccagccacctgagccccaggaagaagaggccccggcagacaggagccctgatggccagcagcccccaggacatcaagttccaggacctggtggtgttcatcctggagaagaagatgggcaccacccggcgggccttcctgatggagctggcccggaggaagggcttccgggtggagaatgagctgagtgacagcgtgacccacatcgtggccgagaacaacagcggcagtgatgtgctggagtggctgcaggcccagaaggtgcaggtgagcagccagcctgagctgctggatgtgtcctggctgattgagtgcatccgggccggcaagcctgtggagatgaccgggaagcaccagctggtggtgcggcgggactacagcgacagcaccaaccctggcccccccaagaccccacccatcgctgtgcagaagatcagccagtatgcctgccagaggaggaccaccctgaacaactgcaaccagatcttcacagatgcctttgacatcctggccgagaactgtgagttcagagaaaatgaagacagctgtgtgaccttcatgagagctgcctctgtgctgaagagcctgcccttcaccatcatctccatgaaggacacagagggcatcccctgcctgggcagcaaggtgaagggcatcatcgaggagatcattgaagatggagagagcagcgaggtgaaggctgtgctgaatgatgagcgctaccagagcttcaagctgttcacctctgtgtttggagtgggcctgaagaccagcgagaagtggttcaggatgggcttccgcaccctgagcaaggtgcggagtgacaagagcctgaagttcaccaggatgcagaaggccggcttcctgtactatgaggacctggtgtcctgtgtgaccagggctgaggccgaggccgtgtctgtgctggtgaaggaggccgtgtgggccttcctgcctgatgcctttgtgaccatgactggaggcttcagaagaggcaagaagatgggccatgatgtggacttcctgatcaccagccctggcagcacagaagatgaggagcagctgctgcagaaggtgatgaacctgtgggagaagaagggcctgctgctgtactatgacctggtggagagcacctttgagaagctgcggctgcccagcaggaaggtggatgccctggaccacttccagaagtgcttcctgatcttcaagctgccccggcagagggtggacagcgaccagagctcctggcaggagggcaagacctggaaggccatccgggtggacctggtgctgtgcccctatgaaagaagagcctttgccctgctgggctggacaggcagccggcagtttgagcgggacctgcggcgctatgccacccatgagaggaagatgatcctggacaaccacgccctgtatgacaagaccaagaggatcttcctgaaggccgagagcgaggaggagatctttgcccacctgggcctggactacatcgagccctgggagagaaatgcctag

SEQ ID NO: 143379 - DNA, 1530 bp, Artificial Sequence
  derived and/or modified sequence
atggaccccccccgggccagccacctgagcccccggaagaagcggcctcggcagactggcgccctcatggccagttcaccgcaggatatcaaatttcaggacctggtggttttcatcttggagaagaaaatgggaaccactagaagggcttttctcatggaattagcacgcaggaagggattcagggtggaaaatgagttgtccgacagtgtgacccatatcgtcgccgagaataattccggatccgacgtcctcgagtggctgcaggctcagaaggttcaagtttcatcgcagcctgagctgctggatgttagttggctcatcgaatgtataagagccgggaagcccgtggaaatgaccggcaagcatcagctcgtggtccggagagactattccgactctaccaatcccggccccccaaaaaccccacccatcgcggtccaaaagatctcccagtacgcttgccaaagaagaaccactcttaataattgcaatcaaatctttacagatgcatttgacatcctggctgagaattgcgaatttcgcgaaaacgaagactcgtgcgttacattcatgcgagctgcctcagtcctgaagagcctcccgttcaccattatcagcatgaaagacaccgaggggatcccatgtttgggatctaaggtaaagggaataattgaggaaatcattgaggatggtgaaagttccgaggtcaaggcggtgctgaacgatgagcgatatcagagctttaaactgtttacttcagtatttggggtgggactcaagaccagtgagaagtggttccggatgggattccggacactttcaaaagtccgctccgacaaatccctgaaattcacaagaatgcagaaagctgggttcttatattacgaagatttggtgagctgcgtgacacgcgccgaggccgaggctgtgtcagtgctcgtgaaggaggctgtgtgggctttcctgcccgacgccttcgtcacgatgaccgggggttttcgcagggggaagaagatgggccatgatgtcgactttcttattactagcccgggctcgacagaggacgaggagcagctgctccagaaagtcatgaatctgtgggagaagaaaggcctgttgctgtattacgacctggtggaaagcacatttgagaagttgcgactgcccagccgaaaagttgatgccctggaccactttcagaaatgctttttaatctttaaactgccacggcagcgggtggacagtgaccagagttcctggcaggaagggaaaacgtggaaagccattcgcgtggatctggtactgtgtccctacgagcgaagagctttcgcactgctggggtggacggggagccgacagtttgaacgagacctccgacgctacgccacgcacgaaagaaaaatgatcctggataaccatgctctatacgataaaacaaagcgaattttcttaaaggcggaaagtgaggaagagatcttcgcccacctgggcctggattacattgagccatgggaaaggaatgcttag

SEQ ID NO: 143380 - DNA, 1530 bp, Artificial Sequence
  derived and/or modified sequence
atggatcctccgcgtgcctcacacctctcacctcgtaagaagcgtccacgacagacaggagccctaatggctagcagcccacaagacattaagttccaggacctcgtggtgtttattctagagaagaagatggggaccactcggagagcttttcttatggagctggctcgtcggaaagggtttagagtcgagaatgaactgagtgactccgttacccacatcgtggccgaaaataattctggctcagacgtactggagtggctccaggcccagaaagtacaagttagctcacagcccgaacttctggatgtcagctggttgattgagtgcatccgtgcaggcaaaccagtggagatgactggtaagcatcagctcgtggtacgcagggattactctgattcaactaacccgggtccacctaagaccccaccgatagcggtccagaagatctcacaatacgcctgccagcgcagaacaaccctgaacaattgtaaccagatttttactgacgcatttgatattcttgcggagaattgtgagttccgcgagaacgaagattcatgcgtaacttttatgcgcgctgcgtccgtcctcaagtccttgccgtttaccatcatttccatgaaggacactgaaggaatcccttgcttaggttcgaaggtgaaagggatcatagaggaaattatcgaggacggggaatccagtgaagtgaaagccgtgctaaacgatgaacggtaccaatcattcaaactctttacctccgtctttggtgtgggcctgaaaacctccgaaaaatggtttagaatgggctttcgaaccctatcaaaagtgcggtccgacaagagtttaaaatttaccagaatgcagaaagcgggatttctgtactatgaagatctggtcagctgcgtgacacgcgcagaggccgaggccgttagcgtccttgtgaaagaagccgtgtgggccttccttcctgacgcctttgtgactatgactggtggttttcggcgagggaagaaaatgggacatgacgtcgatttcctgatcacaagccctggatccaccgaggacgaagagcaactgctgcagaaggtcatgaacctttgggaaaagaaaggcttgctcctgtactatgacttagtggagagtaccttcgagaaactgcgcctgccatcccgcaaggtggatgccctggaccactttcagaaatgctttctgatttttaaattgccacgtcagcgcgtggattccgatcaatctagctggcaggaagggaaaacctggaaagccattagggtggatctggttctctgcccgtacgagcgcagagccttcgctctgctgggatggacagggagcagacaattcgagcgggacctgcggaggtacgccacgcatgagagaaagatgatcctcgataaccacgccttatacgataagaccaaaagaatctttctgaaggctgagagtgaggaggagattttcgcacatctcggtttggactacattgaaccctgggaacggaatgcctag

SEQ ID NO: 143381 - protein, 110 aa, Artificial Sequence
  derived and/or modified sequence
MAFQPPYSSSLFRKRDNASGASVVAIDNKIEQAMDLVKNHLMYAVREEVEILKEQIRELVEKNSQLERENTLLKTLASPEQLEKFQSCLSPEEPAPESPQVPEAPGGSAV

SEQ ID NO: 143382 - protein, 77 aa, Artificial Sequence
  derived and/or modified sequence
MDLVKNHLMYAVREEVEILKEQIRELVEKNSQLERENTLLKTLASPEQLEKFQSCLSPEEPAPESPQVPEAPGGSAV

SEQ ID NO: 143383 - protein, 134 aa, Artificial Sequence
  derived and/or modified sequence
MNTEMYQTPMEVAVYQLHNFSISFFSSLLGGDVVSVKLDNSASGASVVAIDNKIEQAMDLVKNHLMYAVREEVEILKEQIRELVEKNSQLERENTLLKTLASPEQLEKFQSCLSPEEPAPESPQVPEAPGGSAV

SEQ ID NO: 143384 - protein, 25 aa, Artificial Sequence
  derived and/or modified sequence
MDLVKNHLMYAVREEVEILKEQIRE

SEQ ID NO: 143385 - DNA, 1986 bp, Artificial Sequence
  derived and/or modified sequence
agtctgggttggactggcggccgtggagtttgtgacatacgaggtgacacccctcgagtcacttcccttcaactccagctggagcgcctgcttggctttgggttcgttctgcagccttcgccccgctcctagcctcagggccggactccagcgcagagcccagcccagcgcagcctgccagcagccacccagccgcccagccgcccagccccgcacgaaacccggccagagcttcctagcagcccgagccatgaacaccgaaatgtatcagacccccatggaggtggcggtctaccagctgcacaatttctccatctccttcttctcttctctgcttggaggggatgtggtttccgttaagctggacaacagtgcctccggagccagcgtggtggccatagacaacaagatcgaacaggccatggatctggtgaagaatcatctgatgtatgctgtgagagaggaggtggagatcctgaaggagcagatccgagagctggtggagaagaactcccagctagagcgtgagaacaccctgttgaagaccctggcaagcccagagcagctggagaagttccagtcctgtctgagccctgaagagccagctcccgaatccccacaagtgcccgaggcccctggtggttctgcggtgtaagtggctctgtcctcagggtgggcagagccactaaacttgttttacctagttctttccagtttgtttttggctccccaagcatcatctcacgaggagaactttacacctagcacagctggtgccaagagatgtcctaaggacatggccacctgggtccactccagcgacagacccctgacaagagcaggtctctggaggctgagttgcatggggcctagtaacaccaagccagtgagcctctaatgctactgcgccctgggggctcccagggcctgggcaacttagctgcaactggcaaaggagaagggtagtttgaggtgtgacaccagtttgctccagaaagtttaaggggtctgtttctcatctccatggacatcttcaacagcttcacctgacaacgactgttcctatgaagaagccacttgtgttttaagcagaggcaacctctctcttctcctctgtttcgtgaaggcaggggacacagatgggagagattgagccaagtcagccttctgttggttaatatggtataatgcatggctttgtgcacagcccagtgtgggattacagctttgggatgaccgcttacaaagttctgtttggttagtattggcatagtttttctatatagccataaatgcgtatatatacccatagggctagatctgtatcttagtgtagcgatgtatacatatacacatccacctacatgttgaagggcctaaccagccttgggagtattgactggtcccttacctcttatggctaagtctttgactgtgttcatttaccaagttgacccagtttgtcttttaggttaagtaagactcgagagtaaaggcaaggaggggggccagcctctgaatgcggccacggatgccttgctgctgcaaccctttccccagctgtccactgaaacgtgaagtcctgttttgaatgccaaacccaccattcactggtgctgactacatagaatggggttgagagaagatcagtttgggcttcacagtgtcatttgaaaacgttttttgttttgttttgtaattattgtggaaaactttcaagtgaacagaaggatggtgtcctactgtggatgagggatgaacaaggggatggctttgatccaatggagcctgggaggtgtgcccagaaagcttgtctgtagcgggttttgtgagagtgaacactttccactttttgacaccttatcctgatgtatggttccaggatttggattttgattttccaaatgtagcttgaaatttcaataaactttgctctgtttttctaaaaataaaaaaaaaaaaaaaaaaaaaaaaaaaaaaaaaaaa

SEQ ID NO: 143386 - DNA, 333 bp, Artificial Sequence
  derived and/or modified sequence
atggccttccagcccccctacagcagcagcctgttcagaaagagagacaacgccagcggcgccagcgtggtggccatcgacaacaagatcgagcaggccatggacctggtgaagaaccacctgatgtacgccgtgagagaggaggtggagatcctgaaggagcagatcagagagctggtggagaagaacagccagctggagagagagaacaccctgctgaagaccctggccagccccgagcagctggagaagttccagagctgcctgagccccgaggagcccgcccccgagagcccccaggtgcccgaggcccccggcggcagcgccgtgtag

SEQ ID NO: 143387 - DNA, 405 bp, Artificial Sequence
  derived and/or modified sequence
atgaacaccgagatgtaccagacccccatggaggtggccgtgtaccagctgcacaacttcagcatcagcttcttcagcagcctgctgggcggcgacgtggtgagcgtgaagctggacaacagcgccagcggcgccagcgtggtggccatcgacaacaagatcgagcaggccatggacctggtgaagaaccacctgatgtacgccgtgagagaggaggtggagatcctgaaggagcagatcagagagctggtggagaagaacagccagctggagagagagaacaccctgctgaagaccctggccagccccgagcagctggagaagttccagagctgcctgagccccgaggagcccgcccccgagagcccccaggtgcccgaggcccccggcggcagcgccgtgtag

SEQ ID NO: 143388 - DNA, 333 bp, Artificial Sequence
  derived and/or modified sequence
atggccttccagcctccatattcgtcaagcctgtttcgtaaaagggataatgccagcggggcaagcgttgtagctattgacaataaaatcgagcaagccatggatctggtgaaaaaccatctaatgtacgctgttcgagaggaggttgagatacttaaagaacagatacgtgaactggtagagaagaactcccagcttgaacgcgagaacacactactcaagacattggccagtcccgagcaactggaaaagtttcaaagctgcttgtctcctgaggagcctgcaccggaaagcccccaggtaccggaagcacccggcggaagtgctgtttag

SEQ ID NO: 143389 - DNA, 405 bp, Artificial Sequence
  derived and/or modified sequence
atgaatacagagatgtaccaaacaccaatggaagtggccgtgtaccaattacacaactttagtatcagcttcttctcttctctgttgggcggggatgtggtgtctgtgaagttagataacagcgccagcggcgcttccgttgtggctattgacaacaagatcgaacaagcaatggacttggttaagaatcacttgatgtacgcggtccgcgaggaagtggagattctcaaagagcaaattcgcgagttagtggaaaagaacagccaactcgagcgggagaacacgttattgaagactctggcttccccagagcagctagaaaaatttcagtcatgcctgtcaccagaggaacctgcgccagagagccctcaagtgcccgaggcccctgggggcagtgccgtctag

SEQ ID NO: 143390 - DNA, 333 bp, Artificial Sequence
  derived and/or modified sequence
atggccttccagcccccctacagcagcagcctcttcaggaagagggacaatgccagcggggcctctgtggtggccatcgacaacaagattgagcaggccatggacctggtgaagaaccacctgatgtatgctgtgcgggaggaggtggagatcctgaaggagcagatccgggagctggtggagaagaacagccagctggagcgggagaacaccctgctgaagaccctggccagccctgagcagctggagaagttccagagctgcctgagccctgaggagcccgcccctgagagcccccaggtgcctgaggcccctgggggcagcgctgtgtag

SEQ ID NO: 143391 - DNA, 405 bp, Artificial Sequence
  derived and/or modified sequence
atgaacacagagatgtaccagacccccatggaggtggccgtgtaccagctgcacaacttcagcatctccttcttcagcagcctgctgggcggagatgtggtgtctgtgaagctggacaacagcgccagcggggcctctgtggtggccatcgacaacaagattgagcaggccatggacctggtgaagaaccacctgatgtatgctgtgcgggaggaggtggagatcctgaaggagcagatccgggagctggtggagaagaacagccagctggagcgggagaacaccctgctgaagaccctggccagccctgagcagctggagaagttccagagctgcctgagccctgaggagcccgcccctgagagcccccaggtgcctgaggcccctgggggcagcgctgtgtag

SEQ ID NO: 143392 - DNA, 333 bp, Artificial Sequence
  derived and/or modified sequence
atggccttccagcccccctacagcagcagcctgttccggaagcgggataatgcatctggcgcctccgtggtcgcaatagacaacaaaatcgaacaggcaatggacctggtgaagaaccatttgatgtatgccgtacgggaggaagtcgagatattaaaagagcaaattagagagttagttgagaaaaatagtcagttggaaagagagaatacgttgctcaaaactttagcctcacctgagcaactagagaagttccagagctgcctaagcccagaagagcctgccccggagtctccgcaagtgcccgaggccccaggcgggagtgccgtctag

SEQ ID NO: 143393 - DNA, 405 bp, Artificial Sequence
  derived and/or modified sequence
atgaacaccgagatgtaccagacccccatggaggtggccgtgtaccaactgcataacttctcgattagtttcttctcatccctgctgggaggtgacgtcgtcagtgtcaaactggataattccgccagtggggcctccgtagtggccatcgacaacaaaattgaacaggcgatggacttagtgaaaaaccatctgatgtacgctgtcagggaggaggtcgaaattttgaaggagcagattcgggaacttgtcgagaagaactcccaactggaacgtgagaacacactgctgaagaccctggccagtcccgaacagctggagaagttccagtcgtgtctgagtcccgaggaacccgccccagaatctccgcaagttcccgaagcccccggcggatcagcggtctag

SEQ ID NO: 143394 - DNA, 333 bp, Artificial Sequence
  derived and/or modified sequence
atggcctttcagcccccatactcctccagcctatttcgcaagcgagacaatgcaagcggcgcttcagtggtggccatagacaataagattgaacaggcgatggatctggtcaagaatcacctgatgtacgccgtgcgagaggaagtcgaaattctgaaggagcagattcgcgaactggtggagaagaacagccagctggagcgtgaaaacactcttctgaaaaccttggcctctcccgagcaactggaaaagtttcagagttgcctttctcctgaggagcctgccccagagtccccacaagtcccggaagcgccaggaggatctgcggtgtag

SEQ ID NO: 143395 - DNA, 405 bp, Artificial Sequence
  derived and/or modified sequence
atgaatactgagatgtatcaaacaccgatggaagtggccgtgtaccagctgcacaatttttccatcagtttcttttcgagcttgctcgggggtgatgtggtaagtgtcaagttggataattccgctagcggcgcttctgtggttgctatcgataataagattgaacaggctatggacctcgtcaagaatcacctgatgtatgccgtacgtgaggaggtggagattctgaaggaacagattcgagagcttgtcgagaagaactcacagctggaacgggagaatacgctcctgaagaccttggctagccctgagcagttggagaaattccagagttgcctgtcacccgaagagcctgcgccagaaagcccacaggttcctgaggctccagggggatctgcggtctag

SEQ ID NO: 143396 - DNA, 1216 bp, Artificial Sequence
  derived and/or modified sequence
aattgctagagctgcttttccaagacagtgtccatctctccaccaagattctccttgggctccctcccactcatcatcgccttctgcatctgcatctgcattctcctccccattttcctgcccctgaaattcggagctctgggccctggccatgcagggcagttcacatgatccacagagaacaaggcactttctctttctctgtctttccttcttgcttccctccttctggactttggggattttccatgaaaccaaagtaactatgtaagtggcagtggccttcctgtctatagtctcccacactggagtggaaccagaagggaagagagaagataagcgagaagcaaggacaaattaaaccatggcatttcagcctccttattcctccagcctcttcagaaaaagggacaatgcctccggagccagcgtggtggccatagacaacaagatcgaacaggccatggatctggtgaagaatcatctgatgtatgctgtgagagaggaggtggagatcctgaaggagcagatccgagagctggtggagaagaactcccagctagagcgtgagaacaccctgttgaagaccctggcaagcccagagcagctggagaagttccagtcctgtctgagccctgaagagccagctcccgaatccccacaagtgcccgaggcccctggtggttctgcggtgtaagtggctctgtcctcagggtgggcagagccactaaacttgttttacctagttctttccagtttgtttttggctccccaagcatcatctcacgaggagaactttacacctagcacagctggtgccaagagatgtcctaaggacatggccacctgggtccactccagcgacagacccctgacaagagcaggtctctggaggctgagttgcatggggcctagtaacaccaagccagtgagcctctaatgctactgcgccctgggggctcccagggcctgggcaacttagctgcaactggcaaaggagaagggtagtttgaggtgtgacaccagtttgctccagaaagtttaaggggtctgtttctcatctccatggacatcttcaacagcttcacctgacaacgactgttcctatgaagaagccacttgtgttttaagcagaggcaacctctctcttctcctctgtttcgtgaaggcaggggacacagatgggagagattgagccaagtcagccttctgttgg

SEQ ID NO: 143397 - DNA, 1812 bp, Artificial Sequence
  derived and/or modified sequence
acgcaggaaggggggggtcaccgccgctctgggatccgtcatcgaagcgtccctgcggccgctgcgccgtgaaaaccagctgctgcagccgcagaggcagccggaggcagaggggcggcgggcaggaccagacagggctgggcagggggctggccgagcgccgtgcgccgcttgggagaaggccggaagcttaccagccgagaaggaattcctagctagcttcagagccggtgcctccggagccagcgtggtggccatagacaacaagatcgaacaggccatggatctggtgaagaatcatctgatgtatgctgtgagagaggaggtggagatcctgaaggagcagatccgagagctggtggagaagaactcccagctagagcgtgagaacaccctgttgaagaccctggcaagcccagagcagctggagaagttccagtcctgtctgagccctgaagagccagctcccgaatccccacaagtgcccgaggcccctggtggttctgcggtgtaagtggctctgtcctcagggtgggcagagccactaaacttgttttacctagttctttccagtttgtttttggctccccaagcatcatctcacgaggagaactttacacctagcacagctggtgccaagagatgtcctaaggacatggccacctgggtccactccagcgacagacccctgacaagagcaggtctctggaggctgagttgcatggggcctagtaacaccaagccagtgagcctctaatgctactgcgccctgggggctcccagggcctgggcaacttagctgcaactggcaaaggagaagggtagtttgaggtgtgacaccagtttgctccagaaagtttaaggggtctgtttctcatctccatggacatcttcaacagcttcacctgacaacgactgttcctatgaagaagccacttgtgttttaagcagaggcaacctctctcttctcctctgtttcgtgaaggcaggggacacagatgggagagattgagccaagtcagccttctgttggttaatatggtataatgcatggctttgtgcacagcccagtgtgggattacagctttgggatgaccgcttacaaagttctgtttggttagtattggcatagtttttctatatagccataaatgcgtatatatacccatagggctagatctgtatcttagtgtagcgatgtatacatatacacatccacctacatgttgaagggcctaaccagccttgggagtattgactggtcccttacctcttatggctaagtctttgactgtgttcatttaccaagttgacccagtttgtcttttaggttaagtaagactcgagagtaaaggcaaggaggggggccagcctctgaatgcggccacggatgccttgctgctgcaaccctttccccagctgtccactgaaacgtgaagtcctgttttgaatgccaaacccaccattcactggtgctgactacatagaatggggttgagagaagatcagtttgggcttcacagtgtcatttgaaaacgttttttgttttgttttgtaattattgtggaaaactttcaagtgaacagaaggatggtgtcctactgtggatgagggatgaacaaggggatggctttgatccaatggagcctgggaggtgtgcccagaaagcttgtctgtagcgggttttgtgagagtgaacactttccactttttgacaccttatcctgatgtatggttccaggatttggattttgattttccaaatgtagcttgaaatttcaataaactttgctctgtttttctaaaaataaa

SEQ ID NO: 143398 - DNA, 2027 bp, Artificial Sequence
  derived and/or modified sequence
tttgcatggcccctgacgccatgtgacgcagccggctcctcctatataaagaagcaggagccaaaatatctccgagtctgggttggactggcggccgtggagtttgtgacatacgaggtgacacccctcgagtcacttcccttcaactccagctggagcgcctgcttggctttgggttcgttctgcagccttcgccccgctcctagcctcagggccggactccagcgcagagcccagcccagcgcagcctgccagcagccacccagccgcccagccgcccagccccgcacgaaacccggccagagcttcctagcagcccgagccatgaacaccgaaatgtatcagacccccatggaggtggcggtctaccagctgcacaatttctccatctccttcttctcttctctgcttggaggggatgtggtttccgttaagctggacaacagtgcctccggagccagcgtggtggccatagacaacaagatcgaacaggccatggatctggtgaagaatcatctgatgtatgctgtgagagaggaggtggagatcctgaaggagcagatccgagagctggtggagaagaactcccagctagagcgtgagaacaccctgttgaagaccctggcaagcccagagcagctggagaagttccagtcctgtctgagccctgaagagccagctcccgaatccccacaagtgcccgaggcccctggtggttctgcggtgtaagtggctctgtcctcagggtgggcagagccactaaacttgttttacctagttctttccagtttgtttttggctccccaagcatcatctcacgaggagaactttacacctagcacagctggtgccaagagatgtcctaaggacatggccacctgggtccactccagcgacagacccctgacaagagcaggtctctggaggctgagttgcatggggcctagtaacaccaagccagtgagcctctaatgctactgcgccctgggggctcccagggcctgggcaacttagctgcaactggcaaaggagaagggtagtttgaggtgtgacaccagtttgctccagaaagtttaaggggtctgtttctcatctccatggacatcttcaacagcttcacctgacaacgactgttcctatgaagaagccacttgtgttttaagcagaggcaacctctctcttctcctctgtttcgtgaaggcaggggacacagatgggagagattgagccaagtcagccttctgttggttaatatggtataatgcatggctttgtgcacagcccagtgtgggattacagctttgggatgaccgcttacaaagttctgtttggttagtattggcatagtttttctatatagccataaatgcgtatatatacccatagggctagatctgtatcttagtgtagcgatgtatacatatacacatccacctacatgttgaagggcctaaccagccttgggagtattgactggtcccttacctcttatggctaagtctttgactgtgttcatttaccaagttgacccagtttgtcttttaggttaagtaagactcgagagtaaaggcaaggaggggggccagcctctgaatgcggccacggatgccttgctgctgcaaccctttccccagctgtccactgaaacgtgaagtcctgttttgaatgccaaacccaccattcactggtgctgactacatagaatggggttgagagaagatcagtttgggcttcacagtgtcatttgaaaacgttttttgttttgttttgtaattattgtggaaaactttcaagtgaacagaaggatggtgtcctactgtggatgagggatgaacaaggggatggctttgatccaatggagcctgggaggtgtgcccagaaagcttgtctgtagcgggttttgtgagagtgaacactttccactttttgacaccttatcctgatgtatggttccaggatttggattttgattttccaaatgtagcttgaaatttcaataaactttgctctgtttttctaaaaataaa

SEQ ID NO: 143399 - DNA, 576 bp, Artificial Sequence
  derived and/or modified sequence
gggggctggccgagcgccgtgcgccgcttgggagaaggccggaagcttaccagccgagaaggaattcctagctagcttcagagccgggtaggtttgcctgggaccttgtaggccggctgtgggggactccccgggtcgcacagccccattgtttgcatattgcccgagcaggccacggtggcctgcgcgccccaggactcgcaagcagctccgatcggttggaactcggggcggcggcagcagcgctgagccggcctggatgaggagatgcagcttcctgcaggggccaaggaaggatctggggacaaactgtccggaactctgggccagggaggcgagaaggagagagagaggaagagccgaggcagatggaggactttggccacaactgccatgtactcaagagtagaaccgagtgggtaatgggtcgctttgctttttgtcttggcagtgcctccggagccagcgtggtggccatagacaacaagatcgaacaggccatggatctggtgaagaatcatctgatgtatgctgtgagagaggaggtggagatcctgaaggagcagatccgagagc

SEQ ID NO: 143400 - protein, 185 aa, Artificial Sequence
  derived and/or modified sequence
MSGSFELSVQDLNDLLSDGSGCYSLPSQPCNEVTPRIYVGNASVAQDIPKLQKLGITHVLNAAEGRSFMHVNTNANFYKDSGITYLGIKANDTQEFNLSAYFERAADFIDQALAQKNGRVLVHCREGYSRSPTLVIAYLMMRQKMDVKSALSIVRQNREIGPNDGFLAQLCQLNDRLAKEGKLKP

SEQ ID NO: 143401 - protein, 144 aa, Artificial Sequence
  derived and/or modified sequence
MSVAQDIPKLQKLGITHVLNAAEGRSFMHVNTNANFYKDSGITYLGIKANDTQEFNLSAYFERAADFIDQALAQKNGRVLVHCREGYSRSPTLVIAYLMMRQKMDVKSALSIVRQNREIGPNDGFLAQLCQLNDRLAKEGKLKP

SEQ ID NO: 143402 - DNA, 558 bp, Artificial Sequence
  derived and/or modified sequence
atgtccggcagctttgaactgagcgtgcaagacctgaatgacttgttaagcgatggttccggctgttactccttgccaagccagccatgcaatgaagtgacaccgcggatttatgtaggaaatgcctcggtggctcaagatatcccaaagctgcaaaagcttggcatcacacatgttctgaatgctgccgaaggcagaagttttatgcacgtgaatacaaatgcaaatttttacaaggacagcggtattacttacctgggcataaaggccaacgatacccaagagtttaatctctcagcttattttgagagggctgctgacttcattgatcaggcgctcgcccagaaaaatggtagagtgctggtgcattgcagagaaggctacagtcgctcccccacgctggtgatagcatacctgatgatgcggcaaaagatggatgtgaaatcggccctgtcaattgtcaggcagaatagggagattgggccaaatgacggattcctcgcacagctgtgccaactgaatgatcgactggccaaagagggaaaattaaagccttag

SEQ ID NO: 143403 - DNA, 435 bp, Artificial Sequence
  derived and/or modified sequence
atgtctgtggcccaggacattccaaagctccagaagctaggcatcacccatgtgctgaacgcggctgagggcagaagcttcatgcatgtgaatactaatgcaaatttttacaaggattcgggcattacatatctcgggattaaggccaacgatacccaggaattcaacctgtccgcatactttgagagagccgccgactttatcgatcaggctctggcacagaaaaacgggcgagtgctggtccactgtcgcgagggctactctcggtcaccgacgctggtgattgcctatctgatgatgcggcagaaaatggacgttaagtccgctcttagcatcgttcggcagaaccgggaaatagggccaaacgacggcttcctagctcagctatgccagctgaatgatcgcttagccaaagagggcaaacttaaaccttag

SEQ ID NO: 143404 - DNA, 558 bp, Artificial Sequence
  derived and/or modified sequence
atgagcggcagctttgagctgtctgtgcaggacctgaatgacctgctgagtgatggcagcggctgctacagcctgcccagccagccctgcaatgaggtgaccccccgcatctacgtgggcaatgcctctgtggcccaggacatccccaagctgcagaagctgggcatcacccacgtgctgaatgctgctgagggccgctccttcatgcacgtgaacaccaatgccaacttctacaaggacagcggcatcacctacctgggcatcaaggccaatgacacccaggagttcaacctgagcgcctactttgaaagagctgctgacttcatcgaccaggccctggcccagaagaatggccgggtgctggtgcactgccgggagggctacagccgcagccccaccctggtgattgcctacctgatgatgaggcagaagatggatgtgaagagcgccctgagcatcgtgcggcagaaccgggagatcggccccaatgatggcttcctggcccagctgtgccagctgaatgaccggctggccaaggagggcaagctgaagccctag

SEQ ID NO: 143405 - DNA, 435 bp, Artificial Sequence
  derived and/or modified sequence
atgtctgtggcccaggacatccccaagctgcagaagctgggcatcacccacgtgctgaatgctgctgagggccgctccttcatgcacgtgaacaccaatgccaacttctacaaggacagcggcatcacctacctgggcatcaaggccaatgacacccaggagttcaacctgagcgcctactttgaaagagctgctgacttcatcgaccaggccctggcccagaagaatggccgggtgctggtgcactgccgggagggctacagccgcagccccaccctggtgattgcctacctgatgatgaggcagaagatggatgtgaagagcgccctgagcatcgtgcggcagaaccgggagatcggccccaatgatggcttcctggcccagctgtgccagctgaatgaccggctggccaaggagggcaagctgaagccctag

SEQ ID NO: 143406 - DNA, 558 bp, Artificial Sequence
  derived and/or modified sequence
atgagcggcagcttcgagctgagcgtgcaggacctgaacgacctgctgtcagacggctctggatgctatagcttgccatcccaaccatgtaacgaggtgacccctaggatctatgtgggcaacgcctcagttgcacaggatatacctaaactccaaaaactgggtatcacacacgtcctgaatgcagcagaaggacggagcttcatgcacgtgaataccaatgctaatttttacaaagacagcggcatcacctatttgggaatcaaggctaatgatactcaagaatttaatctcagtgcatacttcgagcgagccgcagactttattgatcaggcactagcacaaaaaaacggacgggtgctggttcactgccgcgagggctattctcggagccctactttggtgatcgcctatctgatgatgcgtcagaaaatggatgtcaagagcgctctgagcatcgtgcgccagaaccgagagatcggtcccaacgacggctttcttgctcagctatgccagttaaatgatcgtctggcaaaggagggaaaactcaagccatag

SEQ ID NO: 143407 - DNA, 435 bp, Artificial Sequence
  derived and/or modified sequence
atgagcgtggcccaggacatccccaagctgcagaagctgggcatcactcacgtgctgaacgcagcagaggggcgcagctttatgcatgtgaatactaatgctaacttttacaaagattccggaatcacgtatcttggcatcaaagccaatgacactcaggagttcaacttgagcgcgtacttcgagcgtgccgccgacttcatcgaccaggcactggcccaaaagaatggacgagtactggtccactgcagagaggggtattcccggtcgcctacgctggtgattgcctatctgatgatgaggcagaaaatggacgtgaagagcgctctgagcatcgtgaggcagaacagagaaatcggccccaatgatggattcctggctcaactgtgtcagctgaacgaccggctggctaaggaggggaagctgaaaccttag

SEQ ID NO: 143408 - DNA, 558 bp, Artificial Sequence
  derived and/or modified sequence
atgtcaggcagttttgagctgagtgttcaggacctgaacgatctacttagcgacggatccgggtgttactcactcccttctcagccatgcaatgaggtcaccccacgaatttacgtgggcaacgctagtgtggcccaagatatccccaagttgcagaagctaggcattacgcacgtattaaatgcggctgagggccgaagctttatgcatgtgaacacaaacgccaatttttacaaggacagtggaatcacatatttgggtatcaaagctaacgacacccaggagttcaatctcagtgcctacttcgagcgtgccgctgattttatagaccaggctctcgcccagaaaaacggaagggtcctggtgcactgccgtgaaggatattcacgaagcccaaccctagttatcgcttatttaatgatgcggcagaagatggacgtgaaaagtgccctgtcaatcgtaagacagaacagggaaatcggtccaaatgacggcttcctggcacaactctgccaattgaatgaccgcctcgcaaaagaaggaaagctgaagccctag

SEQ ID NO: 143409 - DNA, 435 bp, Artificial Sequence
  derived and/or modified sequence
atgtccgttgcccaggacatcccaaagctgcagaagctcggcatcacccatgtcttaaatgcagcagaagggcgatcgttcatgcacgttaacactaacgcaaacttctataaggatagtggtattacctacctgggaataaaggccaacgacacccaggaatttaatttatcagcatacttcgagagggccgcagactttatcgatcaggcactcgctcaaaagaatggaagggtgctggttcattgtcgagagggctatagtcgctcacctaccctggtgatcgcatatctgatgatgcgacagaaaatggacgtgaagtctgccctgtccatcgtgcgccaaaatcgggagatcggcccaaatgacgggttcctggctcaactttgccaactgaacgaccggcttgcaaaggagggcaagctgaaaccatag

SEQ ID NO: 143410 - DNA, 558 bp, Artificial Sequence
  derived and/or modified sequence
atgagcggcagcttcgagctgagcgtgcaggacctgaacgacctgctgagcgacggcagcggctgctacagcctgcccagccagccctgcaacgaggtgacccccagaatctacgtgggcaacgccagcgtggcccaggacatccccaagctgcagaagctgggcatcacccacgtgctgaacgccgccgagggcagaagcttcatgcacgtgaacaccaacgccaacttctacaaggacagcggcatcacctacctgggcatcaaggccaacgacacccaggagttcaacctgagcgcctacttcgagagagccgccgacttcatcgaccaggccctggcccagaagaacggcagagtgctggtgcactgcagagagggctacagcagaagccccaccctggtgatcgcctacctgatgatgagacagaagatggacgtgaagagcgccctgagcatcgtgagacagaacagagagatcggccccaacgacggcttcctggcccagctgtgccagctgaacgacagactggccaaggagggcaagctgaagccctag

SEQ ID NO: 143411 - DNA, 435 bp, Artificial Sequence
  derived and/or modified sequence
atgagcgtggcccaggacatccccaagctgcagaagctgggcatcacccacgtgctgaacgccgccgagggcagaagcttcatgcacgtgaacaccaacgccaacttctacaaggacagcggcatcacctacctgggcatcaaggccaacgacacccaggagttcaacctgagcgcctacttcgagagagccgccgacttcatcgaccaggccctggcccagaagaacggcagagtgctggtgcactgcagagagggctacagcagaagccccaccctggtgatcgcctacctgatgatgagacagaagatggacgtgaagagcgccctgagcatcgtgagacagaacagagagatcggccccaacgacggcttcctggcccagctgtgccagctgaacgacagactggccaaggagggcaagctgaagccctag

SEQ ID NO: 143412 - DNA, 4121 bp, Artificial Sequence
  derived and/or modified sequence
gcgagcccccgcccagctgatccgccgctctccgcctcgcttgctcctgccgggcgtgcagggccccgccgccgccatgtcgggctcgttcgagctctcggtgcaggatctcaacgacctgctctcggacggcagcggctgctacagcctcccgagccagccctgcaacgaggtcaccccgcggatctacgtgggcaacgcgtctgtggctcaggacatccccaagctgcagaaactaggcatcacccatgtgctgaacgcggctgagggcaggtccttcatgcacgtcaacaccaatgccaacttctacaaggactccggcatcacatacctgggcatcaaggccaacgacacacaggagttcaacctcagcgcttactttgaaagggctgccgacttcattgaccaggctttggctcaaaagaatggccgggtgctcgtccactgccgggaaggttatagccgctccccaacgctagttatcgcctacctcatgatgcggcagaagatggacgtcaagtctgccctgagcatcgtgaggcagaaccgtgagatcggccccaacgatggcttcctggcccagctctgccagctcaatgacagactagccaaggaggggaagttgaaaccctagggcacccccaccacctctgctcgagaggtccgtgggggaggccgtgggcaaaggtgtcccgagctgccatgtttaggaaacacactgtaccctgctcccagcatcacaaggcacttgtctacaagtgtgtcccaacacagtcctgggccactttccccaccctggggagcacataaagaagcttgccaaggggggcgtccttgctccccagttgtcctgtttctgtaacttatgatgtcttttccctgagatgggggctcagagggggaaggcctgtggcctgcatgcttcccgatggcccacggcaggaggtgtgtggaagtgtaaggcctaagatgctcacagaggtccctcatgacctcccttccccaactcccgaatcctctcttgagtgtggacctcaacaccttgagccctagtaaaggaactatgcaaatgcaggccactctccccaccacgtctgtgccctgcactgtccccacagccttccacaccctgtgcataggcagccctctcacgtcttgaggtccgaagctggggtgggggtgtccgtcagttattagtggatggagattcccacagcaaggctgcatttgaatgatttccttaggatgaatggtccctacacaaagaggccttgtgggcaaacctggagaaccctcctaaatccatagagttttcaaaatgtgaatctttggaagccttgagttcagaatctgctgctctggaatatttcccttcgatcttatctcagtcacttcgtttttgagaagagtgatgccttgggcatgcttttttttttttcttttttagaaaacagggagttgaagtccaacctatttaaaaaccccaccatttggagaattacaagggttttgtcctgaattgtagtgttggcaagcccaagccactcgtgctaactgctttttgtctcggttgctattccaagaacagaaggaggaagttggccaattacagcgtgtgtgcatggatgtgtgtggggggcgtgcctctcagaaacgcggccagaagacaagcagggaagtgaaaggtcccaggcacacaccctgcccattgcaggtggctcttacagctctctggtgccagcacgggatccctgaagtgactcagccaggcagacatgagacatggcggagtgtccaaatggatcctttattggtggtagagcaaaaaaacccaaacacgataaacctttcaaaagactttctaaggatgatattggaatgcaccagccctcacatgtgtatgcacatttgccagaatataagagttttgttttaaatacagtcttgttaggattttacgttattgttattatggaaagtgattgtgatgctatttatcttcagggtcactctgggcaaagagaaggtcctcagccatgcccccagcaccttgcacataggtgtctgataaaagtttaagaaagtaaacactttttgagcaccaaatatatatagggcattgttctggtgggtgtgtcacgctcccagaagactgaattcatggtaggatcactcgcaaggccttgtgaaggagtcttacctaaaacgaaagaaatatcagggacttttgttgactatttacaactcagttttacatttaaattcaggcagtgttaatatgccaaggtagggaatgtgcctttttcagagttggccaggagctcctggctgggacacggagaggcaggtgtggcgtaaggcctcactcccggctgggaaggtctctgatcacacagaagcagccctgcccagcctggtcatttgctgtccgcttttctctgtgaccacagcagccctgaacaaccagtatgtgtcttcttctccagatagtgaaaaaggtgtccagataaacccacctaagtgaaatggccatcctctaaactgggtacctcactgcacagcttctaggtagccttccaacttaatctaacttgagcctcacagtaaccctgtaaagttagtagagcttgttcttgtattgtgaccttttttaaaaaaaaggaactgaggttcagaatgattaagggcctggcccccagggttgtccagctccataaggtggagctgggcaagattttgggtttgctgctccctgaagctggattctttcatacgatactctttctcaagaagggggctccctgggatctccaggtgtactgcacttaccctcaatccagccccggagaagcaagtgaaaagggtgggtccctcataggctagaatgtgcagctctttctccaggtgggatgtagcaccccgaagtagagctttctgctctgctcctggaaaaggctagggagctggggctggggctcccctcccatgaccaggcagtggtcaccccatgggacaggcacagctacttacgcgaacacagcaggttggtgtggctggctaactaggacctctcgaaagtctctgtgggggcatgagggagaaaaggccattgggagaattactgcctttactttgggactacttttatgctgataacttgggatttcttgatagtccttcacccctgaaaccccgtatttacttaacaagatttagctcttagttcttcaagtaaaattaaagtctcttgtgtaagagccaacacatgcccagctgcggatgggagctgttcctggacagccttctactgcctgggaagtgatggaacaggaactcagggtgcccttaccccctccccagacctgttccctttctttgactgacagagcaccatccaggcaaaattagagcgccaaatggttttcttctcaatcttaaagcagtatacctttccacaggctcgtctgtgtccctgccactctgagttatccagaaaccaccacctacaaatgaggggactcatctagaagacctctaaggtccccttttggctctgaggggtctctaataatccccacttggaattcagcaccgcaaggaaattatgggtatgtgagccataatatgatgggcagcaggtggcgctgccttccacccatggtgatggatggtttggaaagggaatgttggtgccttttgtgccacaagttaagatgctactgttttaaaggaaaaaaaaaaaaaaaagtactgatcttcaatatgaagacatgagcttttctcgcaggaaattttctttttcacagaactggtgtcaggaatcactgaagggctaaccgtgatagtccttgcaagtaagtcaaggttttatcctgattggaaatagaagacatttccggttgagagaacagattcgttggaagcttaacttttgttgcctcttaacgccaccaaattttagggtaatttgattatgaaagagtgaatttttctggacagaaaagggagagctaccaaattgtttttttctttttaaaaggaagtttaatgtccgttgtatcacaaatcagtgttaaaacaccagaactttagccaaaataaatgtcttacattacaaaggt

SEQ ID NO: 143413 - DNA, 2073 bp, Artificial Sequence
  derived and/or modified sequence
ccccgccgccgccatgtcgggctcgttcgagctctcggtgcaggatctcaacgacctgctctcggacggcagcggctgctacagcctcccgagccagccctgcaacgaggtcaccccgcggatctacgtgggcaacgctaagaatgtctaatcagcaggaaagaaccagtgttaacattctgagatgtgaaataggagcctcaagaaagaatatattagcatgcctgtacagccttggaaagcctcaagttggattttcacgatactctgaggacccagttaccaaaatcctaagcttcatggctcagcccaaggatggcatgttgaaaactcaaaactaaccctcctcccattttacagaggaggaaatggtggctcagagtgtgtgagggactacaaggacagggtcaatgtcttgttcatgtctgtggctcaggacatccccaagctgcagaaactaggcatcacccatgtgctgaacgcggctgagggcaggtccttcatgcacgtcaacaccaatgccaacttctacaaggactccggcatcacatacctgggcatcaaggccaacgacacacaggagttcaacctcagcgcttactttgaaagggctgccgacttcattgaccaggctttggctcaaaagaatggccgggtgctcgtccactgccgggaaggttatagccgctccccaacgctagttatcgcctacctcatgatgcggcagaagatggacgtcaagtctgccctgagcatcgtgaggcagaaccgtgagatcggccccaacgatggcttcctggcccagctctgccagctcaatgacagactagccaaggaggggaagttgaaaccctagggcacccccaccacctctgctcgagaggtccgtgggggaggccgtgggcaaaggtgtcccgagctgccatgtttaggaaacacactgtaccctgctcccagcatcacaaggcacttgtctacaagtgtgtcccaacacagtcctgggccactttccccaccctggggagcacataaagaagcttgccaaggggggcgtccttgctccccagttgtcctgtttctgtaacttatgatgtcttttccctgagatgggggctcagagggggaaggcctgtggcctgcatgcttcccgatggcccacggcaggaggtgtgtggaagtgtaaggcctaagatgctcacagaggtccctcatgacctcccttccccaactcccgaatcctctcttgagtgtggacctcaacaccttgagccctagtaaaggaactatgcaaatgcaggccactctccccaccacgtctgtgccctgcactgtccccacagccttccacaccctgtgcataggcagccctctcacgtcttgaggtccgaagctggggtgggggtgtccgtcagttattagtggatggagattcccacagcaaggctgcatttgaatgatttccttaggatgaatggtccctacacaaagaggccttgtgggcaaacctggagaaccctcctaaatccatagagttttcaaaatgtgaatctttggaagccttgagttcagaatctgctgctctggaatatttcccttcgatcttatctcagtcacttcgtttttgagaagagtgatgccttgggcatgcttttttttttttcttttttagaaaacagggagttgaagtccaacctatttaaaaaccccaccatttggagaattacaagggttttgtcctgaattgtagtgttggcaagcccaagccactcgtgctaactgctttttgtctcggttgctattccaagaacagaaggaggaagttggccaattacagcgtgtgtgcatggatgtgtgtggggggcgtgcctctcagaaacgcggccagaagacaagcagggaagtgaaaggtcccaggcacacaccctgcccattgcaggtggctcttacagctctctggtgccagcacgggatccctgaagtgactcagccaggcagacatgagacatggcggagtgtccaaatggatcctttattggtggtagagcaaaaaaacccaaacacgataaacctttc

SEQ ID NO: 143414 - protein, 290 aa, Artificial Sequence
  derived and/or modified sequence
MAALRVLLSCVRGPLRPPVRCPAWRPFASGANFEYIIAEKRGKNNTVGLIQLNRPKALNALCDGLIDELNQALKTFEEDPAVGAIVLTGGDKAFAAGADIKEMQNLSFQDCYSSKFLKHWDHLTQVKKPVIAAVNGYAFGGGCELAMMCDIIYAGEKAQFAQPEILIGTIPGAGGTQRLTRAVGKSLAMEMVLTGDRISAQDAKQAGLVSKICPVETLVEEAIQCAEKIASNSKIVVAMAKESVNAAFEMTLTEGSKLEKKLFYSTFATDDRKEGMTAFVEKRKANFKDQ

SEQ ID NO: 143415 - DNA, 873 bp, Artificial Sequence
  derived and/or modified sequence
atggctgccctgcgagtgttgctcagctgcgtccgagggccccttaggccaccagttcgttgtccagcatggcgcccgttcgccagtggcgctaatttcgagtatatcatcgctgaaaagaggggtaaaaacaatacagttggattgatccagcttaaccggcctaaagcccttaacgcgctgtgcgatgggctgatcgatgaacttaatcaggccctgaagacgttcgaagaagatcctgccgtgggggccatcgtgttgactggtggcgacaaggctttcgctgccggggctgacatcaaggagatgcaaaatttgtctttccaagattgctactcctccaagtttctgaaacattgggaccatctaactcaggtaaagaaacccgtcattgccgcagtcaacggttatgctttcgggggtggctgcgaactggccatgatgtgcgatatcatctacgctggcgaaaaggcacaattcgcccaaccagaaattcttatcgggaccatacctggggctggcggtactcagcgattgactcgcgctgtcggaaaatccttggcgatggagatggttctgaccggcgatcggatctctgcgcaagacgcaaagcaggctgggcttgtttccaaaatatgtcccgtggagacactggtagaagaggccatccagtgtgccgagaagattgcctcaaacagtaagattgttgtggcaatggccaaagaatctgttaacgctgcctttgaaatgactctgaccgaaggatctaaactggagaagaaactcttttatagcacgttcgctacggacgatagaaaagaaggaatgacagcgtttgtcgagaagagaaaagccaacttcaaagatcaatag

SEQ ID NO: 143416 - DNA, 873 bp, Artificial Sequence
  derived and/or modified sequence
atggccgccctgcgggtgctgctgagctgtgtgcggggccccctgcggccccctgtgcgctgcccagcctggaggccctttgccagcggggccaactttgagtacatcatcgccgagaagaggggcaagaacaacacagtgggcctcatccagctgaaccggcccaaggccctgaatgccctgtgtgatggcctgattgatgagctgaaccaggccctgaagacctttgaggaggaccctgctgtgggcgccatcgtgctgaccggcggggacaaggcctttgctgctggagctgacatcaaggagatgcagaacctgtccttccaggactgctacagcagcaagttcctgaagcactgggaccacctgacccaggtgaagaagcctgtgattgctgctgtgaatggctacgcctttggaggcggctgtgagctggccatgatgtgtgacatcatctatgctggggagaaggcccagtttgcccagcctgagatcctgattggcaccatccctggagctgggggcacccagaggctgaccagggctgtgggcaagagcctggccatggagatggtgctgaccggggaccgcatcagcgcccaggatgccaagcaggccggcctggtgtccaagatctgccctgtggagaccctggtggaggaggccatccagtgtgccgagaagatcgccagcaacagcaagatcgtggtggccatggccaaggagagcgtgaatgctgcctttgagatgaccctgacagagggcagcaagctggagaagaagctgttctacagcacctttgccacagatgacaggaaggagggcatgacagcctttgtggagaagaggaaggccaacttcaaggaccagtag

SEQ ID NO: 143417 - DNA, 873 bp, Artificial Sequence
  derived and/or modified sequence
atggccgccctgcgggtgctgctgagctgcgtgcggggccccctgcggccccccgttcgctgtcctgcctggcgccctttcgcatctggagcgaattttgagtacatcattgccgagaagcggggaaagaacaacacagtgggcctgattcagttgaatagacccaaggcgctgaatgccctctgtgatggactgattgatgagctgaaccaggcgcttaaaaccttcgaagaggatcccgctgttggagccattgtgctgactgggggggacaaggcatttgctgccggagccgacatcaaagaaatgcagaacctcagtttccaggattgttactcctccaaatttttgaagcactgggaccacctgactcaagtcaaaaagcctgtgatcgcagctgtgaacgggtacgcttttggtggcggctgcgagttggcaatgatgtgcgatatcatctatgctggcgagaaggcacagttcgcacagcctgaaatcctcattggtacaataccgggcgctggggggacgcaacggctcacacgggccgtgggcaagtcactggccatggagatggtcctaaccggcgatcgcatctccgcccaagatgccaagcaggcgggtctggtctctaaaatttgtcccgtggagaccttggtcgaggaggcgatccagtgtgctgaaaaaattgcctccaatagcaaaattgtggtcgcaatggccaaggagagcgttaatgcagctttcgagatgaccctgacagagggctccaagctcgagaaaaaactgttctattcgacgtttgcaacagatgatcgaaaggaagggatgaccgctttcgtggagaagagaaaagccaacttcaaagaccaatag

SEQ ID NO: 143418 - DNA, 873 bp, Artificial Sequence
  derived and/or modified sequence
atggcggctctgagggtgctcctttcatgtgtgcgtggacccttgcgcccaccggtaaggtgtcccgcatggcgaccgttcgcttcgggagccaatttcgaatacataatagcagaaaaaaggggcaaaaacaacacagtgggcctgatacagctcaatagacccaaggccctgaacgctctctgcgacggactcatcgacgagctaaaccaggccctcaaaacgtttgaggaggatcccgcagtaggagccattgttctgaccggtggagacaaggcctttgcggctggcgcagatattaaagagatgcaaaatctgtcatttcaggattgctattcttcgaaatttcttaagcattgggaccatctgacccaggtaaaaaagcctgtgatcgctgccgttaacggatacgcgttcgggggaggatgcgaacttgctatgatgtgtgacatcatctatgcaggggaaaaagcccagttcgctcagccagaaattctaatcgggaccatacctggagcaggcggtacccaacgcctgacacgagcagtcggcaagtcattggctatggagatggtgctcacgggggatcgaatttcagctcaggacgcaaagcaagctggcctcgtcagtaaaatctgccctgtcgagaccctggtggaggaagctattcaatgtgccgagaaaatagctagcaactctaagattgtggtggccatggctaaggagagtgtgaacgcggcatttgagatgactctcactgaaggctccaagttggaaaagaaattgttttactccacattcgcgaccgatgatcgtaaagagggcatgactgccttcgtggagaaacgaaaggccaactttaaggaccagtag

SEQ ID NO: 143419 - DNA, 873 bp, Artificial Sequence
  derived and/or modified sequence
atggccgccctgagagtgctgctgagctgcgtgagaggccccctgagaccccccgtgagatgccccgcctggagacccttcgccagcggcgccaacttcgagtacatcatcgccgagaagagaggcaagaacaacaccgtgggcctgatccagctgaacagacccaaggccctgaacgccctgtgcgacggcctgatcgacgagctgaaccaggccctgaagaccttcgaggaggaccccgccgtgggcgccatcgtgctgaccggcggcgacaaggccttcgccgccggcgccgacatcaaggagatgcagaacctgagcttccaggactgctacagcagcaagttcctgaagcactgggaccacctgacccaggtgaagaagcccgtgatcgccgccgtgaacggctacgccttcggcggcggctgcgagctggccatgatgtgcgacatcatctacgccggcgagaaggcccagttcgcccagcccgagatcctgatcggcaccatccccggcgccggcggcacccagagactgaccagagccgtgggcaagagcctggccatggagatggtgctgaccggcgacagaatcagcgcccaggacgccaagcaggccggcctggtgagcaagatctgccccgtggagaccctggtggaggaggccatccagtgcgccgagaagatcgccagcaacagcaagatcgtggtggccatggccaaggagagcgtgaacgccgccttcgagatgaccctgaccgagggcagcaagctggagaagaagctgttctacagcaccttcgccaccgacgacagaaaggagggcatgaccgccttcgtggagaagagaaaggccaacttcaaggaccagtag

SEQ ID NO: 143420 - DNA, 1617 bp, Artificial Sequence
  derived and/or modified sequence
cggcgcagagcccggcaggcgccgccgttgcctccgcctccgcgcggtctccccggggccagctgggaccccgagggctggggcgggggcgggggcgcgggcgactgcggcggggcctggagggcgctggtcccagcccagggcggggtcccggggacgcccctcggccttagatccgcgagcggcagctcgggcctgggggcggggcctggcggagagcgacccgctcactctgcccgggctgatctcgcgagggccgcctggtctcgcggcgctggcctgtgggcggagcgagccctgaaaggctataggcgagggggcggctccgcggggccgggcgaggagtccagagagccatggccgccctgcgtgtcctgctgtcctgcgtccgcggcccgctgaggcccccggttcgctgtcccgcctggcgtcccttcgcctcgggtgctaactttgagtacatcatcgcagaaaaaagagggaagaataacaccgtggggttgatccaactgaaccgccccaaggccctcaatgcactttgcgatggcctgattgacgagctcaaccaggccctgaagaccttcgaggaggacccggccgtgggggccattgtcctcaccggcggggataaggcctttgcagctggagctgatatcaaggaaatgcagaacctgagtttccaggactgttactccagcaagttcttgaagcactgggaccacctcacccaggtcaagaagccagtcatcgctgctgtcaatggctatgcctttggcgggggctgtgagcttgccatgatgtgtgatatcatctatgccggtgagaaggcccagtttgcacagccggagatcttaataggaaccatcccaggtgcgggcggcacccagagactcacccgtgctgttgggaagtcgctggcgatggagatggtcctcactggtgaccggatctcagcccaggacgccaagcaagcaggtcttgtcagcaagatttgtcctgttgagacactggtggaagaagccatccagtgtgcagaaaaaattgccagcaattctaaaattgtagtagcgatggccaaagaatcagtgaatgcagcttttgaaatgacattaacagaaggaagtaagttggagaagaaactcttttattcaacctttgccactgatgaccggaaagaagggatgaccgcgtttgtggaaaagagaaaggccaacttcaaagaccagtgagaaccagctgcccctgcttcacacctctgcttggagaggacaagtgcagcctgtcagttttagaagcaagtaaatcatcctcttttcaagagcagtgtccgtggtgtgcagttcctctccaattgctgcgtggtcgtggcccgacctctcacggcatgacagccttcgtcacccagcctgtgagggtcctgactggagcaccttctaaatctaagattctgctgaggagcccccgctggtccctctgggcatgctgtgctcggacggaaagcggggcctgcgggtccttgtgtccctgccgctgaagaatggggctgctctgagggaaacgctgtctgctgccttcatacagatgctgattaaagtgatagcgattcagattacacca

SEQ ID NO: 143421 - protein, 333 aa, Artificial Sequence
  derived and/or modified sequence
MAVRRDSVWKYCWGVLMVLCRTAISKSIVLEPIYWNSSNSKFLPGQGLVLYPQIGDKLDIICPKVDSKTVGQYEYYKVYMVDKDQADRCTIKKENTPLLNCAKPDQDIKFTIKFQEFSPNLWGLEFQKNKDYYIISTSNGSLEGLDNQEGGVCQTRAMKILMKVGQDASSAGSTRNKDPTRRPELEAGTNGRSSTTSPFVKPNPGSSTDGNSAGHSGNNILGSEVALFAGIASGCIIFIVIIITLVVLLLKYRRRHRKHSPQHTTTLSLSTLATPKRSGNNNGSEPSDIIIPLRTADSVFCPHYEKVSGDYGHPVYIVQEMPPQSPANIYYKV

SEQ ID NO: 143422 - DNA, 1002 bp, Artificial Sequence
  derived and/or modified sequence
atggccgtgagaagagacagcgtgtggaagtactgctggggcgtgctgatggtgctgtgcagaaccgccatcagcaagagcatcgtgctggagcccatctactggaacagcagcaacagcaagttcctgcccggccagggcctggtgctgtacccccagatcggcgacaagctggacatcatctgccccaaggtggacagcaagaccgtgggccagtacgagtactacaaggtgtacatggtggacaaggaccaggccgacagatgcaccatcaagaaggagaacacccccctgctgaactgcgccaagcccgaccaggacatcaagttcaccatcaagttccaggagttcagccccaacctgtggggcctggagttccagaagaacaaggactactacatcatcagcaccagcaacggcagcctggagggcctggacaaccaggagggcggcgtgtgccagaccagagccatgaagatcctgatgaaggtgggccaggacgccagcagcgccggcagcaccagaaacaaggaccccaccagaagacccgagctggaggccggcaccaacggcagaagcagcaccaccagccccttcgtgaagcccaaccccggcagcagcaccgacggcaacagcgccggccacagcggcaacaacatcctgggcagcgaggtggccctgttcgccggcatcgccagcggctgcatcatcttcatcgtgatcatcatcaccctggtggtgctgctgctgaagtacagaagaagacacagaaagcacagcccccagcacaccaccaccctgagcctgagcaccctggccacccccaagagaagcggcaacaacaacggcagcgagcccagcgacatcatcatccccctgagaaccgccgacagcgtgttctgcccccactacgagaaggtgagcggcgactacggccaccccgtgtacatcgtgcaggagatgcccccccagagccccgccaacatctactacaaggtgtag

SEQ ID NO: 143423 - DNA, 4447 bp, Artificial Sequence
  derived and/or modified sequence
gaccgctggagctgcgcagcgcgcctcggagctgcctgcgggcgcacgccgtcttccccgccagtctgccccggaggattgggggtcccagcctgcgtcccgtcagtcccttcttggcccggagtgcgcggagctgggagtggcttcgccatggctgtgagaagggactccgtgtggaagtactgctggggtgttttgatggttttatgcagaactgcgatttccaaatcgatagttttagagcctatctattggaattcctcgaactccaaatttctacctggacaaggactggtactatacccacagataggagacaaattggatattatttgccccaaagtggactctaaaactgttggccagtatgaatattataaagtttatatggttgataaagaccaagcagacagatgcactattaagaaggaaaatacccctctcctcaactgtgccaaaccagaccaagatatcaaattcaccatcaagtttcaagaattcagccctaacctctggggtctagaatttcagaagaacaaagattattacattatatctacatcaaatgggtctttggagggcctggataaccaggagggaggggtgtgccagacaagagccatgaagatcctcatgaaagttggacaagatgcaagttctgctggatcaaccaggaataaagatccaacaagacgtccagaactagaagctggtacaaatggaagaagttcgacaacaagtccctttgtaaaaccaaatccaggttctagcacagacggcaacagcgccggacattcggggaacaacatcctcggttccgaagtggccttatttgcagggattgcttcaggatgcatcatcttcatcgtcatcatcatcacgctggtggtcctcttgctgaagtaccggaggagacacaggaagcactcgccgcagcacacgaccacgctgtcgctcagcacactggccacacccaagcgcagcggcaacaacaacggctcagagcccagtgacattatcatcccgctaaggactgcggacagcgtcttctgccctcactacgagaaggtcagcggcgactacgggcacccggtgtacatcgtccaggagatgcccccgcagagcccggcgaacatttactacaaggtctgagagggaccctggtggtacctgtgctttcccagaggacacctaatgtcccgatgcctcccttgagggtttgagagcccgcgtgctggagaattgactgaagcacagcaccgggggagagggacactcctcctcggaagagcccgtcgcgctggacagcttacctagtcttgtagcattcggccttggtgaacacacacgctccctggaagctggaagactgtgcagaagacgcccattcggactgctgtgccgcgtcccacgtctcctcctcgaagccatgtgctgcggtcactcaggcctctgcagaagccaagggaagacagtggtttgtggacgagagggctgtgagcatcctggcaggtgccccaggatgccacgcctggaagggccggcttctgcctggggtgcatttcccccgcagtgcataccggacttgtcacacggacctcgggctagttaaggtgtgcaaagatctctagagtttagtccttactgtctcactcgttctgttacccagggctctgcagcacctcacctgagacctccactccacatctgcatcactcatggaacactcatgtctggagtcccctcctccagccgctggcaacaacagcttcagtccatgggtaatccgttcatagaaattgtgtttgctaacaaggtgccctttagccagatgctaggctgtctgcgaagaaggctaggagttcatagaagggagtggggctggggaaagggctggctgcaattgcagctcactgctgctgcctctgaaacagaaagttggaaaggaaaaaagaaaaaagcaattaggtagcacagcactttggttttgctgagatcgaagaggccagtaggagacacgacagcacacacagtggattccagtgcatggggaggcactcgctgttatcaaatagcgatgtgcaggaagaaaagcccctcttcattccggggaacaaagacgggtattgttgggaaaggaacaggcttggagggaagggagaaagtaggccgctgatgatatattcgggcaggactgttgtggtactggcaataagatacacagctccgagctgtaggagagtcggtctgctttggatgattttttaagcagactcagctgctatacttatcacattttattaaacacagggaaagcatttaggagaatagcagagagccaaatctgacctaaaagttgaaaagccaaaggtcaaacaggctgtaattccatcatcatcgttgttattaaagaatccttatctataaaaggtaggtcagatccccctccccccaggttcctccttcccctcccgattgagccttacgacactttggtttatgcggtgctgtccgggtgccagggctgcagggtcggtactgatggaggctgcagcgcccggtgctctgtgtcaaggtgaagcacatacggcagacctcttagagtccttaagacggaagtaaattatgatgtccagggggagaaggaagataggacgtatttataataggtatatagaacacaagggatataaaatgaaagatttttactaatatatattttaaggttgcacacagtacacaccagaagatgtgaaattcatttgtggcaattaagtggtcccaatgctcagcgcttaaaaaaacaaattggacagctacttctgggaaaaacaacatcattccaaaaagaacaataatgagagcaaatgcaaaaataaccaagtcctccgaaggcatctcacggaaccgtagactaggaagtacgagccccacagagcaggaagccgatgtgactgcatcatatatttaacaatgacaagatgttccggcgtttatttctgcgttgggttttcccttgccttatgggctgaagtgttctctagaatccagcaggtcacactgggggcttcaggtgacgatttagctgtggctccctcctcctgtcctcccccgcaccccctcccttctgggaaacaagaagagtaaacaggaaacctactttttatgtgctatgcaaaatagacatctttaacatagtcctgttactatggtaacactttgctttctgaattggaagggaaaaaaaatgtagcgacagcattttaaggttctcagacctccagtgagtacctgcaaaaatgagttgtcacagaaattatgatcctctatttcctgaacctggaaatgatgttggtccaaagtgcgtgtgtgtatgtgtgagtgggtgcgtggtatacatgtgtacatatatgtataatatatatctacaatatatattatatatatctatatcatatttctgtggagggttgccatggtaaccagccacagtacatatgtaattctttccatcaccccaacctctcctttctgtgcattcatgcaagagtttcttgtaagccatcagaagttacttttaggatgggggagaggggcgagaaggggaaaaatgggaaatagtctgattttaatgaaatcaaatgtatgtatcatcagttggctacgttttggttctatgctaaactgtgaaaaatcagatgaattgataaaagagttccctgcaaccaattgaaaagtgttctgtgcgtctgttttgtgtctggtgcagaatatgacaatctaccaactgtccctttgtttgaagttggtttagctttggaaagttactgtaaatgccttgcttgtatgatcgtccctggtcacccgactttggaatttgcaccatcatgtttcagtgaagatgctgtaaataggttcagattttactgtctatggatttggggtgttacagtagccttattcacctttttaataaaaatacacatgaaaacaagaaagaaatggcttttcttacccagattgtgtacatagagcaatgttggttttttataaagtctaagcaagatgttttgtataaaatctgaattttgcaatgtatttagctacagcttgtttaacggcagtgtcattcccctttgcactgtaatgaggaaaaaatggtataaaaggttgccaaattgctgcatatttgtgccgtaattatgtaccatgaatatttatttaaaatttcgttgtccaatttgtaagtaacacagtattatgcctgagttataaatatttttttctttctttgttttattttaatagcctgtcataggttttaaatctgctttagtttcacattgcagttagccccagaaaatgaaatccgtgaagtcacattccacatctgtttcaaactgaatttgttcttaaaaaaataaaatatttttttcctatggaaaaa

SEQ ID NO: 143424 - DNA, 1002 bp, Artificial Sequence
  derived and/or modified sequence
atggctgtaaggcgagacagcgtttggaagtattgctggggcgtgcttatggtgctgtgtcgtactgccatcagcaagtcaattgtgcttgagccgatttattggaacagctctaacagtaagtttctgcctggccagggcctagtgctatatcctcaaatcggggacaagttagacattatctgcccgaaagttgattcaaagacagtaggacaatatgaatactataaggtgtatatggtagacaaggatcaagctgatagatgtacgatcaaaaaagagaacacacccctgcttaattgtgctaaaccagatcaagacattaagttcacgattaaatttcaggaattttcaccaaacctgtggggcctggagttccaaaagaataaagactactatatcatctcaacgtccaatggctccttggaggggctggataaccaggagggtggcgtatgccagacaagggccatgaagatattaatgaaggtcgggcaagacgctagctccgcagggtcaacaagaaataaggaccccaccagaagacccgaactggaggccggcactaacggacgctcctcaactacaagcccctttgtcaagccaaatcctggcagctctaccgacgggaattccgctgggcattctgggaataatatcctgggatctgaggtggcattatttgcgggaatcgcttctggctgcattatttttatcgtcatcatcattacccttgtagtgctgttgctgaagtatagaagaaggcaccgcaagcatagccctcagcacaccacaacactgtccctgagcactctggctactccaaagcggagcggtaataataacggatcagaaccatcggacatcattataccactgcgaacggccgatagtgtgttctgtcctcactatgagaaagtatccggggattatgggcaccccgtgtatatcgtgcaggaaatgccaccacaatcacccgctaacatctattacaaagtgtag

SEQ ID NO: 143425 - DNA, 1002 bp, Artificial Sequence
  derived and/or modified sequence
atggctgtgcggcgggacagcgtgtggaagtactgctggggcgtgctgatggtgctgtgcaggacagccatcagcaagagcatcgtgctggagcccatctactggaacagcagcaacagcaagttcctgcccggccagggcctggtgctgtacccccagatcggggacaagctggacatcatctgccccaaggtggacagcaagacagtgggccagtatgagtactacaaggtgtacatggtggacaaggaccaggccgaccgctgcaccatcaagaaggagaacacccccctgctgaactgtgccaagccagaccaggacatcaagttcaccatcaagttccaggagttcagccccaacctgtggggcctggagttccagaagaacaaggactactacatcatcagcaccagcaatggcagcctggagggcctggacaaccaggagggcggcgtgtgccagacccgggccatgaagatcctgatgaaggtgggccaggatgccagcagcgctggcagcaccaggaacaaggaccccaccaggaggcctgagctggaggccggcaccaacggccgcagcagcaccaccagcccctttgtgaagcccaaccctggcagcagcacagatggcaacagcgctggccacagcggcaacaacatcctgggcagcgaggtggccctgtttgctggcatcgccagcggctgcatcatcttcatcgtcatcatcatcaccctggtggtgctgctgctgaagtacagaagaagacacaggaagcacagcccccagcacaccaccaccctgagcctgagcaccctggccacccccaagaggagcggcaacaacaacggcagcgagcccagcgacatcatcatccccctgaggacagctgacagcgtcttctgcccccactatgagaaggtgtctggggactatggccaccctgtgtacatcgtgcaggagatgccaccccagagccctgccaacatctactacaaggtgtag

SEQ ID NO: 143426 - DNA, 1002 bp, Artificial Sequence
  derived and/or modified sequence
atggccgtgcggcgggacagcgtgtggaagtactgctggggcgtgctgatggttctttgtcgaacggccatctctaaatctattgtgctcgaaccaatctactggaattcctccaactccaagttcctgccgggccaaggcctcgtgctgtatccccaaattggtgataaacttgacatcatctgtcctaaggttgactcaaagacagtgggtcagtacgaatactataaggtttatatggtggacaaagaccaggccgacaggtgtacaataaagaaagaaaatactcctctgctgaattgtgctaaacccgatcaggacatcaagtttacaataaagtttcaggagtttagcccaaacctgtggggcctggaatttcagaagaacaaggactattatattattagcacatcgaacggatctctcgagggcttggacaaccaggaggggggtgtctgtcagacacgggctatgaagattcttatgaaggtgggtcaggacgcgtctagtgcagggtccacccggaataaagaccctacccggcgacctgagctggaagcagggactaatggtaggtcctctaccacttctccttttgttaaaccgaacccagggtcttccacagatggtaacagcgctggtcactcaggtaataatattcttggatctgaagtggccctgttcgctggcattgcttcaggctgtatcatctttatcgtaattatcattaccctcgtggttttgctgctgaagtataggcgtaggcatagaaagcatagcccccagcacactactactctgtcattgagcaccctggctacacccaagcgtagcgggaataataatggaagcgaaccctccgacatcattattcccttgcgcaccgccgattccgttttttgtccccactacgagaaagtgtccggcgattacggccaccccgtctacatcgtgcaggagatgcccccgcagagtcctgccaacatatactacaaggtctag

SEQ ID NO: 143427 - DNA, 1002 bp, Artificial Sequence
  derived and/or modified sequence
atggcagtccggagggactcagtctggaagtactgctggggagtacttatggtgctttgtcgcaccgctatctctaaaagcatcgttctggagccaatctattggaactcctcgaatagcaagtttctaccaggacaagggttagtgctctacccccaaatcggagacaaactcgatatcatttgtccaaaggtagactctaagacagtcggacagtatgagtattacaaagtgtacatggttgacaaggatcaagccgacaggtgcacaattaagaaagaaaacacccctctcttgaactgcgcaaaaccggatcaggatattaaattcacaatcaaatttcaggaattcagcccaaacctttggggactggagttccagaagaacaaggattattacataatatccacatccaatggatccctggaggggttagacaaccaagagggcggagtctgccaaactcgcgcaatgaagatactgatgaaagttggccaggacgcctctagtgccggtagtactaggaataaagatcccacccgacgccctgagttggaggctgggacaaacggtagatcaagcaccacctctcctttcgtgaagccaaatcccggaagcagcacagacggtaactccgccggtcattcaggaaataacatcctagggagcgaagttgcattatttgcgggaatcgcatccgggtgtataatcttcatcgttataatcatcactctcgttgttcttctactgaagtaccggaggaggcatcgtaaacatagcccgcagcacaccaccacccttagcttatccaccctggccaccccaaagcgaagcggtaataacaacggttctgagccttccgatataatcatccctttgcgcacagctgacagcgtgttctgccctcactatgagaaagtcagcggtgactacggtcacccagtttatatagttcaggaaatgcctccacaatctcccgctaatatttattataaggtgtag

SEQ ID NO: 143428 - protein, 315 aa, Artificial Sequence
  derived and/or modified sequence
MPGLSCRFYQHKFPEVEDVVMVNVRSIAEMGAYVSLLEYNNIEGMILLSELSRRRIRSINKLIRIGRNECVVVIRVDKEKGYIDLSKRRVSPEEAIKCEDKFTKSKTVYSILRHVAEVLEYTKDEQLESLFQRTAWVFDDKYKRPGYGAYDAFKHAVSDPSILDSLDLNEDEREVLINNINRRLTPQAVKIRADIEVACYGYEGIDAVKEALRAGLNCSTENMPIKINLIAPPRYVMTTTTLERTEGLSVLSQAMAVIKEKIEEKRGVFNVQMEPKVVTDTDETELARQMERLERENAEVDGDDDAEEMEAKAED

SEQ ID NO: 143429 - protein, 129 aa, Artificial Sequence
  derived and/or modified sequence
MPGLSCRFYQHKFPEVEDVVMVNVRSIAEMGAYVSLLEYNNIEGMILLSELSRRRIRSINKLIRIGRNECVVVIRVDKEKGYIDLSKRRLTLWETESNLRNTEQRFLAVNPRLESFPVLKTSKLNIFYF

SEQ ID NO: 143430 - protein, 273 aa, Artificial Sequence
  derived and/or modified sequence
MPGLSCRFYQHKFPEVEDVVMVNVRSIAEMGAYVSLLEYNNIEGMILLSELSRRRIRSINKLIRIGRNECVVVIRVDKEKGYIDLSKRRVSPEEAIKCEDKFTKSKTVYSILRHVAEVLEYTKDEQLESLFQRTAWVFDDKYKRPGYGAYDAFKHAVSDPSILDSLDLNEDEREVLINNINRRLTPQAVKIRADIEVACYGYEGIDAVKEALRAGLNCSTENMPIKINLIAPPRYVMTTTTLERTEGLSVLSQAMAVIKEKIEEKRGVFNVQM

SEQ ID NO: 143431 - DNA, 390 bp, Artificial Sequence
  derived and/or modified sequence
atgcccggcctgagctgcagattctaccagcacaagttccccgaggtggaggacgtggtgatggtgaacgtgagaagcatcgccgagatgggcgcctacgtgagcctgctggagtacaacaacatcgagggcatgatcctgctgagcgagctgagcagaagaagaatcagaagcatcaacaagctgatcagaatcggcagaaacgagtgcgtggtggtgatcagagtggacaaggagaagggctacatcgacctgagcaagagaagactgaccctgtgggagaccgagagcaacctgagaaacaccgagcagagattcctggccgtgaaccccagactggagagcttccccgtgctgaagaccagcaagctgaacatcttctacttctag

SEQ ID NO: 143432 - DNA, 822 bp, Artificial Sequence
  derived and/or modified sequence
atgcccggcctgagctgcagattctaccagcacaagttccccgaggtggaggacgtggtgatggtgaacgtgagaagcatcgccgagatgggcgcctacgtgagcctgctggagtacaacaacatcgagggcatgatcctgctgagcgagctgagcagaagaagaatcagaagcatcaacaagctgatcagaatcggcagaaacgagtgcgtggtggtgatcagagtggacaaggagaagggctacatcgacctgagcaagagaagagtgagccccgaggaggccatcaagtgcgaggacaagttcaccaagagcaagaccgtgtacagcatcctgagacacgtggccgaggtgctggagtacaccaaggacgagcagctggagagcctgttccagagaaccgcctgggtgttcgacgacaagtacaagagacccggctacggcgcctacgacgccttcaagcacgccgtgagcgaccccagcatcctggacagcctggacctgaacgaggacgagagagaggtgctgatcaacaacatcaacagaagactgaccccccaggccgtgaagatcagagccgacatcgaggtggcctgctacggctacgagggcatcgacgccgtgaaggaggccctgagagccggcctgaactgcagcaccgagaacatgcccatcaagatcaacctgatcgccccccccagatacgtgatgaccaccaccaccctggagagaaccgagggcctgagcgtgctgagccaggccatggccgtgatcaaggagaagatcgaggagaagagaggcgtgttcaacgtgcagatgtag

SEQ ID NO: 143433 - DNA, 948 bp, Artificial Sequence
  derived and/or modified sequence
atgcctggcttgagctgtcggttttaccaacataaatttccagaagtggaagatgtagtcatggttaatgttaggtccatagccgagatgggcgcatacgtctccctgttagagtacaataacattgaagggatgatactcctgagtgagttatcacgccgtcggatccgatccattaacaagctgatcaggatcgggcgcaacgaatgtgtagttgtaatcagagtcgataaggagaagggttacatagatctctctaagagacgcgtgtcccccgaagaagcaattaaatgcgaagacaagttcaccaagagcaagactgtatatagtattcttcgtcacgtggccgaggtgctggaatacactaaggacgaacagttggaaagcctttttcaacgcaccgcttgggtgtttgacgacaagtacaaaaggccaggctacggagcatatgatgcattcaagcatgctgtctcagatccatccatcctcgattcactggatctgaatgaggacgagcgcgaggtactgatcaacaacataaaccggcggctcacgccccaggccgtcaaaatccgcgccgacatcgaggtggcatgctacgggtacgaggggatcgacgcggtcaaagaggcactgagagccggcctgaactgttccacagagaatatgcccattaagatcaatctgatcgccccaccaagatacgttatgactaccacaaccttagagaggactgagggtttaagcgtactcagtcaagccatggctgtcatcaaagagaagatcgaggaaaagagaggagtgttcaacgtgcagatggagcccaaggttgtgactgataccgacgaaacggagctggcgcgtcaaatggagaggctagagcgagagaacgctgaggttgacggggatgacgacgccgaggaaatggaggccaaagccgaggactag

SEQ ID NO: 143434 - DNA, 390 bp, Artificial Sequence
  derived and/or modified sequence
atgcctgggttatcctgccggttctaccagcataaattccccgaggtggaagacgtagtcatggtcaacgtccggagcatcgccgagatgggcgcctacgtgtctctgctcgagtacaacaatatcgaggggatgattctcctgtccgaattatcaagaagacggattcggagcatcaataaattgatccggattggacgcaacgagtgcgttgtggtgatacgagttgataaggagaaaggctacatagacctttccaagaggcggctgacgctctgggaaactgaaagcaaccttaggaacacagaacaaaggtttctggcagttaaccctcggcttgagtcatttcctgtgctaaagacctctaaactgaatatattttatttctag

SEQ ID NO: 143435 - DNA, 948 bp, Artificial Sequence
  derived and/or modified sequence
atgcccggactttcctgtcgtttctatcagcacaagttccccgaggtagaggatgtggtgatggtgaatgtgcggtctattgcagaaatgggggcttatgtctctctgcttgagtacaacaacatcgaagggatgatcctgctgtccgagctgtcccgtcggagaattagaagcatcaataagttaatcagaatcggcagaaatgagtgtgtggtggtaattcgagtagataaagagaaaggttatatagatctatccaaacgccgcgtaagcccggaggaagctattaaatgtgaggataagttcacaaagagcaaaaccgtgtatagcatcctcaggcatgttgcggaggtgctggagtacacgaaggacgaacagctcgaaagcttattccagaggactgcctgggtgttcgatgataaatataagagaccgggctatggcgcttatgacgccttcaaacacgcagtatcagatccatccatcttagattctctcgatctgaacgaggatgagcgtgaggtactgattaacaatataaaccgacggctaaccccacaggcggtgaagattcgagcagatattgaggtcgcctgttatgggtacgagggtatcgacgccgtgaaggaggcgctgcgcgccggtcttaattgctcaacagagaatatgccaattaaaatcaatcttatagcccctccaagatatgttatgacaacgacgacacttgagagaaccgagggattgtctgtgctatcgcaggctatggccgtcatcaaggaaaaaattgaagagaaacgtggtgtgttcaatgttcagatggagccaaaagtggtcacggacaccgacgaaacagaattggcacggcaaatggaaaggctggagagagaaaacgccgaggtcgatggagacgacgatgcagaagaaatggaagccaaggctgaggattag

SEQ ID NO: 143436 - DNA, 822 bp, Artificial Sequence
  derived and/or modified sequence
atgccggggctctcttgccgtttctatcaacacaagttcccagaggttgaagacgtggtgatggtgaacgtgaggtccattgctgaaatgggggcatacgtgagcctgctggaatataacaacatcgaaggtatgatacttctgagcgagcttagcaggagacgcatacggtcaatcaataaattaatccgcattggcaggaatgaatgtgtagttgtgatccgggtggacaaagaaaaagggtacatcgatctgtcaaagcgcagagtaagtccggaggaggctataaagtgtgaggataagttcactaaatcaaagactgtatactctatcctcaggcacgttgctgaggtgttggaatataccaaggacgaacaactggagagtctctttcagcgcacagcttgggtgtttgacgataagtacaagaggcccggctacggggcttatgacgccttcaaacacgctgtatcagatcctagcatccttgacagcctagaccttaacgaagacgagcgagaagtcctcataaataacattaacagacgtctgacccctcaagcagtgaagatccgggccgacattgaggtagcctgctacggctacgaaggaatcgacgcagtcaaagaagcgctaagagccggcctaaattgttctacagaaaacatgcccataaagatcaatcttattgctcctccaagatatgtgatgaccacaacaactctagaacgaaccgaggggctgtcagttttgtcacaggccatggctgtgatcaaggaaaaaatagaagagaagagaggagtttttaatgttcaaatgtag

SEQ ID NO: 143437 - DNA, 948 bp, Artificial Sequence
  derived and/or modified sequence
atgcctggcctgagctgccgcttctaccagcacaagtttcctgaggtggaggatgtggtgatggtgaatgtgcgcagcattgctgagatgggcgcctacgtgtccctgctggagtacaacaacatcgagggcatgatcctgctgtctgagctgagcagaagacgcatccgcagcatcaacaagctgatcagaattggaagaaatgaatgtgtggtggtgatccgggtggacaaggagaagggctacatcgacctgagcaagagaagagtgtccccagaggaggccatcaagtgtgaggacaagttcaccaagagcaagacagtgtacagcatcctgcggcacgtggccgaggtgctggagtacaccaaggatgagcagctggagagcctcttccagaggacagcctgggtgtttgatgacaagtacaagaggcctggctatggagcctatgatgccttcaagcatgctgtgtctgaccccagcatcctggacagcctggacctgaatgaagatgagcgggaggtgctgatcaacaacatcaacagaaggctgaccccccaggccgtgaagatccgggctgacatcgaggtggcctgctacggctatgagggcattgatgctgtgaaggaggccctgcgggccggcctgaactgcagcacagagaacatgcccatcaagatcaacctgattgccccacccaggtatgtgatgaccaccaccaccctggagaggacagagggcctgtctgtgctgagccaggccatggccgtcatcaaggagaagattgaggagaagaggggcgtcttcaacgtgcagatggagcccaaggtggtgacagacacagatgaaacagagctggcccggcagatggagcggctggagcgggagaatgctgaggtggatggagatgatgatgctgaggagatggaggccaaggccgaggactag

SEQ ID NO: 143438 - DNA, 390 bp, Artificial Sequence
  derived and/or modified sequence
atgcctggcctgagctgccgcttctaccagcacaagtttcctgaggtggaggatgtggtgatggtgaatgtgcgcagcattgctgagatgggcgcctacgtgtccctgctggagtacaacaacatcgagggcatgatcctgctgtctgagctgagcagaagacgcatccgcagcatcaacaagctgatcagaattggaagaaatgaatgtgtggtggtgatccgggtggacaaggagaagggctacatcgacctgagcaagaggcggctgaccctgtgggagacagagagcaacctgaggaacacagagcagcgcttcctggccgtgaacccccggctggagagcttccctgtgctgaagaccagcaagctgaacatcttctacttctag

SEQ ID NO: 143439 - DNA, 822 bp, Artificial Sequence
  derived and/or modified sequence
atgcctggcctgagctgccgcttctaccagcacaagtttcctgaggtggaggatgtggtgatggtgaatgtgcgcagcattgctgagatgggcgcctacgtgtccctgctggagtacaacaacatcgagggcatgatcctgctgtctgagctgagcagaagacgcatccgcagcatcaacaagctgatcagaattggaagaaatgaatgtgtggtggtgatccgggtggacaaggagaagggctacatcgacctgagcaagagaagagtgtccccagaggaggccatcaagtgtgaggacaagttcaccaagagcaagacagtgtacagcatcctgcggcacgtggccgaggtgctggagtacaccaaggatgagcagctggagagcctcttccagaggacagcctgggtgtttgatgacaagtacaagaggcctggctatggagcctatgatgccttcaagcatgctgtgtctgaccccagcatcctggacagcctggacctgaatgaagatgagcgggaggtgctgatcaacaacatcaacagaaggctgaccccccaggccgtgaagatccgggctgacatcgaggtggcctgctacggctatgagggcattgatgctgtgaaggaggccctgcgggccggcctgaactgcagcacagagaacatgcccatcaagatcaacctgattgccccacccaggtatgtgatgaccaccaccaccctggagaggacagagggcctgtctgtgctgagccaggccatggccgtcatcaaggagaagattgaggagaagaggggcgtcttcaacgtgcagatgtag

SEQ ID NO: 143440 - DNA, 948 bp, Artificial Sequence
  derived and/or modified sequence
atgcccggcctgagctgccggttctaccagcacaagttccccgaggtagaagacgtcgtgatggtgaacgtgagatcaatcgccgagatgggagcctacgtgtccctcctggaatacaataatatcgagggaatgatcctgctgagcgagctgagtcgccggcgcattcgctccattaacaagctgatcaggattggtcgaaacgagtgcgtggtggttattcgggtagataaggaaaagggctacatagatctgagtaagcggcgcgttagcccagaggaagctatcaagtgcgaggacaaattcacaaagagcaagactgtgtacagtatcttgcgccacgtggcagaagttttggagtacaccaaggatgagcaactggaatctctgttccagcggaccgcatgggtattcgacgacaagtacaaaagaccaggatacggagcatatgacgcattcaagcatgccgtgtccgatccgagcattctcgattcattggacctaaacgaggacgagcgtgaggtgctcattaataatattaataggcggctcacaccacaggcagttaaaataagggccgacatagaagttgcctgttacggctacgaaggtattgatgcggtcaaggaagctctgcgagctggactcaattgctctactgaaaatatgccgattaaaatcaaccttattgcccccccccggtacgtgatgacgacaacaaccctggagcggaccgaagggctctctgtcttgtctcaggccatggccgtaataaaagagaaaatcgaggagaaaaggggggtgttcaacgtgcaaatggagcctaaggtcgtcacagataccgatgagaccgagttggcccgacagatggaaagactggagcgagagaatgccgaagtcgacggtgatgatgacgctgaagagatggaggccaaggcagaagattag

SEQ ID NO: 143441 - DNA, 390 bp, Artificial Sequence
  derived and/or modified sequence
atgcccggcctgagctgccggttctaccagcacaagttccccgaggtcgaggacgtggtgatggtaaacgtcagaagcattgctgagatgggggcatatgtctcactgttagagtataataatatcgaggggatgattctgctgagcgagctcagcagacgcagaatcagatccataaacaagctcatcaggatcggtagaaatgagtgcgttgtggtaattagggtggataaggagaaaggttatattgacctctccaagcgaaggttaactctttgggagacagagtccaacctgaggaacactgaacagagatttttggctgtgaatcctcgcctggaatcgtttcctgtcttgaagacttcaaagcttaatattttttatttttag

SEQ ID NO: 143442 - DNA, 948 bp, Artificial Sequence
  derived and/or modified sequence
atgcccggcctgagctgccggttctaccagcacaagttccccgaggtggaggacgtcgtgatggtgaacgtgaggtccatcgctgagatgggcgcttacgtctcactgctggagtacaacaatatcgaaggaatgatcttgttgtccgagctatctcgccgacggattagatcaatcaataaactgatccgaatcggtcgtaacgagtgtgtcgtagttatccgggtagacaaggagaaaggctatatagatctgagcaagagacgcgtctcgcccgaggaagctataaagtgcgaagataagtttactaaatctaagaccgtgtacagtatacttcgacatgtggccgaagtgctggagtataccaaggacgaacagctcgagtctctctttcaacggaccgcctgggtctttgatgacaaatataagaggcccggctatggtgcatacgatgcttttaagcatgcggtgtcagatccttcaattctcgactccctcgacctgaatgaagacgaaagagaagttctgatcaataacatcaataggagattgacccctcaggctgtaaagatacgtgcagatatcgaagtggcatgctatggatatgagggtatcgatgcagttaaggaagctttgcgtgctggcctgaattgtagcacagagaacatgcccataaaaattaacctgattgcgccgccacggtacgtaatgacgaccaccactctggaacgaacagagggcctgagcgtgttatcacaggctatggccgtgatcaaggagaaaatcgaggagaagaggggcgtattcaacgttcagatggaaccaaaggttgtgactgataccgacgagaccgagcttgccaggcagatggaacgactcgaacgggaaaacgcagaagttgacggcgatgacgatgcagaagagatggaagccaaagccgaggattag

SEQ ID NO: 143443 - DNA, 822 bp, Artificial Sequence
  derived and/or modified sequence
atgcccggcctgagctgccggttctaccagcacaagttccccgaggtggaggacgttgtgatggtgaatgtgcggtcaattgcagagatgggcgcatatgtgtcgctcctggaatataacaacatagaggggatgattcttttgtcagagttaagtcggaggcggatacgaagcatcaacaaacttatcaggatcgggaggaatgaatgtgtggtagtgatccgagtagacaaagagaaaggttacatcgatctctctaaacgccgcgtaagcccggaggaggctattaagtgcgaagataagtttactaagagtaaaacagtctacagcattttacggcatgtggctgaggtgctggagtacaccaaggacgaacagctggagtcccttttccagaggacggcatgggtatttgatgacaaatataaaaggccagggtacggggcgtatgatgcctttaaacacgcagtgtccgacccgtctatcctggactctctcgatttaaatgaggacgagcgggaagtcctcattaataacattaaccgcagactcacacctcaggcagtcaaaatccgggcagatattgaagtagcatgctacgggtacgaaggcatagacgcagtgaaggaggctctgcgcgccgggctcaattgtagcacagaaaacatgcccatcaagatcaatcttatcgccccacctcgatacgtgatgactactactacactggaaaggacagaaggcttgtcagttctctcccaggccatggctgtgataaaggagaagatcgaggagaagagaggagtgtttaacgtgcagatgtag

SEQ ID NO: 143444 - DNA, 948 bp, Artificial Sequence
  derived and/or modified sequence
atgcccggtctcagctgccggttctatcagcataagtttccggaggtggaagatgtagttatggtcaatgtgaggagcattgctgaaatgggcgcttacgtttctcttctggaatataacaacatcgagggaatgattctcctttctgaactgtcacggcgtcgtattagaagcattaataaactcatccgcatcggaaggaacgagtgcgtggtggtaatccgggtggacaaggaaaaagggtacattgacctaagtaagcgacgagtcagtccggaagaagccattaaatgtgaggacaagttcaccaagagcaagaccgtctacagcatcctgcgccacgtcgcagaggtgctggagtataccaaagacgagcagctcgagtccttatttcaacgaaccgcctgggttttcgatgacaaatacaaaagacctggatatggagcatatgacgccttcaaacacgctgtgtcggatcctagtattctcgacagtctcgacttaaacgaagacgagcgagaggtcctgatcaacaatatcaaccggaggctgacacctcaagcagtgaaaattcgggctgacattgaagtggcctgctatgggtatgagggcatcgatgccgtgaaggaggccctccgggctggactgaattgttctacagagaatatgccgatcaagattaacctgatcgcccctccacgatatgtgatgaccactactaccctggagcggaccgagggtctcagtgtgctgtcccaggcaatggccgtcatcaaagaaaagatcgaggagaagaggggcgttttcaatgtccagatggaaccaaaagtggtgaccgacaccgacgaaactgagctggctcgccagatggaacggcttgaacgcgagaacgcagaagtggacggagatgacgatgccgaggaaatggaagcaaaggcggaagattag

SEQ ID NO: 143445 - DNA, 390 bp, Artificial Sequence
  derived and/or modified sequence
atgcctggcctatcctgcaggttctatcagcacaagtttcctgaggttgaggatgtagtgatggtgaacgtaagatccatcgctgaaatgggggcttacgtcagtctcctggaatataacaatatagaaggaatgatcctcttatcagaactaagccgcaggagaattagatctattaacaagcttatccggattgggagaaatgaatgtgtcgtggtgatcagagttgacaaggagaaagggtatatcgacctcagcaagcgcagacttactctgtgggagacggagtctaacctgcgaaatacagagcagcgcttcctggctgtgaaccctcgtctcgaatctttcccagtgctcaaaactagtaaactaaacatattttatttttag

SEQ ID NO: 143446 - DNA, 948 bp, Artificial Sequence
  derived and/or modified sequence
atgcccggactaagttgccgcttctatcagcacaaattcccagaggttgaggacgtggtgatggttaatgtccgaagcatagcagagatgggcgcttacgtaagcctgttagagtacaataacatcgagggtatgatcctactaagcgagttatcacgcaggaggattaggtctatcaacaaacttatccgtataggccgaaacgagtgtgtggttgtcatcagagtggacaaagagaagggctatattgacttaagcaagagacgcgtttcacctgaggaagcaatcaagtgcgaggacaagttcacaaaatccaagactgtgtacagtattttgaggcatgtggcggaggtactggagtacactaaggatgagcaattagaaagcctttttcagaggaccgcttgggtttttgacgataagtataaaagaccagggtacggagcttacgacgcttttaagcacgccgtttctgatccgagcatcctcgacagtctcgatttaaacgaagatgaaagggaggtgcttatcaataatataaatagacgtctgaccccccaggcagtgaagattagggctgatatcgaggtagcttgctatggatacgagggtattgatgccgtgaaagaagcgcttcgagccggattgaattgttcaaccgaaaacatgcctatcaagattaacttaattgccccaccacggtatgtcatgaccaccacaaccctggagcggaccgagggcttatcagtccttagccaagccatggccgtaataaaagagaagattgaggagaagagaggtgtcttcaatgtccagatggaaccaaaagtggtaaccgacacggatgaaaccgagcttgccagacaaatggaacgactcgagagagagaacgcggaggttgatggggacgacgatgctgaggaaatggaggcaaaggccgaggactag

SEQ ID NO: 143447 - DNA, 822 bp, Artificial Sequence
  derived and/or modified sequence
atgccaggacttagctgcagattctaccaacacaaatttccggaggttgaagacgtcgttatggtgaacgtacgatccatagccgaaatgggcgcatatgtgagcctcctggaatacaataatatcgaaggaatgatcctgctcagtgagctaagtcgcagacgcataagatctattaacaaacttatcagaatcggcagaaacgagtgcgtcgttgtgattagggtggataaggagaagggttatatcgatctgagcaagaggcgcgttagtcctgaagaagccataaagtgtgaggacaagttcacaaaatccaagacagtttactctatattgagacatgtggccgaggtcttagagtataccaaggacgagcaactggaaagcttgtttcagagaactgcctgggtctttgacgataagtataaacgcccaggttacggagcctacgacgcctttaagcacgccgtttcggacccatcaatcctggattcattggatctgaatgaggatgaaagggaagtgttgattaacaacatcaatagacggctcacacctcaggctgttaaaatccgagccgatattgaagttgcttgctacggctacgaaggcattgacgctgtgaaggaagctcttcgcgcaggtttgaactgttctaccgaaaacatgccaattaaaatcaacctaattgcccctcccaggtacgttatgacgaccaccacactggaacgaactgaggggctgagtgtgctctcacaggcgatggccgtgataaaggagaaaatcgaggagaaaaggggagtcttcaatgtgcagatgtag

SEQ ID NO: 143448 - DNA, 1306 bp, Artificial Sequence
  derived and/or modified sequence
gagcgaagcgcacgctgaggaggatcggcggccggtgagggggaagcaagtctggtctctgtgattgaagaagtcggctctgggctccagtgcgggaatcacacacatacctcagaatgccgggtctaagttgtagattttatcaacacaaatttcctgaggtggaagatgtagtgatggtgaatgtcagatccattgctgaaatgggggcttatgtcagcttgctggaatacaacaacattgaaggcatgattcttcttagtgaattatccagaaggcgtatccgttctatcaacaaactcatccgaattggcaggaatgagtgtgtggttgtcattagggtggacaaagaaaaaggatatattgatttgtcaaaaagaagattaactttgtgggaaacagagtccaatttaaggaacacagagcagcgcttcctggctgtaaatcctagacttgaaagttttccagtattgaaaacttcaaagctgaatattttttatttctaagtatttaaatgttctaacagatcagaacatgaaatgccctcctaaatgtcagctgttgtcacacagtagctccaacactttgagcatttttaagggagtggcctcatttcactagagacaaatctttaagaatagttctaaaattgggcttgtgatttccatttctgatgtctccagattggcacccctttctagttcaatgcctcacgagatttgccaggggcatccaaggcaaacaatcccaatctttctatataaaatgtattcaagcaaacatcaaataaatttctgggatatttaactataggcttcttccttcttgtcaccagttaaaagcattttaatactaagaccctaattcttttatctttattttagtcttgatgtggaactgtaggagcaggtgaataaaggatctctataacagatcctttcaaaagaagagttttagagaaaataaatttaactttaaccacagtgaaagttgacccttagcgggacaaagccttaaaatgcattgaaagaattagatcggttctgtgccttttatctatttgagattgatgacaacctgtgtgagagaatttatcacaccacgtccttattggaataataagctacttgccttgagtttataattcagggtggtaaagtatgtttttaaattttaaaaagcagctgcattttttatttagttggaatatcacccaattttttatttttattgctattaaaatatccactagatgccacctagagctccagttctttataacaaaacagggatctgtttgaacact

SEQ ID NO: 143449 - DNA, 4485 bp, Artificial Sequence
  derived and/or modified sequence
gcgcaatacgcggcacgcgccaggccaaagactaggagcgaagcgtgcacgccttgtctttctccacctttcgtctttggtcacagcgccatctcatggttagctgaaactttgaaagaggattcattcttcagaggcaaggaatcggagtcctatgtctttctcgcgccttgaaggttacttagctaaagctaagatagcgagaaacagtacttttcaggtccttccatgatctacattcgtccttgttctcggaggacccagactctatggttaatgatgaagaggggcctctattcgttcagcgcttgcgcatgcgaggaggttccgcatgcgcggtggagtgagcgaagcgcacgctgaggaggatcggcggccggtgagggggaagcaagtctggtctctgtgattgaagaagtcggctctgggctccagtgcgggaatcacacacatacctcagaatgccgggtctaagttgtagattttatcaacacaaatttcctgaggtggaagatgtagtgatggtgaatgtcagatccattgctgaaatgggggcttatgtcagcttgctggaatacaacaacattgaaggcatgattcttcttagtgaattatccagaaggcgtatccgttctatcaacaaactcatccgaattggcaggaatgagtgtgtggttgtcattagggtggacaaagaaaaaggatatattgatttgtcaaaaagaagagtttctccagaggaagcaatcaaatgtgaagacaaattcacaaaatccaaaactgtttatagcattcttcgtcatgttgctgaggtgttagaatacaccaaggatgagcagctggaaagcctattccagaggactgcctgggtctttgatgacaagtacaagagacctggatatggtgcctatgatgcatttaagcatgcagtctcagacccatctattttggatagtttagatttgaatgaagatgaacgggaagtactcattaataatattaataggcgcttgaccccacaggctgtcaaaattcgagcagatattgaagtggcttgttatggttatgaaggcattgatgctgtaaaagaagccctaagagcaggtttgaattgttctacagaaaacatgcccattaagattaatctaatagctcctcctcggtatgtaatgactacgacaaccctggagagaacagaaggcctttctgtcctcagtcaagctatggctgttatcaaagagaagattgaggaaaagaggggtgtgttcaatgttcaaatggagcccaaagtggtcacagatacagatgagactgaacttgcgaggcagatggagaggcttgaaagagaaaatgccgaagtggatggagatgatgatgcagaagaaatggaagccaaagctgaagattaactttgtgggaaacagagtccaatttaaggaacacagagcagcgcttcctggctgtaaatcctagacttgaaagttttccagtattgaaaacttcaaagctgaatattttttatttctaagtatttaaatgttctaacagatcagaacatgaaatgccctcctaaatgtcagctgttgtcacacagtagctccaacactttgagcatttttaagggagtggcctcatttcactagagacaaatctttaagaatagttctaaaattgggcttgtgatttccatttctgatgtctccagattggcacccctttctagttcaatgcctcacgagatttgccaggggcatccaaggcaaacaatcccaatctttctatataaaatgtattcaagcaaacatcaaataaatttctgggatatttaactataggcttcttccttcttgtcaccagttaaaagcattttaatactaagaccctaattcttttatctttattttagtcttgatgtggaactgtaggagcaggtgaataaaggatctctataacagatcctttcaaaagaagagttttagagaaaataaatttaactttaaccacagtgaaagttgacccttagcgggacaaagccttaaaatgcattgaaagaattagatcggttctgtgccttttatctatttgagattgatgacaacctgtgtgagagaatttatcacaccacgtccttattggaataataagctacttgccttgagtttataattcagggtggtaaagtatgtttttaaattttaaaaagcagctgcattttttatttagttggaatatcacccaattttttatttttattgctattaaaatatccactagatgccacctagagctccagttctttataacaaaacagggatctgtttgaacacttactgttgtttttttttttttacatgtttccatcatttctgtctttaagaactaattcgtacataataagtttcataggtaacacattatttgaagttacagctacagtagtcaggtgtagaaaatcttgagttgctttggtctgcttgtcttcataaatttattctcttatgatacttgaggtaccagttgtatttaattttattcattatccctagatagctattaagatacttagattagacctaacccaccatagtcaatccaagactagactactcaatattaaagggtctggaaaatagaagagtgtgttgggcaggtagtttgtaccatttatgaaggtttgttcctttgttaaatttagcagcctgtactagcttttgaaatccagaagttttaacttccagtggctggtttctgagagagtgccatgattgctagccagcattccatattgggaatatgtagaggagaacctggatgtacttaagagtggcatataattttcacttctgtctgttgaggcatcaaaaaaacaagtttagaaagctggcaacatgaagaatgcattcaaaatataacaggtgcttctttgttgtacgcagaggaattttttcttttgattttgtttactgaaatttgttatacttcaaaagccataacttgaaaaatactggtggcgtcgatggtgagtgatttttatcccacgtgggccttttgctcagttccatggcaattttgtaaattgaccctagccagagaatagatcagtatttcactgataccacgaggaaaagaacaaacaaaacttaaaagtattcatacaccttgctaacctaaaagacagcagggacaagatacatatgaggacaaggtatacacccagttctgaataacttgaagaacaggcttggcaaagaagtaagtttatccaaatcttgaatttctgccaggcatggtagctcatgcctgtaaccctggcacttaaggggccaaggcaggaggatcacttgaggccagtgagctgtgatcactccagtgcactcgagcctgggtgacagggcaagaccctgtctcaaaaaaaaaaaaaaaaaccaaaaatcttgaatctcccatcaaagccttttcattaaaaatacaatttcatctactccctactgtacctttcactgatgtcaagtggctatcaattcatatagctgaaaattagtgatagtttgggtctcatttatgcataaattaattgaaaatcagtaatggccaggaagaaatatgaatattcaaaccacttttttctttttttttttttttttttggcaaatggtgttatattgcctgggcaggtctcgaaatcctgggctcaagctatcctcctgcctctgcctctgtaagagtgtgagccaccatgccccacccaaaccatttttcatatcagttatagcaaaacaagacaaaccagttcttaataatgttcaaagttggacccatagagacatgctaagcactacatcatgctaagaagaacagttattactcagctgccatacttcagccattctacttttacaccaagaacaaaatggctagagatttttttaaaaatacaaatgccagtaccttgccgagacttgttcactgatttgccccaaccccaaggtaatggtcatctactttgcaacctatggagatcctgatagctcccatacaaagtgaggtacactgttgccaatttggaggcaggaagccatcaaactaaacgtagtttaattcagatgaacacctatcgatattcaaaaggcaaaacaaaaaaactaattccagggacattagaccttggtgaaatgccaaatggaaaatggtgctttaaaaggtagtctcttaccatataaggaataagtaaaacattagcttgtgatttctcattattcaggtcaatgttttagacacgactaacaagggacagttcaaactattaaagagaacaaatttttacttaagcactttgaggtatccactccccttaaatgtaagttatgtattttatctgttgattaaggggaggtccaagcatttgtacttggcaggaatgctggcaatagcttgtgccagattactgtataaacttgaaagtaataaaaatgttctttaaaagta

SEQ ID NO: 143450 - DNA, 2390 bp, Artificial Sequence
  derived and/or modified sequence
aattgtaaatatctttaatgcttggaggttaagagaaacttgaactttgtagtaatggagattaaagctattctcaagattaggtatacctattcaataaaagaaaggaatatttgggagtattggggataagagaagctagacattgtgaattcaaggaaaaagaattatgagaggaggatgcattttagtttattttgtgattaaaatttttttagtttttgttgttttgacatgtgacactgtaattttggctataataaatgacagaatgtatcatttggtatattggttagggtttaggtagaaaattttttcctttatatagtgagtggtagcgtatacaatgtttgctcacttcggcaaagagtagctttagttttctgattagttataatagtgatgcttcccatcatttgatatgccttaaagtagtattttactcttgaggtattcctttaatccttaggtcttggagtactttatagatggtcattattttttatgattcctctgaaactaaaggcagagaatcacccaagcattacaaaaatgttgagcaaaataaaaattaaagcttggttcctgaacattatctgttttctggtaccacttaagaagtttcaaaggatgagaagactaagactaataactatttttttcttcatcttttctttcagtggcaggatgtggaaattgattttttttttattttcaccttaactgaatacttacttaattcttttgtttaaattgcagaatgccgggtctaagttgtagattttatcaacacaaatttcctgaggtggaagatgtagtgatggtgaatgtcagatccattgctgaaatgggggcttatgtcagcttgctggaatacaacaacattgaaggcatgattcttcttagtgaattatccagaaggcgtatccgttctatcaacaaactcatccgaattggcaggaatgagtgtgtggttgtcattagggtggacaaagaaaaaggatatattgatttgtcaaaaagaagagtttctccagaggaagcaatcaaatgtgaagacaaattcacaaaatccaaaactgtttatagcattcttcgtcatgttgctgaggtgttagaatacaccaaggatgagcagctggaaagcctattccagaggactgcctgggtctttgatgacaagtacaagagacctggatatggtgcctatgatgcatttaagcatgcagtctcagacccatctattttggatagtttagatttgaatgaagatgaacgggaagtactcattaataatattaataggcgcttgaccccacaggctgtcaaaattcgagcagatattgaagtggcttgttatggttatgaaggcattgatgctgtaaaagaagccctaagagcaggtttgaattgttctacagaaaacatgcccattaagattaatctaatagctcctcctcggtatgtaatgactacgacaaccctggagagaacagaaggcctttctgtcctcagtcaagctatggctgttatcaaagagaagattgaggaaaagaggggtgtgttcaatgttcaaatggagcccaaagtggtcacagatacagatgagactgaacttgcgaggcagatggagaggcttgaaagagaaaatgccgaagtggatggagatgatgatgcagaagaaatggaagccaaagctgaagattaactttgtgggaaacagagtccaatttaaggaacacagagcagcgcttcctggctgtaaatcctagacttgaaagttttccagtattgaaaacttcaaagctgaatattttttatttctaagtatttaaatgttctaacagatcagaacatgaaatgccctcctaaatgtcagctgttgtcacacagtagctccaacactttgagcatttttaagggagtggcctcatttcactagagacaaatctttaagaatagttctaaaattgggcttgtgatttccatttctgatgtctccagattggcacccctttctagttcaatgcctcacgagatttgccaggggcatccaaggcaaacaatcccaatctttctatataaaatgtattcaagcaaacatcaaataaatttctgggatatttaactataggcttcttccttcttgtcaccagttaaaagcattttaatactaagaccctaattcttttatctttattttagtcttgatgtggaactgtaggagcaggtgaataaaggatctctataacagatcctttcaaaagaagagttttagagaaaataaatttaactttaaccacagtgaaagttgacccttagcgggacaaagccttaaaatgcattgaaagaattagatcggttctgtgccttttatctatttgagattg

SEQ ID NO: 143451 - DNA, 999 bp, Artificial Sequence
  derived and/or modified sequence
tttcccgtccctgcgcgggaagtggctggacagcaccgccaccacccgcgctgtcgtgggcctcctcgccggctccgtgtaggtcatcctgtgttccagaggcatcgttgttcgagcagaggaatctcgtgaaggaaagtgggccgagtggattgtacagcctctacaatatgccgaaaaatgccgggtctaagttgtagattttatcaacacaaatttcctgaggtggaagatgtagtgatggtgaatgtcagatccattgctgaaatgggggcttatgtcagcttgctggaatacaacaacattgaaggcatgattcttcttagtgaattatccagaaggcgtatccgttctatcaacaaactcatccgaattggcaggaatgagtgtgtggttgtcattagggtggacaaagaaaaaggatatattgatttgtcaaaaagaagagtttctccagaggaagcaatcaaatgtgaagacaaattcacaaaatccaaaactgtttatagcattcttcgtcatgttgctgaggtgttagaatacaccaaggatgagcagctggaaagcctattccagaggactgcctgggtctttgatgacaagtacaagagacctggatatggtgcctatgatgcatttaagcatgcagtctcagacccatctattttggatagtttagatttgaatgaagatgaacgggaagtactcattaataatattaataggcgcttgaccccacaggctgtcaaaattcgagcagatattgaagtggcttgttatggttatgaaggcattgatgctgtaaaagaagccctaagagcaggtttgaattgttctacagaaaacatgcccattaagattaatctaatagctcctcctcggtatgtaatgactacgacaaccctggagagaacagaaggcctttctgtcctcagtcaagctatggctgttatcaaagagaagattgaggaaaagaggggtgtgttcaatgttcaaatg

SEQ ID NO: 143452 - DNA, 948 bp, Artificial Sequence
  derived and/or modified sequence
atgcccggcctgagctgcagattctaccagcacaagttccccgaggtggaggacgtggtgatggtgaacgtgagaagcatcgccgagatgggcgcctacgtgagcctgctggagtacaacaacatcgagggcatgatcctgctgagcgagctgagcagaagaagaatcagaagcatcaacaagctgatcagaatcggcagaaacgagtgcgtggtggtgatcagagtggacaaggagaagggctacatcgacctgagcaagagaagagtgagccccgaggaggccatcaagtgcgaggacaagttcaccaagagcaagaccgtgtacagcatcctgagacacgtggccgaggtgctggagtacaccaaggacgagcagctggagagcctgttccagagaaccgcctgggtgttcgacgacaagtacaagagacccggctacggcgcctacgacgccttcaagcacgccgtgagcgaccccagcatcctggacagcctggacctgaacgaggacgagagagaggtgctgatcaacaacatcaacagaagactgaccccccaggccgtgaagatcagagccgacatcgaggtggcctgctacggctacgagggcatcgacgccgtgaaggaggccctgagagccggcctgaactgcagcaccgagaacatgcccatcaagatcaacctgatcgccccccccagatacgtgatgaccaccaccaccctggagagaaccgagggcctgagcgtgctgagccaggccatggccgtgatcaaggagaagatcgaggagaagagaggcgtgttcaacgtgcagatggagcccaaggtggtgaccgacaccgacgagaccgagctggccagacagatggagagactggagagagagaacgccgaggtggacggcgacgacgacgccgaggagatggaggccaaggccgaggactag

SEQ ID NO: 143453 - protein, 118 aa, Artificial Sequence
  derived and/or modified sequence
MSGGSSCSQTPSRAIPATRRVVLGDGVQLPPGDYSTTPGGTLFSTTPGGTRIIYDRKFLMECRNSPVTKTPPRDLPTIPGVTSPSSDEPPMEASQSHLRNSPEDKRAGGEESQFEMDI

SEQ ID NO: 143454 - DNA, 357 bp, Artificial Sequence
  derived and/or modified sequence
atgagcggcggcagcagctgcagccagacccccagcagagccatccccgccaccagaagagtggtgctgggcgacggcgtgcagctgccccccggcgactacagcaccacccccggcggcaccctgttcagcaccacccccggcggcaccagaatcatctacgacagaaagttcctgatggagtgcagaaacagccccgtgaccaagaccccccccagagacctgcccaccatccccggcgtgaccagccccagcagcgacgagccccccatggaggccagccagagccacctgagaaacagccccgaggacaagagagccggcggcgaggagagccagttcgagatggacatctag

SEQ ID NO: 143455 - DNA, 357 bp, Artificial Sequence
  derived and/or modified sequence
atgagtggaggcagttcttgctctcaaacaccatctagggcgattcccgctactcgtagggtggtccttggcgatggcgtccagttgccaccgggggactattctaccactcctggtggtacgttatttagcacaacccctggaggcaccagaatcatatatgatcgcaagtttttaatggaatgtagaaactctcccgttacaaaaacccctccccgcgatctgccaactatcccgggcgtaacttctccaagcagcgatgagcctcctatggaggcgagccagagccatctgaggaacagcccggaggataagcgcgccggcggcgaagagtcccagtttgaaatggacatatag

SEQ ID NO: 143456 - DNA, 1020 bp, Artificial Sequence
  derived and/or modified sequence
gtgcggaagagcccgtgagcagacgggagtgggtcggggggcggcgggggatcccacgtggaagcagcgtcctggagctgggtggggctgcggcgcggactacaaatcccaggggcgtggggcgggagaggcggaaggggcgtcctggggcggggcggcacggggcgaggcggagcgaggctggaggcgcgggagggcagcgagaggttcgcgggtgcagcgcacaggagaccatgtccgggggcagcagctgcagccagaccccaagccgggccatccccgccactcgccgggtggtgctcggcgacggcgtgcagctcccgcccggggactacagcacgacccccggcggcacgctcttcagcaccaccccgggaggtaccaggatcatctatgaccggaaattcctgatggagtgtcggaactcacctgtgaccaaaacacccccaagggatctgcccaccattccgggggtcaccagcccttccagtgatgagccccccatggaagccagccagagccacctgcgcaatagcccagaagataagcgggcgggcggtgaagagtcacagtttgagatggacatttaaagcaccagccatcgtgtggagcactaccaaggggcccctcagggccttcctgggaggagtcccaccagccaggccttatgaaagtgatcatactgggcaggcgttggcgtggggtcggacaccccagccctttctccctcactcagggcacctgccccctcctcttcgtgaacaccagcagatacctccttgtgcctccactgatgcaggagctgccaccccaaggggagtgacccctgccagcacaccctgcagccaagggccaggaagtggacaagaacgaacccttccttccgaatgatcagcagttccagcccctcgctgctgggggcgcaaccaccccttccttaggttgatgtgcttgggaaagctccctccccctccttccccaagagaggaaataaaagccaccttcgccctagggccaaga

SEQ ID NO: 143457 - DNA, 357 bp, Artificial Sequence
  derived and/or modified sequence
atgtctgggggcagcagctgcagccagacccccagccgggccatcccagccaccaggagagtggtgctgggagatggagtgcagctgcccccaggggactacagcaccacccctgggggcaccctcttcagcaccaccccaggcggcacccgcatcatctatgacaggaagttcctgatggagtgcaggaacagccctgtgaccaagaccccaccccgggacctgcccaccatccctggggtgaccagccccagcagtgatgagccccccatggaggccagccagagccacctgaggaacagccctgaggacaagagagctggaggagaggagagccagtttgagatggacatctag

SEQ ID NO: 143458 - DNA, 357 bp, Artificial Sequence
  derived and/or modified sequence
atgagcggcggcagcagctgcagccagacccccagccgggccatccctgccactcgtagagtggttctcggggatggcgtgcaacttcctccaggcgattattctactacgccaggcggaacattgttctccaccacaccgggtggcacaaggatcatctacgacaggaaatttctgatggaatgcagaaactcacctgttaccaaaacccccccgcgcgacctaccaactatccccggcgttacctcaccatcatccgacgagcctcctatggaggctagccagagtcatctacgcaacagccctgaagataagagagccggcggtgaggaatcccagtttgagatggatatttag

SEQ ID NO: 143459 - DNA, 357 bp, Artificial Sequence
  derived and/or modified sequence
atgagtggtggttcttcatgctctcaaacaccaagtcgcgcaatcccagcgacgcgaagggtcgtcctgggagatggagttcaactgccaccaggtgattactcaactactccaggcggtaccctgttttccacaacaccaggaggcactcgaattatctacgatcgtaagttcctcatggagtgcaggaactctcctgtaaccaaaactccgcctcgcgacttgcctaccatacccggagtaacatcaccctcttctgatgagccccctatggaagcctctcagagccatttgaggaactcaccagaagacaaaagagcaggaggggaggagagccagtttgaaatggacatctag

SEQ ID NO: 143460 - protein, 120 aa, Artificial Sequence
  derived and/or modified sequence
MSSSAGSGHQPSQSRAIPTRTVAISDAAQLPHDYCTTPGGTLFSTTPGGTRIIYDRKFLLDRRNSPMAQTPPCHLPNIPGVTSPGTLIEDSKVEVNNLNNLNNHDRKHAVGDDAQFEMDI

SEQ ID NO: 143461 - DNA, 7257 bp, Artificial Sequence
  derived and/or modified sequence
gccgagagcccgcgcccacagccatgtcctcgtcagccggcagcggccaccagcccagccagagccgcgccatccccacccgcaccgtggccatcagcgacgccgcgcagctacctcatgactattgcaccacgcccggggggacgctcttctccaccacaccgggaggaactcgaatcatttatgacagaaagtttctgttggatcgtcgcaattctcccatggctcagaccccaccctgccacctgcccaatatcccaggagtcactagccctggcaccttaattgaagactccaaagtagaagtaaacaatttgaacaacttgaacaatcacgacaggaaacatgcagttggggatgatgctcagttcgagatggacatctgactctcctgcaaggattagaagaaaagcagcaacactgatacttgtgtgcacctgatttggccaataggatcaacagtgaaaagacagaagaggcaataccagcagtccccattacagtctccacctccccgtcttcctctgggtgccaaatgatgggaagatgagcttcatctgaccatttcttctccctgtctcctgttccccttcccagttaaacaggttagattgaaggcccttgctgtatttctgtagagctaagcagcccttagaggaaaacagttcaactctgactttcctagttgtttttttattgagagccaccctcataccctgtaattttgtcccaaatcaaatatcaacctaccaacaactgcctggctgggaagtctggggaagggatacagagcttggtgggcctaacaccattcatattccttaccctctgtctctcctccctgtatcccacctatggttcagtgttgcaagagtctgggcttggggtctttaaaaccagcagggggaaatgataaaaagagagctgctttcccttttaccttgaggtattcgtccctcgggacagagcacagcttgtgcaactctggtagcgttaccctgtgacactgttttgaggtccacttcctttctttcctctgggaggaatgtcttctgtctttggtattatagttcatcttcccattcttttacttagtgcatttgtgcagatatttttaactctgtacatcagaagagagcccttggtaaccagttttgctcttcttctgccactcctccctgcttgcatctcgttgctggcagagtcctcttgtacttcaagaaagcaaagtgattttgtctgctcctagagcaggtccataccaagtaatagaggcactttagcttccacttggtgggtaaggcctgatcatagtattctgtcagataatgcctaagaatgaccgctgaagaacgttgacccatttgagtacccggtctcagtcgtcatttttaagtccagtgagcattgtggtagttgttcttagattgcagtttcttatgttttgagtttgaagttgattttcagaatgttcttagaaaagaactgcatttttttcctttgtggatctgctttgtttggctgctgggatagataagcatgggcttaaaaaatgtgttcctcccagttttcttgcctttcctgttgtactctgaatttctctccctacctccctcactttcttcctctctccttcctttccttcctttttctctaccaggccatttttcaaatttacatcaaagatacctgaagtgttggtatctgagaatatctgtcactcctcttatctgagaagtgaccttttatttttaagatgactacagacctatttttagatatgttttcagtacaattttgaacagcaactttttaattaaacatcttccagtgttaggaagttgagaaacgttcataggcaagtctgctgttctatgtcaccatcttttgtctcccctagtcccccaggagctctttcctttcccctctagttttgggtgtgcatgtttggagtttgtagtgggtggtttgtaaaactggaccattctgccttgctatgggttgttcaagaaagcctcattcttttctgtgaccctttcgcttttgcattcaccctccttcccacctacctgtcctggggctgttgagcagcataataatcccgggagaatgattcccctcatagaaagacaaaagcatccatcccctcatagttaagtagccactggtgtcctgggaatttctggttggatttggtgccctgaacttttttattaagaaatcagatcccagggtgagagtaacaggccatttggccaagaaagaaacctgtttgtttttcttttgaactatgaaaagaccctgtttgtgaatatattttagaaagagaggaaggatgtctgcagaactttgttctgttttctgccacaaaaatgtgaatagttcagagtgaaaaccttttgtgatggttgatgtctcaggaataagctggatctccaatgttttggggatgctttgagtctcaaaaaaaattgataatcagaaaagtaatttttgtttgtttgtttaatgtatccctgttctgtttttaattaaactccaagtctcattttacatattcttggaaaaacctaagttgctctgtaatttacataagaagcatgctcaggacctctttgtaccccggggagcctgattctttgggaatgaagcttttcattcttcatacactggccttggcatcctgtggaatttgacccaactagcagctagtcagtctgtcagtgagcagaagagtgaactcttcttgatctttattgctatgtgtgaaaacttggcttcctcactgaacggtgaggaatggatttaaagcatgagctttagtagtatcaagatgccattttcctttttcttgctgtcttggggagcttctgcatgtgaccccctaatcagaaggcatgtttttagtatttcttgggagtgtcagctgtataatgcagcagctgttcaatcccttacccttctctgcaaggacttccttacagcttggtgcagttctttcccagaggccaccactactagacagtctttcttttatcttatggagataaattggcatttaaaaaataatttcacaaggcatgagataaactttcaatagatgatacctttgtgtcatgcctcatggaattatttttagaacaagccagagtccattgagtggtttacctctgcatgtttggagggaacctcacagatgaaacccttaatgaataatgtgtccggggttttttagagagaaggagcactcttaagttaccactttgagacagctcttaacatcttagtgaccatttgtagttttctttttatgaggaacccatgcttctatacttgggcggacaatcgagcttaatgagaagtgacttcccttcaaattccaacagcagacatgcattgtcatgattctgtcttctttttagtgtggtttattgagttcagcagttctcatattctgtttaaataggtacagcattttcaagggcacagatacagagaagctggctttctaggtattgggcttccaagccaagagttttgtccttccacctgtattagttatctattgctgtgtaaaaaattaccctaaatttagtatgttaaaatagtaaacattatctgtcagtttctgtgggttaagaatttgggagtagtttaacatgatggttctggcccatggtatcatgaagttacagtcaagattgaacaggggctgcagtcagctggagctggagaaaccacttccaagttctctctttgtggccgttggcaggatgcctcagtttcttcccatgtgggtctctgcgtagggcagcatgagtgtcctcacaccatgacacctggcttctccctgagcagctgattccagagatcatggggcagggccaggagaaagctgcagtgccttttaagacatagtcttggaaaggacacaccgtcacttcttatcctagttgttagaagcaagccactaagttcagcctgcactcaaggagagaggaattacacatacctctaccccaatggagcagtagcaaagaatttatggacatatcttaaaagcaccacaccccaactggggatgaaagtaggtcaacagggaggtaggtttaatctagataagctgaaagatagattgctatcaaaaacagttctccaagatgtgcatagccaaactgggatagaaggcaaactccccaaagctacctgctggttttgagaggggtggtaagacatggcaattcccaggagtagtagaaaataatatgcctgactaccaacagctcaagtatgcttatttgcacatcctagacttggtgtctgtaagactcagttaccacttttattttcctgtagctaggagttagcaaaaggaactggggccttccagccgagccactaaacctgtcttatttggaatggggattgtccagcaaagggagcaaacatgaattagatgttaagctattgagctgaagaaaagaaagcagttcacatttaggtgaaatagatgatgttatcaggaagccaggttcccaccagagtcggtgcttggtacctggtctctccagtctcaacagactcaggtcaggtctctcacccaggaagcaaccactcaataaaatagagaacatctgagaattacaaatgtctatgcttgattgctcctctaaatccagtgcataggttaaccctgcatgcccatttcttcctgggcttcttgatggcaatgtgttcttaaataactggtcttgtgttcatgctaaagacaaacttacatgaagtttttcagtttaagacattctagtgaatggctgctatgtgtttctggcactcattcctaaccaagtctttagagatttcagatgaccttaaagatgcaatatctttttctttctttctttctttctttttttctgagacaagagttgcgccctgtcgcccaggctggggtgctggagtgcagtggtgcgatctcagctcactgcagcctctgcttcccaggttcaagtgtttctcctgcctcagccttccgagtagctgggattacaggcatgtaccactatgcctggctaatttttatttctatatttttagtagagatggggtttcatcatgtttgccaggctggtctcgaactcctggcctcaagtgatccgcccacctcagcctcccaaagtgctgggattacaggcgcgagccaccgcgcctggccaaagatgcaaattcttgtttggatttatgctctgcctcttcccagcattttcttatctgtagccctgcttgcttgagagtatacttggataagaagtattgctgttgagggagctataagaaaaggattcttcttccagaagtaaagaactcatctttagagtacctttaaatgaattttgtttttctttcttattttgaggtggattggtcttctctttttttgggtttccagctcactgggactctcagaccttacctttccagctcaaacaccattagttaaattccttcattctcattagaatgcagcctgctgagtatgtgggtttcactgccggagtccatcatttagccagtatacatagaggaactgcttcgaatcaaggcaactggtgaagggcttagcatgttggcagcaatatcccagagattgaatctgtttgcattttcctcatctaggataacagctgcttgaagccagggctcttagccctttgcattccccttgagcgaggaagccacactgcctttctgtgtctggttcagagctcttccttcttggcatgttttctggactacatgcacatgggcagctatagattaatctgcaaaacctagtcacttacctacccataatatctgggaaggtgtggtatttgttttaaagaaacattgtttctttgggagggcagtttctgtctggactttgaggtggacttagttatccctacagttctttaactctcagcttttaataaaagatgaaatcagatattgatgcagttgggtcacaattctttagaatgcttctaccccagggccgcttcctgttcctagtcatggttttccagtttagtagtggagtttcttgaggctaacttacagaaatttctaactgaaaactttaagagttattgatacttgttttttcagtcagtcacttacatcacctagcctactctctggaatttaaatttatttctctaggctggtcctggaagttgataaccttttggcaaagcttagatttaggagaaggcttgagtccctgttcagcgggtctgtggattctctttgcttatggctctctgcctgcagccctggcagaccatactgtatgtcatggatacccagtggaaatattactgagatgaaacacatttccaagggtatttaaactctcactctgccacctttctaagggtgggaggctggcagagatgctgcaatgcttgataatcatttggccacactgaaatttccaaagggagctcttgccggtgcttaaaaccaaaactcctggacacttagaaaattccatgaatctagcacaaaatatccattcttgcccaagtgtatcccctttctctccagcttaatcttttttttttttttttttttaaagcccaggccaagggtacttttaactggaaactggggaggagggaagaacactagcagggagctaagaggcaggttgctgggtaagccatcctgctcctacctggtgcctgtatctacattgctgagtgctgtgcgccagtgcctttccttcatctgcagatggagcccatctctttccacctgggtgaggagaccctctgctactccaggggtaaaccttaaagaaggtgtcttgaagagcccagaggacactcacgtgctaaggtgtccattttatgcatctttaaaatattttatttaaaaaaaaaaatagccctgccctgtcttagtgccactaacggcccagttccatccattctgaatggaaaagcggagactgccagcactttccttggtcttccctttgtctcccatgatgtgttgttccctcatccctcccatccatttcactgtgtgtggatggatagcagagggtaccacgcagtccttgaggcagtcctgtgtgattccatgatcagttgtttttgtattttaactattcttccaaaccagcagatgtttggaaattaaggaaaaaattaaattctcatcaatggttgctgttatagttaaatcagtaaagatcttgagtatcaa

SEQ ID NO: 143462 - DNA, 363 bp, Artificial Sequence
  derived and/or modified sequence
atgagcagtagcgccggcagcgggcaccagccttcccagtcccgtgcgatccctacacgcactgtggcaatttctgatgccgctcagctgccccatgattattgcaccactcctgggggaacattattcagcacgacacctggaggcactcggataatctatgatcggaaatttctcctggataggcggaactctcccatggcacagacccctccctgccacctgccgaatatccccggggtcactagtcccggcactctgattgaggattctaaagtcgaagtgaacaacctgaacaatctgaacaaccatgatcgaaaacatgccgttggggacgacgcacagtttgaaatggatatttag

SEQ ID NO: 143463 - DNA, 363 bp, Artificial Sequence
  derived and/or modified sequence
atgagcagcagcgctggcagcggccaccagcccagccagagccgggccatccccaccaggacagtggccatcagtgatgctgcccagctgccccatgactactgcaccacccctgggggcaccctcttcagcaccaccccaggcggcacccgcatcatctatgacaggaagttcctgctggacagaagaaacagccccatggcccagaccccaccctgccacctgcccaacatccctggggtgaccagccctggcaccctgattgaggacagcaaggtggaggtgaacaacctgaacaacctgaacaaccacgacaggaagcatgctgtgggagatgatgcccagtttgagatggacatctag

SEQ ID NO: 143464 - DNA, 363 bp, Artificial Sequence
  derived and/or modified sequence
atgagcagcagcgccggcagcggccaccagcccagccagagccgggcaatacccactcggacggttgccatctcagacgcggcgcagttaccccatgactactgtaccactccaggcgggaccctgttcagcacaacccctggcggcactcgcatcatatacgatcgcaagttcctgctggacagaagaaattctcctatggcccagactcctccctgtcacctgcccaacatcccaggagttacgtcgccaggaacattaatcgaggatagtaaggtagaggttaacaatttaaataacctcaacaaccacgaccggaaacacgccgtgggcgacgacgctcaattcgagatggacatttag

SEQ ID NO: 143465 - DNA, 363 bp, Artificial Sequence
  derived and/or modified sequence
atgtcatcatccgcaggctccggccaccagcctagtcagagcagggcaattccaacacggactgtcgccataagtgatgcagcccagctgccacacgactactgtacaaccccgggaggtaccttgttttctactactccgggaggcacaaggataatctatgataggaagttcctcctggataggcggaactcgcccatggcacaaactcccccttgccatttaccgaacattccaggtgtaactagcccaggaacattgatcgaagactccaaggtggaggtcaacaatttgaacaatctgaataaccacgaccggaagcatgccgtgggcgacgacgctcagtttgaaatggatatctag

SEQ ID NO: 143466 - DNA, 363 bp, Artificial Sequence
  derived and/or modified sequence
atgagcagcagcgccggcagcggccaccagcccagccagagcagagccatccccaccagaaccgtggccatcagcgacgccgcccagctgccccacgactactgcaccacccccggcggcaccctgttcagcaccacccccggcggcaccagaatcatctacgacagaaagttcctgctggacagaagaaacagccccatggcccagacccccccctgccacctgcccaacatccccggcgtgaccagccccggcaccctgatcgaggacagcaaggtggaggtgaacaacctgaacaacctgaacaaccacgacagaaagcacgccgtgggcgacgacgcccagttcgagatggacatctag

SEQ ID NO: 143467 - protein, 290 aa, Artificial Sequence
  derived and/or modified sequence
MCLAGCTPRKAAAPGRGALPRARLPRTAPAAATMFQPAAKRGFTIESLVAKDGGTGGGTGGGGAGSHLLAAAASEEPLRPTALNYPHPSAAEAAFVSGFPAAAAAGAGRSLYGGPELVFPEAMNHPALTVHPAHQLGASPLQPPHSFFGAQHRDPLHFYPWVLRNRFFGHRFQASDVPQDGLLLHGPFARKPKRIRTAFSPSQLLRLERAFEKNHYVVGAERKQLAGSLSLSETQVKVWFQNRRTKYKRQKLEEEGPESEQKKKGSHHINRWRIATKQANGEDIDVTSND

SEQ ID NO: 143468 - DNA, 462 bp, Artificial Sequence
  derived and/or modified sequence
gcctccccgctgcagcccccgcactccttcttcggcgcccagcaccgggaccctctccatttctacccctgggtcctgcggaaccgcttcttcggccaccgcttccaggccagcgacgtgccccaggacgggctgcttctgcacggccccttcgcacgcaagcccaagcggatccgcacggccttctcgccctcgcagctgctgcggctggagcgcgccttcgagaagaaccactacgtggtgggcgccgagcggaagcagctggccggcagtctcagcctctccgagacgcaggtgaaggtgtggttccagaaccggaggacaaagtacaaacggcagaagctggaggaggaagggcctgagtccgagcagaagaagaagggctcccatcacatcaaccggtggcgcattgccacgaagcaggccaatggggaggacatcgatgtcacctccaatgactag

SEQ ID NO: 143469 - DNA, 873 bp, Artificial Sequence
  derived and/or modified sequence
atgtgtctcgccggttgcactcccagaaaagcggccgcgccaggaaggggggccctgcccagggctcgactcccccgaactgcaccggcagctgcgactatgtttcagcctgcagccaagcgcggctttaccattgagtcacttgtcgccaaagatggagggactggcggcggcaccggtggtggaggcgccgggtcccacctgctggctgcagcagcctccgaagagcctttacgcccaacggcgttaaactacccacacccgtctgctgcggaggcagcttttgtcagtggcttccccgctgcagcagccgctggagccgggagatcactttatggcgggcccgaactggtctttccggaggccatgaatcatccggcattaaccgtgcatcccgcacaccaattaggcgcctctcctctccagcccccccactccttcttcggcgcccagcatagggatccactgcacttctacccctgggtgttaaggaataggttcttcggtcaccggttccaggcaagcgatgtgccccaggacggtctgctgctgcacggaccctttgctcggaaacccaagcgaatcagaacagccttttccccaagccagttactccggctcgaacgggcgttcgagaaaaaccactatgtggtcggcgcagagagaaagcagctcgccgggtccctgtcgctaagcgagacgcaggttaaagtgtggttccagaatcgtcgtactaagtataagcggcagaaactcgaagaggaaggtcccgaatctgagcagaagaaaaagggcagccaccacataaatagatggcgcatcgcaaccaaacaggcaaatggagaggacatcgacgtgacctcaaacgattag

SEQ ID NO: 143470 - DNA, 873 bp, Artificial Sequence
  derived and/or modified sequence
atgtgcctggccggctgcacccccaggaaggccgccgcccctggccgcggggccctgccccgggcccggctgcccaggacagccccagctgctgccaccatgttccagcctgctgccaagaggggcttcaccatcgagagcctggtggccaaggatggcggcactggaggcggcactggaggcggcggggccggcagccacctgctggccgccgccgccagcgaggagcccctgcggcccacagccctgaactacccccaccccagcgctgctgaggccgcctttgtgtctggcttccctgctgctgctgctgctggagctggccgcagcctgtatggaggccctgagctggtgtttcctgaggccatgaaccacccagccctgactgtgcacccagcccaccagctgggcgccagccccctgcagcccccccacagcttcttcggggcccagcaccgggaccccctgcacttctacccctgggtgctgaggaaccgcttcttcggccaccgcttccaggccagtgatgtgccccaggacggcctgctgctgcacggcccctttgccaggaagcccaagaggatcagaacagccttcagccccagccagctgctgcggctggagcgggcctttgagaagaaccactacgtggtgggcgctgagaggaagcagctggccggcagcctgagcctgtctgagacccaggtgaaggtgtggttccagaacagaaggaccaagtacaagaggcagaagctggaggaggagggccctgagagcgagcagaagaagaagggcagccaccacatcaaccgctggagaattgccaccaagcaggccaacggggaggacattgatgtgaccagcaatgactag

SEQ ID NO: 143471 - DNA, 873 bp, Artificial Sequence
  derived and/or modified sequence
atgtgcctggccggctgcaccccccggaaggccgccgcccccggcaggggagccctgcctcgcgctagactgccaaggactgcccctgccgccgccaccatgtttcaaccggctgccaaacgtgggtttacaatagaatccctggtggctaaggatggcggaacgggcggaggcaccggagggggtggcgccggttcccatctcttggcagcagcagcttctgaagagccccttcgccccaccgccttgaattacccccacccctccgcggccgaagcagcctttgtgtctggtttccctgctgctgcagccgcgggggctggccgaagcctttatgggggacccgagctggtgttccctgaggccatgaaccacccggccctgacagtgcaccctgcccaccaattgggagcatcgccactccagccgccacatagctttttcggggcccagcacagggatcccctccatttctatccatgggtgctgagaaacaggtttttcggccatcgcttccaggcgtcagacgtgccccaagatggactgttgctacacggccccttcgccaggaagcccaaacggatccgaacagctttcagcccttctcaactgctcaggcttgagcgcgctttcgagaagaatcattatgtggtgggcgctgaacgaaaacagctcgctgggtccctctctctctcagagactcaggtgaaagtgtggttccaaaaccgccggaccaagtacaagcggcagaagctggaggaagaaggacccgagtcagagcagaaaaaaaagggcagccaccacatcaaccgctggcgtattgctactaagcaggctaatggggaggacatcgacgtgacttctaacgactag

SEQ ID NO: 143472 - DNA, 873 bp, Artificial Sequence
  derived and/or modified sequence
atgtgtctggccggatgcaccccgaggaaggccgctgcccctgggaggggagcactgccccgagctcggctcccacgaaccgctcctgctgctgcaaccatgttccaaccagcggctaagcggggtttcacgatagagtccctggtcgccaaggatgggggaacggggggaggaaccggagggggaggtgcaggctcacatctgctcgctgcagccgcaagtgaagagcccctgagaccaactgcacttaactatccccatccaagtgcggcagaggctgcgtttgtgtctgggttccccgcagcagcagctgccggagcgggtcgatcactgtacggcggaccagagctcgtgtttcccgaagcaatgaaccacccagctttgaccgtgcaccccgcacatcaattgggcgcaagccccttgcaaccccctcactccttcttcggcgctcagcatcgcgatcctcttcatttctatccttgggtgcttagaaatcggttcttcggccacaggttccaggcctcagacgtgccccaggatggactgctgcttcacggcccttttgcgaggaaaccaaaacgaattagaaccgccttcagccccagccagttgctgagattggaaagagctttcgagaagaatcactatgtggtgggagcagaaaggaagcagctagctggctctttgtcattgtccgaaacgcaagtcaaggtgtggttccagaaccgaaggacaaagtataagcgccaaaagttggaagaagagggccctgaatccgagcagaagaagaaaggctcccatcacataaaccgctggcggattgcaacaaaacaggccaatggtgaggacattgatgtcacttcgaacgactag

SEQ ID NO: 143473 - DNA, 873 bp, Artificial Sequence
  derived and/or modified sequence
atgtgcctggccggctgcacccccagaaaggccgccgcccccggcagaggcgccctgcccagagccagactgcccagaaccgcccccgccgccgccaccatgttccagcccgccgccaagagaggcttcaccatcgagagcctggtggccaaggacggcggcaccggcggcggcaccggcggcggcggcgccggcagccacctgctggccgccgccgccagcgaggagcccctgagacccaccgccctgaactacccccaccccagcgccgccgaggccgccttcgtgagcggcttccccgccgccgccgccgccggcgccggcagaagcctgtacggcggccccgagctggtgttccccgaggccatgaaccaccccgccctgaccgtgcaccccgcccaccagctgggcgccagccccctgcagcccccccacagcttcttcggcgcccagcacagagaccccctgcacttctacccctgggtgctgagaaacagattcttcggccacagattccaggccagcgacgtgccccaggacggcctgctgctgcacggccccttcgccagaaagcccaagagaatcagaaccgccttcagccccagccagctgctgagactggagagagccttcgagaagaaccactacgtggtgggcgccgagagaaagcagctggccggcagcctgagcctgagcgagacccaggtgaaggtgtggttccagaacagaagaaccaagtacaagagacagaagctggaggaggagggccccgagagcgagcagaagaagaagggcagccaccacatcaacagatggagaatcgccaccaagcaggccaacggcgaggacatcgacgtgaccagcaacgactag

SEQ ID NO: 143474 - DNA, 2188 bp, Artificial Sequence
  derived and/or modified sequence
aggtgagcggcggccaatgggcgagcgcggggcaggtgcccgctaactcgcgcctcgcagcgctgggcggccggggctgggcagggcagtgcggggacaccgggggctggggtcggtcccagcgggactccgaaaggagggagacgagctcaaccctcgggccttactggcagctcgcagcctagcacggagcccgcgcctgtgcgggcgcctggagctgcccgctccgccgcagcagccgccgcgcctggccgtacgctgtggccggaccccgcggtcgctcgctcacacacccctcgccgctccgcgcctggctcgcccgcgggggccgagcgcgagcgggcgggcgggggaggtgaggggtgcgggcgggtgtgcatgtgcctggctgggtgcacaccccgcaaggcggcggcgccaggacgcggagcgctccccagagcccggctgcctcgcacagctcccgcggctgcgaccatgttccagcccgcggccaagcgcggctttaccatagagtccttggtggccaaggacggcggcaccggcgggggcactggcggcgggggcgcgggctcccatctcctggcggcggccgcctccgaggaaccgctccggcccacggcgctcaactaccctcaccccagcgcggccgaggcggccttcgtgagtggcttccctgccgcggccgccgcgggcgcgggccgctcgctctacggtgggcccgagctcgtgttccccgaggccatgaaccaccccgcgctgaccgtgcatccggcgcaccagctgggcgcctccccgctgcagcccccgcactccttcttcggcgcccagcaccgggaccctctccatttctacccctgggtcctgcggaaccgcttcttcggccaccgcttccaggccagcgacgtgccccaggacgggctgcttctgcacggccccttcgcacgcaagcccaagcggatccgcacggccttctcgccctcgcagctgctgcggctggagcgcgccttcgagaagaaccactacgtggtgggcgccgagcggaagcagctggccggcagtctcagcctctccgagacgcaggtgaaggtgtggttccagaaccggaggacaaagtacaaacggcagaagctggaggaggaagggcctgagtccgagcagaagaagaagggctcccatcacatcaaccggtggcgcattgccacgaagcaggccaatggggaggacatcgatgtcacctccaatgactagggtgggcaaccacaaacccacgagggcagagtgctgcttgctgctggccaggcccctgcgtgggcccaagctggactctggccactccctggccaggctttggggaggcctggagtcatggccccacagggcttgaagcccggggccgccattgacagagggacaagcaatgggctggctgaggcctgggaccacttggccttctcctcggagagcctgcctgcctgggcgggcccgcccgccaccgcagcctcccagctgctctccgtgtctccaatctcccttttgttttgatgcatttctgttttaatttattttccaggcaccactgtagtttagtgatccccagtgtcccccttccctatgggaataataaaagtctctctcttaatgacacgggcatccagctccagccccagagcctggggtggtagattccggctctgagggccagtgggggctggtagagcaaacgcgttcagggcctgggagcctggggtggggtactggtggagggggtcaagggtaattcattaactcctctcttttgttgggggaccctggtctctacctccagctccacagcaggagaaacaggctagacatagggaagggccatcctgtatcttgagggaggacaggcccaggtctttcttaacgtattgagaggtgggaatcaggcccaggtagttcaatgggagagggagagtgcttccctctgcctagagactctggtggcttctccagttgaggagaaaccagaggaaaggggaggattggggtctgggggagggaacaccattcacaaaggctgacggttccagtccgaagtcgtgggcccaccaggatgctcacctgtccttggagaaccgctgggcaggttgagactgcagagacagggcttaaggctgagcctgcaaccagtccccagtgactc

SEQ ID NO: 143475 - protein, 252 aa, Artificial Sequence
  derived and/or modified sequence
MFQPAPKRCFTIESLVAKDSPLPASRSEDPIRPAALSYANSSPINPFLNGFHSAAAAAAGRGVYSNPDLVFAEAVSHPPNPAVPVHPVPPPHALAAHPLPSSHSPHPLFASQQRDPSTFYPWLIHRYRYLGHRFQGNDTSPESFLLHNALARKPKRIRTAFSPSQLLRLEHAFEKNHYVVGAERKQLAHSLSLTETQVKVWFQNRRTKFKRQKLEEEGSDSQQKKKGTHHINRWRIATKQASPEEIDVTSDD

SEQ ID NO: 143476 - DNA, 2908 bp, Artificial Sequence
  derived and/or modified sequence
cgggcgccgcaggagcgagtgagctgggagcgaggggcgaaggcgcggagaagcccggccgcccggtgggcggcagaaggctcagccgaggcggcggcgccgactccgttccactctcggcccggatccaggcctccgggttcccaggcgctcacctccctctgacgcactttaaagagtctccccccttccacctcagggcgagtaatagcgaccaatcatcaagccatttaccaggcttcggaggaagctgtttatgtgatccccgcactaattaggctcatgaactaacaaatcgtttgcacaacttgtgaagaagcgaacacttccatggattgtccttggacttagggcgccctgcccgccttttgcagaggagaaaaaacttttttttttttttgcctcccccgagaactttccccccttctcctccctgcctctaactccgatccccccacgccatctcgccaaaaaaaaaaaaaaaaaaaaaaaagaaaaaaaaagaaaaaaaaagaaaaaaaattaccccaatccacgcctgcaaattcttctggaaggattttcccccctctcttcaggttgggcgcgtttggtgcaagattctcgggatcctcggctttgcctctccctctccctcccccctcctttcctttttcctttcctttcctttctttcttcctttccttccccccacccccacccccaccccaaacaaacgagtccccaattctcgtccgtcctcgccgcgggcagcgggcggcggaggcagcgtgcggcggtcgccaggagctgggagcccagggcgcccgctcctcggcgcagcatgttccagccggcgcccaagcgctgcttcaccatcgagtcgctggtggccaaggacagtcccctgcccgcctcgcgctccgaggaccccatccgtcccgcggcactcagctacgctaactccagccccataaatccgttcctcaacggcttccactcggccgccgccgccgccgccggtaggggcgtctactccaacccggacttggtgttcgccgaggcggtctcgcacccgcccaaccccgccgtgccagtgcacccggtgccgccgccgcacgccctggccgcccaccccctaccctcctcgcactcgccacaccccctattcgcctcgcagcagcgggatccgtccaccttctacccctggctcatccaccgctaccgatatctgggtcatcgcttccaagggaacgacactagccccgagagtttccttttgcacaacgcgctggcccgaaagcccaagcggatccgaaccgccttctccccgtcccagcttctaaggctggaacacgcctttgagaagaatcactacgtggtgggcgccgaaaggaagcagctggcacacagcctcagcctcacggaaactcaggtaaaagtatggtttcagaaccgaagaacaaagttcaaaaggcagaagctggaggaagaaggctcagattcgcaacaaaagaaaaaagggacgcaccatattaaccggtggagaatcgccaccaagcaggcgagtccggaggaaatagacgtgacctcagatgattaaaaacataaacctaaccccacagaaacggacaacatggagcaaaagagacagggagaggtggagaaggaaaaaaccctacaaaacaaaaacaaaccgcatacacgttcaccgagaaagggagagggaatcggagggagcagcggaatgcggcgaagactctggacagcgagggcacagggtcccaaaccgaggccgcgccaagatggcagaggatggaggctccttcatcaacaagcgaccctcgtctaaagaggcagctgagtgagagacacagagagaaggagaaagagggagggagagagagaaagagagagaaagagagagagagagagagagagagaaagctgaacgtgcactctgacaaggggagctgtcaatcaaacaccaaaccggggagacaagatgattggcaggtattccgtttatcacagtccacttaaaaaatgatgatgatgataaaaaccacgacccaaccaggcacaggacttttttgttttttgcacttcgctgtgtttcccccccatctttaaaaataattagtaataaaaaacaaaaattccatatctagccccatcccacacctgtttcaaatccttgaaatgcatgtagcagttgttgggcgaatggtgtttaaagaccgaaaatgaattgtaattttcttttccttttaaagacaggttctgtgtgctttttattttgattttttttcccaagaaatgtgcagtctgtaaacactttttgataccttctgatgtcaaagtgattgtgcaagctaaatgaagtaggctcagcgatagtggtcctcttacagagaaacggggagcaggacgacgggggggctgggggtggcgggggagggtgcccacaaaaagaatcaggacttgtactgggaaaaaaacccctaaattaattatatttcttggacattccctttcctaacatcctgaggcttaaaaccctgatgcaaacttctcctttcagtggttggagaaattggccgagttcaaccattcactgcaatgcctattccaaactttaaatctatctattgcaaaacctgaaggactgtagttagcggggatgatgttaagtgtggccaagcgcacggcggcaagttttcaagcactgagtttctattccaagatcatagacttactaaagagagtgacaaatgcttccttaatgtcttctataccagaatgtaaatatttttgtgttttgtgttaatttgttagaattctaacacactatatacttccaagaagtatgtcaatgtcaatattttgtcaataaagatttatcaatatgccctcaaaaaaaaaaaaa

SEQ ID NO: 143477 - DNA, 759 bp, Artificial Sequence
  derived and/or modified sequence
atgttccagccggccccaaaacgatgtttcaccattgagtctttggtcgctaaggatagtcccctcccagcctccagatccgaggatccaatccgccccgccgctttatcctacgccaattcatcccccatcaacccgtttcttaacggtttccatagcgcagccgccgctgcagctggcaggggtgtttactctaatccggacctggtgtttgcagaggccgtatcccatccccctaatccagctgtaccagtgcatccggtgcccccaccccacgccctggctgcccaccccttaccctcctcccactccccacacccattattcgcaagtcagcaacgcgacccatctacattctatccttggctaattcaccgctacagatacctggggcatcgtttccaaggaaacgatacaagtcctgaaagcttcttgcttcataacgcgttggcccgaaaacctaaacgtatacgcacagccttctctcccagccagctcctgcggctcgaacacgccttcgaaaaaaatcactatgtggtgggagccgaaagaaagcaactcgctcacagcctttctctgaccgagacccaggtcaaagtctggttccagaaccgaaggacaaagtttaagaggcagaaattggaggaggagggctcagatagccagcagaagaagaagggcacgcatcatattaatagatggaggatcgcaaccaaacaggctagcccggaggagatagatgtgacttctgatgactag

SEQ ID NO: 143478 - DNA, 759 bp, Artificial Sequence
  derived and/or modified sequence
atgttccagcctgcccccaagcgctgcttcaccatcgagagcctggtggccaaggacagccccctgcctgccagccgctctgaggaccccatccggcctgctgccctgtcctatgccaacagcagccccatcaaccccttcctgaatggcttccacagcgctgctgctgctgctgctggccggggcgtgtacagcaacccagacctggtgtttgctgaggccgtgagccacccccccaacccagctgtgcctgtgcaccctgtgcccccaccccacgccctggccgcccaccccctgcccagcagccacagcccccaccccctgtttgccagccagcagagggaccccagcaccttctacccctggctgatccaccgctaccgctacctgggccaccgcttccagggcaatgacaccagccctgagagcttcctgctgcacaatgccctggccaggaagcccaagaggatcagaacagccttcagccccagccagctgctgcggctggagcacgcctttgagaagaaccactacgtggtgggcgctgagaggaagcagctggcccacagcctgagcctgacagagacccaggtgaaggtgtggttccagaacagaaggaccaagttcaagaggcagaagctggaggaggagggcagtgacagccagcagaagaagaagggcacccaccacatcaaccgctggagaattgccaccaagcaggccagccctgaggagattgatgtgaccagtgatgactag

SEQ ID NO: 143479 - DNA, 759 bp, Artificial Sequence
  derived and/or modified sequence
atgttccagcccgcccccaagcggtgcttcaccatcgagagcctggtagccaaagatagcccattacctgccagcagatctgaggaccccattcgtcctgccgccttgtcatacgccaactcctctccgatcaatcccttcttaaatggctttcactccgcggcggcggctgccgccggccgcggggtttactcaaacccagacctagtcttcgccgaagccgtgtcgcacccccccaaccctgccgtaccagtacatcccgtgccaccgcctcatgccttagccgcacacccactgccctcatctcattccccccatcctctgtttgcaagccagcagcgggacccgtcaaccttttacccctggcttatccaccgctatcgttatctcggccacaggttccaggggaacgacacgtccccggagagctttctgctccacaatgccctcgcccgtaaaccaaagcggattcgaaccgcctttagcccgtctcaacttttgcggctggaacacgcctttgagaagaaccattacgtggtaggcgcagagagaaaacagctggcccattctttaagccttaccgaaactcaggtcaaggtgtggtttcaaaatcggcgcacgaagtttaagagacagaaactagaagaagaaggcagtgactcacagcagaagaagaagggcacccatcacattaatagatggcggatcgcgaccaagcaggccagccccgaggagatcgatgtgactagcgacgactag

SEQ ID NO: 143480 - DNA, 759 bp, Artificial Sequence
  derived and/or modified sequence
atgttccagcccgctcctaaaaggtgtttcactatcgaatctctagtcgccaaagactcgcctttgccagcctcacgctccgaggaccccatccggcctgcagctctgagctatgccaattcgagtccgatcaatccatttctgaatggtttccatagtgcagccgcagccgcagcgggacgcggagtttactcgaaccccgacctggtgttcgctgaggccgtatcacacccacccaacccagcagtgccggtgcaccctgtccccccaccacacgccctagccgcacatccgctgccctcctcccacagcccacatcccttgtttgccagtcagcagagggatccgagtactttttacccttggctgattcatcgctatcgataccttggtcaccggtttcagggcaacgacacctccccggaaagtttcttactgcacaacgccctggcacggaagcctaaacgaatacggaccgcatttagcccatcgcaattactcaggctcgagcacgcttttgagaagaaccactatgttgttggtgctgaaaggaaacagctagcccacagtctctcactcaccgaaactcaagtcaaggtctggtttcagaacagacggaccaaatttaagcgccagaagctcgaagaggagggcagcgacagccagcaaaagaaaaagggtacccaccacataaacagatggcgcattgctaccaagcaggcctcacccgaagagatcgacgtaacctccgatgattag

SEQ ID NO: 143481 - DNA, 759 bp, Artificial Sequence
  derived and/or modified sequence
atgttccagcccgcccccaagagatgcttcaccatcgagagcctggtggccaaggacagccccctgcccgccagcagaagcgaggaccccatcagacccgccgccctgagctacgccaacagcagccccatcaaccccttcctgaacggcttccacagcgccgccgccgccgccgccggcagaggcgtgtacagcaaccccgacctggtgttcgccgaggccgtgagccacccccccaaccccgccgtgcccgtgcaccccgtgccccccccccacgccctggccgcccaccccctgcccagcagccacagcccccaccccctgttcgccagccagcagagagaccccagcaccttctacccctggctgatccacagatacagatacctgggccacagattccagggcaacgacaccagccccgagagcttcctgctgcacaacgccctggccagaaagcccaagagaatcagaaccgccttcagccccagccagctgctgagactggagcacgccttcgagaagaaccactacgtggtgggcgccgagagaaagcagctggcccacagcctgagcctgaccgagacccaggtgaaggtgtggttccagaacagaagaaccaagttcaagagacagaagctggaggaggagggcagcgacagccagcagaagaagaagggcacccaccacatcaacagatggagaatcgccaccaagcaggccagccccgaggagatcgacgtgaccagcgacgactag

SEQ ID NO: 143482 - DNA, 3281 bp, Artificial Sequence
  derived and/or modified sequence
gcgggcgccgcaggagcgagtgagctgggagcgaggggcgaaggcgcggagaagcccggccgcccggtgggcggcagaaggctcagccgaggcggcggcgccgactccgttccactctcggcccggatccaggcctccgggttcccaggcgctcacctccctctgacgcactttaaagagtctccccccttccacctcagggcgagtaatagcgaccaatcatcaagccatttaccaggcttcggaggaagctgtttatgtgatccccgcactaattaggctcatgaactaacaaatcgtttgcacaacttgtgaagaagcgaacacttccatggattgtccttggacttagggcgccctgcccgccttttgcagaggagaaaaaacttttttttttttttgcctcccccgagaactttccccccttctcctccctgcctctaactccgatccccccacgccatctcgccaaaaaaaaaaaaaaaaaaaaaaaagaaaaaaaaagaaaaaaaaagaaaaaaaattaccccaatccacgcctgcaaattcttctggaaggattttcccccctctcttcaggttgggcgcgtttggtgcaagattctcgggatcctcggctttgcctctccctctccctcccccctcctttcctttttcctttcctttcctttctttcttcctttccttccccccacccccacccccaccccaaacaaacgagtccccaattctcgtccgtcctcgccgcgggcagcgggcggcggaggcagcgtgcggcggtcgccaggagctgggagcccagggcgcccgctcctcggcgcagcatgttccagccggcgcccaagcgctgcttcaccatcgagtcgctggtggccaaggacagtcccctgcccgcctcgcgctccgaggaccccatccgtcccgcggcactcagctacgctaactccagccccataaatccgttcctcaacggcttccactcggccgccgccgccgccgccggtaggggcgtctactccaacccggacttggtgttcgccgaggcggtctcgcacccgcccaaccccgccgtgccagtgcacccggtgccgccgccgcacgccctggccgcccaccccctaccctcctcgcactcgccacaccccctattcgcctcgcagcagcgggatccgtccaccttctacccctggctcatccaccgctaccgatatctgggtcatcgcttccaagggaacgacactagccccgagagtttccttttgcacaacgcgctggcccgaaagcccaagcggatccgaaccgccttctccccgtcccagcttctaaggctggaacacgcctttgagaagaatcactacgtggtgggcgccgaaaggaagcagctggcacacagcctcagcctcacggaaactcaggtaaaagtatggtttcagaaccgaagaacaaagttcaaaaggcagaagctggaggaagaaggctcagattcgcaacaaaagaaaaaagggacgcaccatattaaccggtggagaatcgccaccaagcaggcgagtccggaggaaatagacgtgacctcagatgattaaaaacataaacctaaccccacagaaacggacaacatggagcaaaagagacagggagaggtggagaaggaaaaaaccctacaaaacaaaaacaaaccgcatacacgttcaccgagaaagggagagggaatcggagggagcagcggaatgcggcgaagactctggacagcgagggcacagggtcccaaaccgaggccgcgccaagatggcagaggatggaggctccttcatcaacaagcgaccctcgtctaaagaggcagctgagtgagagacacagagagaaggagaaagagggagggagagagagaaagagagagaaagagagagagagagagagagagagaaagctgaacgtgcactctgacaaggggagctgtcaatcaaacaccaaaccggggagacaagatgattggcaggtattccgtttatcacagtccacttaaaaaatgatgatgatgataaaaaccacgacccaaccaggcacaggacttttttgttttttgcacttcgctgtgtttcccccccatctttaaaaataattagtaataaaaaacaaaaattccatatctagccccatcccacacctgtttcaaatccttgaaatgcatgtagcagttgttgggcgaatggtgtttaaagaccgaaaatgaattgtaattttcttttccttttaaagacaggttctgtgtgctttttattttgattttttttcccaagaaatgtgcagtctgtaaacactttttgataccttctgatgtcaaagtgattgtgcaagctaaatgaagtaggctcagcgatagtggtcctcttacagagaaacggggagcaggacgacgggggggctgggggtggcgggggagggtgcccacaaaaagaatcaggacttgtactgggaaaaaaacccctaaattaattatatttcttggacattccctttcctaacatcctgaggcttaaaaccctgatgcaaacttctcctttcagtggttggagaaattggccgagttcaaccattcactgcaatgcctattccaaactttaaatctatctattgcaaaacctgaaggactgtagttagcggggatgatgttaagtgtggccaagcgcacggcggcaagttttcaagcactgagtttctattccaagatcatagacttactaaagagagtgacaaatgcttccttaatgtcttctataccagaatgtaaatatttttgtgttttgtgttaatttgttagaattctaacacactatatacttccaagaagtatgtcaatgtcaatattttgtcaataaagatttatcaatatgccctcagagtagtcgtcttgggaaattgaagtggatctttaaaaatgtatctcagtaatttgagtgtggtccttccccaactaggctcaagaaacccaggctcctcacccacaaaagggccagattgatggattctcaggcattttaaagaaagatgagggtggagaagggagaagattaggaaaacttaagtccttcagaaaagagatgggagaaaagtttttcaaccagactttgcccattgtatgccctcctgagggagtttagtttgaacttcaggttaaaatgcttacttctcttaacctctggttattaaaaaaaaactggacatatagttacacattgaggactactctcccaaaatattggggaaaacatgtagcagaatct

SEQ ID NO: 143483 - protein, 288 aa, Artificial Sequence [sequence omitted]

SEQ ID NO: 143484 - protein, 237 aa, Artificial Sequence
  derived and/or modified sequence
MCIKIIKEYERAIIFRLGRILQGGAKGPGLFFILPCTDSFIKVDMRTISFDIPPQEILTKDSVTISVDGVVYYRVQNATLAVANITNADSATRLLAQTTLRNVLGTKNLSQILSDREEIAHNMQSTLDDATDAWGIKVERVEIKDVKLPVQLQRAMAAEAEASREARAKVIAAEGEMNASRALKEASMVITESPAALQLRYLQTLTTIAAEKNSTIVFPLPIDMLQGIIGAKHSHLG

SEQ ID NO: 143485 - DNA, 867 bp, Artificial Sequence
  derived and/or modified sequence
atggccgagaagagacacaccagagacagcgaggcccagagactgcccgacagcttcaaggacagccccagcaagggcctgggcccctgcggctggatcctggtggccttcagcttcctgttcaccgtgatcaccttccccatcagcatctggatgtgcatcaagatcatcaaggagtacgagagagccatcatcttcagactgggcagaatcctgcagggcggcgccaagggccccggcctgttcttcatcctgccctgcaccgacagcttcatcaaggtggacatgagaaccatcagcttcgacatccccccccaggagatcctgaccaaggacagcgtgaccatcagcgtggacggcgtggtgtactacagagtgcagaacgccaccctggccgtggccaacatcaccaacgccgacagcgccaccagactgctggcccagaccaccctgagaaacgtgctgggcaccaagaacctgagccagatcctgagcgacagagaggagatcgcccacaacatgcagagcaccctggacgacgccaccgacgcctggggcatcaaggtggagagagtggagatcaaggacgtgaagctgcccgtgcagctgcagagagccatggccgccgaggccgaggccagcagagaggccagagccaaggtgatcgccgccgagggcgagatgaacgccagcagagccctgaaggaggccagcatggtgatcaccgagagccccgccgccctgcagctgagatacctgcagaccctgaccaccatcgccgccgagaagaacagcaccatcgtgttccccctgcccatcgacatgctgcagggcatcatcggcgccaagcacagccacctgggctag

SEQ ID NO: 143486 - DNA, 714 bp, Artificial Sequence
  derived and/or modified sequence
atgtgcatcaagatcatcaaggagtacgagagagccatcatcttcagactgggcagaatcctgcagggcggcgccaagggccccggcctgttcttcatcctgccctgcaccgacagcttcatcaaggtggacatgagaaccatcagcttcgacatccccccccaggagatcctgaccaaggacagcgtgaccatcagcgtggacggcgtggtgtactacagagtgcagaacgccaccctggccgtggccaacatcaccaacgccgacagcgccaccagactgctggcccagaccaccctgagaaacgtgctgggcaccaagaacctgagccagatcctgagcgacagagaggagatcgcccacaacatgcagagcaccctggacgacgccaccgacgcctggggcatcaaggtggagagagtggagatcaaggacgtgaagctgcccgtgcagctgcagagagccatggccgccgaggccgaggccagcagagaggccagagccaaggtgatcgccgccgagggcgagatgaacgccagcagagccctgaaggaggccagcatggtgatcaccgagagccccgccgccctgcagctgagatacctgcagaccctgaccaccatcgccgccgagaagaacagcaccatcgtgttccccctgcccatcgacatgctgcagggcatcatcggcgccaagcacagccacctgggctag

SEQ ID NO: 143487 - DNA, 867 bp, Artificial Sequence
  derived and/or modified sequence
atggccgaaaagagacacactcgcgattccgaagctcagaggctgcccgattcatttaaagatagcccatctaaagggttgggcccctgcggatggatcctggtggcctttagcttccttttcacggttataacatttcccatttcaatttggatgtgtatcaaaattattaaagagtacgaaagagccattattttccggttgggacggatcttacagggtggagctaagggccccggcctgttttttattctgccctgtaccgattcattcattaaggtggatatgagaaccatctctttcgacatccccccacaggagatccttactaaggattccgttactatcagtgtggacggcgtggtgtattacagagtccaaaatgctacgcttgcagtggccaacattacgaacgccgattctgcaactagactgctggcccaaacaacgctacgtaatgtcctgggcacgaaaaatctctctcagatactttccgaccgggaggagattgctcacaatatgcagagtacattggatgatgccactgacgcctggggcataaaggttgagagggtggagatcaaggatgtaaagttaccagtacagctacaacgtgcgatggctgcagaggcggaagctagcagggaggcccgggcaaaggtgattgcggctgagggagaaatgaatgctagcagggctttgaaggaggcttccatggtgattacagaatcaccagccgcactgcagctgaggtaccttcagacattgaccaccatcgccgccgagaagaacagtacaatcgtctttcccctacccatcgacatgctgcaggggatcattggggccaaacacagccatctgggctag

SEQ ID NO: 143488 - DNA, 714 bp, Artificial Sequence
  derived and/or modified sequence
atgtgtatcaaaatcatcaaagaatatgaacgcgccattattttccggctgggacgcatcctgcagggtggggccaaggggccagggctcttttttatcctgccatgcacagactcctttattaaagtggacatgcgcactatttcatttgacattccaccacaggagattttgacaaaagattccgttacaatttctgtggacggcgtggtatactacagggtccagaatgccaccctggccgtcgctaacatcacaaacgccgacagcgccacacgactgctggcgcagactacattgagaaatgtgttgggaacaaaaaatctgagccagatcctgtctgatagagaagagatcgctcacaacatgcagagcacactggacgatgctacagatgcctggggcatcaaggtggaacgtgtggagatcaaggatgttaaactgccagttcagctccagcgggccatggcagcagaggcagaagccagcagagaagctagggcaaaggtgattgcagctgagggcgagatgaatgcatccagagccctgaaagaagcttccatggtgataactgaatcccctgctgctctgcagttaaggtatcttcaaacgcttacaactatcgcggccgagaagaattcaacaatcgtcttccccttgcccatagatatgctgcaaggcatcatcggtgccaagcactcacacctcgggtag

SEQ ID NO: 143489 - DNA, 867 bp, Artificial Sequence
  derived and/or modified sequence
atggccgagaagaggcacacccgggacagcgaggcccagaggctgcctgacagcttcaaggacagccccagcaagggcctgggcccctgtggctggatcctggtggccttctccttcctgttcaccgtcatcaccttccccatcagcatctggatgtgcatcaagatcatcaaggagtatgaaagagccatcatcttccggctgggccgcatcctgcagggcggggccaagggccctggcctcttcttcatcctgccctgcacagacagcttcatcaaggtggacatgaggaccatcagctttgacatccccccccaggagatcctgaccaaggacagcgtgaccatctctgtggatggagtggtgtactacagagtgcagaatgccaccctggccgtggccaacatcaccaatgctgacagcgccacccggctgctggcccagaccaccctgagaaatgtgctgggcaccaagaacctgagccagatcctgagtgaccgggaggagatcgcccacaacatgcagagcaccctggatgatgccacagatgcctggggcatcaaggtggagcgggtggagatcaaggatgtgaagctgcctgtgcagctgcagagggccatggctgctgaggccgaggccagccgggaggcccgggccaaggtgattgctgctgagggggagatgaatgccagccgggccctgaaggaggcctccatggtgatcacagagagccctgctgccctgcagctgcgctacctgcagaccctgaccaccatcgctgctgagaagaacagcaccatcgtgttccccctgcccatcgacatgctgcagggcatcatcggggccaagcacagccacctgggctag

SEQ ID NO: 143490 - DNA, 714 bp, Artificial Sequence
  derived and/or modified sequence
atgtgcatcaagatcatcaaggagtatgagcgggccatcatcttccggctgggccgcatcctgcagggcggggccaagggccctggcctcttcttcatcctgccctgcacagacagcttcatcaaggtggacatgaggaccatcagctttgacatccccccccaggagatcctgaccaaggacagcgtgaccatctctgtggatggagtggtgtactacagagtgcagaatgccaccctggccgtggccaacatcaccaatgctgacagcgccacccggctgctggcccagaccaccctgagaaatgtgctgggcaccaagaacctgagccagatcctgagtgaccgggaggagatcgcccacaacatgcagagcaccctggatgatgccacagatgcctggggcatcaaggtggagcgggtggagatcaaggatgtgaagctgcctgtgcagctgcagagggccatggctgctgaggccgaggccagccgggaggcccgggccaaggtgattgctgctgagggggagatgaatgccagccgggccctgaaggaggcctccatggtgatcacagagagccctgctgccctgcagctgcgctacctgcagaccctgaccaccatcgctgctgagaagaacagcaccatcgtgttccccctgcccatcgacatgctgcagggcatcattggagccaagcacagccacctgggctag

SEQ ID NO: 143491 - DNA, 867 bp, Artificial Sequence
  derived and/or modified sequence
atggccgagaagcggcacacccgggacagcgaggcccagcggctgcccgattcctttaaagactctccaagcaaaggtctgggcccttgtgggtggatcttggttgcattctcatttctgttcactgtgatcacctttcctatctctatttggatgtgtattaagattatcaaagaatatgagagagcgataattttccgattggggcgaatactgcaggggggggctaaaggccctggcctattcttcatactgccctgcacagattccttcattaaagttgacatgcgaaccatatcatttgacatacctccacaggagatcctgacaaaggatagcgtgactatcagtgtcgatggcgtcgtgtattatcgcgttcaaaacgccactcttgctgtagccaatattactaatgctgactcagcaacaagattgttggcccagaccacactgaggaacgtgctgggcactaagaacctgagccaaatcctttctgatagggaggagattgcccacaatatgcagtcgaccctggatgatgctacagacgcctggggtataaaagtggagcgcgtggagatcaaggacgtgaaactgccagttcaactgcagagagccatggcagctgaagcagaagccagtagagaggctagagccaaggtcatcgcagccgagggcgaaatgaatgcctccagagctctcaaggaagccagcatggtgattacagagagccctgctgcactgcagctccgttatctgcagaccctgaccactatcgccgccgagaagaactccaccatcgtgtttcctctgcctattgatatgcttcagggtattataggagcaaagcatagccatctgggctag

SEQ ID NO: 143492 - DNA, 714 bp, Artificial Sequence
  derived and/or modified sequence
atgtgcatcaagatcatcaaggagtacgagcgggccatcatcttcaggctcgggcgcatcctgcaggggggcgccaaaggtccggggctgtttttcatattgccttgcaccgactcgtttattaaagtggacatgcgaaccatttcatttgatatcccgcctcaggaaatactgacgaaggacagtgtcaccattagcgtcgacggcgtggtatactatagagtacagaatgctacccttgccgtggccaatatcaccaacgccgacagcgcgacccgcctcctggcccagaccaccctgcgcaacgtgctcggtacgaaaaacctgtcccagatcctgtctgacagggaggagatcgcacataacatgcagtctactctggatgatgcaacggatgcctggggcatcaaggtcgagcgcgtggagatcaaggacgtgaaacttccagtgcaacttcagcgggcgatggcagctgaagcagaggcgtcgagagaggcgagggcgaaggtcattgcagctgaaggagagatgaacgcctccagggccctcaaagaagcttcaatggttattaccgaatcaccagcggccctgcagttacggtacttgcagacccttaccacgatcgccgcggaaaagaatagtacaatagttttcccgttgcctattgatatgcttcagggcatcataggcgctaagcactcccacctgggctag

SEQ ID NO: 143493 - DNA, 867 bp, Artificial Sequence
  derived and/or modified sequence
atggccgagaagagacatacacgtgactctgaggctcagcggctcccggatagtttcaaggattctccaagcaaggggctcggaccctgcggttggattctggtcgctttctccttcctcttcacagtaatcacatttcctatatctatatggatgtgcataaaaataattaaggagtacgagcgggcaatcatttttagactcggacggatcttacagggaggtgccaagggcccaggcctgttcttcatcctgccatgtaccgactcttttataaaagtggacatgcgtacaatttcattcgatataccgccacaggaaatcttgaccaaggattctgttactattagcgttgatggtgtggtttactatcgcgttcagaatgccaccctcgcagtcgcgaatatcaccaacgccgattccgcaacaaggctcctggcccagacgaccctccgcaacgtgctcggtacaaaaaatctatctcaaatcctctcggatagagaggaaatcgcccacaatatgcagtccaccctcgacgatgctacagacgcttggggcatcaaggttgagagggtcgaaatcaaagacgtgaaattacccgtccagctgcagcgggctatggctgctgaggcagaagcatcacgggaggctagagcaaaagtgatcgcagccgagggggagatgaatgccagtagagcgttgaaggaagctagcatggtgatcaccgaaagccccgctgccctacagctccgatacctgcagacactgaccacaatcgccgcagagaaaaacagtacgattgtcttccctctccccattgatatgctacaaggaataatcggcgctaagcattcacatctcggctag

SEQ ID NO: 143494 - DNA, 714 bp, Artificial Sequence
  derived and/or modified sequence
atgtgtataaagattattaaagagtacgagcgtgcaatcatattcagattaggtcgaattctgcaaggaggcgctaaaggtccaggcctttttttcatcttgccctgtaccgacagttttatcaaggtggacatgcggactatttcctttgatattccccctcaagagatactgacgaaagatagtgtgactatatctgtggatggcgtggtgtattaccgggtgcagaacgcaaccttagcggtggccaacattaccaacgcagatagcgcaacaaggctgctggcacagacgaccctccggaatgttctgggtaccaagaatttgtctcagatactgtctgatagggaggaaatcgctcacaatatgcagtccacattagacgacgccaccgacgcctggggcatcaaagtagagagggtagagattaaggatgtcaagctcccggtgcaacttcagcgcgcaatggccgcagaagccgaggcctcgcgagaggcaagagcaaaggttattgccgcagaaggtgaaatgaacgcttcaagggcactaaaagaagctagcatggtgatcacagaaagccccgcagcattgcagttgagatatcttcaaactctcaccacaatcgctgccgaaaaaaactctaccatcgtcttcccactcccaatcgatatgctgcagggaataatcggcgctaagcactcccaccttggatag

SEQ ID NO: 143495 - DNA, 3010 bp, Artificial Sequence
  derived and/or modified sequence
gactgcgtctcgggcagcatggccgagaagcggcacacacgggactccgaagcccagcggctccccgactccttcaaggacagccccagtaagggccttggaccttgcggatggattttggtggcgttctcattcttattcaccgttataactttcccaatctcaatatggatgtgcataaagattataaaagagtatgaaagagccatcatctttagattgggtcgcattttacaaggaggagccaaaggacctggtttgttttttattctgccatgcactgacagcttcatcaaagtggacatgagaactatttcatttgatattcctcctcaggagatcctcacaaaggattcagtgacaattagcgtggatggtgtggtctattaccgcgttcagaatgcaaccctggctgtggcaaatatcaccaacgctgactcagcaacccgtcttttggcacaaactactctgaggaatgttctgggcaccaagaatctttctcagatcctctctgacagagaagaaattgcacacaacatgcagtctactctggatgatgccactgatgcctggggaataaaggtggagcgtgtggaaattaaggatgtgaaactacctgtgcagctccagagagctatggctgcagaagcagaagcgtcccgcgaggcccgcgccaaggttattgcagccgaaggagaaatgaatgcatccagggctctgaaagaagcctccatggtcatcactgaatctcctgcagcccttcagctccgatacctgcagacactgaccaccattgctgctgagaaaaactcaacaattgtcttccctctgcccatagatatgctgcaaggaatcataggggcaaaacacagccatctaggctagtgtagagatgagcgctagccttccaagcatgaagtcggggaccaaattagcctttaactcataaagagagggtagggcttttctttttccatatgtcaattgtggtgttcccagaatgtatagcagttataaaaataggtgaaagaattgttagcttgtaaatactgagagattggtgatttatataaggtaatctgttagtcttaaaatagttaaaagtttgtatttttagattattatgtagtaggttagatccctcttgttttgacttccactgactcattctgaaccccctaagcacccaggccagaggcaagaacctgggctgtaactgccacctgacaccgctgactggctaaatgctttgcagaaagtgatgaccttacaccacaaccagcttctccaggtcatatgtgccttacctccagagagtctttttttttttttttctgagatggagtttcactcttgttgcccaggctggagtgcaatagcatgatctcggctcactgcaacctccgcctcctgggttcaagagattctcctgcctcagcctccccagtagctgggattacaggctcatgccaccatgcccagctaatttttgtattattattattgttttttagtagagacggggtttcaccatgttggccaggctagtcacgaactcctaacctcaggtgatccacccacctctgcctcccaaagtgctgggattacaggcatgagctaccacacctggtttggagagtcttaattaaggaaatttccctaatgttcatttattttctaaatccagaccgtgtttcagaataatccttacttgagagtagccattttcttgcctgtacttgtcagaactagaggaaatagccaagactaatgaaaaagattactctaacccttaaaagacttttaaattcactactagagtggtcattttaaaaatacatccatgttttaacttatttgagccttctttatgagtaaatgattcctccttgttctgtctttcaaaccagctaaatatttgtcacaaaagtgcttttttctcactgttgcctattttcatatatcaggttttaaatagttttaattttttaataaaattttctctacgttctatatgcaattgttatatatctatttgaatagctgaaggactaaaatacttttttaagagataacttcaggaaaccattatattttactatctgcatgctgttaactgtggtacactgtgaaatatgttgattacaaacccattcattacatagtataaggaattcacagtatattgactatatagtgtctaatgatcttgggcagatactgtcaaacttacaatatctatatagatgtaggtctttttaaatttacctagtcattcttctatcatgtatattgatgctgaaagaggaactggtcagctcctctggacaacaaattcttagtctataatattaggagacatcttctgttttgcaaatgtctgtgaatctgagcaacctggcattctgcttactggccagaaagctggcgggtgacatttgtaacatttcctctttgagactctgagttcacctagagaagtctaagcataacagctttctttcccagcacgagcctttatagctctctttagctcaaccactctgtccatccagccaatggatgtcccttcccctgtaccccaatttcaagcttattttaggaagccttgaactaccatgtatcctggctcctagctgagtttattagaggtatggagcagtgcaacttaaactcaagttgcacttacattttgaattttaaaatgatggttttatctgttgtgtgaagtggttcacccttgaggaccaggagcctccatatcctgactgaaaaccttttctgagacttagagtaacagtgcttttggttccttgagttctcctgtctccagataccaaatgaccttgacttttctgccttgtgaattcgtagtccaatcagctgaaattaaatcacttgggagggacgcatagaaggagctctaggaacacagtgccagtgcagaagtttctccaggtggcctccctttccaacaatgtacataataaagtgtatgcactttcactaa

SEQ ID NO: 143496 - DNA, 1511 bp, Artificial Sequence
  derived and/or modified sequence
attcccggcggctccgggtttggcaacgaggacgggggagtgcgactgcgtctcgggcagcatggccgagaagcggcacacacgggactccgaagcccagcggctccccgactccttcaaggaaacttgaactccaagcatttggcctcacatttcagaagattatccttgaagatacaaccaataaagtcctaaagtctcagacaatgaaaactatactgaacttgtggtccagttaaagtgagcactatgacagccccagtaagggccttggaccttgcggatggattttggtggcgttctcattcttattcaccgttataactttcccaatctcaatatggatgtgcataaagattataaaagagtatgaaagagccatcatctttagattgggtcgcattttacaaggaggagccaaaggacctggtttgttttttattctgccatgcactgacagcttcatcaaagtggacatgagaactatttcatttgatattcctcctcaggagatcctcacaaaggattcagtgacaattagcgtggatggtgtggtctattaccgcgttcagaatgcaaccctggctgtggcaaatatcaccaacgctgactcagcaacccgtcttttggcacaaactactctgaggaatgttctgggcaccaagaatctttctcagatcctctctgacagagaagaaattgcacacaacatgcagtctactctggatgatgccactgatgcctggggaataaaggtggagcgtgtggaaattaaggatgtgaaactacctgtgcagctccagagagctatggctgcagaagcagaagcgtcccgcgaggcccgcgccaaggttattgcagccgaaggagaaatgaatgcatccagggctctgaaagaagcctccatggtcatcactgaatctcctgcagcccttcagctccgatacctgcagacactgaccaccattgctgctgagaaaaactcaacaattgtcttccctctgcccatagatatgctgcaaggaatcataggggcaaaacacagccatctaggctagtgtagagatgagcgctagccttccaagcatgaagtcggggaccaaattagcctttaactcataaagagagggtagggcttttctttttccatatgtcaattgtggtgttcccagaatgtatagcagttataaaaataggtgaaagaattgttagcttgtaaatactgagagattggtgatttatataaggtaatctgttagtcttaaaatagttaaaagtttgtatttttagattattatgtagtaggttagatccctcttgttttgacttccactgactcattctgaaccccctaagcacccaggccagaggcaagaacctgggctgtaactgccacctgacaccgctgactggctaaatgctttgcagaaagtgatgaccttacaccacaaccagcttctccaggtcatatgtgccttacctccagagagtctttttttttttttttctga

SEQ ID NO: 143497 - protein, 639 aa, Artificial Sequence
  derived and/or modified sequence
MEDSQDLNEQSVKKTCTESDVSQSQNSRSMEMQDLASPHTLVGGGDTPGSSKLEKSNLSSTSVTTNGTGGENMTVLNTADWLLSCNTPSSATMSLLAVKTEPLNSSETTATTGDGALDTFTGSVITSSGYSPRSAHQYSPQLYPSKPYPHILSTPAAQTMSAYAGQTQYSGMQQPAVYTAYSQTGQPYSLPTYDLGVMLPAIKTESGLSQTQSPLQSGCLSYSPGFSTPQPGQTPYSYQMPGSSFAPSSTIYANNSVSNSTNFSGSQQDYPSYTAFGQNQYAQYYSASTYGAYMTSNNTADGTPSSTSTYQLQESLPGLTNQPGEFDTMQSPSTPIKDLDERTCRSSGSKSRGRGRKNNPSPPPDSDLERVFVWDLDETIIVFHSLLTGSYAQKYGKDPPMAVTLGLRMEEMIFNLADTHLFFNDLEECDQVHIDDVSSDDNGQDLSTYSFATDGFHAAASSANLCLPTGVRGGVDWMRKLAFRYRRVKELYNTYKNNVGGLLGPAKRDAWLQLRAEIEGLTDSWLTNALKSLSIISTRSNCINVLVTTTQLIPALAKVLLYSLGGAFPIENIYSATKIGKESCFERIMQRFGRKVVYVVIGDGVEEEQAAKKHNMPFWRISSHSDLLALHQALELEYL

SEQ ID NO: 143498 - DNA, 5699 bp, Artificial Sequence
  derived and/or modified sequence
ttccgcgcaaaacttccatcctgtccacgtgaagttgtcgctgccttagagagggggaaagagctgcgggaaaagccggggagtgacgactgcggcggctgggcgcgctctctcattttcttttcttctcctttcccccctgtcgcagtccggagttttggctcctctcctttcctcctccccctcggagccggcttctccctccgccccgcttctcccccgcttgtgtacgctatttgttgtggggtggccgaaggggatgtcctgttttcaccagaggcacagcgcgaaggggaaacttcgacactggaaggaacgagaataaatacttaattacggacgcactgaaccgcggctgggacagacacttcgggaacccgaggcggaccgggcgacgagatagtcatttttacttgaaggaagctgcttctacttgggagtggcaggagaagtgagaaaaccacatggaagactcccaggatttaaatgaacaatcagtaaagaaaacgtgcacagaatcagatgtttcacaatctcagaattccaggtctatggaaatgcaggacctagcaagtcctcatactcttgttggaggtggtgatactccaggtagctccaaactggaaaaatctaatctcagcagcacatcagttactacaaatgggacaggaggggaaaacatgactgttttaaacacagcagactggttgctgagttgcaacaccccctcttctgcaacaatgtctcttcttgcagtcaaaacagagcccttgaacagcagtgaaaccacagccacgactggagatggagcgcttgacacttttactgggtcagtaattacaagtagtggctacagccccagatcagcacatcagtattccccacagctgtatccttccaagccctatccacacattctttctacaccagcagctcaaacaatgtctgcctatgcaggccagactcagtattcggggatgcagcagccagccgtctacacagcctactcacagacaggacagccctacagcttgcccacttacgatttgggtgtgatgttgccagccatcaagacagagagtggactttcccaaactcagtccccattacagagtggctgcctcagttacagcccagggttctctaccccacagccaggccagacaccttattcttaccaaatgccaggttctagttttgcaccatcatctactatttatgcaaataattcagtttccaattcaacgaatttcagtggttcacaacaggattatccatcctatacagcctttggccaaaaccagtatgcacagtattattcagcatcaacgtatggagcgtatatgacatcgaataacacagccgatggcacaccctcttcaacctctacttatcagttgcaggaatctctcccaggactgactaaccaaccaggagagttcgataccatgcagagtccctccacacccatcaaagatcttgatgagagaacctgtaggagttctgggtcaaagtccagaggaagaggccggaaaaataatccctccccgcctcctgatagtgacctggagcgtgtgtttgtctgggatttggatgaaaccatcattgtttttcactcactgctcaccgggtcttatgcacagaagtatggcaaggatccccccatggctgtaacccttggactccgcatggaagaaatgatttttaatcttgctgatactcatttgttttttaatgatttagaggagtgtgatcaagttcatatagatgatgtttcctctgatgataatgggcaggacttaagtacctacagttttgcaactgatggcttccatgcagctgcaagtagtgcaaacctttgtttgccaacaggtgtaagaggaggggttgactggatgaggaagttggcttttcgttacagaagagtaaaagaattatataacacctacaagaacaacgttggaggactccttggccctgccaagagggatgcctggctacagttaagggcagagattgaaggtctgacagattcctggctaacaaatgcacttaagtctttatcaattattagcactaggagtaactgcataaatgtcttggtaacgacaactcaactgatcccagcacttgcgaaggttctactctatagtttaggaggtgctttccccattgagaatatttacagtgcaactaaaataggaaaagaaagttgctttgaacgaataatgcaaaggtttggcagaaaagtagtgtatgttgtaattggggatggtgtagaagaagaacaggcagcaaaaaagcacaacatgcccttctggaggatatccagtcactcagacctcctggctctccaccaagcactggaattagagtatttgtaactgtgttctttagccggagatccattttttatatttcaagtacactgaatttttatgtgtgattcaatgcctctggctctacacatataaattgtcttaatggatgaaatcatatttggaataaaaattccagaatgaagaattcagattgctgaatggagttaaactttagtgctacagaaaagaaactctatggtcttatatttacaacactttaatgggttttttaaaaatctgtggaggttgctggtacacaccaaatgagtccaaactggaatgagcagctttagcaaagaactcttaccctggcaaagcagcaacacacatgctccgtctgacaaggtggtcaacaacattcctcaaaatgggagatcttctcagccctgaggtttgaatctgactttagcctacctaacccagaaaatctgaattggaatgcactcagactgtataaggacagtcctatttagacatgtaatttgtgtaaattattgatgaaaataatttactgtgactttattagcagctgactttcaaagtggatgcaatttttctttcttttgttggggaggggaatgggaggggaaatgggaatataatattgtctcttttttaagtttggcaaacagaatgttcatactgatgtgttgtgccttaaagacaagacagcatttgtgtgttacaatgtaactttggttaaaatctctgtagataatgaaaaaaaacaaaaaaaaaaacctttgtgatgattcttaacatgaccaaatttaaaagtcaagctctcagagcttaattaccgcatcagcaagaaactgagtattttttgcaataagaaaacaacaataataaaggaaagcttgtgtttcatttgggttcttaataattccaataattgtatgaggcaactatttgcgcatccaaccatgagtggaaggtttgggaaagactgtgggacctttacttagaaagtgaaatgtatgtagaagtctcaagtaccccttctacagttttactggagaaaactaagagccatattcatgacaacttgcacagttttgaggttgagacttttgatatgtgtaagttgcatagaggaggatattatcatgcaaatcatgagcaattatcacataaacttttttagaatgtgccatgaacatggcataaaattcacattgagtgcacagggcttaaaataaagctaagtatgtttattcccaatgccatggcaaaaatgataatatcatcagaaatggaaggcagttctcccagatggtgtctaatgaaagcaatgagtctatgaaaattttacctagaatatcatcataaattaaattagcaagtgcgctggatcttggcagcgctgctgaaatgacaacagtaaaataatacctggttctccatctgaatacatcaatgcaggttctcctcgtaacagacttgcatatgtttgttagtttctgcctgtattgtcactgcgcaacggatggcattcattacaagaagagcccatcatcgttgtgtttgcatggtttttttccttgtgtgtagcccatgttgggaacacgatacaggttctcctcttatttcctatgacacgatttcccttgtggaaatttaagactttaagaactagagtatttttatggtgtctgcacctgcagttctgtgtttaaaatgtcataatgtggatcctggagtcaggctactagtcagtgcccctagccagaggctggttcatgagttcatcaactgaggcctctgtggcttcaataaagtctacattttgctcacagatcacaacattcactgtggaaatatgatttcatttctttaggctacaaacctgtatttctttactgaatgctaaggccatgtttatattgggtagaaagatattgagatcccaattttgtacaagattgtgatttcattatctaaaccttaaacttaatcctttaaattttgtagcttttggctgcatctgccccaagtactattccaggcaaattaaagttggaatacctttaataatataaaaataatgatagtaaatcttatacttctgttggcccttagcttgaaaatagcagttaaaaaaatttaaatgttgccttgattatcagtacttaattatgttgtgcactaaaaccttaaatatttattactgtgaataaaaacaaattatctttactgtatagctggtttctttaaatgttgatagaattgtggcattacatctaaatttgtaagtcttttcatatcaaacaagcaaggctttttatgctgctaagtctgtgggtgcagaaagaaacaccccttggaagggcaaagagaagccggctggttgcatcaccccgtgcagtttctcacacacatctctttttctgattctgtgttcagaagaggctgccggcataaaacctaaatgcaaggttgacggagaacagcttgtctggcacaacaatggtgcaggcccacgagccagcatcacagcttggccatgggacgttgagtatgcacaaactagaactcttcccttcccaccttaggaatagaaaatcctcttcctttctaatctgaaaaacgaaaactgaacaaacacaaaaccaaccccttggcagttcccacctcctattgacatatggaatattgtgccttattgtaaaccagtttgaaaaatgttctgtaactaaagtgggttttcggctattatgtatacagcttggtatattactacgaaagataaccaccttgtgttgcaccttaaaaatatcaagaccatgtaatttccataacaaaataggtggcctggctatggtattatagcatacaattaggacactatgcccctgcaaaattttgtaaatcaaattcagaggcaaaaacatattttagaatcatacagtttgcacacgacaagtaggtaataactgtctctaaaaatgttttctccttagtccgcaatgagctaagattcagaatagtgtcaacagcatgctcctatatgaagttgttttttttaaagcacatttgtttatgacaagcctacattctcagtgaatatggcatttagtatttcttttgaaaacaaacttaagcatcatgagccaaagttgcactttgactcccaactacggtagcattatggacatctcacaatgtcaagggtttctgttatgtattagtaaagtatagattattggggcctacataatttaaaagaaatgtaaattaatattaaaagcttgtaaaaatatgtatatctttactatttctcaataaatacctttgcaattgttttcatttccttca

SEQ ID NO: 143499 - DNA, 1920 bp, Artificial Sequence
  derived and/or modified sequence
atggaggactctcaggacctcaacgagcagtccgtgaagaagacatgcactgagagtgatgtatctcagtcacaaaacagtagaagtatggagatgcaggatttagcaagtccacacaccctggttggagggggcgataccccaggaagctcaaagctggaaaagagtaatctgtctagtacctctgtaacaaccaacgggactggaggtgagaacatgaccgtgctgaataccgccgactggctgctgtcatgtaacacaccctccagcgcaacaatgagccttttggccgtgaagactgagccacttaactcaagcgaaactacagctaccaccggagacggagctcttgacaccttcacgggctctgtgataacgagctccgggtacagccctcgcagcgctcatcagtactctccccagctctacccgtctaagccgtacccacacattctgagcactccagccgcacagacgatgtcagcatacgccggacagacccagtacagcggaatgcagcagcccgccgtgtatactgcttacagtcaaactggacagccctactcattacctacttatgatctaggggtgatgctgccagccatcaaaactgaaagcgggcttagtcagacccagtcgcctctgcagtctggttgcctctcctatagccctggctttagcacaccccaacccggtcagacaccttacagttaccagatgcccgggtctagtttcgcacctagttcgactatatatgctaataactccgttagcaacagtactaacttctcaggaagtcaacaagattaccctagctacacagcgtttggtcagaatcaatacgcccagtattattctgcttcgacatatggcgcatacatgacatccaacaatacagcagatggtactccttcttccacatctacctaccaactgcaggaatcgctgcccgggctcaccaaccagcctggtgagtttgataccatgcagtctccatcaacgccaataaaagatctagacgaacgcacatgcagatcctccggctcgaagtcccggggccgaggtcgcaaaaacaacccgtctcctccacccgatagcgatttggaaagggtttttgtttgggacctggacgagacgatcattgtgtttcactctttgctgaccggcagctatgcacagaagtatgggaaggacccccccatggctgtaactttgggactgagaatggaggaaatgatattcaacttggcagacacgcatctattcttcaatgacctggaggagtgtgaccaggtccacatcgatgacgtgagtagtgatgacaatggtcaggatctgtctacctacagcttcgctactgatggatttcacgctgcagccagttcagctaatctgtgtctgcccaccggggtgagaggtggagtggactggatgcgcaaactagcatttcggtatcgaagagtcaaggagctctataatacctacaagaacaacgtgggcggcctgctgggcccagctaagagagacgcctggctccagttacgcgcagaaattgagggactaacagactcctggctaaccaacgcgctcaagtctttgtctatcatatctacccgctcgaattgtatcaatgtgctggtaaccacaacccagcttattcccgccctggctaaagttctattgtattctctcggtggtgcttttccaatcgaaaatatctatagtgccacgaaaatcgggaaggagtcctgctttgaacggattatgcaaagatttggccgaaaagtcgtatacgtggtaattggcgacggtgttgaagaggagcaggcggctaagaaacacaatatgcctttctggcgtatttcctctcacagtgacctgctcgccctgcatcaggcgttggagcttgagtatctgtag

SEQ ID NO: 143500 - DNA, 1920 bp, Artificial Sequence
  derived and/or modified sequence
atggaggacagccaggacctgaatgagcagagcgtgaagaagacctgcacagaaagtgatgtgtcccagagccagaacagccgctccatggagatgcaggacctggccagcccccacaccctggtgggcggcggggacaccccaggcagcagcaagctggagaagagcaacctgagcagcacctctgtgaccaccaacggcactggaggagagaacatgacagtgctgaacacagctgactggctgctgagctgcaacacccccagcagcgccaccatgagcctgctggccgtgaagacagagcccctgaacagcagcgagaccacagccaccactggagatggagccctggacaccttcaccggcagcgtcatcaccagcagcggctacagccccaggtctgcccaccagtacagcccccagctgtaccccagcaagccctacccccacatcctgagcaccccagctgcccagaccatgtctgcctatgccggccagacccagtacagcggcatgcagcagcctgctgtgtacacagcctacagccagacaggccagccctacagcctgcccacctatgacctgggcgtgatgctgcctgccatcaagacagagagcggcctgagccagacccagagccccctgcagagcggctgcctgagctacagccctggcttcagcaccccccagcccggccagaccccctacagctaccagatgcctggcagcagctttgcccccagcagcaccatctatgccaacaacagcgtgagcaacagcaccaacttcagcggcagccagcaggactaccccagctacacagccttcggccagaaccagtatgcccagtactacagcgccagcacctacggggcctacatgaccagcaacaacacagcagatggcacccccagcagcaccagcacctaccagctgcaggagagcctgcccggcctgaccaaccagcctggagaatttgacaccatgcagagccccagcacccccatcaaggacctggatgagaggacctgccgcagcagcggcagcaagagccggggccggggcaggaagaacaaccccagccccccaccagacagcgacctggagcgggtgtttgtgtgggacctggatgagaccatcatcgtgttccacagcctgctgaccggcagctatgcccagaagtatggcaaggacccccccatggctgtgaccctgggcctgaggatggaggagatgatcttcaacctggccgacacccacctgttcttcaatgacctggaggagtgtgaccaggtgcacattgatgatgtgtccagtgatgacaatggccaggacctgagcacctacagctttgccacagatggcttccacgccgccgccagcagcgccaacctgtgcctgcccactggagtgcggggcggcgtggactggatgaggaagctggccttccgctaccgccgggtgaaggagctgtacaacacctacaagaacaacgtgggcggcctgctgggccctgccaagagagatgcctggctgcagctgcgggcagaaattgagggcctgacagacagctggctgaccaatgccctgaagagcctgagcatcatcagcaccaggagcaactgcatcaacgtgctggtgaccaccacccagctgatcccagccctggccaaggtgctgctgtacagcctgggcggggccttccccatcgagaacatctacagcgccaccaagattggcaaggagagctgctttgagcgcatcatgcagcgcttcggcaggaaggtggtgtatgtggtgattggagatggagtggaggaggagcaggccgccaagaagcacaacatgcccttctggaggatcagcagccacagcgacctgctggccctgcaccaggccctggagctggagtacctgtag

SEQ ID NO: 143501 - DNA, 1920 bp, Artificial Sequence
  derived and/or modified sequence
atggaggacagccaggacctgaacgagcagagcgtgaagaagacctgcactgagtccgacgttagtcagagccagaattcgaggtccatggaaatgcaggacttggcaagcccgcatactctcgtggggggcggggatacgccagggtcttctaagcttgagaagtccaacctgtcttccacatcagtcacaactaatggtaccggtggagagaatatgacagtgctgaatacagcggactggctgttgtcctgcaacacacctagttccgcgacaatgtcactcctcgctgtgaagactgagccattaaattcaagtgagaccaccgctacgaccggagatggtgcccttgatacttttaccgggagcgtgattactagtagcgggtattcaccaagatccgcccaccagtatagtccccaactgtacccatctaagccctacccacacattttgagcacaccagccgcgcagacgatgtccgcctatgctgggcagacccaatattccgggatgcagcagcccgctgtctataccgcatactcacaaactggacagccatactccctgcctacttacgatctgggtgtcatgctgcctgccatcaaaaccgaatccggcctgagccagactcaatctccgcttcagagcggatgcctttcatactctcccggtttttcaacccctcagcccggtcagacgccatatagttaccaaatgccaggatctagctttgctcccagtagtacgatttacgctaataacagcgtgtctaattccacaaacttcagtggttcacagcaagattaccccagttatacagccttcggccaaaatcagtatgctcaatactactcagcctctacatacggggcttatatgacatcaaataatacagctgacggaacaccctcttctacatcgacatatcagttgcaggaatctctaccgggactgacaaaccagccaggggaattcgacaccatgcagtcccctagcacccccattaaagacttagacgaacgaacctgccgctcgagtgggagcaaaagccgcggcagaggccggaagaacaatccgtccccccctccagattcagacctcgaacgagtattcgtgtgggacctcgacgagacgatcattgtcttccattctttattgacaggctcctacgcccagaaatacggaaaggatccaccaatggcagttactctaggactgcgaatggaagaaatgatcttcaatctggccgacactcacctgttcttcaatgatctggaggagtgcgaccaagtgcatattgacgatgtgtcatccgacgataacgggcaggacttgtctacctattctttcgccactgatggattccatgctgcagcttccagcgccaatctgtgcctgcccaccggcgtgcgtggtggcgttgactggatgcgcaagctagcctttcggtataggcgggttaaggagctctacaatacctacaaaaataacgtgggagggctgctgggcccggcaaaacgcgatgcatggctgcagttgcgggcggaaatcgaagggttaaccgactcttggcttaccaatgcacttaaatccctgtccattatcagcacccgaagtaactgtattaatgttctggtgactacaactcagcttattccagcactcgccaaagtgctgctctatagtcttgggggagcctttccgattgaaaatatttactcagctactaagattggaaaagaatcttgcttcgagcggatcatgcagcgattcgggaggaaggtcgtgtacgtggtgatcggtgacggcgtggaggaggaacaggctgccaaaaagcacaacatgcctttttggaggatctcttcacactcagatctgttggccctgcatcaggctctggagttggagtatctgtag

SEQ ID NO: 143502 - DNA, 1920 bp, Artificial Sequence
  derived and/or modified sequence
atggaggatagccaggaccttaacgagcagagtgtcaagaaaacgtgcaccgagagcgacgtgagccagtctcagaacagccggtcaatggaaatgcaggatttggcctcgccacacaccctcgtgggtggtggtgacacccctggatcttccaagctggaaaaatctaatcttagttccacatcagtaaccactaacggcacaggaggcgagaacatgaccgtcttaaacacagctgattggctgctgagctgcaatacacctagtagcgcgaccatgtccttgctggcagtgaagacagagcctctgaactctagtgagacaactgccaccactggggacggcgctctggatacgttcacagggtccgtaatcacaagcagcggctattcaccacgcagcgcgcaccagtactcccctcagttatacccatccaaaccttaccctcacattttgtcaacaccagctgcccagacaatgagcgcgtacgctggacagacccagtactcaggaatgcagcagccagctgtttacaccgcctattctcaaacaggccagccctacagtctccccacctacgaccttggcgtgatgttgccagccatcaagacagaatctggcctctcgcagacccaatcccctctgcaatctgggtgcctgagctactctcccggattcagcaccccacagcctgggcagactccttactcctatcagatgcccggtagctcctttgctccctcctccacaatttatgcaaacaatagtgtttcaaacagcactaatttctcaggctcacagcaggattatccgagctatactgcttttgggcagaaccagtacgcccagtactattcagcttcaacctatggagcttatatgacttcaaacaacaccgctgatggtaccccgtcgtccacctctacttaccagttacaggaaagcctcccgggtttgaccaaccagcctggcgagtttgacaccatgcagagtccctctactccaatcaaagaccttgacgagaggacctgtcgatctagtggctctaagagtcgcggtaggggcagaaagaataacccgagccctcctccagatagcgatttagagcgagtgtttgtttgggacttagacgagactataattgtgttccatagtcttcttacagggtcctatgcccagaagtatggcaaagatccacccatggctgttacactagggctcagaatggaggaaatgatctttaatcttgctgacacccatctcttctttaatgacctcgaagaatgtgaccaggtgcacatagatgatgtcagtagcgacgacaatggccaggacctctctacatacagctttgcaaccgatggctttcacgcagcggctagtagcgcaaacctctgtcttcccactggggtgcgtggtggtgtggattggatgcggaaactcgccttccggtaccggcgtgtcaaggagctgtacaatacttataagaacaacgttggaggtctgctggggcctgccaagagggatgcatggctccaactgagggccgagatcgagggactgacggactcatggctgacaaacgccctgaaatccctgtccatcataagcaccagaagtaactgtattaatgtcctggtgactactacgcaactcatcccggctctggccaaagtcctgctttactctctgggcggtgcgttccccattgagaacatttatagtgcaacaaaaattggaaaagagagctgttttgagaggatcatgcagcgtttcggtcgcaaggtggtgtacgtcgtaattggtgatggcgtggaagaggagcaggcagcaaaaaagcataacatgcccttttggcgcatcagtagccatagtgatctgctcgccctgcaccaggctctagaactggagtacctttag

SEQ ID NO: 143503 - DNA, 1920 bp, Artificial Sequence
  derived and/or modified sequence
atggaggacagccaggacctgaacgagcagagcgtgaagaagacctgcaccgagagcgacgtgagccagagccagaacagcagaagcatggagatgcaggacctggccagcccccacaccctggtgggcggcggcgacacccccggcagcagcaagctggagaagagcaacctgagcagcaccagcgtgaccaccaacggcaccggcggcgagaacatgaccgtgctgaacaccgccgactggctgctgagctgcaacacccccagcagcgccaccatgagcctgctggccgtgaagaccgagcccctgaacagcagcgagaccaccgccaccaccggcgacggcgccctggacaccttcaccggcagcgtgatcaccagcagcggctacagccccagaagcgcccaccagtacagcccccagctgtaccccagcaagccctacccccacatcctgagcacccccgccgcccagaccatgagcgcctacgccggccagacccagtacagcggcatgcagcagcccgccgtgtacaccgcctacagccagaccggccagccctacagcctgcccacctacgacctgggcgtgatgctgcccgccatcaagaccgagagcggcctgagccagacccagagccccctgcagagcggctgcctgagctacagccccggcttcagcaccccccagcccggccagaccccctacagctaccagatgcccggcagcagcttcgcccccagcagcaccatctacgccaacaacagcgtgagcaacagcaccaacttcagcggcagccagcaggactaccccagctacaccgccttcggccagaaccagtacgcccagtactacagcgccagcacctacggcgcctacatgaccagcaacaacaccgccgacggcacccccagcagcaccagcacctaccagctgcaggagagcctgcccggcctgaccaaccagcccggcgagttcgacaccatgcagagccccagcacccccatcaaggacctggacgagagaacctgcagaagcagcggcagcaagagcagaggcagaggcagaaagaacaaccccagccccccccccgacagcgacctggagagagtgttcgtgtgggacctggacgagaccatcatcgtgttccacagcctgctgaccggcagctacgcccagaagtacggcaaggacccccccatggccgtgaccctgggcctgagaatggaggagatgatcttcaacctggccgacacccacctgttcttcaacgacctggaggagtgcgaccaggtgcacatcgacgacgtgagcagcgacgacaacggccaggacctgagcacctacagcttcgccaccgacggcttccacgccgccgccagcagcgccaacctgtgcctgcccaccggcgtgagaggcggcgtggactggatgagaaagctggccttcagatacagaagagtgaaggagctgtacaacacctacaagaacaacgtgggcggcctgctgggccccgccaagagagacgcctggctgcagctgagagccgagatcgagggcctgaccgacagctggctgaccaacgccctgaagagcctgagcatcatcagcaccagaagcaactgcatcaacgtgctggtgaccaccacccagctgatccccgccctggccaaggtgctgctgtacagcctgggcggcgccttccccatcgagaacatctacagcgccaccaagatcggcaaggagagctgcttcgagagaatcatgcagagattcggcagaaaggtggtgtacgtggtgatcggcgacggcgtggaggaggagcaggccgccaagaagcacaacatgcccttctggagaatcagcagccacagcgacctgctggccctgcaccaggccctggagctggagtacctgtag

SEQ ID NO: 143504 - protein, 374 aa, Artificial Sequence
  derived and/or modified sequence
MKALIFAAAGLLLLLPTFCQSGMENDTNNLAKPTLPIKTFRGAPPNSFEEFPFSALEGWTGATITVKIKCPEESASHLHVKNATMGYLTSSLSTKLIPAIYLLVFVVGVPANAVTLWMLFFRTRSICTTVFYTNLAIADFLFCVTLPFKIAYHLNGNNWVFGEVLCRATTVIFYGNMYCSILLLACISINRYLAIVHPFTYRGLPKHTYALVTCGLVWATVFLYMLPFFILKQEYYLVQPDITTCHDVHNTCESSSPFQLYYFISLAFFGFLIPFVLIIYCYAAIIRTLNAYDHRWLWYVKASLLILVIFTICFAPSNIILIIHHANYYYNNTDGLYFIYLIALCLGSLNSCLDPFLYFLMSKTRNHSTAYLTK

SEQ ID NO: 143505 - protein, 352 aa, Artificial Sequence
  derived and/or modified sequence
MENDTNNLAKPTLPIKTFRGAPPNSFEEFPFSALEGWTGATITVKIKCPEESASHLHVKNATMGYLTSSLSTKLIPAIYLLVFVVGVPANAVTLWMLFFRTRSICTTVFYTNLAIADFLFCVTLPFKIAYHLNGNNWVFGEVLCRATTVIFYGNMYCSILLLACISINRYLAIVHPFTYRGLPKHTYALVTCGLVWATVFLYMLPFFILKQEYYLVQPDITTCHDVHNTCESSSPFQLYYFISLAFFGFLIPFVLIIYCYAAIIRTLNAYDHRWLWYVKASLLILVIFTICFAPSNIILIIHHANYYYNNTDGLYFIYLIALCLGSLNSCLDPFLYFLMSKTRNHSTAYLTK

SEQ ID NO: 143506 - DNA, 1125 bp, Artificial Sequence
  derived and/or modified sequence
atgaaagcccttatctttgctgccgcaggcttattgttgctcctgcccaccttctgccaaagtggcatggagaacgatacgaacaatttggccaaaccaaccctcccgatcaagacctttcgcggggctccgcccaacagtttcgaagaattccccttcagcgcccttgaggggtggactggtgccacaattactgtaaaaatcaaatgtcctgaggagtcggcctcccatttacacgtcaaaaatgcgacaatggggtatctcacatccagtctaagcaccaagctgataccagccatttatctgcttgtgttcgttgttggagtccctgccaatgccgtcacactgtggatgctgttctttcgcacaagaagcatctgtacaactgtattctacactaacctggccatcgccgacttcctgttctgtgtcaccctgcccttcaagatcgcctatcatctcaatgggaataactgggtgtttggagaagtcctgtgccgtgcgactacagtcatcttttacggaaatatgtactgtagtattttgctgcttgcttgcattagtattaatcggtatctcgcaattgtgcacccttttacttatagagggctccccaagcacacatacgcacttgtgacctgtggactcgtatgggcgaccgtgttcttgtacatgttaccgttttttatcctcaaacaggagtactatctggttcagccagatattacaacttgtcatgatgtgcataacacctgtgagtctagcagccccttccagctgtattacttcattagtctcgccttctttgggttcctgattccgttcgtgttaattatctattgctatgctgcaattattaggactctgaatgcatacgaccaccggtggctgtggtatgtgaaggctagtctactcatactggtgatctttacgatttgttttgccccctcgaatatcatactgatcattcatcacgctaactactattataataatacagatggattatatttcatttatctcattgccctttgtctgggatcactgaatagttgccttgaccctttcctgtacttcttaatgagcaaaactaggaatcacagcaccgcttacctcaccaagtag

SEQ ID NO: 143507 - DNA, 1125 bp, Artificial Sequence
  derived and/or modified sequence
atgaaggccctgatctttgctgctgctggcctgctgctgctgctgcccaccttctgccagagcggcatggagaatgacaccaacaacctggccaagcccaccctgcccatcaagaccttccggggggccccacccaacagctttgaggagttccccttcagcgccctggagggctggacaggagccaccatcaccgtgaagatcaagtgcccagaggagagcgccagccacctgcacgtgaagaatgccaccatgggctacctgaccagcagcctgagcaccaagctgatcccagccatctacctgctggtgtttgtggtgggcgtgcctgccaatgctgtgaccctgtggatgctgttcttccgcaccaggagcatctgcaccaccgtcttctacaccaacctggccatcgctgacttcctgttctgtgtgaccctgcccttcaagatcgcctaccacctgaatggaaacaactgggtgtttggagaggtgctgtgccgggccaccaccgtcatcttctacggcaacatgtactgcagcatcctgctgctggcctgcatcagcatcaaccgctacctggccatcgtgcaccccttcacctaccggggcctgcccaagcacacctacgccctggtgacctgtggcctggtgtgggccaccgtcttcctgtacatgctgcccttcttcatcctgaagcaggagtactacctggtgcagcctgacatcaccacctgccatgatgtgcacaacacctgtgagagcagcagccccttccagctgtactacttcatcagcctggccttcttcggcttcctgatcccctttgtgctgatcatctactgctatgctgccatcatccgcaccctgaatgcctatgaccaccgctggctgtggtacgtgaaggccagcctgctgatcctggtgatcttcaccatctgctttgcccccagcaacatcatcctgatcatccaccacgccaactactactacaacaacacagatggcctgtacttcatctacctgattgccctgtgcctgggcagcctgaacagctgcctggaccccttcctgtacttcctgatgagcaagaccaggaaccacagcacagcctacctgaccaagtag

SEQ ID NO: 143508 - DNA, 1125 bp, Artificial Sequence
  derived and/or modified sequence
atgaaggccctgatcttcgccgccgccggcctgctgctgctgctgcctaccttttgtcagagtggaatggagaacgataccaacaaccttgccaaacctaccctgcccatcaaaacctttagaggcgctcctcccaacagcttcgaagagtttccctttagcgccctcgagggctggactggcgcaaccatcaccgtgaaaataaagtgccccgaggagagcgcctctcatctgcacgtaaaaaatgccactatgggctacctcacctccagcctgtctacaaaattgatacccgctatttaccttctcgtttttgtggttggtgtgccggccaacgccgtgacactctggatgctgttcttccgaacgcgatctatatgtaccaccgtcttttacaccaatctggctattgccgactttcttttttgcgttactttgccttttaaaatagcctaccatctgaatgggaataactgggtgttcggagaggtgctttgtcgggcaactacagtgattttctatgggaatatgtactgttccatcttgctgctcgcatgcatttctatcaataggtacctggctattgtccatcccttcacctaccggggcctgcccaagcatacctatgcgctcgttacgtgtgggcttgtgtgggcaactgtgttcctctacatgctgcctttcttcatccttaagcaggagtactatctagtgcagccggacataactacatgccatgatgtgcacaacacttgcgagtcatcctcgccgttccagttatattactttatcagcctagccttttttggcttcctgatcccattcgtactcattatctactgttatgccgccataatacggactctgaacgcctacgatcacaggtggttgtggtacgtgaaagcatcccttcttatcttagttatcttcactatctgtttcgcaccatctaacattattctcataatccatcatgctaattactactataacaacacggatggtctgtactttatctacctaatcgcactttgcctgggaagcctgaacagctgtctggatccttttctttacttcctgatgagtaagacacggaaccacagcactgcctacctgaccaagtag

SEQ ID NO: 143509 - DNA, 1125 bp, Artificial Sequence
  derived and/or modified sequence
atgaaggctcttatttttgcggcagcagggttgcttcttctgctacccactttttgccagtctgggatggaaaatgatacaaataatttagctaaacctacactgccaattaagactttccggggagccccaccgaatagctttgaggaattccctttcagcgccctggaggggtggaccggagcaactatcactgttaagattaagtgtccagaggaatccgcgtctcacctccatgttaagaatgctacaatgggatacctaactagcagtctttctaccaaactgataccagcgatttatctgcttgtgttcgtggttggagtccccgcaaatgctgtgacactgtggatgctctttttcaggacacggtctatctgcaccacagtgttctacaccaatttggccatcgccgactttcttttttgcgtgaccctgccctttaaaatagcttatcatctgaacggaaataattgggtgtttggcgaagtgctttgtagagccacaactgtcattttttacggcaacatgtattgctctattctgctgctagcttgcatatctatcaacaggtatcttgcaatcgtccacccttttacttataggggactgcctaagcacacctatgcactagttacttgcgggcttgtgtgggctaccgtttttctttacatgctgccattcttcatactgaagcaagagtattatctggtccagccggacatcaccacatgccatgacgtgcacaatacctgtgaaagctccagcccgttccagttgtattactttatcagcctggctttcttcggtttcctgattccctttgtgctcatcatctactgctatgcggcaataataagaacacttaacgcgtacgatcaccgctggctgtggtacgttaaagcctcacttttaattcttgtgatttttacaatttgctttgccccatccaatatcatacttatcatacatcacgctaattactattacaataacaccgacggcctttacttcatttacctcattgctttgtgcctaggcagtctgaattcctgcctggacccattcctgtactttttgatgtccaaaacaaggaatcactcaactgcctacctcactaaatag

SEQ ID NO: 143510 - DNA, 3408 bp, Artificial Sequence
  derived and/or modified sequence
atgcttactgaagcatcgagtggattacatcctttccctgcggaggaccagggcaagtttcctgcctgcacggcacaggagagcaaacttctacagacagaccaaggcttccatttgctgctgacacatggaactgaggtgaaattgtgctccatgattttacagatttcataacgtttaagagacgggactcaggtcatcaaaatgaaagccctcatctttgcagctgctggcctcctgcttctgttgcccactttttgtcagagtggcatggaaaatgatacaaacaacttggcaaagccaaccttacccattaagacctttcgtggagctcccccaaattcttttgaagagttccccttttctgccttggaaggctggacaggagccacgattactgtaaaaattaagtgccctgaagaaagtgcttcacatctccatgtgaaaaatgctaccatggggtacctgaccagctccttaagtactaaactgatacctgccatctacctcctggtgtttgtagttggtgtcccggccaatgctgtgaccctgtggatgcttttcttcaggaccagatccatctgtaccactgtattctacaccaacctggccattgcagattttcttttttgtgttacattgccctttaagatagcttatcatctcaatgggaacaactgggtatttggagaggtcctgtgccgggccaccacagtcatcttctatggcaacatgtactgctccattctgctccttgcctgcatcagcatcaaccgctacctggccatcgtccatcctttcacctaccggggcctgcccaagcacacctatgccttggtaacatgtggactggtgtgggcaacagttttcttatatatgctgccatttttcatactgaagcaggaatattatcttgttcagccagacatcaccacctgccatgatgttcacaacacttgcgagtcctcatctcccttccaactctattacttcatctccttggcattctttggattcttaattccatttgtgcttatcatctactgctatgcagccatcatccggacacttaatgcatacgatcatagatggttgtggtatgttaaggcgagtctcctcatccttgtgatttttaccatttgctttgctccaagcaatattattcttattattcaccatgctaactactactacaacaacactgatggcttatattttatatatctcatagctttgtgcctgggtagtcttaatagttgcttagatccattcctttattttctcatgtcaaaaaccagaaatcactccactgcttaccttacaaaatagtgaaatgatcttagagaacaaggacagccatcacagagaacgtctgttttcaagaacaacataagcatagtgcaaggagctccatttccgagctcctaagaaatatgcttcaaaggtcaaacattacaaaagcattagtagtttgtttgtttgtttttgagactgagtctcactttatcacccagactggcgtgcagtggcactatcttggctcattgcaacctctgcctcccaggtcagcctcccaagtagctgggattacaccaccatgcccagctactaaaaatacttgtatttttagtagagacggggtttcaccatgttgaccaggctggtcttgaactcctgacctcaagtgatcttccggcctcagcctcccaaagtgctggattacaggcgtgagccactgagccagccagcattagtaatttttaaaaacactttatcagtattttaaaaatgttaatgcaggagaaaagatatcacaactctatggaaaatgacatttccatttgccttattgctacttcaagctctttaaatcaccatcttccctatttctgtgagtggtattgccatccttgacatttgacatcattttttattctttggtctcttttgactctcatgctggtggctgcctcatcaactgattctatctttgtagggtccctcaccagggtcttttatctagtttcacctttgccttcttttttcctttttttaatagagacagtgtctcgcttcgtcacctggctgaagtgcagtagcctgatcatagctcacttcagcctccaactcctgggctcaagcaatcctgctgtctcagcctcccaagtaactaagactacaggcatgcaccaccatacccaactaattttattttttattttttgcagagatggagtctcactgttgcccaggctggtcttgaactcctggtctcgagtgatcttcctatctcagcctcccaaagtgctgggactacaggcatgagccactacgtccaggccacctctaccttctaaccattctctccactgccagcctaccctccaccacttcacaagtcctgccagattaatcttccttagatatcagttaggatacatcactaaaacatttccactaactccactgtttctataataaatcataaatctttagcctggcattcaaggctaacttgctaatcacacttcccattaaaccttgcttatgatataggcaccaaccaaacctcttgctctgctatatctccactctgcctcagactgaaaagctagtcctaacgtctttgccttaattctgttcattttttcaagtccttgaaggaccattcttccctgattctcaggctagaagtgtcacttttcttatctgtacttccaaagcactttcgtatatttttattatggcatttatatatagttcatttatatttaaattttaattccatgaacaatcaagtaccaagtataatggagaaggtgctcatcctctgccttccttgagcttctgggtgatgccaggcccaagtctttgtggcacccagctccatgctttgaatactatgtggctgaatgaatttttaaaatctcaaagcagttaaacagcaggaaagcccattaacttcgtactgaaaaagcaacatactgtgatgatacgggatgacatcatttcaggttgggcatacaaaaaagtaaggaagctaaactaagactatactcaccaggccatttagaagttttaaataatgcctccactattttttttcttagacatagcttttaatggggaaatggaattttgttattaatacccattatattcctgtaagtaaatgactatttttcccttaactcagtgattagacaggaaggaagacattagtgattagacaggagggaagatattagtgattagacagcagggaagatattagtggtaaagagtgaatgatagtagtgaatataaatggggctgaggaaactttaagcataaaagattcctgagatgactttacaagtctgtacgaatctgccttgactgtatatttcatactgcccaacaaaacaa

SEQ ID NO: 143511 - DNA, 1387 bp, Artificial Sequence
  derived and/or modified sequence
ggattacatcctttccctgcggaggaccagggcaagtttcctgcctgcacggcacaggagagcaaacttctacagacagaccaaggcttccatttgctgctgacacatggaactgaggcatggaaaatgatacaaacaacttggcaaagccaaccttacccattaagacctttcgtggagctcccccaaattcttttgaagagttccccttttctgccttggaaggctggacaggagccacgattactgtaaaaattaagtgccctgaagaaagtgcttcacatctccatgtgaaaaatgctaccatggggtacctgaccagctccttaagtactaaactgatacctgccatctacctcctggtgtttgtagttggtgtcccggccaatgctgtgaccctgtggatgcttttcttcaggaccagatccatctgtaccactgtattctacaccaacctggccattgcagattttcttttttgtgttacattgccctttaagatagcttatcatctcaatgggaacaactgggtatttggagaggtcctgtgccgggccaccacagtcatcttctatggcaacatgtactgctccattctgctccttgcctgcatcagcatcaaccgctacctggccatcgtccatcctttcacctaccggggcctgcccaagcacacctatgccttggtaacatgtggactggtgtgggcaacagttttcttatatatgctgccatttttcatactgaagcaggaatattatcttgttcagccagacatcaccacctgccatgatgttcacaacacttgcgagtcctcatctcccttccaactctattacttcatctccttggcattctttggattcttaattccatttgtgcttatcatctactgctatgcagccatcatccggacacttaatgcatacgatcatagatggttgtggtatgttaaggcgagtctcctcatccttgtgatttttaccatttgctttgctccaagcaatattattcttattattcaccatgctaactactactacaacaacactgatggcttatattttatatatctcatagctttgtgcctgggtagtcttaatagttgcttagatccattcctttattttctcatgtcaaaaaccagaaatcactccactgcttaccttacaaaatagtgaaatgatcttagagaacaaggacagccatcacagagaacgtctgttttcaagaacaacataagcatagtgcaaggagctccatttccgagctcctaagaaatatgcttcaaaggtcaaacattacaaaagcattagtagtttgtttgtttgtttttgagactgagtctcactttatcacccagactggcgtgcagtggcactatctt

SEQ ID NO: 143512 - DNA, 1125 bp, Artificial Sequence
  derived and/or modified sequence
atgaaggccctgatcttcgccgccgccggcctgctgctgctgctgcccaccttctgccagagcggcatggagaacgacaccaacaacctggccaagcccaccctgcccatcaagaccttcagaggcgccccccccaacagcttcgaggagttccccttcagcgccctggagggctggaccggcgccaccatcaccgtgaagatcaagtgccccgaggagagcgccagccacctgcacgtgaagaacgccaccatgggctacctgaccagcagcctgagcaccaagctgatccccgccatctacctgctggtgttcgtggtgggcgtgcccgccaacgccgtgaccctgtggatgctgttcttcagaaccagaagcatctgcaccaccgtgttctacaccaacctggccatcgccgacttcctgttctgcgtgaccctgcccttcaagatcgcctaccacctgaacggcaacaactgggtgttcggcgaggtgctgtgcagagccaccaccgtgatcttctacggcaacatgtactgcagcatcctgctgctggcctgcatcagcatcaacagatacctggccatcgtgcaccccttcacctacagaggcctgcccaagcacacctacgccctggtgacctgcggcctggtgtgggccaccgtgttcctgtacatgctgcccttcttcatcctgaagcaggagtactacctggtgcagcccgacatcaccacctgccacgacgtgcacaacacctgcgagagcagcagccccttccagctgtactacttcatcagcctggccttcttcggcttcctgatccccttcgtgctgatcatctactgctacgccgccatcatcagaaccctgaacgcctacgaccacagatggctgtggtacgtgaaggccagcctgctgatcctggtgatcttcaccatctgcttcgcccccagcaacatcatcctgatcatccaccacgccaactactactacaacaacaccgacggcctgtacttcatctacctgatcgccctgtgcctgggcagcctgaacagctgcctggaccccttcctgtacttcctgatgagcaagaccagaaaccacagcaccgcctacctgaccaagtag

SEQ ID NO: 143513 - protein, 2511 aa, Artificial Sequence
  derived and/or modified sequence
MEEVVIAGMSGKLPESENLQEFWDNLIGGVDMVTDDDRRWKAGLYGLPRRSGKLKDLSRFDASFFGVHPKQAHTMDPQLRLLLEVTYEAIVDGGINPDSLRGTHTGVWVGVSGSETSEALSRDPETLVGYSMVGCQRAMMANRLSFFFDFRGPSIALDTACSSSLMALQNAYQAIHSGQCPAAIVGGINVLLKPNTSVQFLRLGMLSPEGTCKAFDTAGNGYCRSEGVVAVLLTKKSLARRVYATILNAGTNTDGFKEQGVTFPSGDIQEQLIRSLYQSAGVAPESFEYIEAHGTGTKVGDPQELNGITRALCATRQEPLLIGSTKSNMGHPEPASGLAALAKVLLSLEHGLWAPNLHFHSPNPEIPALLDGRLQVVDQPLPVRGGNVGINSFGFGGSNVHIILRPNTQPPPAPAPHATLPRLLRASGRTPEAVQKLLEQGLRHSQDLAFLSMLNDIAAVPATAMPFRGYAVLGGERGGPEVQQVPAGERPLWFICSGMGTQWRGMGLSLMRLDRFRDSILRSDEAVKPFGLKVSQLLLSTDESTFDDIVHSFVSLTAIQIGLIDLLSCMGLRPDGIVGHSLGEVACGYADGCLSQEEAVLAAYWRGQCIKEAHLPPGAMAAVGLSWEECKQRCPPGVVPACHNSKDTVTISGPQAPVFEFVEQLRKEGVFAKEVRTGGMAFHSYFMEAIAPPLLQELKKVIREPKPRSARWLSTSIPEAQWHSSLARTSSAEYNVNNLVSPVLFQEALWHVPEHAVVLEIAPHALLQAVLKRGLKPSCTIIPLMKKDHRDNLEFFLAGIGRLHLSGIDANPNALFPPVEFPAPRGTPLISPLIKWDHSLAWDVPAAEDFPNGSGSPSAAIYNIDTSSESPDHYLVDHTLDGRVLFPATGYLSIVWKTLARALGLGVEQLPVVFEDVVLHQATILPKTGTVSLEVRLLEASRAFEVSENGNLVVSGKVYQWDDPDPRLFDHPESPTPNPTEPLFLAQAEVYKELRLRGYDYGPHFQGILEASLEGDSGRLLWKDNWVSFMDTMLQMSILGSAKHGLYLPTRVTAIHIDPATHRQKLYTLQDKAQVADVVVSRWLRVTVAGGVHISGLHTESAPRRQQEQQVPILEKFCFTPHTEEGCLSERAALQEELQLCKGLVQALQTKVTQQGLKMVVPGLDGAQIPRDPSQQELPRLLSAACRLQLNGNLQLELAQVLAQERPKLPEDPLLSGLLDSPALKACLDTAVENMPSLKMKVVEVLAGHGHLYSRIPGLLSPHPLLQLSYTATDRHPQALEAAQAELQQHDVAQGQWDPADPAPSALGSADLLVCNCAVAALGDPASALSNMVAALREGGFLLLHTLLRGHPLGDIVAFLTSTEPQYGQGILSQDAWESLFSRVSLRLVGLKKSFYGSTLFLCRRPTPQDSPIFLPVDDTSFRWVESLKGILADEDSSRPVWLKAINCATSGVVGLVNCLRREPGGNRLRCVLLSNLSSTSHVPEVDPGSAELQKVLQGDLVMNVYRDGAWGAFRHFLLEEDKPEEPTAHAFVSTLTRGDLSSIRWVCSSLRHAQPTCPGAQLCTVYYASLNFRDIMLATGKLSPDAIPGKWTSQDSLLGMEFSGRDASGKRVMGLVPAKGLATSVLLSPDFLWDVPSNWTLEEAASVPVVYSTAYYALVVRGRVRPGETLLIHSGSGGVGQAAIAIALSLGCRVFTTVGSAEKRAYLQARFPQLDSTSFANSRDTSFEQHVLWHTGGKGVDLVLNSLAEEKLQASVRCLATHGRFLEIGKFDLSQNHPLGMAIFLKNVTFHGVLLDAFFNESSADWREVWALVQAGIRDGVVRPLKCTVFHGAQVEDAFRYMAQGKHIGKVVVQVLAEEPEAVLKGAKPKLMSAISKTFCPAHKSYIIAGGLGGFGLELAQWLIQRGVQKLVLTSRSGIRTGYQAKQVRRWRRQGVQVQVSTSNISSLEGARGLIAEAAQLGPVGGVFNLAVVLRDGLLENQTPEFFQDVCKPKYSGTLNLDRVTREACPELDYFVVFSSVSCGRGNAGQSNYGFANSAMERICEKRRHEGLPGLAVQWGAIGDVGILVETMSTNDTIVSGTLPQRMASCLEVLDLFLNQPHMVLSSFVLAEKAAAYRDRDSQRDLVEAVAHILGIRDLAAVNLDSSLADLGLDSLMSVEVRQTLERELNLVLSVREVRQLTLRKLQELSSKADEASELACPTPKEDGLAQQQTQLNLRSLLVNPEGPTLMRLNSVQSSERPLFLVHPIEGSTTVFHSLASRLSIPTYGLQCTRAAPLDSIHSLAAYYIDCIRQVQPEGPYRVAGYSYGACVAFEMCSQLQAQQSPAPTHNSLFLFDGSPTYVLAYTQSYRAKLTPGCEAEAETEAICFFVQQFTDMEHNRVLEALLPLKGLEERVAAAVDLIIKSHQGLDRQELSFAARSFYYKLRAAEQYTPKAKYHGNVMLLRAKTGGAYGEDLGADYNLSQVCDGKVSVHVIEGDHRTLLEGSGLESIISIIHSSLAEPRVSVREG

SEQ ID NO: 143514 - protein, 833 aa, Artificial Sequence
  derived and/or modified sequence
MSILGSAKHGLYLPTRVTAIHIDPATHRQKLYTLQDKAQVADVVVSRWLRVTVAGGVHISGLHTESAPRRQQEQQVPILEKFCFTPHTEEGCLSERAALQEELQLCKGLVQALQTKVTQQGLKMVVPGLDGAQIPRDPSQQELPRLLSAACRLQLNGNLQLELAQVLAQERPKLPEDPLLSGLLDSPALKACLDTAVENMPSLKMKVVEVLAGHGHLYSRIPGLLSPHPLLQLSYTATDRHPQALEAAQAELQQHDVAQGQWDPADPAPSALGSADLLVCNCAVAALGDPASALSNMVAALREGGFLLLHTLLRGHPLGDIVAFLTSTEPQYGQGILSQDAWESLFSRVSLRLVGLKKSFYGSTLFLCRRPTPQDSPIFLPVDDTSFRWVESLKGILADEDSSRPVWLKAINCATSGVVGLVNCLRREPGGNRLRCVLLSNLSSTSHVPEVDPGSAELQKVLQGDLVMNVYRDGAWGAFRHFLLEEDKPEEPTAHAFVSTLTRGDLSSIRWVCSSLRHAQPTCPGAQLCTVYYASLNFRDIMLATGKLSPDAIPGKWTSQDSLLGMEFSGRDASGKRVMGLVPAKGLATSVLLSPDFLWDVPSNWTLEEAASVPVVYSTAYYALVVRGRVRPGETLLIHSGSGGVGQAAIAIALSLGCRVFTTVGSAEKRAYLQARFPQLDSTSFANSRDTSFEQHVLWHTGGKGVDLVLNSLAEEKLQASVRCLATHGRFLEIGKFDLSQNHPLGMAIFLKNVTFHGVLLDAFFNESSADWREVWALVQAGIRDGVVRPLKCTVFHGAQVEDAFRYMAQAKASQAWPCSGAPSATWAFWWRR

SEQ ID NO: 143515 - DNA, 7536 bp, Artificial Sequence
  derived and/or modified sequence
atggaggaggtggtgatcgccggcatgagcggcaagctgcccgagagcgagaacctgcaggagttctgggacaacctgatcggcggcgtggacatggtgaccgacgacgacagaagatggaaggccggcctgtacggcctgcccagaagaagcggcaagctgaaggacctgagcagattcgacgccagcttcttcggcgtgcaccccaagcaggcccacaccatggacccccagctgagactgctgctggaggtgacctacgaggccatcgtggacggcggcatcaaccccgacagcctgagaggcacccacaccggcgtgtgggtgggcgtgagcggcagcgagaccagcgaggccctgagcagagaccccgagaccctggtgggctacagcatggtgggctgccagagagccatgatggccaacagactgagcttcttcttcgacttcagaggccccagcatcgccctggacaccgcctgcagcagcagcctgatggccctgcagaacgcctaccaggccatccacagcggccagtgccccgccgccatcgtgggcggcatcaacgtgctgctgaagcccaacaccagcgtgcagttcctgagactgggcatgctgagccccgagggcacctgcaaggccttcgacaccgccggcaacggctactgcagaagcgagggcgtggtggccgtgctgctgaccaagaagagcctggccagaagagtgtacgccaccatcctgaacgccggcaccaacaccgacggcttcaaggagcagggcgtgaccttccccagcggcgacatccaggagcagctgatcagaagcctgtaccagagcgccggcgtggcccccgagagcttcgagtacatcgaggcccacggcaccggcaccaaggtgggcgacccccaggagctgaacggcatcaccagagccctgtgcgccaccagacaggagcccctgctgatcggcagcaccaagagcaacatgggccaccccgagcccgccagcggcctggccgccctggccaaggtgctgctgagcctggagcacggcctgtgggcccccaacctgcacttccacagccccaaccccgagatccccgccctgctggacggcagactgcaggtggtggaccagcccctgcccgtgagaggcggcaacgtgggcatcaacagcttcggcttcggcggcagcaacgtgcacatcatcctgagacccaacacccagcccccccccgcccccgccccccacgccaccctgcccagactgctgagagccagcggcagaacccccgaggccgtgcagaagctgctggagcagggcctgagacacagccaggacctggccttcctgagcatgctgaacgacatcgccgccgtgcccgccaccgccatgcccttcagaggctacgccgtgctgggcggcgagagaggcggccccgaggtgcagcaggtgcccgccggcgagagacccctgtggttcatctgcagcggcatgggcacccagtggagaggcatgggcctgagcctgatgagactggacagattcagagacagcatcctgagaagcgacgaggccgtgaagcccttcggcctgaaggtgagccagctgctgctgagcaccgacgagagcaccttcgacgacatcgtgcacagcttcgtgagcctgaccgccatccagatcggcctgatcgacctgctgagctgcatgggcctgagacccgacggcatcgtgggccacagcctgggcgaggtggcctgcggctacgccgacggctgcctgagccaggaggaggccgtgctggccgcctactggagaggccagtgcatcaaggaggcccacctgccccccggcgccatggccgccgtgggcctgagctgggaggagtgcaagcagagatgcccccccggcgtggtgcccgcctgccacaacagcaaggacaccgtgaccatcagcggcccccaggcccccgtgttcgagttcgtggagcagctgagaaaggagggcgtgttcgccaaggaggtgagaaccggcggcatggccttccacagctacttcatggaggccatcgccccccccctgctgcaggagctgaagaaggtgatcagagagcccaagcccagaagcgccagatggctgagcaccagcatccccgaggcccagtggcacagcagcctggccagaaccagcagcgccgagtacaacgtgaacaacctggtgagccccgtgctgttccaggaggccctgtggcacgtgcccgagcacgccgtggtgctggagatcgccccccacgccctgctgcaggccgtgctgaagagaggcctgaagcccagctgcaccatcatccccctgatgaagaaggaccacagagacaacctggagttcttcctggccggcatcggcagactgcacctgagcggcatcgacgccaaccccaacgccctgttcccccccgtggagttccccgcccccagaggcacccccctgatcagccccctgatcaagtgggaccacagcctggcctgggacgtgcccgccgccgaggacttccccaacggcagcggcagccccagcgccgccatctacaacatcgacaccagcagcgagagccccgaccactacctggtggaccacaccctggacggcagagtgctgttccccgccaccggctacctgagcatcgtgtggaagaccctggccagagccctgggcctgggcgtggagcagctgcccgtggtgttcgaggacgtggtgctgcaccaggccaccatcctgcccaagaccggcaccgtgagcctggaggtgagactgctggaggccagcagagccttcgaggtgagcgagaacggcaacctggtggtgagcggcaaggtgtaccagtgggacgaccccgaccccagactgttcgaccaccccgagagccccacccccaaccccaccgagcccctgttcctggcccaggccgaggtgtacaaggagctgagactgagaggctacgactacggcccccacttccagggcatcctggaggccagcctggagggcgacagcggcagactgctgtggaaggacaactgggtgagcttcatggacaccatgctgcagatgagcatcctgggcagcgccaagcacggcctgtacctgcccaccagagtgaccgccatccacatcgaccccgccacccacagacagaagctgtacaccctgcaggacaaggcccaggtggccgacgtggtggtgagcagatggctgagagtgaccgtggccggcggcgtgcacatcagcggcctgcacaccgagagcgcccccagaagacagcaggagcagcaggtgcccatcctggagaagttctgcttcaccccccacaccgaggagggctgcctgagcgagagagccgccctgcaggaggagctgcagctgtgcaagggcctggtgcaggccctgcagaccaaggtgacccagcagggcctgaagatggtggtgcccggcctggacggcgcccagatccccagagaccccagccagcaggagctgcccagactgctgagcgccgcctgcagactgcagctgaacggcaacctgcagctggagctggcccaggtgctggcccaggagagacccaagctgcccgaggaccccctgctgagcggcctgctggacagccccgccctgaaggcctgcctggacaccgccgtggagaacatgcccagcctgaagatgaaggtggtggaggtgctggccggccacggccacctgtacagcagaatccccggcctgctgagcccccaccccctgctgcagctgagctacaccgccaccgacagacacccccaggccctggaggccgcccaggccgagctgcagcagcacgacgtggcccagggccagtgggaccccgccgaccccgcccccagcgccctgggcagcgccgacctgctggtgtgcaactgcgccgtggccgccctgggcgaccccgccagcgccctgagcaacatggtggccgccctgagagagggcggcttcctgctgctgcacaccctgctgagaggccaccccctgggcgacatcgtggccttcctgaccagcaccgagccccagtacggccagggcatcctgagccaggacgcctgggagagcctgttcagcagagtgagcctgagactggtgggcctgaagaagagcttctacggcagcaccctgttcctgtgcagaagacccaccccccaggacagccccatcttcctgcccgtggacgacaccagcttcagatgggtggagagcctgaagggcatcctggccgacgaggacagcagcagacccgtgtggctgaaggccatcaactgcgccaccagcggcgtggtgggcctggtgaactgcctgagaagagagcccggcggcaacagactgagatgcgtgctgctgagcaacctgagcagcaccagccacgtgcccgaggtggaccccggcagcgccgagctgcagaaggtgctgcagggcgacctggtgatgaacgtgtacagagacggcgcctggggcgccttcagacacttcctgctggaggaggacaagcccgaggagcccaccgcccacgccttcgtgagcaccctgaccagaggcgacctgagcagcatcagatgggtgtgcagcagcctgagacacgcccagcccacctgccccggcgcccagctgtgcaccgtgtactacgccagcctgaacttcagagacatcatgctggccaccggcaagctgagccccgacgccatccccggcaagtggaccagccaggacagcctgctgggcatggagttcagcggcagagacgccagcggcaagagagtgatgggcctggtgcccgccaagggcctggccaccagcgtgctgctgagccccgacttcctgtgggacgtgcccagcaactggaccctggaggaggccgccagcgtgcccgtggtgtacagcaccgcctactacgccctggtggtgagaggcagagtgagacccggcgagaccctgctgatccacagcggcagcggcggcgtgggccaggccgccatcgccatcgccctgagcctgggctgcagagtgttcaccaccgtgggcagcgccgagaagagagcctacctgcaggccagattcccccagctggacagcaccagcttcgccaacagcagagacaccagcttcgagcagcacgtgctgtggcacaccggcggcaagggcgtggacctggtgctgaacagcctggccgaggagaagctgcaggccagcgtgagatgcctggccacccacggcagattcctggagatcggcaagttcgacctgagccagaaccaccccctgggcatggccatcttcctgaagaacgtgaccttccacggcgtgctgctggacgccttcttcaacgagagcagcgccgactggagagaggtgtgggccctggtgcaggccggcatcagagacggcgtggtgagacccctgaagtgcaccgtgttccacggcgcccaggtggaggacgccttcagatacatggcccagggcaagcacatcggcaaggtggtggtgcaggtgctggccgaggagcccgaggccgtgctgaagggcgccaagcccaagctgatgagcgccatcagcaagaccttctgccccgcccacaagagctacatcatcgccggcggcctgggcggcttcggcctggagctggcccagtggctgatccagagaggcgtgcagaagctggtgctgaccagcagaagcggcatcagaaccggctaccaggccaagcaggtgagaagatggagaagacagggcgtgcaggtgcaggtgagcaccagcaacatcagcagcctggagggcgccagaggcctgatcgccgaggccgcccagctgggccccgtgggcggcgtgttcaacctggccgtggtgctgagagacggcctgctggagaaccagacccccgagttcttccaggacgtgtgcaagcccaagtacagcggcaccctgaacctggacagagtgaccagagaggcctgccccgagctggactacttcgtggtgttcagcagcgtgagctgcggcagaggcaacgccggccagagcaactacggcttcgccaacagcgccatggagagaatctgcgagaagagaagacacgagggcctgcccggcctggccgtgcagtggggcgccatcggcgacgtgggcatcctggtggagaccatgagcaccaacgacaccatcgtgagcggcaccctgccccagagaatggccagctgcctggaggtgctggacctgttcctgaaccagccccacatggtgctgagcagcttcgtgctggccgagaaggccgccgcctacagagacagagacagccagagagacctggtggaggccgtggcccacatcctgggcatcagagacctggccgccgtgaacctggacagcagcctggccgacctgggcctggacagcctgatgagcgtggaggtgagacagaccctggagagagagctgaacctggtgctgagcgtgagagaggtgagacagctgaccctgagaaagctgcaggagctgagcagcaaggccgacgaggccagcgagctggcctgccccacccccaaggaggacggcctggcccagcagcagacccagctgaacctgagaagcctgctggtgaaccccgagggccccaccctgatgagactgaacagcgtgcagagcagcgagagacccctgttcctggtgcaccccatcgagggcagcaccaccgtgttccacagcctggccagcagactgagcatccccacctacggcctgcagtgcaccagagccgcccccctggacagcatccacagcctggccgcctactacatcgactgcatcagacaggtgcagcccgagggcccctacagagtggccggctacagctacggcgcctgcgtggccttcgagatgtgcagccagctgcaggcccagcagagccccgcccccacccacaacagcctgttcctgttcgacggcagccccacctacgtgctggcctacacccagagctacagagccaagctgacccccggctgcgaggccgaggccgagaccgaggccatctgcttcttcgtgcagcagttcaccgacatggagcacaacagagtgctggaggccctgctgcccctgaagggcctggaggagagagtggccgccgccgtggacctgatcatcaagagccaccagggcctggacagacaggagctgagcttcgccgccagaagcttctactacaagctgagagccgccgagcagtacacccccaaggccaagtaccacggcaacgtgatgctgctgagagccaagaccggcggcgcctacggcgaggacctgggcgccgactacaacctgagccaggtgtgcgacggcaaggtgagcgtgcacgtgatcgagggcgaccacagaaccctgctggagggcagcggcctggagagcatcatcagcatcatccacagcagcctggccgagcccagagtgagcgtgagagagggctag

SEQ ID NO: 143516 - DNA, 2502 bp, Artificial Sequence
  derived and/or modified sequence
atgagcatcctgggcagcgccaagcacggcctgtacctgcccaccagagtgaccgccatccacatcgaccccgccacccacagacagaagctgtacaccctgcaggacaaggcccaggtggccgacgtggtggtgagcagatggctgagagtgaccgtggccggcggcgtgcacatcagcggcctgcacaccgagagcgcccccagaagacagcaggagcagcaggtgcccatcctggagaagttctgcttcaccccccacaccgaggagggctgcctgagcgagagagccgccctgcaggaggagctgcagctgtgcaagggcctggtgcaggccctgcagaccaaggtgacccagcagggcctgaagatggtggtgcccggcctggacggcgcccagatccccagagaccccagccagcaggagctgcccagactgctgagcgccgcctgcagactgcagctgaacggcaacctgcagctggagctggcccaggtgctggcccaggagagacccaagctgcccgaggaccccctgctgagcggcctgctggacagccccgccctgaaggcctgcctggacaccgccgtggagaacatgcccagcctgaagatgaaggtggtggaggtgctggccggccacggccacctgtacagcagaatccccggcctgctgagcccccaccccctgctgcagctgagctacaccgccaccgacagacacccccaggccctggaggccgcccaggccgagctgcagcagcacgacgtggcccagggccagtgggaccccgccgaccccgcccccagcgccctgggcagcgccgacctgctggtgtgcaactgcgccgtggccgccctgggcgaccccgccagcgccctgagcaacatggtggccgccctgagagagggcggcttcctgctgctgcacaccctgctgagaggccaccccctgggcgacatcgtggccttcctgaccagcaccgagccccagtacggccagggcatcctgagccaggacgcctgggagagcctgttcagcagagtgagcctgagactggtgggcctgaagaagagcttctacggcagcaccctgttcctgtgcagaagacccaccccccaggacagccccatcttcctgcccgtggacgacaccagcttcagatgggtggagagcctgaagggcatcctggccgacgaggacagcagcagacccgtgtggctgaaggccatcaactgcgccaccagcggcgtggtgggcctggtgaactgcctgagaagagagcccggcggcaacagactgagatgcgtgctgctgagcaacctgagcagcaccagccacgtgcccgaggtggaccccggcagcgccgagctgcagaaggtgctgcagggcgacctggtgatgaacgtgtacagagacggcgcctggggcgccttcagacacttcctgctggaggaggacaagcccgaggagcccaccgcccacgccttcgtgagcaccctgaccagaggcgacctgagcagcatcagatgggtgtgcagcagcctgagacacgcccagcccacctgccccggcgcccagctgtgcaccgtgtactacgccagcctgaacttcagagacatcatgctggccaccggcaagctgagccccgacgccatccccggcaagtggaccagccaggacagcctgctgggcatggagttcagcggcagagacgccagcggcaagagagtgatgggcctggtgcccgccaagggcctggccaccagcgtgctgctgagccccgacttcctgtgggacgtgcccagcaactggaccctggaggaggccgccagcgtgcccgtggtgtacagcaccgcctactacgccctggtggtgagaggcagagtgagacccggcgagaccctgctgatccacagcggcagcggcggcgtgggccaggccgccatcgccatcgccctgagcctgggctgcagagtgttcaccaccgtgggcagcgccgagaagagagcctacctgcaggccagattcccccagctggacagcaccagcttcgccaacagcagagacaccagcttcgagcagcacgtgctgtggcacaccggcggcaagggcgtggacctggtgctgaacagcctggccgaggagaagctgcaggccagcgtgagatgcctggccacccacggcagattcctggagatcggcaagttcgacctgagccagaaccaccccctgggcatggccatcttcctgaagaacgtgaccttccacggcgtgctgctggacgccttcttcaacgagagcagcgccgactggagagaggtgtgggccctggtgcaggccggcatcagagacggcgtggtgagacccctgaagtgcaccgtgttccacggcgcccaggtggaggacgccttcagatacatggcccaggccaaggccagccaggcctggccctgcagcggcgcccccagcgccacctgggccttctggtggagaagatag

SEQ ID NO: 143517 - DNA, 7536 bp, Artificial Sequence
  derived and/or modified sequence
atggaagaggtggtgatagctggtatgagtggtaaattaccagagtcggaaaatctgcaggagttttgggataatctgattgggggcgtggatatggtgacagacgacgaccgcagatggaaagctggcttgtatggcctgcctcgccgttcagggaagctgaaggacttgagccggtttgatgcttccttctttggggtccacccaaaacaggctcatacaatggatcctcagctcaggctgctgctggaggtgacctacgaggccatcgtagacggaggcatcaaccccgactcactgcgggggacacacactggcgtctgggtgggcgttagcggctccgagaccagcgaagcactttcccgcgatcctgagacactcgtgggatacagcatggtggggtgccagcgagccatgatggctaaccggctctcgtttttcttcgatttcagagggccaagcattgccctcgacacggcatgctcttccagcctgatggccctacagaacgcgtaccaagctattcactcaggccagtgtcctgcggcgattgtgggaggtataaatgtactactgaaacccaatacctctgtgcagtttctgcgcctaggtatgttgtctcctgaagggacatgcaaagccttcgacaccgcaggcaacggctactgccgcagcgagggggtggtagctgttcttctgactaaaaagtcactagcccgcagagtctacgctaccatcttaaatgcgggaactaacacagacggctttaaggagcagggggtgacttttccttccggtgatattcaggaacagctgataaggtctttgtatcaaagtgctggcgtggcccctgaatcctttgaatacatagaagcgcatggcacaggaacgaaagttggcgaccctcaagagctgaacggcatcactcgggctctttgtgccacacgccaggaacctctgctaattgggtccactaaatccaacatgggacaccccgagccagccagcggcctagcagcgttggctaaagtgctcctgtctctggaacacggattatgggcaccaaacctgcactttcactctcccaaccccgagataccagctctgctcgatggtaggcttcaggtagtagatcaacccctcccggtgcgaggtggtaacgtgggcatcaattcctttggcttcggaggttcgaatgtgcatatcatcctgcggccgaatacacagccccccccagcccccgccccccatgccaccctgccaagactgttgcgcgcctcaggacgcacaccagaagctgtgcagaaactgctggagcagggtctgcggcattcacaggacctcgccttccttagtatgctgaatgatatcgctgccgtgcccgccactgcgatgccctttagaggttacgcggtactgggaggcgaacggggtggacccgaagttcagcaagtgcctgcaggagaacgcccgttgtggtttatttgctccgggatgggaacacagtggcgtggcatgggcctaagccttatgcgactcgaccggttcagggactccatcctgcggtccgacgaggctgtgaagccgtttgggttgaaagtgtcacagctgctgttatccacggacgagtctacatttgatgatattgttcacagttttgtgagtttaacagcaattcagataggactcattgatttgttgagctgtatgggactgcgccctgacgggatcgttgggcattctctgggcgaagttgcatgtgggtacgctgacggatgtctctctcaggaggaggccgtgcttgcagcctactggaggggccagtgtattaaagaagcgcaccttccccctggagccatggcagcagtcggcctgagctgggaagagtgcaagcagaggtgtccacctggtgtcgtgccggcatgccacaactccaaggacactgtgaccatctcggggccgcaggcccccgtcttcgaatttgtggagcagctcaggaaggagggcgtcttcgccaaagaagttaggaccggaggcatggcttttcactcgtacttcatggaggcaattgctcctccccttctccaggaattgaagaaggtcatccgcgagccgaagccaagaagcgcaagatggctctccacttctattcccgaagcccagtggcattcctccctggccaggacctccagtgcggagtataatgttaacaacctggtatccccggttctcttccaggaggctctgtggcatgtccccgaacatgctgtcgttttggaaatagctccccacgctttgctgcaggcagtactcaaaagagggctcaagccaagttgtaccatcatcccccttatgaaaaaagatcatcgcgacaatctcgaatttttcctggccgggatcggaagacttcacctgtccgggattgacgcgaatccaaatgcactgtttcctcccgtggagttccctgctccacgcgggactcccttaatctcccccttaatcaaatgggatcactccctcgcctgggatgtgcccgccgcagaggacttccctaacgggtccggcagtcctagtgccgcaatatacaatatcgatacatcatctgagtcacctgaccactatcttgtggaccacaccttagacggtcgggtgctgttcccagcgacagggtatttgtccatagtgtggaagactttagctcgggcccttggcctgggagtggagcagttgccggttgtttttgaggatgtggtgctccatcaggctactatcctaccgaaaacggggacggtgagcctggaagtccgcctgcttgaggcaagcagggcttttgaggtttcagagaatgggaaccttgtagttagcggcaaggtgtaccagtgggacgatcccgacccgagactgttcgaccatcccgagtccccaacacctaatcctaccgaacctctatttctggctcaggctgaagtgtataaggaacttagactccgcggctacgactacggtcctcactttcagggcatacttgaggcaagcctggaaggggactctgggcggttactatggaaggataattgggtgagtttcatggataccatgctccaaatgtcgatcctggggagtgcaaaacacggactttaccttccaactcgggttacggcaatccacattgatccggctacacatcgccagaaactctatactttgcaagacaaggcccaagtagcggatgtggttgtaagcagatggctgagggtcaccgtggctggcggtgtacacattagcggtctgcacacagagagtgcgccgcggcgacaacaagaacagcaggtccctatccttgagaagttttgcttcacccctcatacagaggaagggtgtctgtctgagagagcggcgctgcaagaagaacttcagctctgcaagggtctcgtacaggcgctgcagaccaaagtcacccagcaagggctgaaaatggtggttcccggactggacggcgcgcagattccacgagacccatcccaacaggaactacctcgtctgctgtcagctgcctgccgcctgcagttgaacgggaacctccaacttgaactcgcacaggttctggcccaggaacgcccaaagcttcccgaggacccactgctaagcggcctgctggacagccccgccctcaaagcctgtctggacactgccgtagaaaatatgccaagcctcaaaatgaaggtggtggaggtcctggccggacacggacatctgtactcaagaataccagggctgctgtctccacaccccctgttacagctttcatatactgccacggatagacacccgcaggctctcgaggctgcccaggctgagttgcagcaacatgatgtggctcaggggcaatgggaccccgctgatcccgcacccagcgccttgggaagtgcggaccttctggtgtgcaactgcgcagtggctgctctgggggatccagcgagcgctctttctaacatggtggctgcattacgggaggggggattcctactgctgcatacccttctgcgcggtcatcccttaggggacattgtggcctttctcacctctacagagccccagtacggacaaggaattctcagtcaggatgcatgggagagtcttttttcgcgggtctcgttgagactggttggactgaaaaagtccttttacggcagtaccctctttctatgccgcagaccaactccccaggatagtccaatcttccttcctgtggacgacacatcattccgttgggttgaaagcctgaagggcatcctggcagacgaagatagcagccgcccagtttggctgaaagctatcaattgcgcaacatccggggtggtggggcttgttaactgtttgagacgggagcccggaggaaaccgacttcgttgcgtgctactgagcaacctgtcatccacgtcccacgtcccagaggttgacccgggctcagccgagctgcaaaaggtattacagggcgatttggttatgaacgtgtacagggacggtgcgtggggggcttttcgacatttcctgctggaagaagataagccagaagagcccacggcccacgccttcgtctcaacccttacgaggggggacttgtcctctatcagatgggtctgtagctcacttagacacgctcagccaacatgtccaggcgctcagttgtgtacagtgtactacgcctctcttaatttccgtgatatcatgctggccacaggcaagctctctcctgacgcgatcccgggaaagtggacaagccaggactcgctcttgggcatggagttttccggccgagacgccagtggtaaacgcgtaatggggttggttcccgccaagggactggcgactagtgtcctcctgtcacctgactttctgtgggacgtgccgtccaattggacactggaagaggcagcttccgtgcctgtcgtgtacagtacggcctactacgctctggtggtgcgtggaagggtcaggcccggagaaactctgttgatccactcgggcagcggcggcgtgggacaggctgccatcgcgattgcactatccctggggtgccgtgtgttcactacagtcggcagcgctgaaaaaagggcttacctccaggccagattcccccagttagactctacatccttcgcaaattccagagatacgtcttttgagcagcatgtgctttggcacacaggcggaaaaggagtcgatctagtgctcaattcactagccgaagaaaagttgcaggcctcggtgcggtgcctcgccactcacggtcgctttctggagatcggaaaatttgacctgtcgcagaaccaccccctggggatggcgatattcctgaagaacgtaacgtttcatggggtgttgcttgatgcattcttcaatgagtcctcagcggattggagagaagtgtgggctcttgtgcaagcaggcataagggacggcgtggtgcggccgttaaaatgtacagttttccacggtgcacaagtggaggacgcatttagatacatggctcagggtaaacacataggcaaggtagtggtgcaagtgttagctgaggagcccgaggctgtcctgaaaggtgccaagcctaagcttatgtctgctatcagtaagactttctgtcccgctcataagagctacatcatcgccggcggcctcgggggcttcggcttagagcttgcccagtggctgattcagagaggtgtacagaagctagtgttaacctcccgctcaggaatccgtactggttaccaggcgaaacaagtacgccgctggcgtagacaaggcgttcaagtgcaggtaagcactagcaacatatcttctttggaaggcgcacggggacttatcgccgaagcagcacagctagggccggtaggaggcgtgttcaacttggctgtcgtgcttagggacggccttctcgaaaaccagactccggagttttttcaggacgtttgcaagccaaaatactctgggaccttaaatttagaccgtgtgactcgggaagcatgtccagagctggattactttgtggtgttcagctccgtgtcctgcggccggggaaacgccggccaaagtaactacggattcgccaactctgctatggagagaatctgcgaaaagaggagacatgaaggactgcccgggttggccgttcagtggggtgcaatcggcgatgtgggtatcctcgttgagacgatgtccaccaacgacacaattgtatccggcacgctgcctcaacgcatggccagttgcctagaggtcctggatcttttccttaaccagccccatatggttttgtcgtcattcgtgcttgccgaaaaggcggccgcgtaccgagatcgggatagtcagagagacctggttgaggctgtggcccatatcctcggtatcagggatctggcagcagttaatttagatagttctctggccgatttgggtcttgatagcctgatgagtgttgaagtgagacagacactggaacgcgaactgaacctggtgctgtccgtgagggaggtgcgccagctcaccctgcgcaaactccaggaactatccagcaaggctgacgaggcgagtgaactagcgtgtcccacgcctaaagaggatgggctagcccagcagcagacacagcttaaccttagatccctactggtgaacccggagggcccgaccctgatgcgtctcaacagtgtccagagtagcgaacggcccctgttccttgtgcatccaatagaggggtcaactactgtttttcactccctggccagcaggctcagtataccaacttatgggctgcaatgcaccagggccgcaccactggacagtattcattcacttgccgcctattatattgactgtatccgtcaggtccagccagagggtccctaccgagttgctgggtatagctatggtgcctgcgttgcattcgaaatgtgctctcagctacaagcccaacagtctccagctcctacccacaacagtctgttcctctttgatggaagtcctacatacgtgctggcctacacccagtcctaccgggcaaagctgacgcccggctgcgaagcagaagcggaaactgaagcgatatgcttttttgttcagcaatttacggatatggagcacaatagggttctcgaggcactgctgccgttgaagggactagaagagcgggtggcggctgctgtggacctcataatcaaaagccaccaggggttagaccgccaggagctgtcatttgcggcaaggagcttctattacaaattgcgagccgctgagcaatatactcccaaggcaaaatatcacggtaatgtgatgctcctccgcgcaaaaacaggtggcgcgtatggcgaagatctcggtgcagactataacttgtcccaagtctgtgacgggaaagtttcagttcatgtaatagagggtgatcaccggacccttcttgaaggctccggtctagaatccataatcagcataatacacagctctttagcagaacctcgcgtatcagtgagagagggctag

SEQ ID NO: 143518 - DNA, 2502 bp, Artificial Sequence
  derived and/or modified sequence
atgtccatcctaggatccgctaagcacggcctgtatttgcctacccgggttactgccatacacatcgatcccgcgacccatagacagaaactctacacactccaggataaagcgcaggtggccgacgtcgtcgtctcccgctggttgcgtgtcacagttgcaggtggagtgcacatttcaggtcttcacacagagtctgccccaaggagacagcaggagcagcaggtcccaattcttgagaagttctgcttcacaccacatacggaagagggatgcctctcagaacgtgccgccctgcaggaagaactgcagctgtgcaagggcctggtgcaggcactgcaaactaaggtgactcagcaagggcttaaaatggttgtgccaggcctcgacggcgctcagatccctagagacccctctcagcaggaactccccaggctgttgtcggcggcctgccggctgcagctgaatggaaatctacaactcgagctggcacaggtgctcgctcaggaacgccctaaactgcctgaagatcctcttttgtccggtttactggactcccctgctcttaaggcgtgcttagataccgctgttgagaacatgccaagtctcaaaatgaaggttgttgaggtgctggcaggccacgggcatctgtatagccggatccctgggctcctgtctccccatcctctgttgcagctctcatatactgcgaccgacaggcacccccaggccctggaagccgctcaggctgagctccagcaacatgacgtggcacagggccagtgggaccccgcggaccccgccccttctgctctcgggtctgcagacctcctcgtgtgcaattgtgctgtggccgccctgggagatccagcgtctgcactgtcaaatatggtcgcggccctgagggagggcgggtttttgctcctccatacattgctgcgaggccatcctttaggagatatcgtggcctttctgacatctaccgaacctcaatacggccaggggatcctgagccaggacgcatgggaatcccttttcagccgcgtgagcctcaggcttgtggggctcaaaaagtctttctatgggagcaccctctttctgtgccgaaggcctaccccccaggatagtccaattttcttaccggttgacgacacttcatttagatgggtggagtccttgaaaggcattttagcggacgaggacagttcacggccagtgtggctgaaggcgatcaactgcgccaccagcggagtcgtgggcctcgtaaactgtctcaggagagaacctgggggtaataggttgcggtgtgtcttgttatctaacttgtcctctacaagccacgtacctgaggtagatcctggatctgcggagctgcagaaagtcctacagggcgaccttgttatgaacgtgtatcgtgacggcgcttggggcgcttttcgccactttctgttggaggaggataaaccagaggagcctactgcacacgcttttgtaagcaccttaacacggggagacctgagctctatcaggtgggtctgcagtagtcttagacacgcccaacccacatgtcccggggcacagctgtgtactgtgtattacgccagcttaaacttccgtgacatcatgcttgctaccggcaagttgtcgcctgacgccatcccaggcaagtggaccagccaggattctctgctgggtatggagtttagcggacgagacgcttctggcaagcgcgtcatgggtttggtgcctgccaaaggcctggctacttccgtgcttttgtcacctgatttcttatgggatgtgccatcaaattggactcttgaagaagcagctagcgtgcccgttgtctactcaacggcctattacgctctagtcgtccgaggtagagtgagacctggggagacgctcctgatacactccggctcgggcggagtgggacaggccgcaatagccatcgcactgtcgctcggttgccgggtttttaccaccgtgggcagtgccgaaaaacgggcctatctccaggctcgtttcccacaattggactctacttcttttgcaaactctagagatacctccttcgagcagcacgtgctttggcacaccgggggcaagggggtcgatctggtcctaaacagtcttgccgaggaaaaattgcaagcttcagtcagatgcttggccactcacggtcggttcctcgaaataggaaaattcgatctatcgcagaatcaccctctgggtatggctatcttcctgaagaacgtaacttttcacggagtgctactggatgccttctttaacgaatcttccgctgattggcgggaggtctgggccctggtacaggccggtatcagggacggtgtggtacgcccgttaaaatgcacagtattccacggcgcccaagtcgaggacgcctttcgctacatggcccaggctaaagcttcacaagcctggccttgcagcggcgcccccagcgccacctgggctttttggtggagacgctag

SEQ ID NO: 143519 - DNA, 8457 bp, Artificial Sequence
  derived and/or modified sequence
gagagacggcagcggccccggcctccctctccgccgcgcttcagcctcccgctccgccgcgctccagcctcgctctccgccgcccgcaccgccgcccgcgccctcaccagagcagccatggaggaggtggtgattgccggcatgtccgggaagctgccagagtcggagaacttgcaggagttctgggacaacctcatcggcggtgtggacatggtcacggacgatgaccgtcgctggaaggcggggctctacggcctgccccggcggtccggcaagctgaaggacctgtctaggtttgatgcctccttcttcggagtccaccccaagcaggcacacacgatggaccctcagctgcggctgctgctggaagtcacctatgaagccatcgtggacggaggcatcaacccagattcactccgaggaacacacactggcgtctgggtgggcgtgagcggctctgagacctcggaggccctgagccgagaccccgagacactcgtgggctacagcatggtgggctgccagcgagcgatgatggccaaccggctctccttcttcttcgacttcagagggcccagcatcgcactggacacagcctgctcctccagcctgatggccctgcagaacgcctaccaggccatccacagcgggcagtgccctgccgccatcgtggggggcatcaatgtcctgctgaagcccaacacctccgtgcagttcttgaggctggggatgctcagccccgagggcacctgcaaggccttcgacacagcggggaatgggtactgccgctcggagggtgtggtggccgtcctgctgaccaagaagtccctggcccggcgggtgtacgccaccatcctgaacgccggcaccaatacagatggcttcaaggagcaaggcgtgaccttcccctcaggggatatccaggagcagctcatccgctcgttgtaccagtcggccggagtggcccctgagtcatttgaatacatcgaagcccacggcacaggcaccaaggtgggcgacccccaggagctgaatggcatcacccgagccctgtgcgccacccgccaggagccgctgctcatcggctccaccaagtccaacatggggcacccggagccagcctcggggctggcagccctggccaaggtgctgctgtccctggagcacgggctctgggcccccaacctgcacttccatagccccaaccctgagatcccagcgctgttggatgggcggctgcaggtggtggaccagcccctgcccgtccgtggcggcaacgtgggcatcaactcctttggcttcgggggctccaacgtgcacatcatcctgaggcccaacacgcagccgccccccgcacccgccccacatgccaccctgccccgtctgctgcgggccagcggacgcacccctgaggccgtgcagaagctgctggagcagggcctccggcacagccaggacctggctttcctgagcatgctgaacgacatcgcggctgtccccgccaccgccatgcccttccgtggctacgctgtgctgggtggtgagcgcggtggcccagaggtgcagcaggtgcccgctggcgagcgcccgctctggttcatctgctctgggatgggcacacagtggcgcgggatggggctgagcctcatgcgcctggaccgcttccgagattccatcctacgctccgatgaggctgtgaagccattcggcctgaaggtgtcacagctgctgctgagcacagacgagagcacctttgatgacatcgtccattcgtttgtgagcctgactgccatccagataggcctcatagacctgctgagctgcatggggctgaggccagatggcatcgtcggccactccctgggggaggtggcctgtggctacgccgacggctgcctgtcccaggaggaggccgtcctcgctgcctactggaggggacagtgcatcaaagaagcccatctcccgccgggcgccatggcagccgtgggcttgtcctgggaggagtgtaaacagcgctgccccccgggcgtggtgcccgcctgccacaactccaaggacacagtcaccatctcgggacctcaggccccggtgtttgagttcgtggagcagctgaggaaggagggtgtgtttgccaaggaggtgcggaccggcggtatggccttccactcctacttcatggaggccatcgcacccccactgctgcaggagctcaagaaggtgatccgggagccgaagccacgttcagcccgctggctcagcacctctatccccgaggcccagtggcacagcagcctggcacgcacgtcctccgccgagtacaatgtcaacaacctggtgagccctgtgctgttccaggaggccctgtggcacgtgcctgagcacgcggtggtgctggagatcgcgccccacgccctgctgcaggctgtcctgaagcgtggcctgaagccgagctgcaccatcatccccctgatgaagaaggatcacagggacaacctggagttcttcctggccggcatcggcaggctgcacctctcaggcatcgacgccaaccccaatgccttgttcccacctgtggagttcccagctccccgaggaactcccctcatctccccactcatcaagtgggaccacagcctggcctgggacgtgccggccgccgaggacttccccaacggttcaggttccccctcagccgccatctacaacatcgacaccagctccgagtctcctgaccactacctggtggaccacaccctcgacggtcgcgtcctcttccccgccactggctacctgagcatagtgtggaagacgctggcccgcgccctgggcctgggcgtcgagcagctgcctgtggtgtttgaggatgtggtgctgcaccaggccaccatcctgcccaagactgggacagtgtccctggaggtacggctcctggaggcctcccgtgccttcgaggtgtcagagaacggcaacctggtagtgagtgggaaggtgtaccagtgggatgaccctgaccccaggctcttcgaccacccggaaagccccacccccaaccccacggagcccctcttcctggcccaggctgaagtttacaaggagctgcgtctgcgtggctacgactacggccctcatttccagggcatcctggaggccagcctggaaggtgactcggggaggctgctgtggaaggataactgggtgagcttcatggacaccatgctgcagatgtccatcctgggctcggccaagcacggcctgtacctgcccacccgtgtcaccgccatccacatcgaccctgccacccacaggcagaagctgtacacactgcaggacaaggcccaagtggctgacgtggtggtgagcaggtggctgagggtcacagtggccggaggcgtccacatctccgggctccacactgagtcggccccgcggcggcagcaggagcagcaggtgcccatcctggagaagttttgcttcactccccacacggaggaggggtgcctgtctgagcgcgctgccctgcaggaggagctgcaactgtgcaaggggctggtgcaggcactgcagaccaaggtgacccagcaggggctgaagatggtggtgcccggactggatggggcccagatcccccgggacccctcacagcaggaactgccccggctgttgtcggctgcctgcaggcttcagctcaacgggaacctgcagctggagctggcgcaggtgctggcccaggagaggcccaagctgccagaggaccctctgctcagcggcctcctggactccccggcactcaaggcctgcctggacactgccgtggagaacatgcccagcctgaagatgaaggtggtggaggtgctggctggccacggtcacctgtattcccgcatcccaggcctgctcagcccccatcccctgctgcagctgagctacacggccaccgaccgccacccccaggccctggaggctgcccaggccgagctgcagcagcacgacgttgcccagggccagtgggatcccgcagaccctgcccccagcgccctgggcagcgccgacctcctggtgtgcaactgtgctgtggctgccctcggggacccggcctcagctctcagcaacatggtggctgccctgagagaagggggctttctgctcctgcacacactgctccgggggcaccccctcggggacatcgtggccttcctcacctccactgagccgcagtatggccagggcatcctgagccaggacgcgtgggagagcctcttctccagggtgtcgctgcgcctggtgggcctgaagaagtccttctacggctccacgctcttcctgtgccgccggcccaccccgcaggacagccccatcttcctgccggtggacgataccagcttccgctgggtggagtctctgaagggcatcctggctgacgaagactcttcccggcctgtgtggctgaaggccatcaactgtgccacctcgggcgtggtgggcttggtgaactgtctccgccgagagcccggcgggaaccgcctccggtgtgtgctgctctccaacctcagcagcacctcccacgtcccggaggtggacccgggctccgcagaactgcagaaggtgttgcagggagacctggtgatgaacgtctaccgcgacggggcctggggggctttccgccacttcctgctggaggaggacaagcctgaggagccgacggcacatgcctttgtgagcaccctcacccggggggacctgtcctccatccgctgggtctgctcctcgctgcgccatgcccagcccacctgccctggcgcccagctctgcacggtctactacgcctccctcaacttccgcgacatcatgctggccactggcaagctgtcccctgatgccatcccagggaagtggacctcccaggacagcctgctaggtatggagttctcgggccgagacgccagcggcaagcgtgtgatgggactggtgcctgccaagggcctggccacctctgtcctgctgtcaccggacttcctctgggatgtgccttccaactggacgctggaggaggcggcctcggtgcctgtcgtctacagcacggcctactacgcgctggtggtgcgtgggcgggtgcgccccggggagacgctgctcatccactcgggctcgggcggcgtgggccaggccgccatcgccatcgccctcagtctgggctgccgcgtcttcaccaccgtggggtcggctgagaagcgggcgtacctccaggccaggttcccccagctcgacagcaccagcttcgccaactcccgggacacatccttcgagcagcatgtgctgtggcacacgggcgggaagggcgttgacctggtcttgaactccttggcggaagagaagctgcaggccagcgtgaggtgcttggctacgcacggtcgcttcctggaaattggcaaattcgacctttctcagaaccacccgctcggcatggctatcttcctgaagaacgtgacattccacggggtcctactggatgcgttcttcaacgagagcagtgctgactggcgggaggtgtgggcgcttgtgcaggccggcatccgggatggggtggtacggcccctcaagtgcacggtgttccatggggcccaggtggaggacgccttccgctacatggcccaagggaagcacattggcaaagtcgtcgtgcaggtgcttgcggaggagccggaggcagtgctgaagggggccaaacccaagctgatgtcggccatctccaagaccttctgcccggcccacaagagctacatcatcgctggtggtctgggtggcttcggcctggagttggcgcagtggctgatacagcgtggggtgcagaagctcgtgttgacttctcgctccgggatccggacaggctaccaggccaagcaggtccgccggtggaggcgccagggcgtacaggtgcaggtgtccaccagcaacatcagctcactggagggggcccggggcctcattgccgaggcggcgcagcttgggcccgtgggcggcgtcttcaacctggccgtggtcttgagagatggcttgctggagaaccagaccccagagttcttccaggacgtctgcaagcccaagtacagcggcaccctgaacctggacagggtgacccgagaggcgtgccctgagctggactactttgtggtcttctcctctgtgagctgcgggcgtggcaatgcgggacagagcaactacggctttgccaattccgccatggagcgtatctgtgagaaacgccggcacgaaggcctcccaggcctggccgtgcagtggggcgccatcggcgacgtgggcattttggtggagacgatgagcaccaacgacacgatcgtcagtggcacgctgccccagcgcatggcgtcctgcctggaggtgctggacctcttcctgaaccagccccacatggtcctgagcagctttgtgctggctgagaaggctgcggcctatagggacagggacagccagcgggacctggtggaggccgtggcacacatcctgggcatccgcgacttggctgctgtcaacctggacagctcactggcggacctgggcctggactcgctcatgagcgtggaggtgcgccagacgctggagcgtgagctcaacctggtgctgtccgtgcgcgaggtgcggcaactcacgctccggaaactgcaggagctgtcctcaaaggcggatgaggccagcgagctggcatgccccacgcccaaggaggatggtctggcccagcagcagactcagctgaacctgcgctccctgctggtgaacccggagggccccaccctgatgcggctcaactccgtgcagagctcggagcggcccctgttcctggtgcacccaatcgagggctccaccaccgtgttccacagcctggcctcccggctcagcatccccacctatggcctgcagtgcacccgagctgcgccccttgacagcatccacagcctggctgcctactacatcgactgcatcaggcaggtgcagcccgagggcccctaccgcgtggccggctactcctacggggcctgcgtggcctttgaaatgtgctcccagctgcaggcccagcagagcccagcccccacccacaacagcctcttcctgttcgacggctcgcccacctacgtactggcctacacccagagctaccgggcaaagctgaccccaggctgtgaggctgaggctgagacggaggccatatgcttcttcgtgcagcagttcacggacatggagcacaacagggtgctggaggcgctgctgccgctgaagggcctagaggagcgtgtggcagccgccgtggacctgatcatcaagagccaccagggcctggaccgccaggagctgagctttgcggcccggtccttctactacaagctgcgtgccgctgagcagtacacacccaaggccaagtaccatggcaacgtgatgctactgcgcgccaagacgggtggcgcctacggcgaggacctgggcgcggactacaacctctcccaggtatgcgacgggaaagtatccgtccacgtcatcgagggtgaccaccgcacgctgctggagggcagcggcctggagtccatcatcagcatcatccacagctccctggctgagccacgcgtgagcgtgcgggagggctaggcccgtgcccccgcctgccaccggaggtcactccaccatccccaccccaccccaccccacccccgccatgcaacgggattgaagggtcctgccggtgggaccctgtccggcccagtgccactgccccccgaggctgctagatgtaggtgttaggcatgtcccacccacccgccgcctcccacggcacctcggggacaccagagctgccgacttggagactcctggtctgtgaagagccggtggtgcccgtgcccgcaggaactgggctgggcctcgtgcgcccgtggggtctgcgcttggtctttctgtgcttggatttgcatatttattgcattgctggtagagacccccaggcctgtccaccctgccaagactcctcaggcagcgtgtgggtcccgcactctgcccccatttccccgatgtcccctgcgggcgcgggcagccacccaagcctgctggctgcggccccctctcggccaggcattggctcagcccgctgagtggggggtcgtgggccagtccccgaggagctgggcccctgcacaggcacacagggcccggccacacccagcggccccccgcacagccacccgtggggtgctgcccttatgcccggcgccgggcaccaactccatgtttggtgtttgtctgtgtttgtttttcaagaaatgattcaaattgctgcttggattttgaaatttactgtaactgtcagtgtacacgtctggaccccgtttcatttttacaccaatttggtaaaaatgctgctctcagcctcccacaattaaaccgcatgtgatctcc

SEQ ID NO: 143520 - DNA, 7844 bp, Artificial Sequence
  derived and/or modified sequence
gagagacggcagcggccccggcctccctctccgccgcgcttcagcctcccgctccgccgcgctccagcctcgctctccgccgcccgcaccgccgcccgcgccctcaccagagcagccatggaggaggtggtgattgccggcatgtccgggaagctgccagagtcggagaacttgcaggagttctgggacaacctcatcggcggtgtggacatggtcacggacgatgaccgtcgctggaaggcggggctctacggcctgccccggcggtccggcaagctgaaggacctgtctaggtttgatgcctccttcttcggagtccaccccaagcaggcacacacgatggaccctcagctgcggctgctgctggaagtcacctatgaagccatcgtggacggaggcatcaacccagattcactccgaggaacacacactggcgtctgggtgggcgtgagcggctctgagacctcggaggccctgagccgagaccccgagacactcgtgggctacagcatggtgggctgccagcgagcgatgatggccaaccggctctccttcttcttcgacttcagagggcccagcatcgcactggacacagcctgctcctccagcctgatggccctgcagaacgcctaccaggccatccacagcgggcagtgccctgccgccatcgtggggggcatcaatgtcctgctgaagcccaacacctccgtgcagttcttgaggctggggatgctcagccccgagggcacctgcaaggccttcgacacagcggggaatgggtactgccgctcggagggtgtggtggccgtcctgctgaccaagaagtccctggcccggcgggtgtacgccaccatcctgaacgccggcaccaatacagatggcttcaaggagcaaggcgtgaccttcccctcaggggatatccaggagcagctcatccgctcgttgtaccagtcggccggagtggcccctgagtcatttgaatacatcgaagcccacggcacaggcaccaaggtgggcgacccccaggagctgaatggcatcacccgagccctgtgcgccacccgccaggagccgctgctcatcggctccaccaagtccaacatggggcacccggagccagcctcggggctggcagccctggccaaggtgctgctgtccctggagcacgggctctgggcccccaacctgcacttccatagccccaaccctgagatcccagcgctgttggatgggcggctgcaggtggtggaccagcccctgcccgtccgtggcggcaacgtgggcatcaactcctttggcttcgggggctccaacgtgcacatcatcctgaggcccaacacgcagccgccccccgcacccgccccacatgccaccctgccccgtctgctgcgggccagcggacgcacccctgaggccgtgcagaagctgctggagcagggcctccggcacagccaggacctggctttcctgagcatgctgaacgacatcgcggctgtccccgccaccgccatgcccttccgtggctacgctgtgctgggtggtgagcgcggtggcccagaggtgcagcaggtgcccgctggcgagcgcccgctctggttcatctgctctgggatgggcacacagtggcgcgggatggggctgagcctcatgcgcctggaccgcttccgagattccatcctacgctccgatgaggctgtgaagccattcggcctgaaggtgtcacagctgctgctgagcacagacgagagcacctttgatgacatcgtccattcgtttgtgagcctgactgccatccagataggcctcatagacctgctgagctgcatggggctgaggccagatggcatcgtcggccactccctgggggaggtggcctgtggctacgccgacggctgcctgtcccaggaggaggccgtcctcgctgcctactggaggggacagtgcatcaaagaagcccatctcccgccgggcgccatggcagccgtgggcttgtcctgggaggagtgtaaacagcgctgccccccgggcgtggtgcccgcctgccacaactccaaggacacagtcaccatctcgggacctcaggccccggtgtttgagttcgtggagcagctgaggaaggagggtgtgtttgccaaggaggtgcggaccggcggtatggccttccactcctacttcatggaggccatcgcacccccactgctgcaggagctcaagaaggtgatccgggagccgaagccacgttcagcccgctggctcagcacctctatccccgaggcccagtggcacagcagcctggcacgcacgtcctccgccgagtacaatgtcaacaacctggtgagccctgtgctgttccaggaggccctgtggcacgtgcctgagcacgcggtggtgctggagatcgcgccccacgccctgctgcaggctgtcctgaagcgtggcctgaagccgagctgcaccatcatccccctgatgaagaaggatcacagggacaacctggagttcttcctggccggcatcggcaggctgcacctctcaggcatcgacgccaaccccaatgccttgttcccacctgtggagttcccagctccccgaggaactcccctcatctccccactcatcaagtgggaccacagcctggcctgggacgtgccggccgccgaggacttccccaacggttcaggttccccctcagccgccatctacaacatcgacaccagctccgagtctcctgaccactacctggtggaccacaccctcgacggtcgcgtcctcttccccgccactggctacctgagcatagtgtggaagacgctggcccgcgccctgggcctgggcgtcgagcagctgcctgtggtgtttgaggatgtggtgctgcaccaggccaccatcctgcccaagactgggacagtgtccctggaggtacggctcctggaggcctcccgtgccttcgaggtgtcagagaacggcaacctggtagtgagtgggaaggtgtaccagtgggatgaccctgaccccaggctcttcgaccacccggaaagccccacccccaaccccacggagcccctcttcctggcccaggctgaagtttacaaggagctgcgtctgcgtggctacgactacggccctcatttccagggcatcctggaggccagcctggaaggtgactcggggaggctgctgtggaaggataactgggtgagcttcatggacaccatgctgcagatgtccatcctgggctcggccaagcacggcctgtacctgcccacccgtgtcaccgccatccacatcgaccctgccacccacaggcagaagctgtacacactgcaggacaaggcccaagtggctgacgtggtggtgagcaggtggctgagggtcacagtggccggaggcgtccacatctccgggctccacactgagtcggccccgcggcggcagcaggagcagcaggtgcccatcctggagaagttttgcttcactccccacacggaggaggggtgcctgtctgagcgcgctgccctgcaggaggagctgcaactgtgcaaggggctggtgcaggcactgcagaccaaggtgacccagcaggggctgaagatggtggtgcccggactggatggggcccagatcccccgggacccctcacagcaggaactgccccggctgttgtcggctgcctgcaggcttcagctcaacgggaacctgcagctggagctggcgcaggtgctggcccaggagaggcccaagctgccagaggaccctctgctcagcggcctcctggactccccggcactcaaggcctgcctggacactgccgtggagaacatgcccagcctgaagatgaaggtggtggaggtgctggctggccacggtcacctgtattcccgcatcccaggcctgctcagcccccatcccctgctgcagctgagctacacggccaccgaccgccacccccaggccctggaggctgcccaggccgagctgcagcagcacgacgttgcccagggccagtgggatcccgcagaccctgcccccagcgccctgggcagcgccgacctcctggtgtgcaactgtgctgtggctgccctcggggacccggcctcagctctcagcaacatggtggctgccctgagagaagggggctttctgctcctgcacacactgctccgggggcaccccctcggggacatcgtggccttcctcacctccactgagccgcagtatggccagggcatcctgagccaggacgcgtgggagagcctcttctccagggtgtcgctgcgcctggtgggcctgaagaagtccttctacggctccacgctcttcctgtgccgccggcccaccccgcaggacagccccatcttcctgccggtggacgataccagcttccgctgggtggagtctctgaagggcatcctggctgacgaagactcttcccggcctgtgtggctgaaggccatcaactgtgccacctcgggcgtggtgggcttggtgaactgtctccgccgagagcccggcgggaaccgcctccggtgtgtgctgctctccaacctcagcagcacctcccacgtcccggaggtggacccgggctccgcagaactgcagaaggtgttgcagggagacctggtgatgaacgtctaccgcgacggggcctggggggctttccgccacttcctgctggaggaggacaagcctgaggagccgacggcacatgcctttgtgagcaccctcacccggggggacctgtcctccatccgctgggtctgctcctcgctgcgccatgcccagcccacctgccctggcgcccagctctgcacggtctactacgcctccctcaacttccgcgacatcatgctggccactggcaagctgtcccctgatgccatcccagggaagtggacctcccaggacagcctgctaggtatggagttctcgggccgagacgccagcggcaagcgtgtgatgggactggtgcctgccaagggcctggccacctctgtcctgctgtcaccggacttcctctgggatgtgccttccaactggacgctggaggaggcggcctcggtgcctgtcgtctacagcacggcctactacgcgctggtggtgcgtgggcgggtgcgccccggggagacgctgctcatccactcgggctcgggcggcgtgggccaggccgccatcgccatcgccctcagtctgggctgccgcgtcttcaccaccgtggggtcggctgagaagcgggcgtacctccaggccaggttcccccagctcgacagcaccagcttcgccaactcccgggacacatccttcgagcagcatgtgctgtggcacacgggcgggaagggcgttgacctggtcttgaactccttggcggaagagaagctgcaggccagcgtgaggtgcttggctacgcacggtcgcttcctggaaattggcaaattcgacctttctcagaaccacccgctcggcatggctatcttcctgaagaacgtgacattccacggggtcctactggatgcgttcttcaacgagagcagtgctgactggcgggaggtgtgggcgcttgtgcaggccggcatccgggatggggtggtacggcccctcaagtgcacggtgttccatggggcccaggtggaggacgccttccgctacatggcccaagcgaaggcctcccaggcctggccgtgcagtggggcgccatcggcgacgtgggcattttggtggagacgatgagcaccaacgacacgatcgtcagtggcacgctgccccagcgcatggcgtcctgcctggaggtgctggacctcttcctgaaccagccccacatggtcctgagcagctttgtgctggctgagaaggctgcggcctatagggacagggacagccagcgggacctggtggaggccgtggcacacatcctgggcatccgcgacttggctgctgtcaacctggacagctcactggcggacctgggcctggactcgctcatgagcgtggaggtgcgccagacgctggagcgtgagctcaacctggtgctgtccgtgcgcgaggtgcggcaactcacgctccggaaactgcaggagctgtcctcaaaggcggatgaggccagcgagctggcatgccccacgcccaaggaggatggtctggcccagcagcagactcagctgaacctgcgctccctgctggtgaacccggagggccccaccctgatgcggctcaactccgtgcagagctcggagcggcccctgttcctggtgcacccaatcgagggctccaccaccgtgttccacagcctggcctcccggctcagcatccccacctatggcctgcagtgcacccgagctgcgccccttgacagcatccacagcctggctgcctactacatcgactgcatcaggcaggtgcagcccgagggcccctaccgcgtggccggctactcctacggggcctgcgtggcctttgaaatgtgctcccagctgcaggcccagcagagcccagcccccacccacaacagcctcttcctgttcgacggctcgcccacctacgtactggcctacacccagagctaccgggcaaagctgaccccaggctgtgaggctgaggctgagacggaggccatatgcttcttcgtgcagcagttcacggacatggagcacaacagggtgctggaggcgctgctgccgctgaagggcctagaggagcgtgtggcagccgccgtggacctgatcatcaagagccaccagggcctggaccgccaggagctgagctttgcggcccggtccttctactacaagctgcgtgccgctgagcagtacacacccaaggccaagtaccatggcaacgtgatgctactgcgcgccaagacgggtggcgcctacggcgaggacctgggcgcggactacaacctctcccaggtatgcgacgggaaagtatccgtccacgtcatcgagggtgaccaccgcacgctgctggagggcagcggcctggagtccatcatcagcatcatccacagctccctggctgagccacgcgtgagcgtgcgggagggctaggcccgtgcccccgcctgccaccggaggtcactccaccatccccaccccaccccaccccacccccgccatgcaacgggattgaagggtcctgccggtgggaccctgtccggcccagtgccactgccccccgaggctgctagatgtaggtgttaggcatgtcccacccacccgccgcctcccacggcacctcggggacaccagagctgccgacttggagactcctggtctgtgaagagccggtggtgcccgtgcccgcaggaactgggctgggcctcgtgcgcccgtggggtctgcgcttggtctttctgtgcttggatttgcatatttattgcattgctggtagagacccccaggcctgtccaccctgccaagactcctcaggcagcgtgtgggtcccgcactctgcccccatttccccgatgtcccctgcgggcgcgggcagccacccaagcctgctggctgcggccccctctcggccaggcattggctcagcccgctgagtggggggtcgtgggccagtccccgaggagctgggcccctgcacaggcacacagggcccggccacacccagcggccccccgcacagccacccgtggggtgctgcccttatgcccggcgccgggcaccaactccatgtttggtgtttgtctgtgtttgtttttcaagaaatgattcaaattgctgcttggattttgaaatttactgtaactgtcagtgtacacgtctggaccccgtttcatttttacaccaatttggtaaaaatgctgctctcagcctcccacaattaaaccgcatgtgatctcc

SEQ ID NO: 143521 - DNA, 7536 bp, Artificial Sequence
  derived and/or modified sequence
atggaggaggtggtgattgctggcatgtctgggaagctgcctgagagcgagaacctgcaggagttctgggacaacctgattggaggagtggacatggtgacagatgatgaccggcgctggaaggccggcctgtatggcctgcccaggagaagtggcaagctgaaggacctgagcagatttgatgccagcttctttggagtgcaccccaagcaggcccacaccatggacccccagctgcggctgctgctggaggtgacctatgaggccatcgtggatggcggcatcaacccagacagcctgcggggcacccacactggagtgtgggtgggcgtgtctggcagcgagaccagcgaggccctgagccgggaccctgagaccctggtgggctacagcatggtgggctgccagagggccatgatggccaaccggctgtccttcttctttgacttccggggccccagcatcgccctggacacagcctgcagcagcagcctgatggccctgcagaatgcctaccaggccatccacagcggccagtgcccagctgccatcgtgggcggcatcaacgtgctgctgaagcccaacacctctgtgcagttcctgcggctgggcatgctgagccctgagggcacctgcaaggcctttgacacagctggaaatggctactgccgctcagaaggagtggtggccgtgctgctgaccaagaagagcctggcccggcgggtgtatgccaccatcctgaatgccggcaccaacacagatggcttcaaggagcagggcgtgaccttccccagcggggacatccaggagcagctgatccgcagcctgtaccagagcgctggggtggcccctgagagctttgagtacatcgaggcccatggaacaggcaccaaggtgggggacccccaggagctgaatggcatcacccgggccctgtgtgccacccggcaggagcccctgctgattggcagcaccaagagcaacatgggccaccctgagcccgccagcggcctggccgccctggccaaggtgctgctgagcctggagcacggcctgtgggcccccaacctgcacttccacagccccaaccctgagatcccagccctgctggatggccgcctgcaggtggtggaccagcccctgcctgtgcggggcggcaatgtgggcatcaacagctttggatttggaggcagcaatgtgcacatcatcctgcggcccaacacccagcccccaccagccccagcccctcatgccaccctgccccggctgctgcgggccagcggccgcaccccagaggccgtgcagaagctgctggagcagggcctgcggcacagccaggacctggccttcctgtccatgctgaatgacattgctgctgtgcctgccacagccatgcccttccggggctatgctgtgctgggcggggagcggggcggccctgaggtgcagcaggtgcctgctggggagcggcccctgtggttcatctgcagcggcatgggcacccagtggaggggcatgggcctgagcctgatgaggctggaccgcttccgggacagcatcctgcggagtgatgaggccgtgaagcccttcggcctgaaggtgtcccagctgctgctgagcacagatgagagcacctttgatgacatcgtgcacagctttgtgtccctgacagccatccagatcggcctgattgacctgctgagctgcatgggcctgcggccagatggcatcgtgggccacagcctgggggaggtggcctgtggctatgcagatggctgcctgagccaggaggaggccgtgctggccgcctactggaggggccagtgcatcaaggaggcccacctgcccccaggggccatggctgctgtgggcctgtcctgggaggagtgcaagcagcgctgccccccaggagtggtgcctgcctgccacaacagcaaggacacagtgaccatcagcggcccccaggcccctgtgtttgaatttgtggagcagctgaggaaggagggcgtgtttgccaaggaggtgaggactggaggcatggccttccacagctacttcatggaggccatcgccccacccctgctgcaggagctgaagaaggtgatccgggagcccaagcccaggtctgcccgctggctgagcaccagcatccctgaggcccagtggcacagcagcctggcccggaccagcagcgctgagtacaacgtgaacaacctggtgtcccctgtgctcttccaggaggccctgtggcacgtgcctgagcacgctgtggtgctggagatcgccccccacgccctgctgcaggccgtgctgaagaggggcctgaagcccagctgcaccatcatccccctgatgaagaaggaccaccgggacaacctggagttcttcctggccggcatcggccgcctgcacctgagcggcattgatgccaaccccaatgccctcttcccccctgtggagttccctgccccccggggcacccccctcatcagccccctcatcaagtgggaccacagcctggcctgggatgtgcctgctgctgaggacttccccaacggcagcggcagccccagcgctgccatctacaacatcgacaccagcagcgagagcccagaccactacctggtggaccacaccctggatggccgggtgctcttccctgccaccggctacctgagcatcgtgtggaagaccctggcccgggccctgggcctgggcgtggagcagctgcctgtggtgtttgaagatgtggtgctgcaccaggccaccatcctgcccaagacaggcaccgtgtccctggaggtgcggctgctggaggccagccgggcctttgaggtgtctgaaaatggaaacctggtggtgtctgggaaggtgtaccagtgggatgatcctgacccccggctgtttgaccaccctgagagccccacccccaaccccacagagcccctcttcctggcccaggccgaggtgtacaaggagctgcggctgcggggctatgactatggcccccacttccagggcatcctggaggccagcctggagggggacagcggccgcctgctgtggaaggacaactgggtgtccttcatggacaccatgctgcagatgagcatcctgggcagcgccaagcacggcctgtacctgcccaccagggtgacagccatccacattgatcctgccacccaccggcagaagctgtacaccctgcaggacaaggcccaggtggctgatgtggtggtgagccgctggctgcgggtgacagtggccggcggcgtgcacatcagcggcctgcacacagaaagtgccccccggcggcagcaggagcagcaggtgcccatcctggagaagttctgcttcaccccccacacagaggagggctgcctgtctgagcgggccgccctgcaggaggagctgcagctgtgcaagggcctggtgcaggccctgcagaccaaggtgacccagcagggcctgaagatggtggtgcccggcctggatggagcccagatcccccgggaccccagccagcaggagctgccccggctgctgtctgctgcctgccgcctgcagctgaatggaaacctgcagctggagctggcccaggtgctggcccaggagcggcccaagctgcctgaggaccccctgctgagcggcctgctggacagccctgccctgaaggcctgcctggacacagctgtggagaacatgcccagcctgaagatgaaggtggtggaggtgctggccggccacggccacctgtacagccgcatccctggcctgctgagcccccaccccctgctgcagctgagctacacagccacagacagacacccccaggccctggaggccgcccaggccgagctgcagcagcatgatgtggcccagggccagtgggaccctgctgaccctgcccccagcgccctgggcagcgctgacctgctggtgtgcaactgtgctgtggccgccctgggggaccctgccagcgccctgagcaacatggtggccgccctgcgggagggcggcttcctgctgctgcacaccctgctgcggggccaccccctgggggacatcgtggccttcctgaccagcacagagccccagtatggccagggcatcctgagccaggatgcctgggagagcctcttcagccgggtgtccctgcggctggtgggcctgaagaagagcttctacggcagcaccctcttcctgtgccggcggcccaccccccaggacagccccatcttcctgcctgtggatgacaccagcttccgctgggtggagagcctgaagggcatcctggctgatgaggacagcagcaggcctgtgtggctgaaggccatcaactgtgccaccagcggcgtggtgggcctggtgaactgcctgcggcgggagcccggcggcaaccggctgcgctgtgtgctgctgagcaacctgagcagcaccagccacgtgcctgaggtggaccccggcagcgctgagctgcagaaggtgctgcagggcgacctggtgatgaatgtgtacagagatggagcctggggcgccttccgccacttcctgctggaggaggacaagccagaggagcccacagcccacgcctttgtgtccaccctgaccaggggggacctgagcagcatccgctgggtgtgcagcagcctgcggcatgcccagcccacctgccctggggcccagctgtgcaccgtgtactatgccagcctgaacttccgggacatcatgctggccaccgggaagctgagcccagatgccatccctgggaagtggaccagccaggacagcctgctgggcatggagttcagcggcagagatgccagcggcaagagggtgatgggcctggtgcctgccaagggcctggccacctctgtgctgctgagcccagacttcctgtgggatgtgcccagcaactggaccctggaggaggccgcctctgtgcctgtggtgtacagcacagcctactatgccctggtggtgcggggccgggtgcggcctggagagaccctgctgatccacagcggcagcggaggagtgggccaggccgccatcgccatcgccctgagcctgggctgcagggtcttcaccaccgtgggcagcgctgagaagagggcctacctgcaggcccgcttcccccagctggacagcaccagctttgccaacagccgggacaccagctttgagcagcacgtgctgtggcacactggaggaaaaggagtggacctggtgctgaacagcctggccgaggagaagctgcaggcctctgtgcgctgcctggccacccacggccgcttcctggagatcggcaagtttgacctgagccagaaccaccccctgggcatggccatcttcctgaagaatgtgaccttccacggcgtgctgctggatgccttcttcaatgaaagcagcgctgactggagggaggtgtgggccctggtgcaggccggcatcagagatggagtggtgcggcccctgaagtgcaccgtcttccacggggcccaggtggaggatgccttccgctacatggcccagggcaagcacatcggcaaggtggtggtgcaggtgctggccgaggagcctgaggccgtgctgaagggggccaagcccaagctgatgtctgccatcagcaagaccttctgcccagcccacaagagctacatcatcgccggcggcctgggcggcttcggcctggagctggcccagtggctgatccagaggggcgtgcagaagctggtgctgaccagccgcagcggcatcagaacaggctaccaggccaagcaggtgcggcgctggaggcggcagggcgtgcaggtgcaggtgtccaccagcaacatcagcagcctggagggcgcccggggcctgattgctgaggccgcccagctgggccctgtgggcggcgtcttcaacctggccgtggtgctgagagatggcctgctggagaaccagaccccagagttcttccaggatgtgtgcaagcccaagtacagcggcaccctgaacctggacagagtgacccgggaggcctgcccagagctggactactttgtggtgttcagctctgtgtcctgtggcagaggaaatgccggccagagcaactacggctttgccaacagcgccatggagcgcatctgtgagaagagaagacatgagggcctgcccggcctggccgtgcagtggggcgccatcggagatgtgggcatcctggtggagaccatgagcaccaatgacaccatcgtgtctggcaccctgccccagaggatggccagctgcctggaggtgctggacctcttcctgaaccagccccacatggtgctgagcagctttgtgctggccgagaaggccgccgcctacagagaccgggacagccagagggacctggtggaggccgtggcccacatcctgggcatccgggacctggccgctgtgaacctggacagcagcctggccgacctgggcctggacagcctgatgtctgtggaggtgcggcagaccctggagcgggagctgaacctggtgctgtctgtgcgggaggtgcggcagctgaccctgaggaagctgcaggagctgagcagcaaggcagatgaggccagcgagctggcctgccccacccccaaggaggatggcctggcccagcagcagacccagctgaacctgcggagcctgctggtgaaccctgagggccccaccctgatgaggctgaacagcgtgcagagcagcgagcggcccctcttcctggtgcaccccatcgagggcagcaccaccgtcttccacagcctggccagccggctgagcatccccacctacggcctgcagtgcacccgggccgcccccctggacagcatccacagcctggccgcctactacatcgactgcatccggcaggtgcagcctgagggcccctacagagtggccggctacagctatggagcctgtgtggcctttgagatgtgcagccagctgcaggcccagcagagccctgcccccacccacaacagcctcttcctgtttgatggcagccccacctacgtgctggcctacacccagagctaccgggccaagctgaccccaggctgtgaggccgaggccgagacagaggccatctgcttctttgtgcagcagttcacagacatggagcacaacagagtgctggaggccctgctgcccctgaagggcctggaggagcgggtggccgctgctgtggacctgatcatcaagagccaccagggcctggaccggcaggagctgagctttgctgcccggagcttctactacaagctgcgggctgctgagcagtacacccccaaggccaagtaccacggcaatgtgatgctgctgcgggccaagacaggaggagcctacggggaggacctgggcgctgactacaacctgagccaggtgtgtgatggcaaggtgtctgtgcacgtgattgaaggagaccacaggaccctgctggagggcagcggcctggagagcatcatcagcatcatccacagcagcctggccgagccccgggtgtctgtgcgggagggctag

SEQ ID NO: 143522 - DNA, 2502 bp, Artificial Sequence
  derived and/or modified sequence
atgagcatcctgggcagcgccaagcacggcctgtacctgcccaccagggtgacagccatccacatcgaccctgccacccaccggcagaagctgtacaccctgcaggacaaggcccaggtggctgatgtggtggtgagccgctggctgcgggtgacagtggccggcggcgtgcacatcagcggcctgcacacagagagcgccccccggcggcagcaggagcagcaggtgcccatcctggagaagttctgcttcaccccccacacagaggagggctgcctgtctgaaagagctgccctgcaggaggagctgcagctgtgcaagggcctggtgcaggccctgcagaccaaggtgacccagcagggcctgaagatggtggtgcccggcctggatggagcccagatcccccgggaccccagccagcaggagctgccccggctgctgtctgctgcctgccgcctgcagctgaatggaaacctgcagctggagctggcccaggtgctggcccaggagcggcccaagctgcctgaggaccccctgctgagcggcctgctggacagccctgccctgaaggcctgcctggacacagctgtggagaacatgcccagcctgaagatgaaggtggtggaggtgctggccggccacggccacctgtacagccgcatccctggcctgctgagcccccaccccctgctgcagctgagctacacagccacagacagacacccccaggccctggaggccgcccaggccgagctgcagcagcatgatgtggcccagggccagtgggaccctgctgaccctgcccccagcgccctgggcagcgctgacctgctggtgtgcaactgtgctgtggccgccctgggggaccctgccagcgccctgagcaacatggtggccgccctgcgggagggcggcttcctgctgctgcacaccctgctgcggggccaccccctgggggacatcgtggccttcctgaccagcacagagccccagtatggccagggcatcctgagccaggatgcctgggagagcctcttcagccgggtgtccctgcggctggtgggcctgaagaagagcttctacggcagcaccctcttcctgtgcagaagacccaccccccaggacagccccatcttcctgcctgtggatgacaccagcttccgctgggtggagagcctgaagggcatcctggctgatgaggacagcagcaggcctgtgtggctgaaggccatcaactgtgccaccagcggcgtggtgggcctggtgaactgcctgcggcgggagcccggcggcaaccggctgcgctgtgtgctgctgagcaacctgagcagcaccagccacgtgcctgaggtggaccccggcagcgctgagctgcagaaggtgctgcagggcgacctggtgatgaatgtgtacagagatggagcctggggcgccttccgccacttcctgctggaggaggacaagccagaggagcccacagcccacgcctttgtgtccaccctgaccaggggggacctgagcagcatccgctgggtgtgcagcagcctgcggcatgcccagcccacctgccctggggcccagctgtgcaccgtgtactatgccagcctgaacttccgggacatcatgctggccaccgggaagctgagcccagatgccatccctgggaagtggaccagccaggacagcctgctgggcatggagttcagcggcagagatgccagcggcaagagggtgatgggcctggtgcctgccaagggcctggccacctctgtgctgctgagcccagacttcctgtgggatgtgcccagcaactggaccctggaggaggccgcctctgtgcctgtggtgtacagcacagcctactatgccctggtggtgcggggccgggtgcggcctggagagaccctgctgatccacagcggcagcggcggcgtgggccaggccgccatcgccatcgccctgagcctgggctgcagggtcttcaccaccgtgggcagcgctgagaagagggcctacctgcaggcccgcttcccccagctggacagcaccagctttgccaacagccgggacaccagctttgagcagcacgtgctgtggcacactggaggcaagggcgtggacctggtgctgaacagcctggccgaggagaagctgcaggcctctgtgcgctgcctggccacccacggccgcttcctggagatcggcaagtttgacctgagccagaaccaccccctgggcatggccatcttcctgaagaatgtgaccttccatggagtgctgctggatgccttcttcaatgaatcttctgctgactggagggaggtgtgggccctggtgcaggccggcatcagagatggagtggtgcggcccctgaagtgcaccgtcttccatggagcccaggtggaggatgccttccgctacatggcccaggccaaggccagccaggcctggccctgcagcggggcccccagcgccacctgggccttctggtggaggaggtag

SEQ ID NO: 143523 - DNA, 7536 bp, Artificial Sequence
  derived and/or modified sequence
atggaggaggtggtgatcgccggcatgagcggcaagctgcccgagagtgaaaacttgcaggagttctgggacaacctcattggcggagtcgacatggtgacagacgacgatcgcagatggaaggcgggcctctacggactccctaggcggtcggggaaactcaaggacctgtcccggttcgacgcctcattcttcggcgtccacccaaaacaggcacacacgatggatcctcaacttagactgttgctggaggtgacatatgaggccatcgtggacgggggaatcaaccccgactctctgcgcgggacccacacaggagtgtgggtgggggtgtccggctctgagacttccgaagccctgtcacgcgatcctgaaacattggtgggatacagcatggtcgggtgtcagcgagcgatgatggctaatagactgagcttcttctttgattttcgtggaccgtcaatcgcactggataccgcttgtagcagttcactgatggccctgcagaacgcctaccaggcgattcattcgggtcagtgtcccgcagccatcgtgggcgggatcaatgtactcctgaagcctaacacgagtgtccaattcctgcgcctgggtatgttatcaccggagggtacatgtaaagctttcgacacagctgggaacgggtattgcagaagcgaaggggtcgtggcagtgctgctgactaagaagagcctggcgcgtcgcgtatacgccacaatccttaatgccgggactaacaccgatgggtttaaggaacagggggtgactttcccatctggcgatattcaggaacagctgattcgtagtctgtatcagtccgccggtgtcgcgccagaatccttcgagtacatcgaagcacacggtactgggaccaaggttggcgatccacaggaactcaatggaataaccagagcgctgtgcgccactaggcaggaacctctgctcattggcagcacgaaaagcaacatggggcaccccgagcccgcctcaggcttagcagccctcgccaaagtgttactgagtttagagcacggcctctgggcaccaaacctgcactttcacagtcctaaccctgagattccggctctgcttgacggtaggcttcaggtcgtggaccaacctctccctgttcgggggggaaatgttggtattaatagcttcgggtttggcgggtcaaacgtccatataatccttaggccaaatacccagcctccacccgccccagctccgcacgccacattgcccaggcttctcagggcatccggacgcactcctgaggctgttcagaaattactcgaacaggggcttcggcacagccaggatctggcttttctgtccatgctgaacgatatcgcagctgtgcctgcaacagccatgccatttcgcggctatgccgtgctcgggggtgagcgcgggggacccgaagtgcagcaggtcccggctggagagcgtcctctctggttcatctgttcaggtatgggcacccaatggcggggaatggggctgtctctcatgagacttgatcggtttcgggatagcattcttagaagtgacgaagccgtgaaaccctttggcctgaaggtaagtcagctcctgttatccactgacgagtccacatttgacgacattgttcatagctttgtaagcctcacagccatccagatcggtcttatagacctgctctcctgtatgggcctccggcccgacggcattgtgggacattccttaggagaggtggcctgcggctatgccgacggctgtctcagccaggaggaagctgtgctggcagcctattggcgtgggcagtgcatcaaggaagctcacctgccccccggggccatggcagcagtggggctgtcctgggaggagtgcaagcagcggtgtccaccaggggtcgtcccagcctgtcacaactctaaagacacagtgacgatttctgggccacaagcccctgtcttcgagttcgtggagcagctaaggaaggagggggtgttcgccaaagaagtgcggacaggcgggatggccttccactcttatttcatggaagccatcgctcctcctctgcttcaggagctgaaaaaagtcatcagagaaccaaagccccgctctgcacggtggttgtctacatccatccccgaggcacaatggcacagctccttggccaggacgagctctgctgaatacaatgtgaacaacctagtaagtcctgtgctgttccaggaggctctttggcacgtgcccgaacacgccgtggtccttgaaatcgccccccatgctcttctgcaagcagtattgaaacgcggactgaaaccatcctgcacaatcattccactcatgaaaaaagaccaccgagataacctggaattcttcctggctggcataggacgattgcacctatcaggcattgatgcaaacccaaacgctctgttcccacccgtagaatttcctgcacctaggggcacgcctctgatttccccactgatcaagtgggatcattctctggcgtgggacgtccccgccgccgaagattttccaaacggtagcgggtcgccgtccgcggccatttacaacatcgacacctcgtccgagtcacccgaccactatttggtggatcatacactggatggacgcgtacttttcccagctactggatacctgagtatcgtttggaaaactctcgcaagggctctcggacttggcgtggagcagttgcccgtggtatttgaggacgtagtcttacaccaggccaccatactgccaaaaactgggacagtttcactcgaggtgaggctgctcgaagcctcacgggctttcgaagtgtccgagaacggtaacctcgtggtttccggaaaggtgtatcagtgggatgaccctgatcctaggttattcgaccacccagagtcgcccacgccgaaccctaccgagcccctcttcctggcccaagcagaggtgtacaaggaactccgactgcggggctatgactacggcccccattttcagggcatactcgaggcttcgctggaaggcgattctggcaggctgctttggaaggataattgggtgtctttcatggacactatgctgcagatgtcgattttagggagcgctaaacacggcctgtacctgcccacaagggtcactgccatccacatagaccctgcaacacatcggcagaagttgtatactctacaggacaaggcgcaggtggcagatgtggtggtttctagatggctgagagtcaccgtagccggtggcgtccacataagcggactgcatacagagtccgcgcctaggcgccaacaagagcagcaggtccctatcctggaaaaattttgctttaccccccacaccgaagagggttgtctgtccgagcgagcggcactgcaagaagagctccagctgtgtaagggcctggtgcaggccctccagacaaaagtgacacagcagggtcttaagatggtggttccaggcctcgatggtgcccagattccgcgggatcccagtcaacaggagctccccagactgctgagtgccgcttgcagactgcagctgaatggtaacctgcagctagagctggcacaggtactggcccaggagcggccaaaactccctgaggatccgcttctttctggtctcctggatagcccagccctgaaggcttgtcttgacactgccgtcgaaaacatgccaagtcttaagatgaaagtagttgaagtgctggctggacatggacatctgtatagccgaatcccaggcctgctgtctccacatcctctgcttcaactgtcttacaccgctactgatcggcatccgcaggccctagaggcagcacaagccgaactgcaacagcacgacgtggcacagggacagtgggaccccgccgatccagcaccatctgcactgggatctgcagacttgctggtttgtaattgcgcagtcgctgccttgggcgaccctgccagtgccctgtccaacatggtcgctgcccttcgggagggggggttccttctcctgcacacccttctgagggggcatcccctgggggacatcgtggcatttctgacttccacagaaccacagtacggtcagggcatcttgtcacaggatgcgtgggaatccctgttcagtcgggtctcacttcggctcgtgggcctgaagaagtccttctatggttccaccctgttcctgtgccgcaggccaacaccccaggactccccaatatttcttccggtggacgacactagcttccgctgggtggagtccctgaagggaatactcgcggatgaggactccagccggcccgtgtggctgaaggcaatcaactgtgccacgtccggagttgtgggactggtcaattgccttcgacgagaaccggggggaaataggctgagatgtgttctgctgtcgaatttgagctctacgtcccatgtcccggaagtggacccagggtctgctgaactgcagaaagtccttcagggcgatctagttatgaacgtatacagagatggagcctggggggctttcagacattttctgctggaggaggacaagcctgaagaaccaaccgcccacgcctttgtctccactttaaccagaggggaccttagttcaatccggtgggtgtgctcatctctgaggcacgcccagcccacgtgccccggagcgcagttatgtactgtatattatgcatctcttaacttcagggatattatgctcgccaccggaaaactgtcccctgacgctattcccggtaagtggacaagccaggacagcttgttaggaatggagttcagcggaagggacgcatctggcaagcgcgtgatgggccttgttccagctaaagggcttgccaccagcgttctcctcagtcccgattttctgtgggatgtgccatcgaattggactctagaggaggctgctagcgtgcccgttgtgtacagcacggcttactatgccttggtagtgcgggggagagttagacccggtgaaaccttacttatccacagcgggtcggggggtgtggggcaggccgccatcgcgatcgcgctctcccttggatgccgcgtgttcacgacggtaggcagtgccgagaagcgggcctatctacaggcgcgttttccccagttggattccacttctttcgcgaactcacgagacacttcatttgagcaacatgtcttatggcataccggtggaaaaggagtggatttggtgctgaattccctagcggaagagaagctgcaagcctctgtgcggtgtcttgcgacacacggaaggttcttggagatagggaaatttgatttgagccagaatcaccctctcgggatggcaattttccttaaaaatgtgactttccacggcgtactccttgatgccttcttcaacgaaagcagcgccgactggagggaggtttgggcattagtgcaggctggcattcgtgacggggttgttaggccccttaagtgcaccgttttccatggcgcccaagtagaggatgcatttcgctatatggctcaggggaagcatattggaaaagtagtggtgcaagtgctggcagaagagccggaagctgtacttaaaggagcaaagccaaaactgatgtctgccatctccaaaactttttgcccagcccacaagagctacatcatcgccggcgggctagggggtttcggactcgagctggcacagtggctcatccaacggggggtgcagaagcttgttctgacctcacgttccggaatacggaccgggtatcaagccaaacaggtcaggcgttggcgacgccagggcgtccaagtacaagtgtctacatccaacatttcaagtcttgagggtgcacgggggctcatcgcggaagctgcacagttaggtccagtcggcggcgtcttcaaccttgcagtcgttctgagggatggactcctggagaatcagactcctgaattctttcaggatgtgtgcaaaccaaagtattctggtacgctgaatctggaccgcgtaaccagagaagcatgtcccgagctggactactttgtggttttctcatccgtgtcttgtggtcgcggaaacgcaggacagagtaactacggtttcgcaaacagcgccatggaaaggatctgtgagaagcggcgccatgagggactgcctggcctggcagtgcaatggggtgccataggtgacgttggaatcctcgtcgagaccatgtctacaaacgacactatcgtcagcggcactcttcctcagcgcatggctagctgtctggaagtgctggatttgtttctcaaccagccccatatggtgctgagtagttttgttttggcagagaaagctgccgcgtatcgcgatagggactcacagcgggacttagtagaggccgttgcacacatcttgggcataagggaccttgcggcagtgaacctcgactctagcctggctgacctggggttggattctctcatgagtgtggaggttcgccagaccctggagcgggagctgaaccttgtgcttagcgtccgagaagtgaggcagcttaccctgaggaagctgcaggagttgagctctaaagctgatgaagcaagtgaactcgcctgtccaactcctaaggaagacggtcttgcacagcagcaaacgcagcttaatttacggtctttactggtgaaccccgagggccctacgctcatgcgtctaaattccgtgcagagtagtgaacgccctctgttcctcgtacatcccattgagggttctaccacggtctttcattcacttgcctctcgactgtcaatcccaacttacggtcttcagtgcacacgtgcggcccctctggattctatccacagcctagcagcgtattacattgattgcattaggcaggtgcaaccagagggcccttaccgcgttgcgggatactcatacggggcctgcgttgcttttgaaatgtgctcacagctgcaggcccaacagagtcccgcccctacacataattcgctgtttctgttcgacgggagtcctacttacgtattggcatatacgcagtcctaccgcgccaagttaaccccgggctgcgaggccgaggctgagaccgaagcaatttgtttcttcgtccaacagtttacggacatggaacataacagggtcttggaagctctcctacccctgaaaggccttgaggagagagtggccgccgcggtggacctgatcatcaagagccaccaagggctcgaccggcaggagctgtcttttgcagcaaggagcttttattacaaattacgagcagctgaacaatatacccccaaggccaagtaccacggaaacgtgatgctgctgcgggccaagacgggaggcgcctatggggaagacctgggagccgactacaacctgagtcaggtctgcgacgggaaggtctcagtgcacgtgatagaaggagatcaccggaccctcttagagggatcgggcctcgaatctataatcagcatcattcacagctccttggcagagccaagagtgagcgtgcgtgagggctag

SEQ ID NO: 143524 - DNA, 2502 bp, Artificial Sequence
  derived and/or modified sequence
atgagcatcctgggcagcgccaagcacggcctgtacctgcccaccagagtgacagcaatccacattgatccagccacccatagacagaagctttacactctgcaggacaaagcccaggtggcggatgtggtcgtgtcaagatggcttcgggttaccgtggcaggcggagtgcacatttccgggttgcacaccgagtcagccccgcgaaggcaacaggagcaacaagtcccgatactggaaaaattctgtttcacccctcatacagaggaggggtgtctgtcggaacgcgctgcccttcaggaggagttgcagctgtgcaaaggcttggtccaggccctgcagaccaaggtaacgcagcagggcttaaaaatggtcgttcccggattagacggggcccagatccctcgcgacccatctcaacaggagctcccacgtctactgtccgcagcttgtaggcttcagctgaatgggaacttgcagttagagctggcccaggtgcttgctcaggagaggccaaaactcccagaagatccgttgctcagtggactgctcgattctcccgcgctgaaagcttgtcttgacactgcagtcgagaacatgccaagcctgaaaatgaaggttgtcgaggtgctggctgggcacggtcacctatattccagaatccccggactgttgagcccccaccccctgctccagctatcctatactgctacagaccgacatccccaggccttagaagcggctcaagccgaactccagcaacatgatgtggcacaggggcaatgggatcctgccgaccctgcacccagtgcgctgggctccgcagatctgctcgtgtgtaactgtgccgtggctgcgctgggcgatccagcctccgcactgtccaatatggtcgccgccctgagggaaggaggatttcttctgttacacacactcctccgcggccacccgctcggcgatatcgtggcttttctcacatctaccgaaccacagtatggtcaggggattctgtcccaggatgcctgggagtcactattctctagggtatctttgcgcttagttgggcttaaaaagagcttctacggatcgacgctctttctgtgccggcgaccgaccccccaagactcacctattttcctgccagtggatgatacaagctttcggtgggtagagtcgctcaaaggaattctggcagatgaggacagtagtcgccctgtgtggctgaaggcaattaactgtgctacctcaggtgtggtagggctggttaactgtcttcgacgagagcccggcgggaatcgcctgaggtgtgtcctgttgtccaaccttagcagcacgtcccacgttccggaagtcgacccggggtcggccgagctccagaaggtcctccagggggacctcgtcatgaatgtgtatagagatggcgcatggggggcattccggcactttctcctggaggaggataagcccgaggagcccactgcacacgccttcgtctcaaccctcaccagaggagatctgtcgtcaattagatgggtgtgcagttccctgagacacgcccagcctacctgcccaggggcacagttgtgtacagtctactatgcctccctgaattttcgggacattatgctcgccaccgggaaacttagtcccgacgccatacctgggaaatggacaagccaggatagtctgttgggaatggagtttagcggccgcgatgctagcgggaagcgcgtgatgggcttggtgccggcaaagggactggctactagcgttctcttgtctcctgactttttgtgggacgtgccaagcaattggacccttgaagaggccgcctccgttcccgtcgtgtatagtactgcatactacgcgctggttgtgagaggccgggtgcgccccggggagaccttgctgatacattccggcagcggaggggtggggcaggctgcgatagctattgccctaagcctcggatgcagggtgtttacaactgtgggttccgcagaaaagagagcctaccttcaggcgcgattcccgcagctagattccacttcatttgccaattcacgggatacatctttcgagcaacacgtactttggcacacaggcgggaagggtgtggaccttgttctgaattccctggcagaggagaagctccaggcgtccgtgagatgcctggccactcacgggcgctttctcgaaattggaaagttcgacctgagccagaatcacccgctcgggatggccatttttcttaagaacgtgacattccacggggtacttctggatgcattctttaacgagagcagtgccgattggcgcgaagtgtgggctctcgtacaggcaggaattagggacggggttgtgcgcccactcaagtgtactgttttccatggagctcaagtcgaggatgcgttcagatacatggctcaagctaaggccagccaagcatggccgtgctctggggccccaagtgccacatgggccttctggtggcgtaggtag

SEQ ID NO: 143525 - DNA, 7536 bp, Artificial Sequence
  derived and/or modified sequence
atggaagaagtagtaattgccggaatgtcggggaagctccctgaatcggagaatctgcaggagttctgggacaacttgatcgggggtgtggatatggtcaccgatgatgaccggagatggaaagcgggtttatacggcctaccaagacgctcaggaaaactcaaagatctgagtcgcttcgatgccagcttttttggcgtccatccaaagcaagcacacacgatggatccccaactgcgcttgctgttagaggtgacctacgaggccatcgtagatggagggattaatcccgactcccttagggggacacacacgggggtatgggtgggtgtgtctggcagtgaaacaagcgaagccctgagtagagacccagaaactctcgttggctattccatggtgggatgccagagggccatgatggctaatcgtctgagctttttttttgactttcgcggacccagtatcgccctcgataccgcatgtagctcctcattgatggcactgcagaacgcctatcaggcgatccactctggtcaatgtcccgcagccatcgtgggcggaatcaacgtattgctgaagccaaacactagtgtccagttccttcgccttgggatgctgtccccagaggggacatgtaaagcttttgacacagccggtaacggatactgcagaagcgaaggtgtggtagccgtgctgctaactaagaaatcattagcccgtcgggtgtatgcaaccatcctgaatgccggtacgaataccgacggattcaaggagcagggagtgacattcccttcaggagatattcaagaacagctcattcgcagcctgtaccagtctgcgggagtggcccctgagtcttttgagtacattgaagcccatggcactggtactaaagtcggggatcctcaagagctcaacggaatcacccgagcgttgtgcgcaaccaggcaggaacccttacttataggctcaaccaagtcaaatatgggtcacccagaacccgcttccggactggctgcactcgcgaaggtgctcctctcactggagcacggactgtgggctccaaatctgcactttcactcgcctaacccggagatcccagccctcctggacggtagactgcaggtggtggatcaacccttgccggtcagggggggtaatgttggcatcaatagctttggattcggcggaagcaacgtgcatatcattctcaggccgaacacccaacccccaccagctcccgcaccccacgctacactgccacgacttctccgggcaagcgggcgaacacctgaggccgttcagaaattgctcgaacaaggtctgagacattcacaggatctggcatttctatctatgctgaatgacatagctgccgtgccagccactgcaatgcccttccggggttatgctgttctgggaggcgagaggggcggtcctgaggtgcagcaggttcctgctggcgagagacccttgtggtttatatgctctgggatgggaacccaatggagaggaatgggcctgagcctcatgcgattggatagatttcgtgattctatactaagaagcgacgaggcagtcaagccttttggcctgaaagtctctcagctactcctgagcaccgacgaatcaacctttgacgatatagtacattcctttgtctccctgaccgctatccaaatcggcctgatcgaccttctgagctgcatggggctccggccagacggtatcgtcggccatagtcttggagaggtcgcatgtggctatgcagatggatgcctctcccaggaagaggctgtgcttgccgcatactggagaggccagtgtatcaaggaggcccatctgccccctggggctatggccgctgtcgggttatcctgggaagagtgcaagcaacggtgtccacctggggtggtacctgcatgtcacaattccaaggataccgtgactatttcaggaccgcaggctcctgtgtttgagttcgtagagcagctgcgcaaagagggcgtgtttgcaaaagaagtccggaccgggggaatggcttttcacagctattttatggaggccatcgctcctcctcttctccaggaacttaagaaagtgatacgggagccaaagcctagatccgctcggtggctgtctaccagcatacctgaggcacagtggcattctagcctcgcacgcacttcatctgccgagtataatgtcaacaacctggtatcaccggtactttttcaagaggcattgtggcatgtgcctgagcatgcggttgtattggagatcgcccctcacgccctactgcaggcggtacttaaaaggggccttaagccatcctgtacgattattcctctgatgaagaaggatcacagggataacctggagttctttctggcaggaattggcagactgcatctcagcggcattgatgccaaccccaacgctctgtttccacctgtggagtttccagcgcctagaggcactcccctgatctcacctctcatcaagtgggatcatagccttgcttgggacgtcccggctgctgaagatttcccaaacggttctggatcgccaagtgccgcaatttacaatattgatacttccagcgagtctcccgaccactatttagtggaccacacgttagatgggcgagtcctttttcctgctactggctacttgagtattgtgtggaaaacgttggcacgggctttgggcctgggggtagaacagctcccagttgtttttgaggacgtggtgcttcaccaggcgaccatcctgccaaagactggaactgtgagtttggaagtccgcctactcgaagctagcagagcctttgaggttagtgagaatgggaatttggtagtgtctgggaaggtatatcagtgggacgatcccgatcctaggctttttgaccaccccgaatcaccaacacctaatccaacagagcccctgtttctcgcccaggcagaggtgtataaagaactgagattgcgcggatacgattacggcccacactttcaggggatcttagaagccagccttgagggggattctgggaggctcctgtggaaagataattgggtgtctttcatggataccatgctacagatgtcaatccttggttctgcgaaacatggtctctacctgcccactcgggtgactgctattcatatcgaccctgctacacatcgccagaagctctatacactccaggacaaggcccaagttgccgacgttgtggtgtctcggtggctgcgcgttacggtggctgggggagtgcacatttccgggttacacactgagtctgcccctaggagacagcaggagcaacaggtgcctatattggagaagttttgctttacaccccacaccgaagaggggtgcctgtccgagcgcgcagccctccaggaggagctgcagttatgtaaggggttagtgcaagccttgcagacgaaagttacgcaacaagggctgaaaatggtggtgccaggacttgatggggctcagatacctcgcgacccatcccagcaagagttacccaggctacttagtgctgcatgccgtctccaactcaatgggaatcttcagcttgaactggcccaggtactggctcaagaacgcccaaagctccccgaagaccctctgttgtccggattgctggactcccccgctttaaaggcatgtctcgatactgctgtggagaatatgccctctctgaaaatgaaggtggtcgaggtactggccggtcacggccacttatattcccgtattcccggtctgttaagcccgcatcccctgctacaactctcatacaccgccactgacaggcaccctcaagcgctggaggcagcgcaagctgagctgcagcaacatgatgtcgctcaggggcagtgggaccccgcagacccagctccttcagctctcggctccgcagatctcctcgtttgtaattgtgctgtggccgcactcggtgatcccgcatcagccctgagtaacatggtagcagctctccgcgagggcggatttcttttactgcacactttgctaaggggccatcccctaggcgacatcgtggcctttttgacaagtacagaacctcaatacggccaagggatactctcacaagacgcttgggagtcgttatttagtcgggtgtccttacgcctggtcggccttaagaaaagcttctacgggtccacgttgtttctttgccggagaccaacaccccaggactctcccatatttttgccggtggacgacaccagctttcggtgggtggagtcactgaagggcatcctggctgacgaggattccagcagacctgtttggttaaaggctatcaattgtgctacgagtggcgttgtaggtctcgttaattgtttacgaagagaaccaggaggaaatcgattgcgctgcgtgctcctgtccaatttgtctagtacatctcatgtgccagaagttgaccccggaagtgctgagttgcagaaggtgcttcagggtgatttggttatgaacgtttatcgggacggagcttggggcgcttttcggcattttttattagaggaagataagccggaagagcccactgcccatgcctttgtctccacattgactaggggtgatcttagctcaatccgttgggtatgctccagtctgcgacacgcccagcccacttgtccgggagcacagctgtgcacggtctattacgcatctctcaacttccgtgacataatgttggccacaggaaagctgagccctgacgcaatccctggcaaatggaccagtcaggactcactcctgggcatggaattcagtggtagggacgcctccgggaagagagtgatgggtctggtgccagccaaggggctagccacatctgtcctcctatcccctgatttcctgtgggatgttccttcaaattggacgttagaggaagcagccagtgttccagtcgtatattccaccgcttactacgcgcttgtggtgaggggtcgggtgcgcccaggagaaacactacttattcatagcggatccggcggtgtgggtcaagccgctattgcgattgccctatccttggggtgtcgggttttcacaaccgtcggcagcgctgaaaaacgggcttatttacaggcccgatttccacagctggactccacatcctttgccaacagccgagacacttcgtttgagcagcacgtcctgtggcataccgggggaaaaggcgtcgatcttgtgcttaatagtctggccgaagaaaaacttcaggcgagcgtgcgttgtctcgcaactcacggacgattcctcgaaattggtaagttcgacctgtctcagaaccaccctctagggatggccatttttctaaagaacgtcacctttcacggtgtactgctggacgcattttttaacgagtcttcggctgactggcgcgaagtgtgggcactcgtgcaggcaggcatccgggacggagtcgtgaggccactgaagtgtacggttttccatggggctcaggtggaggatgcttttcgatatatggctcagggaaaacacattgggaaggtagtggtacaggtgttggccgaggagccggaagccgtcttgaaaggagccaagcccaaattaatgagtgccatctccaagaccttttgcccggctcacaagagctacataattgcaggaggcctcgggggtttcgggttagaactggcccagtggctgatccagaggggggtccaaaaactggtccttacaagcaggtctgggataaggacaggctaccaggcaaagcaggtaaggcggtggcggaggcagggtgtccaggtccaggtaagcactagtaatatctccagtcttgaaggggcaaggggtctgatagctgaggccgctcagttgggcccagtgggaggagtatttaacctggccgtggtgctgcgggacggactgctagaaaaccagacccctgagtttttccaggatgtatgtaagcccaagtactccggtacactcaacctggaccgagttacgagagaggcttgcccagagctggattattttgttgtgttttcttcggtcagctgcggccgtggaaacgcaggacagagtaattatggtttcgctaattcagccatggagcgcatatgcgagaagcggagacacgaagggcttccaggcctggcggttcagtggggcgctattggtgacgtgggcattctggtggaaactatgagcaccaacgatacaattgtctccggaaccctgcctcaaagaatggcaagctgtttggaggtcctcgatctttttcttaaccagcctcatatggtcctgtctagcttcgtgctggccgagaaagcagccgcataccgagatcgagatagccagagagacctggtggaggctgttgcacatatccttgggattcgagacttagcagccgtgaacctggacagctctctggcagatcttgggctggattcactcatgtctgtcgaggtgcgccagactctagagagagaactcaatctagttctgagcgtccgcgaggttaggcagctgacccttcgaaagctgcaggagcttagtagtaaggccgacgaggcttctgagctggcatgtcccacccccaaagaagacggcttggcacagcagcagacacaattaaacctgcgctccttacttgtgaatcccgagggacccaccctgatgaggttaaattccgtgcaaagctctgaacgtcccctctttttggtgcaccccatcgagggcagcacaaccgtatttcattctctggccagccggttgtcaattcccacgtatgggctgcagtgtaccagggcagcacccctggacagtatccactccctggccgcttattacatagactgcataaggcaggtccagcccgaagggccttacagagtcgcagggtactcctatggcgcttgcgtcgcattcgaaatgtgtagccaactccaggctcagcagagccccgctccgacacacaattccctcttcctgttcgacggatcaccgacatatgttttggcctacacccagtcctaccgcgcaaaactcacaccaggttgcgaggccgaggcagaaacagaagccatttgttttttcgtacagcagtttaccgatatggaacataatagagtactcgaggcgctactgcctctgaagggtctggaggagagagtcgccgctgctgttgacttaatcattaaatctcaccagggactagatcgccaggaactgagctttgcagcaaggtccttttactataaactcagggccgcagagcaatacacaccgaaggcaaaataccacggtaacgtgatgcttctcagggcaaagacgggtggggcatacggcgaggaccttggcgcagactataatttgtcgcaagtgtgtgacggtaaagtgagcgtgcacgtcatcgagggggaccaccggacccttctggagggatcaggattagaatccataataagcattattcatagctcactagccgagccaagagtttctgtgcgcgagggataa

SEQ ID NO: 143526 - DNA, 2502 bp, Artificial Sequence
  derived and/or modified sequence
atgtctatcctcggcagcgccaaacatggactgtacctgccgacacgcgtgaccgctatccacattgaccccgctacgcacagacagaaactgtacacgctccaagacaaagcccaggtcgctgatgttgtggtcagtcgctggcttagagtgacggtagctggcggagtccacataagcggcctacataccgagtccgccccacggcgacagcaggaacagcaagtgcctatcttagagaagttttgctttacccctcacaccgaggagggatgcttgtcagagcgcgctgcactccaggaggagctccagctgtgcaagggcctggtgcaggctctgcagaccaaggtgactcaacaagggctgaaaatggtcgtgcctggccttgacggagcccagatcccccgagatcccagccagcaggaacttcctcgcctattgtccgctgcctgtcgcctccaactcaatgggaatctgcagctcgaacttgcacaggtgctggctcaggagagacccaagctgcctgaggaccccctgctgagtggccttttggactctcctgccctgaaagcatgccttgataccgcggtcgagaacatgcccagcttgaagatgaaagttgtggaagtgttggcaggtcacggacatctgtactctcggattcccggactgttgagcccacatcctctgctgcagttatcctacacagcgaccgatcgccatccacaagccctggaagctgctcaggctgagttgcagcagcatgatgtggcccagggtcagtgggaccccgcagacccagcacctagcgcccttggaagtgcggacctgctggtatgcaattgtgcagttgccgctctgggggacccagccagtgcgctctctaacatggttgctgccctccgcgaggggggtttcctgttgctccacaccctcctgcgaggccatccactgggcgatatcgtcgccttcttgactagtacagaaccacagtacggacaaggcattttgtcacaggacgcttgggagtcactcttcagccgagtttctctcaggctcgtcggtctcaaaaagtcattctacggcagcacattgtttctatgtcggcgaccgaccccccaagatagccctatctttctccccgtggatgacacgtcctttaggtgggtggagagccttaaaggtatccttgcagatgaggattcttccagaccagtgtggctcaaagccataaactgtgccacctctggggtggttggccttgtaaactgtctaagaagggagccaggtgggaaccggctgaggtgcgtgctcctgtcaaacctatcttctacctcccacgttcctgaagtcgatcctggtagcgctgagctccagaaggtcctgcagggggaccttgtcatgaatgtctaccgcgacggagcttggggagcattccggcactttctgctggaggaggacaagcccgaggagccaacggcacacgcctttgtgtctactttgacacgaggggatttatcatctattcgatgggtgtgctccagcctgaggcacgcccagcctacatgccccggagctcagttatgcaccgtgtattacgcctctctgaacttccgggacatcatgctggctacaggaaaactgtcacctgacgctatccctggaaaatggacatctcaagattctctgctgggcatggagtttagtggacgcgacgcgagtggaaagcgcgtcatgggcctggtgccagccaaaggactagctacttcagtgctccttagtccggatttcctatgggatgtgccttcaaattggaccttggaagaagctgcctccgtccccgttgtgtactccacagcctactacgccctggttgtcagaggtagggtccggcctggggaaacgctgctcatccacagtgggagcggcggtgttgggcaggccgcaatcgccatcgcgctgtctcttggttgccgggtcttcacgacggtgggctccgccgaaaaaagggcttacctgcaagcaaggtttccgcagctcgactccacatccttcgctaatagcagggacactagtttcgagcagcacgtgctgtggcataccggcggaaagggggtggacttggtgctgaacagcctagccgaggaaaagctgcaggcctcagtgcggtgtctagccacacacgggcgatttctggagatcggcaaatttgacctgtcccagaaccaccctcttggtatggctatttttttaaaaaacgtgacattccatggagttttgctggatgctttttttaatgagtcctctgcagactggcgtgaggtgtgggctctagtacaggccggaatacgagacggcgtggttcgaccattaaagtgtactgtgtttcacggcgcacaggtggaggacgcattccggtatatggcccaggccaaggcatcgcaggcctggccctgtagtggcgctcctagcgccacatgggccttctggtggcgcaggtag

SEQ ID NO: 143527 - protein, 86 aa, Artificial Sequence
  derived and/or modified sequence
MIPAVVLLLLLLVEQAAALGEPQLCYILDAILFLYGIVLTLLYCRLKIQVRKAAITSYEKSDGVYTGLSTRNQETYETLKHEKPPQ

SEQ ID NO: 143528 - protein, 112 aa, Artificial Sequence
  derived and/or modified sequence
MIPAVVLLLLLLVEQAAALGEPQLCYILDAILFLYGIVLTLLYCRLKIQVRKAAITSYEKSDGVYTMESPSITRLECSGMIWAHCNLCLLGSRDSRASPSRVAKTTGTTMPS

SEQ ID NO: 143529 - DNA, 591 bp, Artificial Sequence
  derived and/or modified sequence
cagaacggccgatctccagcccaagatgattccagcagtggtcttgctcttactccttttggttgaacaagcagcggccctgggagagcctcagctctgctatatcctggatgccatcctgtttctgtatggaattgtcctcaccctcctctactgtcgactgaagatccaagtgcgaaaggcagctataaccagctatgagaaatcagatggtgtttacacgggcctgagcaccaggaaccaggagacttacgagactctgaagcatgagaaaccaccacagtagctttagaatagatgcggtcatattcttctttggcttctggttcttccagccctcatggttggcatcacatatgcctgcatgccattaacaccagctggccctacccctataatgatcctgtgtcctaaattaatatacaccagtggttcctcctccctgttaaagactaatgctcagatgctgtttacggatatttatattctagtctcactctcttgtcccacccttcttctcttccccattcccaactccagctaaaatatgggaagggagaacccccaataaaactgccatggactggactc

SEQ ID NO: 143530 - DNA, 551 bp, Artificial Sequence
  derived and/or modified sequence
acagctgcacagtgctgtcagaacggccgatctccagcccaagatgattccagcagtggtcttgctcttactccttttggttgaacaagcagcggccctgggagagcctcagctctgctatatcctggatgccatcctgtttctgtatggaattgtcctcaccctcctctactgtcgactgaagatccaagtgcgaaaggcagctataaccagctatgagaaatcagatggtgtttacacgatggagtctccctctatcaccaggctggagtgcagtggcatgatctgggctcactgcaacctctgcctcctgggttcaagagattctcgtgcttcaccctcccgagtagctaagactacaggcaccaccatgcccagctaattttttttgtatttttagtagagacagggtttcactatgttggtcttgatctcttgacctcgtgatctgctcgcctcagcctcctaaagtgctgggattacaggtgtgagccaccgagcctgacctggaagtaactcttttaaagataaagtgggaataaacttttatt

SEQ ID NO: 143531 - DNA, 261 bp, Artificial Sequence
  derived and/or modified sequence
atgatcccagccgttgtgttgttactgctccttttggtggagcaggctgcagccctgggggaaccgcaactctgctatattctggatgcgatcctcttcctctatggcatcgtccttacactgctctattgccgattgaagatacaagttcgcaaggcagccatcacctcatacgagaagtcagacggtgtgtacactggcctctccacgagaaaccaagaaacctacgagacactcaagcatgaaaagcccccccagtag

SEQ ID NO: 143532 - DNA, 339 bp, Artificial Sequence
  derived and/or modified sequence
atgattcccgctgtagtactcctcttgctgcttctggtggagcaggcagccgccttgggcgaacctcaactgtgctatatactagatgccattctgttcctgtatgggattgtcctgacacttctgtattgtcgattgaaaatacaggtgcgaaaggcagcaattaccagttacgaaaagagcgacggtgtctacacaatggaatctcccagcattacaagactggaatgctccggcatgatctgggctcattgtaatctgtgtttgctcggcagcagagactcacgcgcgtctccctcccgcgtcgctaagaccaccggaacaaccatgccttcctag

SEQ ID NO: 143533 - DNA, 261 bp, Artificial Sequence
  derived and/or modified sequence
atgatcccagctgtggtgctgctgctgctgctgctggtggagcaggccgccgccctgggggagccccagctgtgctacatcctggatgccatcctcttcctgtatggaattgtgctgaccctgctgtactgccgcctgaagatccaggtgaggaaggccgccatcaccagctatgagaagagtgatggagtgtacacaggcctgagcaccaggaaccaggagacctatgagaccctgaagcatgagaagccaccccagtag

SEQ ID NO: 143534 - DNA, 339 bp, Artificial Sequence
  derived and/or modified sequence
atgatcccagctgtggtgctgctgctgctgctgctggtggagcaggccgccgccctgggggagccccagctgtgctacatcctggatgccatcctcttcctgtatggaattgtgctgaccctgctgtactgccgcctgaagatccaggtgaggaaggccgccatcaccagctatgagaagagtgatggagtgtacaccatggagagccccagcatcacccggctggagtgcagcggcatgatctgggcccactgcaacctgtgcctgctgggcagccgggacagccgggccagccccagccgggtggccaagaccaccggcaccaccatgcccagctag

SEQ ID NO: 143535 - DNA, 261 bp, Artificial Sequence
  derived and/or modified sequence
atgatccccgccgtggtgctgctgctgctgctgctggtggagcaggcggccgccctaggagaacctcaattgtgctacatcttagacgccatccttttcctgtacggcatcgtgctcactttgctctattgccgcctgaaaatacaggtccgaaaggctgccatcacctcatacgagaaatccgacggcgtctatactggcctgagcacacgaaaccaagagacctatgaaactctgaagcatgaaaaaccaccccagtag

SEQ ID NO: 143536 - DNA, 339 bp, Artificial Sequence
  derived and/or modified sequence
atgatccccgccgtggtgctgctgctgctgctgctggtggagcaggccgccgcattgggcgagccccagctctgttacatcctcgacgccatcctgttcctatatggcatcgtgctgacacttctctactgtcgcctcaagatccaagtgcgaaaggcagctatcacctcctacgaaaaatctgatggagtgtatactatggagtcgcctagcataacacgactggagtgttctggcatgatctgggcccactgtaatttgtgtctcttgggctctcgcgatagtagagcctcccctagtcgggtcgccaaaacaacgggcaccaccatgccgagttag

SEQ ID NO: 143537 - DNA, 261 bp, Artificial Sequence
  derived and/or modified sequence
atgatcccagccgtagtgctcttactgttgttgcttgttgagcaggctgcagccctcggcgaaccacagctgtgctacatcctggacgcaattctctttttatatgggatagtgctgaccctgttatactgtagactgaagattcaagtgcgcaaagccgcaattacttcatatgaaaagtccgatggagtatacacagggctcagcaccaggaaccaggagacctacgaaaccctaaagcacgagaagccaccccagtag

SEQ ID NO: 143538 - DNA, 339 bp, Artificial Sequence
  derived and/or modified sequence
atgatccccgcagttgtgttactgttgttgctgctagttgaacaggccgctgcactgggtgaacctcagctttgctacatcctcgatgccattctgttcctgtatggtattgtgctgaccctgctgtattgccgtctaaagatccaagtcagaaaagccgcaattacatcgtatgaaaaatccgacggcgtttacactatggaatccccctcgatcacacgcctggaatgcagtggtatgatttgggcccactgcaatctttgtctcctcgggtctcgagatagccgcgcatcgccatccagggtcgccaaaacaaccgggaccaccatgccttcatag

SEQ ID NO: 143539 - DNA, 261 bp, Artificial Sequence
  derived and/or modified sequence
atgatccccgccgtggtgctgctgctgctgctgctggtggagcaggccgccgccctgggcgagccccagctgtgctacatcctggacgccatcctgttcctgtacggcatcgtgctgaccctgctgtactgcagactgaagatccaggtgagaaaggccgccatcaccagctacgagaagagcgacggcgtgtacaccggcctgagcaccagaaaccaggagacctacgagaccctgaagcacgagaagcccccccagtag

SEQ ID NO: 143540 - DNA, 339 bp, Artificial Sequence
  derived and/or modified sequence
atgatccccgccgtggtgctgctgctgctgctgctggtggagcaggccgccgccctgggcgagccccagctgtgctacatcctggacgccatcctgttcctgtacggcatcgtgctgaccctgctgtactgcagactgaagatccaggtgagaaaggccgccatcaccagctacgagaagagcgacggcgtgtacaccatggagagccccagcatcaccagactggagtgcagcggcatgatctgggcccactgcaacctgtgcctgctgggcagcagagacagcagagccagccccagcagagtggccaagaccaccggcaccaccatgcccagctag

SEQ ID NO: 143541 - protein, 313 aa, Artificial Sequence
  derived and/or modified sequence
MELDRAVGVLGAATLLLSFLGMAWALQAADTCPEVKMVGLEGSDKLTILRGCPGLPGAPGPKGEAGTNGKRGERGPPGPPGKAGPPGPNGAPGEPQPCLTGPRTCKDLLDRGHFLSGWHTIYLPDCRPLTVLCDMDTDGGGWTVFQRRVDGSVDFYRDWATYKQGFGSRLGEFWLGNDNIHALTAQGTSELRVDLVDFEDNYQFAKYRSFKVADEAEKYNLVLGAFVEGSAGDSLTFHNNQSFSTKDQDNDLNTGNCAVMFQGAWWYKNCHVSNLNGRYLRGTHGSFANGINWKSGKGYNYSYKVSEMKVRPA

SEQ ID NO: 143542 - DNA, 1057 bp, Artificial Sequence
  derived and/or modified sequence
accagaagagatggagctggacagagctgtgggggtcctgggcgctgccaccctgctgctctctttcctgggcatggcctgggctctccaggcggcagacacctgtccagaggtgaagatggtgggcctggagggctctgacaagctcaccattctccgaggctgtccggggctgcctggggcccctgggcccaagggagaggcaggcaccaatggaaagagaggagaacgtggcccccctggacctcctgggaaggcaggaccacctgggcccaacggagcacctggggagccccagccgtgcctgacaggcccgcgtacctgcaaggacctgctagaccgagggcacttcctgagcggctggcacaccatctacctgcccgactgccggcccctgactgtgctctgtgacatggacacggacggagggggctggaccgttttccagcggagggtggatggctctgtggacttctaccgggactgggccacgtacaagcagggcttcggcagtcggctgggggagttctggctggggaatgacaacatccacgccctgaccgcccagggaaccagcgagctccgtgtagacctggtggactttgaggacaactaccagtttgctaagtacagatcattcaaggtggccgacgaggcggagaagtacaatctggtcctgggggccttcgtggagggcagtgcgggagattccctgacgttccacaacaaccagtccttctccaccaaagaccaggacaatgatcttaacaccggaaattgtgctgtgatgtttcagggagcttggtggtacaaaaactgccatgtgtcaaacctgaatggtcgctacctcagggggactcatggcagctttgcaaatggcatcaactggaagtcggggaaaggatacaattatagctacaaggtgtcagagatgaaggtgcgacctgcctagcccaggccggcctcagggtcaggacgcctccacacatagttggttggggggtagggttgggagcttggccctacggtttgtaaaagaaacacatgtcgtgattct

SEQ ID NO: 143543 - DNA, 942 bp, Artificial Sequence
  derived and/or modified sequence
atggaactggacagggcggtcggggtcctaggtgccgcaacactgttactgtcctttctgggcatggcatgggcactgcaggcagccgatacctgtccagaggtcaagatggtagggctggaaggctccgataagttgaccatcctgcggggttgtcctggcctcccaggggctccaggacccaagggggaggccggaacaaatgggaagaggggagaacgcggcccaccaggtcctccgggtaaagcaggccccccaggtcccaacggtgctccaggtgaacctcagccatgtctaaccgggcctcgcacttgtaaagacctcctggataggggtcacttcctcagtggttggcatacgatttaccttccagattgtagacctctgactgtattgtgtgacatggatactgatgggggaggctggacagtttttcagagaagggtcgatggaagtgtggacttttatagggactgggcgacctacaagcaggggttcggctctagactgggcgaattttggctaggaaatgataatattcacgcgctgaccgctcaaggtacttctgagctgcgggtggatttagtggatttcgaagacaattatcagtttgcaaagtatcggtcctttaaggttgccgacgaggcagagaaatacaacctggtccttggcgctttcgtagaagggtcagccggcgactctctcacttttcacaacaatcaatcattcagcacaaaagatcaagacaatgaccttaacaccgggaattgtgcagttatgtttcagggcgcatggtggtacaaaaattgccacgtttccaacctgaacggacgctatttgcggggaacacatggaagcttcgctaatggaatcaactggaaaagtgggaaggggtacaactattcatataaggtgtctgagatgaaagtgcgtcccgcatag

SEQ ID NO: 143544 - DNA, 942 bp, Artificial Sequence
  derived and/or modified sequence
atggagctggacagagctgtgggcgtgctgggcgccgccaccctgctgctgtccttcctgggcatggcctgggccctgcaggccgctgacacctgcccagaggtgaagatggtgggcctggagggcagtgacaagctgaccatcctgcggggctgccccggcctgcccggggcccctggccccaagggggaggccggcaccaacgggaagagaggagagcggggccccccaggccccccaggcaaggccggccccccaggccccaatggagcccctggagagccccagccctgcctgaccggccccaggacctgcaaggacctgctggaccggggccacttcctgagcggctggcacaccatctacctgcctgactgccggcccctgactgtgctgtgtgacatggacacagatggcggcggctggacagtgttccagaggagagtggatggctctgtggacttctacagagactgggccacctacaagcagggcttcggcagccggctgggggagttctggctgggcaatgacaacatccacgccctgacagcccagggcaccagcgagctgcgggtggacctggtggactttgaggacaactaccagtttgccaagtaccgctccttcaaggtggctgatgaggccgagaagtacaacctggtgctgggcgcctttgtggagggcagcgctggggacagcctgaccttccacaacaaccagagcttcagcaccaaggaccaggacaatgacctgaacacaggcaactgtgctgtgatgttccagggcgcctggtggtacaagaactgccacgtgagcaacctgaatggccgctacctgcggggcacccacggcagctttgccaacggcatcaactggaagagcggcaagggctacaactacagctacaaggtgtctgagatgaaggtgcggcctgcctag

SEQ ID NO: 143545 - DNA, 942 bp, Artificial Sequence
  derived and/or modified sequence
atggagctggaccgggccgtgggcgtgctgggcgccgccaccctgcttctctcctttcttggaatggcctgggccctgcaggcggcagatacgtgtccagaagtaaagatggtcggcctggaaggcagcgacaaacttacaatcttacggggctgccctgggctcccaggggctcccggcccaaagggggaggcgggtactaatggcaagcgcggtgagagaggtccccctgggccccccggcaaggcaggtcctccaggccccaatggggccccgggcgagcctcagccatgtcttactggtccaagaacatgcaaggacttgcttgataggggccacttcttaagcggctggcacacaatctacctgccagattgcaggcctttaactgttttgtgcgatatggacacagatggaggcgggtggacggtctttcaaaggcgggtggatggcagtgtggacttctatagagactgggcaacatacaaacagggcttcgggagccgactaggcgagttttggctgggcaacgacaacatacacgctttaaccgcgcagggcacctcagagctgcgcgttgacctggttgactttgaggacaattatcagtttgctaaatatagaagtttcaaagtcgccgacgaagccgagaagtacaacctcgtgctcggggccttcgttgaaggatctgcgggagattcactgacattccataataaccaatccttttccacaaaggaccaggacaatgacctcaataccggtaactgcgccgtgatgtttcagggtgcctggtggtacaagaattgccacgtaagcaatctgaatggaagatatctcaggggaactcacggcagcttcgcgaacggaataaactggaagtccggcaaagggtataactacagctataaggtatcagagatgaaggttaggcccgcctag

SEQ ID NO: 143546 - DNA, 942 bp, Artificial Sequence
  derived and/or modified sequence
atggagttggatcgcgcagtgggtgtgttgggagccgctacactcctgctgtccttcttaggcatggcctgggccctgcaagccgctgacacctgtcctgaggtgaaaatggttgggcttgaaggcagcgacaagcttactattttgagaggttgtcctgggctgccaggagccccaggacccaagggtgaagcaggcaccaacggtaaacgcggagagaggggaccacctggaccccctggtaaggctgggcctcccggaccaaacggagcaccaggggaacctcagccctgcctcaccggcccaaggacgtgtaaggatctcttggaccggggacatttcctcagcgggtggcacaccatctatttgccagattgtaggcctctgactgtgctttgtgacatggacaccgacggcggagggtggacagtattccagaggcgcgttgatggaagcgttgatttttatcgagattgggcgacatacaaacaagggttcggctcaaggttgggcgagttctggttgggaaacgacaacatccatgccctgacagcgcagggcaccagcgagttaagagttgatttggtggatttcgaggacaactaccagttcgccaagtataggtctttcaaggtagccgatgaggcggaaaagtataacctggtgcttggcgcatttgttgagggcagtgctggggactctctcaccttccataataaccagtccttcagcacaaaagaccaggacaacgacctgaacacaggcaactgtgctgttatgtttcagggcgcatggtggtacaagaattgccacgtcagcaacctcaatggcagatacctgagggggacccatggctccttcgccaacgggataaattggaaaagcgggaaggggtataactacagttacaaggtttccgagatgaaggtgcggccagcttag

SEQ ID NO: 143547 - DNA, 942 bp, Artificial Sequence
  derived and/or modified sequence
atggagctggacagagccgtgggcgtgctgggcgccgccaccctgctgctgagcttcctgggcatggcctgggccctgcaggccgccgacacctgccccgaggtgaagatggtgggcctggagggcagcgacaagctgaccatcctgagaggctgccccggcctgcccggcgcccccggccccaagggcgaggccggcaccaacggcaagagaggcgagagaggcccccccggcccccccggcaaggccggcccccccggccccaacggcgcccccggcgagccccagccctgcctgaccggccccagaacctgcaaggacctgctggacagaggccacttcctgagcggctggcacaccatctacctgcccgactgcagacccctgaccgtgctgtgcgacatggacaccgacggcggcggctggaccgtgttccagagaagagtggacggcagcgtggacttctacagagactgggccacctacaagcagggcttcggcagcagactgggcgagttctggctgggcaacgacaacatccacgccctgaccgcccagggcaccagcgagctgagagtggacctggtggacttcgaggacaactaccagttcgccaagtacagaagcttcaaggtggccgacgaggccgagaagtacaacctggtgctgggcgccttcgtggagggcagcgccggcgacagcctgaccttccacaacaaccagagcttcagcaccaaggaccaggacaacgacctgaacaccggcaactgcgccgtgatgttccagggcgcctggtggtacaagaactgccacgtgagcaacctgaacggcagatacctgagaggcacccacggcagcttcgccaacggcatcaactggaagagcggcaagggctacaactacagctacaaggtgagcgagatgaaggtgagacccgcctag

SEQ ID NO: 143548 - protein, 184 aa, Artificial Sequence
  derived and/or modified sequence
MAAAGGARLLRAASAVLGGPAGRWLHHAGSRAGSSGLLRNRGPGGSAEASRSLSVSARARSSSEDKITVHFINRDGETLTTKGKVGDSLLDVVVENNLDIDGFGACEGTLACSTCHLIFEDHIYEKLDAITDEENDMLDLAYGLTDRSRLGCQICLTKSMDNMTVRVPETVADARQSIDVGKTS

SEQ ID NO: 143549 - DNA, 3206 bp, Artificial Sequence
  derived and/or modified sequence
gggcgtgagaggcggggcggggccgcgctctgcttgccaatgtctttataggtcacccggaaggcacgcggaacctcggcgcggtgcttccagcagggtctctccgccactccagccccgcgcccctcgccgcggccctcgggcgtctgcgccgcagctgccgcccccgcctctttggagtctctcgcggcctcaaagcgcggcctgcgtcgcttccggcagttcccgaccgcgggcgatggctgccgctgggggcgcccggctgctgcgcgccgcttctgctgtcctcggcggcccggccggccggtggctgcaccacgctgggtcccgcgctggatccagcggcctgctgaggaaccgggggccgggcgggagcgcggaggcgagccggtcgctgagcgtgtcggcgcgggcccggagcagctcagaagataaaataacagtccactttataaaccgtgatggtgaaacattaacaaccaaaggaaaagttggtgattctctgctagatgttgtggttgaaaataatctagatattgatggctttggtgcatgtgagggaaccctggcttgttcaacctgtcacctcatctttgaagatcacatatatgagaagttagatgcaatcactgatgaggagaatgacatgctcgatctggcatatggactaacagacagatcacggttgggctgccaaatctgtttgacaaaatctatggacaatatgactgttcgagtgcctgaaacagtggctgatgccagacaatccattgatgtgggcaagacctcctgaactagaacaaataggaatattttcatggaattttacctatttttataattattatttcttaaagtgattaaatgagaacatggatgagtggacttcatattatgactagctttactattttaattcaccttgcataactactgaattttgtcattcttgaaagtatgcaatttttattttggttatattacaaaaatgtcaatcaaatattaaaaaatagttaatgtgatagaaaaaccttacatatttttttcttatgtttgtttagcgactttagcaaaatgttttcatataatctcatctgtttacctagaagataggttaaggaaatatattattattcctgtttgatgtgggtgaaggcagagatctaacctggcttgtttagggccataccactaattagaaaatctgtgctagaacctgtgtcttattcctataagctatgtgttcagactgaaactggagaaattatgactattttatttatagtagtagttaaatctgaatgtgtatggacaaaaatatttaattgctcagtaaactgcttaacttcaaagatagttattgaccttataaataaatatttcaaaattttgattcggaagactaagtctggacgtagacattataatgctatcaaagaagtttgatctctgttttgactaaactagaggaaaaatgattggatgtgtttattcttttctaagcagaatggtttaactttgtactctttgaaaaataatgctgatttataaatctctgcctataacagaatggaaaccttatgaatgaattgtgtttctctgtcctgagctggagaagggaatgagcaggctgacacgttgcacagccccaggtggcgccattctctcacgcaaggatggggctgcagggtgagcagcgtgggctgcagtgtgtcagtcccaggagtgagggagtggcaagcaccacagattaccacgtatgtgtggaagacattcgtactcttatctttactataaataaattcataaaagttaacaaaggggtacacagtatggtctttggaaatataataaaacatcaactaacttggactaattgtgaggaagagcagaacaaattagtagaaagaggttataagacaattgagttagcttcatgtgtattattgcagcttgatcatttatataaatatttgtctagtacaatgcttgacatacagcattgtgttatgcccattggggacacagaggtgaacaagacaaggaatgccatcagggaattcaccttttattaggaaaatataaaatatgtatgtatgtgcagataatttgcttgaactaaactgactagttctgctaaataagattttaaactaattcatatgtaaaaagtgattaggaagaacttgaagtatcatttgatgcttaataactattgagtagttttttttttttttttttggtggggggagcgggggacagggtcttactctgtcactcaggccagagtacaatagtatgatctcggctcactgcaacttctgcctcccagtttcaagggattctcgtgcctcagcctcccaggtagctggtactacaggcacggaccaccacgcctggctaatttttgtattttttctagggacagggttttaccacgttgcccaggctggtcttgaacttttgagctcgagtgatccacccacctcagcctcccaaaatgctgggattacagatgtgagccaccgtgcttggccataactattgaatgctttctatgtggagagtgcttgtcttaattttctgttgctataatagaataacacagactgggtaatttataaagaaaagagatttatttggatcatggttctggaggctgggaggtccaagagcatggtaccagcatctgcttggcatctggtgacagctttcttgctgcatcattacatggtggaagggcaagagaatgcgagtgagagcaagagggcaaaatgattatccttttatcaggagcccacttctgacataactaacccacacctgagataacggcattaatccattcatgaggtctctgctcttaaaggagatcacctcttaaaggacccacctttcaatgccattacactggcaatttaatttcaagatgagttttggaggggacattcaaaccatagcagtgctataattttaaagtacttcaaagccaatttattctcttaattagcttcattattcttgtctttgtgtgtggattacctaaactctccttccagagctactttaatgattatattcaaccaaagcactctaaaatttagagtataaattgtcttatatttcaaattagaaaagttcaaatgaagtttaattgtgttattttataaaaccttctaaaattattaaatggaggatataatcta

SEQ ID NO: 143550 - DNA, 555 bp, Artificial Sequence
  derived and/or modified sequence
atggcggcagctggtggcgcgagactccttagggccgcatcagccgtgctgggcggacccgccggccggtggttgcaccatgctggcagcagggccggctcatctggcctccttagaaaccgaggccccggaggatcggcagaggcgagcaggtcactatcagttagtgcacgagcccggagctcctctgaggacaaaattaccgtccacttcatcaacagggacggcgagacccttaccacgaaaggcaaggtgggcgactctttactcgatgtcgtggttgaaaataacttggatattgacgggttcggggcatgtgagggaaccctggcctgttctacatgccacctgattttcgaggatcatatttatgagaagctggacgctattaccgacgaggagaatgatatgctcgatcttgcctacggtctgaccgatcgcagtcgcctgggatgccaaatttgcctcactaagtctatggacaatatgactgttagagtgcccgaaaccgtggccgatgcaagacaatcaatagacgtgggtaaaactagctag

SEQ ID NO: 143551 - DNA, 555 bp, Artificial Sequence
  derived and/or modified sequence
atggctgctgctgggggcgcccggctgctgcgggccgccagcgctgtgctgggcggccctgctggccgctggctgcaccacgccggcagccgggccggcagcagcggcctgctgaggaacagaggccctgggggcagcgctgaggccagccgcagcctgtctgtgtctgcccgggcccggagcagcagcgaggacaagatcaccgtgcacttcatcaacagagatggagagaccctgaccaccaagggcaaggtgggggacagcctgctggatgtggtggtggagaacaacctggacattgatggctttggagcctgtgagggcaccctggcctgcagcacctgccacctgatctttgaggaccacatctatgagaagctggatgccatcacagatgaggagaatgacatgctggacctggcctacggcctgacagacaggagccggctgggctgccagatctgcctgaccaagtccatggacaacatgacagtgcgggtgcctgagaccgtggctgatgcccggcagagcattgatgtgggcaagaccagctag

SEQ ID NO: 143552 - DNA, 555 bp, Artificial Sequence
  derived and/or modified sequence
atggccgccgccggcggcgcccggctgctgcgggccgccagcgccgttctgggagggccagccggccgctggttgcatcacgcgggctcccgcgccggctcttcagggcttcttcgtaaccggggaccggggggatctgctgaggccagcaggagtttgtccgtgagtgctcgagctcggagctcctctgaagataaaatcactgttcacttcattaaccgcgacggggaaacactaactacgaaagggaaggtaggggactcactcctagacgtcgtggtggagaataatttggacatagacggttttggagcgtgcgagggtaccctggcgtgttccacctgtcatctaatttttgaggatcatatctatgagaagctggatgccatcactgacgaagagaacgacatgttagacctcgcctatggccttaccgatcggtcccgcctcggctgtcaaatttgtctgacaaagtctatggacaatatgaccgttcgcgtccccgagacagtggccgatgcccggcagagtatcgacgtcggcaagacttcatag

SEQ ID NO: 143553 - DNA, 555 bp, Artificial Sequence
  derived and/or modified sequence
atggccgcagctggcggtgcccgactactgcgggcagcctcagccgtgttagggggtcccgctggcagatggctacatcacgcgggatccagagctgggtccagcgggcttctaaggaaccgcggacctggcggtagcgccgaggcttcacggtcactgtctgtcagcgctagagctcgttctagttcagaggacaagatcacagttcacttcatcaaccgagacggggagacgctaacaacgaaaggtaaggtcggagactctttgctggacgtggtagtggagaataacctcgatattgacgggttcggagcctgtgaagggacgctcgcatgctctacctgtcacctgatctttgaggatcacatctatgagaagctcgacgcgattacggacgaagagaacgatatgctggatttagcgtacggactcaccgatcgatcccggttgggatgtcagatttgcttgacaaaaagtatggacaatatgactgtgcgtgtgcctgagactgtggcagacgctcgccagagcatcgatgttgggaagacaagctag

SEQ ID NO: 143554 - DNA, 555 bp, Artificial Sequence
  derived and/or modified sequence
atggccgccgccggcggcgccagactgctgagagccgccagcgccgtgctgggcggccccgccggcagatggctgcaccacgccggcagcagagccggcagcagcggcctgctgagaaacagaggccccggcggcagcgccgaggccagcagaagcctgagcgtgagcgccagagccagaagcagcagcgaggacaagatcaccgtgcacttcatcaacagagacggcgagaccctgaccaccaagggcaaggtgggcgacagcctgctggacgtggtggtggagaacaacctggacatcgacggcttcggcgcctgcgagggcaccctggcctgcagcacctgccacctgatcttcgaggaccacatctacgagaagctggacgccatcaccgacgaggagaacgacatgctggacctggcctacggcctgaccgacagaagcagactgggctgccagatctgcctgaccaagagcatggacaacatgaccgtgagagtgcccgagaccgtggccgacgccagacagagcatcgacgtgggcaagaccagctag

SEQ ID NO: 143555 - protein, 497 aa, Artificial Sequence
  derived and/or modified sequence
MASRCWRWWGWSAWPRTRLPPAGSTPSFCHHFSTQEKTPQICVVGSGPAGFYTAQHLLKHPQAHVDIYEKQPVPFGLVRFGVAPDHPEVKNVINTFTQTAHSGRCAFWGNVEVGRDVTVPELREAYHAVVLSYGAEDHRALEIPGEELPGVCSARAFVGWYNGLPENQELEPDLSCDTAVILGQGNVALDVARILLTPPEHLEALLLCQRTDITKAALGVLRQSRVKTVWLVGRRGPLQVAFTIKELREMIQLPGARPILDPVDFLGLQDKIKEVPRPRKRLTELLLRTATEKPGPAEAARQASASRAWGLRFFRSPQQVLPSPDGRRAAGVRLAVTRLEGVDEATRAVPTGDMEDLPCGLVLSSIGYKSRPVDPSVPFDSKLGVIPNVEGRVMDVPGLYCSGWVKRGPTGVIATTMTDSFLTGQMLLQDLKAGLLPSGPRPGYAAIQALLSSRGVRPVSFSDWEKLDAEEVARGQGTGKPREKLVDPQEMLRLLGH

SEQ ID NO: 143556 - DNA, 1897 bp, Artificial Sequence
  derived and/or modified sequence
gcttgtgggcgggcccgggcaggagcgggcttgccctgcggagcagtagctaggaacagatccacttgcaggttgctgttcccagccatggcttcgcgctgctggcgctggtggggctggtcggcgtggcctcggacccggctgcctcccgccgggagcaccccgagcttctgccaccatttctccacacaggagaagaccccccagatctgtgtggtgggcagtggcccagctggcttctacacggcccaacacctgctaaagcacccccaggcccacgtggacatctacgagaaacagcctgtgccctttggcctggtgcgctttggtgtggcgcctgatcaccccgaggtgaagaatgtcatcaacacatttacccagacggcccattctggccgctgtgccttctggggcaacgtggaggtgggcagggacgtgacggtgccggagctgcgggaggcctaccacgctgtggtgctgagctacggggcagaggaccatcgggccctggaaattcctggtgaggagctgccaggtgtgtgctccgcccgggccttcgtgggctggtacaacgggcttcctgagaaccaggagctggagccagacctgagctgtgacacagccgtgattctggggcaggggaacgtggctctggacgtggcccgcatcctactgaccccacctgagcacctggaggccctccttttgtgccagagaacggacatcacgaaggcagccctgggtgtactgaggcagagtcgagtgaagacagtgtggctagtgggccggcgtggacccctgcaagtggccttcaccattaaggagcttcgggagatgattcagttaccgggagcccggcccattttggatcctgtggatttcttgggtctccaggacaagatcaaggaggtcccccgcccgaggaagcggctgacggaactgctgcttcgaacggccacagagaagccagggccggcggaagctgcccgccaggcatcggcctcccgtgcctggggcctccgctttttccgaagcccccagcaggtgctgccctcaccagatgggcggcgggcagcaggtgtccgcctagcagtcactagactggagggtgtcgatgaggccacccgtgcagtgcccacgggagacatggaagacctcccttgtgggctggtgctcagcagcattgggtataagagccgccctgtcgacccaagcgtgccctttgactccaagcttggggtcatccccaatgtggagggccgggttatggatgtgccaggcctctactgcagcggctgggtgaagagaggacctacaggtgtcatagccacaaccatgactgacagcttcctcaccggccagatgctgctgcaggacctgaaggctgggttgctcccctctggccccaggcctggctacgcagccatccaggccctgctcagcagccgaggggtccggccagtctctttctcagactgggagaagctggatgccgaggaggtggcccggggccagggcacggggaagcccagggagaagctggtggatcctcaggagatgctgcgcctcctgggccactgagcccagccccagccccggcccccagcagggaagggatgagtgttgggaggggaagggctgggtccgtctgagtgggactttgcacctctgctgatcccggccggccctggcttggaggcttggctgctcttccagcgtctctcctccctcctggggaaggtcgcccttgcgcgcaaggttttagctttcagcaactgaggtaaccttagggacaggtggaggtgtgggccgatctaaccccttacccatctctctactgctggactgtggagggtcaccaggttgggaacatgctggaaataaaacagctgcaacc

SEQ ID NO: 143557 - DNA, 1827 bp, Artificial Sequence
  derived and/or modified sequence
ggttgctgttcccagccatggcttcgcgctgctggcgctggtggggctggtcggcgtggcctcggacccggctgcctcccgccgggagcaccccgagcttctgccaccatttctccacacaggagaagaccccccagatctgtgtggtgggcagtggcccagctggcttctacacggcccaacacctgctaaagcacccccaggcccacgtggacatctacgagaaacagcctgtgccctttggcctggtgcgctttggtgtggcgcctgatcaccccgaggtgaagaatgtcatcaacacatttacccagacggcccattctggccgctgtgccttctggggcaacgtggaggtgggcagggacgtgacggtgccggagctgcgggaggcctaccacgctgtggtgctgagctacggggcagaggaccatcgggccctggaaattcctggtgaggagctgccaggtgtgtgctccgcccgggccttcgtgggctggtacaacgggcttcctgagaaccaggagctggagccagacctgagctgtgacacagccgtgattctggggcaggggaacgtggctctggacgtggcccgcatcctactgaccccacctgagcacctggaggccctccttttgtgccagagaacggacatcacgaaggcagccctgggtgtactgaggcagagtcgagtgaagacagtgtggctagtgggccggcgtggacccctgcaagtggccttcaccattaaggagcttcgggagatgattcagttaccgggagcccggcccattttggatcctgtggatttcttgggtctccaggacaagatcaaggaggtcccccgcccgaggaagcggctgacggaactgctgcttcgaacggccacagagaagccagggccggcggaagctgcccgccaggcatcggcctcccgtgcctggggcctccgctttttccgaagcccccagcaggtgctgccctcaccagatgggcggcgggcagcaggtgtccgcctagcagtcactagactggagggtgtcgatgaggccacccgtgcagtgcccacgggagacatggaagacctcccttgtgggctggtgctcagcagcattgggtataagagccgccctgtcgacccaagcgtgccctttgactccaagcttggggtcatccccaatgtggagggccgggttatggatgtgccaggcctctactgcagcggctgggtgaagagaggacctacaggtgtcatagccacaaccatgactgacagcttcctcaccggccagatgctgctgcaggacctgaaggctgggttgctcccctctggccccaggcctggctacgcagccatccaggccctgctcagcagccgaggggtccggccagtctctttctcagactgggagaagctggatgccgaggaggtggcccggggccagggcacggggaagcccagggagaagctggtggatcctcaggagatgctgcgcctcctgggccactgagcccagccccagccccggcccccagcagggaagggatgagtgttgggaggggaagggctgggtccgtctgagtgggactttgcacctctgctgatcccggccggccctggcttggaggcttggctgctcttccagcgtctctcctccctcctggggaaggtcgcccttgcgcgcaaggttttagctttcagcaactgaggtaaccttagggacaggtggaggtgtgggccgatctaaccccttacccatctctctactgctggactgtggagggtcaccaggttgggaacatgctggaaataaaacagctgcaacc

SEQ ID NO: 143558 - DNA, 1494 bp, Artificial Sequence
  derived and/or modified sequence
atggcctcccgctgttggcgttggtgggggtggtcagcctggccgcggacaaggctgccaccagccggcagcaccccctccttctgtcatcacttttctacccaagagaagacaccgcagatctgtgtggtggggagcgggccagctgggttttatactgcccagcacctgctgaagcatccacaggcacatgttgatatctacgagaagcaacccgtgcccttcggacttgtccgtttcggcgtcgctcccgatcaccccgaagtgaagaacgtgattaatactttcacgcagacagcacactcgggaaggtgtgccttctggggtaacgttgaggtgggtcgagacgtgacggtgcccgagttgagggaggcctatcacgccgtcgtcttatcctatggggctgaagaccatagagcactcgagattcctggagaggaactccccggagtctgctcagccagagcatttgttggatggtataatgggctaccagagaatcaggaactcgagcctgacctttcttgcgacactgcagtgatcctcggccaggggaatgttgctctggacgtagcacgcattcttctcacccctccggagcatttggaggcactgctgctctgccagcgtacagacataactaaggcagctctaggggttttgcgtcagtcgcgagtgaagacagtgtggctggttggaaggcgtggcccgctgcaagtcgctttcacaatcaaagaactgagggagatgatacagctgccaggcgcccggcccatattggacccagtggattttcttggcctccaagacaagatcaaggaggtaccgcgccctcgtaagaggctaaccgaattgcttctcagaactgcgaccgagaagcctggtccagctgaggctgcacggcaggcctcagcatcacgcgcctggggcctgcgattttttcggagtccacagcaggtgcttccttcgcccgacggccgaagagcagcaggcgttcgactggccgtgacaagactggagggtgtggacgaagctactagggccgttcccaccggggacatggaagacctgccatgcggcctggtcctgagttcgattggatataaatcacggcctgtagatccgagcgtgccattcgatagcaaattgggtgtgattcccaacgtcgaaggcagagttatggatgtgcctgggttatattgctctggctgggtcaagcggggacccacaggtgtgatcgccacaacaatgaccgattcctttctcaccggacagatgctgctgcaggacctgaaagcagggttgcttccgtctggcccacgacccggttacgctgcaattcaagctctgctcagcagccggggtgtgagacccgtaagtttcagtgattgggagaagctcgacgcagaagaagtggcccgtgggcagggaactggtaagccacgtgagaaactggtggatcctcaggaaatgctaaggctgctcggtcactag

SEQ ID NO: 143559 - DNA, 1494 bp, Artificial Sequence
  derived and/or modified sequence
atggcctcacgttgttggaggtggtggggatggagcgcgtggcccagaacgaggctgcctcccgccggcagtaccccctcattctgtcaccatttttcaacccaagagaagacgccgcagatctgtgttgtcgggtccggcccggccggattctataccgcgcagcacctgctgaaacaccctcaggcacacgtggacatttacgagaaacaacctgttccgtttggattggtacggtttggcgttgcccctgatcacccagaagttaagaatgtgataaatactttcacccagacagcccattctggaaggtgcgcattttgggggaatgtagaggttggccgggatgtgacagtaccagagctgcgcgaggcctatcacgccgtagtcctatcttacggagctgaggaccaccgagcacttgagatacctggtgaagaattgccgggtgtgtgttccgcaagggcctttgtaggatggtacaacgggctgccagagaatcaagagctcgaaccggatctgtcgtgtgataccgcagtgattctggggcaaggcaatgttgccctcgatgtcgccaggatattgcttaccccaccagagcatctcgaagcattgctgctctgtcagaggaccgatatcactaaggctgctctcggagttttacgacagtccagggtcaagactgtatggctagtggggcgacgcgggccactacaggtggcgttcacaatcaaagagctgcgcgagatgatacagctgccaggcgctcgacccatcctcgatcctgtcgattttctcgggctccaggacaagattaaggaggtaccacgtccccgcaagcgtctaactgaactgctccttcggacagccaccgagaagccagggccagccgaggccgcacggcaggccagcgccagtagggcgtgggggctgcgcttcttccgatcccctcagcaggttttgcccagtccagatggtaggcgcgcggctggagttcgcctagcggtaacccgattggagggcgtggatgaagccactcgggcagttccaaccggtgacatggaagatctcccttgcggcctcgtgctgtcttctattggatacaaatcaaggccagttgatccttctgtccccttcgattcaaagttaggagtgattcccaatgtagaaggccgggttatggatgtacccggcctatactgtagtggttgggtgaagcgaggccccaccggtgtgattgctacgactatgactgactcttttctgacagggcagatgctgttgcaggatcttaaggccgggctgctgccctctggccctagacccggatatgcggccatccaggccctgctgagcagtcgcggggtccgaccggtcagcttcagcgactgggagaagttggatgctgaggaggtcgcaagggggcagggcactggtaaacctcgggagaaactggtcgacccccaggaaatgctacgcctgctgggacactag

SEQ ID NO: 143560 - DNA, 1494 bp, Artificial Sequence
  derived and/or modified sequence
atggccagccgctgctggcgctggtggggctggagcgcctggcccaggacccggctgcccccagctggcagcacccccagcttctgccaccacttcagcacccaggagaagaccccccagatctgtgtggtgggcagcggccctgctggcttctacacagcccagcacctgctgaagcacccccaggcccacgtggacatctatgagaagcagcctgtgcccttcggcctggtgcgcttcggcgtggccccagaccaccctgaggtgaagaatgtcatcaacaccttcacccagacagcccacagcggccgctgtgccttctggggcaatgtggaggtgggcagagatgtgacagtgcctgagctgcgggaggcctaccacgctgtggtgctgtcctatggagctgaggaccaccgggccctggagatccctggagaggagctgcccggggtgtgcagcgcccgggcctttgtgggctggtacaacggcctgcctgagaaccaggagctggagccagacctgagctgtgacacagctgtgatcctgggccagggcaatgtggccctggatgtggcccgcatcctgctgaccccacctgagcacctggaggccctgctgctgtgccagaggacagacatcaccaaggccgccctgggcgtgctgcggcagagccgggtgaagacagtgtggctggtgggccggcggggccccctgcaggtggccttcaccatcaaggagctgcgggagatgatccagctgcccggggcccggcccatcctggaccctgtggacttcctgggcctgcaggacaagatcaaggaggtgccccggcccaggaagaggctgacagagctgctgctgaggacagccacagagaagccaggccctgctgaggccgcccggcaggccagcgccagccgggcctggggcctgcgcttcttccgcagcccccagcaggtgctgcccagcccagatggaagaagagctgctggggtgcggctggccgtgacccggctggagggcgtggatgaggccaccagggctgtgcccactggagacatggaggacctgccctgtggcctggtgctgagcagcatcggctacaagagcaggcctgtggaccccagcgtgccctttgacagcaagctgggcgtcatccccaacgtggagggccgggtgatggatgtgcccggcctgtactgcagcggctgggtgaagaggggccccaccggggtgattgccaccaccatgacagacagcttcctgaccggccagatgctgctgcaggacctgaaggccggcctgctgcccagcggcccccggcccggctatgctgccatccaggccctgctgagcagcagaggagtgcggcctgtgtccttcagtgactgggagaagctggatgctgaggaggtggcccggggccagggcaccgggaagccccgggagaagctggtggacccccaggagatgctgcggctgctgggccactag

SEQ ID NO: 143561 - DNA, 1494 bp, Artificial Sequence
  derived and/or modified sequence
atggccagccggtgctggcggtggtggggctggagcgcctggccccgcaccaggcttccccccgctgggagcaccccaagcttctgccatcatttttcaacccaggagaagactcctcagatctgtgtcgtcggatcaggcccagccgggttttatacagcacaacatctgctaaaacatccacaggctcatgtcgacatatatgagaagcagcccgtgccttttggactggtcagattcggtgtcgctcctgaccaccctgaagtgaagaatgtgattaacactttcacgcagactgcacattccggtcgctgcgctttttgggggaacgtcgaggtggggcgtgatgtgacagtgcccgagctgcgcgaagcttaccacgccgtggttctgtcatatggggctgaagaccacagggccctcgagatacccggcgaggaattacctggggtgtgctctgctagggcgttcgtgggatggtacaacggcctccccgaaaatcaagaattagagcccgacctgagctgcgacaccgcagttatattgggtcaggggaacgttgctctagatgtggctaggatcctcctcacaccaccagagcacctggaagctcttttactgtgtcaaagaacagatatcaccaaggccgcgctgggagtcctgcgccagtccagagtgaagacagtatggttggtaggtaggcgaggccccctgcaggttgcgttcaccatcaaggagctgcgggaaatgattcagctgcctggagcaagacctattctcgaccctgtggattttctaggcctccaggacaaaataaaggaggtgccacgcccccgaaaacggctgaccgagcttctgctgcgaacggccacagaaaagcctgggcccgcggaggcggcacggcaagcttcggcttcacgcgcctggggccttcggtttttccgatctcctcagcaggtgctgcccagccctgatgggcgcagggctgccggtgtgaggttggctgtcacacgtctcgaaggagtggacgaagctactcgcgctgttcccactggcgacatggaagacctgccatgtggtttggttcttagctctatcggctataagtctcggcccgtagacccttctgtgccttttgatagcaaactcggagtgattcctaatgtagaaggaagagtcatggacgtgcctggcctttattgtagcggatgggttaagcggggccccaccggtgtaatcgccacaacaatgacagacagctttctgacaggtcaaatgctgctgcaggacttgaaggcggggttgctcccctctggcccacgccccggctacgcagccatccaagcacttctctcttcacgcggggttcggccagtatcatttagcgactgggaaaagctggatgcagaggaggttgcccggggacaaggcactggtaaaccccgcgagaaattagtcgatccccaggagatgcttcgtcttctcggccactag

SEQ ID NO: 143562 - DNA, 1494 bp, Artificial Sequence
  derived and/or modified sequence
atggccagccggtgctggcggtggtggggctggagcgcctggcccagaaccagactccctccagctggctctaccccatctttctgccatcacttctcaacccaggagaagaccccccagatctgtgttgtgggatccggcccagcgggcttctatacagcgcagcacctgcttaagcacccacaggctcatgtggatatttacgagaagcagcccgtcccttttggactggtgcgattcggagtggccccagatcatccagaggtgaaaaatgtgattaacaccttcactcagaccgctcatagtggtagatgtgctttttggggcaatgtcgaagtgggacgagatgttacggtgccggagctgagagaggcttatcatgccgtggtcctgagctacggggcagaagaccatagagcactggagatcccaggcgaagaactgccaggggtctgctctgcacgggcctttgtcggctggtacaacggactgcctgagaatcaggagcttgaaccggacctaagctgtgacactgctgtgatactcgggcagggcaatgtggccttagacgtcgctagaatcctgctcaccccgcccgagcacctagaggcactcctgttgtgccaacggaccgatattaccaaagccgcactgggagttctgaggcaaagtagggtcaaaactgtgtggttagtagggaggagggggcctttgcaagtggcattcacaatcaaagagttgcgggagatgattcaactgcctggggcccgtcctatcctcgaccccgtggatttcctggggctgcaggataaaatcaaggaagtgcccagaccacgcaaacgtcttactgagcttctcctgaggacagcaactgagaaaccaggacccgcagaggcagcgcgccaagcttccgcatctagagcatgggggctgcgcttctttcggagtcctcagcaggtcctgccaagtccagacgggagacgagcagcaggcgtcaggctcgccgtcacaaggttggagggcgtggacgaggctactcgtgccgtcccaacaggcgacatggaggatcttccatgtgggctagtgctctcaagcattggatataaaagccggcccgtcgatccatctgtcccttttgattcgaaactgggcgtgatcccaaacgtggagggaagagtcatggacgtgcccggtctgtattgctccgggtgggtaaagagaggccccaccggggtgatcgctacaacaatgaccgactcattcctcacggggcagatgctgttgcaagatctgaaggccggactactaccctcgggacccagaccaggctacgccgccattcaggccttactgtctagcagaggggtgaggcccgttagttttagtgactgggagaagctggatgccgaggaagtggcacgtggccaggggaccgggaagcctcgcgaaaagcttgtggacccacaggaaatgctccgcctgctggggcattag

SEQ ID NO: 143563 - DNA, 1494 bp, Artificial Sequence
  derived and/or modified sequence
atggctagtagatgctggagatggtggggttggtcagcctggccgagaacaaggctccccccagcaggcagcaccccaagcttttgtcatcatttttcaactcaagagaagacacctcagatttgtgtggttgggagtggacccgcagggttttacacagcccaacatctcctgaagcatccgcaggctcacgtggatatttacgaaaaacaaccggtgcccttcggcctggtccgttttggcgtcgcccctgaccacccagaggtgaagaatgtgataaatacattcacacagacggcccactctggccgttgtgccttttggggcaacgtggaagtgggtagggatgtgacggtacccgaacttcgcgaggcctatcatgctgtggtgctcagctacggagccgaggatcatcgcgcactcgagattcctggagaggaattgcccggtgtatgttccgcccgagcctttgtcggctggtataacggactgcccgaaaatcaagagctcgaacctgacctatcctgcgacaccgcggtgattttgggccagggaaatgtcgcccttgacgtggctaggatcctcctgacccctcccgagcacctcgaagccctgctcctatgtcagaggacggatatcaccaaggctgccctgggagtgcttagacagagtagggtgaagacagtatggctcgtgggaagacgcggacctcttcaggtggcttttactatcaaggagttgcgagagatgatacagctgcctggggctcggcctattctcgaccccgtggacttcctgggactgcaggacaaaataaaagaggtccccaggcccagaaagcgcctgactgaactgctcttgagaaccgccaccgagaagcccggtcctgcagaagcagccaggcaggcatccgcaagcagagcttggggcctgaggttttttcggtcacctcagcaggtgctcccctctcccgacggaagaagagcagcaggcgtgcgtctcgcggttaccagacttgaaggggtggatgaagctacccgcgctgtccctacgggcgatatggaggatttaccgtgtggtctcgtgctgtccagcatcggctataagagtcgacccgtggatccatcagtgccttttgactccaagctcggtgttatcccaaatgtggaaggcagagtgatggacgtcccaggcctctactgctccggttgggtgaagcggggaccaacaggcgttatcgcaactacgatgacagactcttttctgacaggccagatgcttctgcaggatctcaaagctgggctgcttcctagcggccctcggcctggatacgcagctattcaagctctgctatcatccaggggagtgcgacccgtgtcattctcagactgggagaagttagatgccgaagaggtggcccgtggccagggtacaggcaagccccgtgaaaaactcgtggaccctcaggagatgctgcgtcttttgggacactag

SEQ ID NO: 143564 - DNA, 1494 bp, Artificial Sequence
  derived and/or modified sequence
atggcatcccggtgttggcggtggtggggctggtccgcttggcctcgtactcggcttcctccagccggttcaacacccagtttctgccaccacttctcgacccaggaaaaaactccccagatttgtgtcgtgggttctgggcctgccggattttacacagcacaacatctgttaaagcaccctcaagctcacgtcgacatatatgaaaaacagcctgtaccgttcggcctggtccgcttcggagttgctccagatcaccctgaagtgaagaacgtgattaacaccttcacacagaccgcacattccgggagatgtgctttttggggcaatgtggaggtggggagagacgtcactgtccccgaactccgcgaagcgtatcatgcagtggtgttaagctatggcgctgaggatcaccgcgcactggaaatacctggagaagaactgcccggtgtatgctctgctcgagcctttgtaggatggtacaacggcttaccggagaaccaggaattggagcccgacctgagctgcgataccgccgtgatcctgggccagggaaatgtggccctggatgtggctcggatcctgctcacaccccctgaacatctcgaggcactactgctatgtcaacgcaccgatatcacgaaagctgcactcggggtgctcagacagagtcgggtgaagaccgtctggttagttggtcggcgaggcccactgcaggttgcttttacaatcaaggaattgcgcgagatgattcaactgccaggcgcacgcccaatcctcgacccagtcgatttcctcgggttacaagataagataaaagaagtacccagacctcggaagcggcttacagagctgttattgaggaccgctaccgaaaagcctggacctgcggaagctgctaggcaagcctctgcttcaagggcttggggactccggtttttccgatctccacaacaggtccttccatctccagacggcagaagggctgccggtgtgcgcctggctgttaccaggctagaaggagtggacgaagccacaagggccgtgcccaccggcgatatggaggacttgccctgcggccttgttctgagcagcatagggtacaaaagcagacctgttgacccatcagtaccttttgattctaagctgggggtgattcccaacgtggagggcagagtcatggatgtacccggactctactgttccggctgggtgaagcgtggccctacaggggtaatcgcgactactatgactgattccttcctaaccggccagatgctgctccaagacttgaaggctgggctgctccccagtggcccaagacctgggtacgccgcaatccaggcattgctgagctctagaggagttcgtcccgtgagcttttccgattgggaaaagctggatgccgaagaggtggcgcgtggacagggcaccggcaaacccagggagaaactagtcgatccccaggaaatgcttcggttacttggacattag

SEQ ID NO: 143565 - DNA, 1494 bp, Artificial Sequence
  derived and/or modified sequence
atggccagcagatgctggagatggtggggctggagcgcctggcccagaaccagactgccccccgccggcagcacccccagcttctgccaccacttcagcacccaggagaagaccccccagatctgcgtggtgggcagcggccccgccggcttctacaccgcccagcacctgctgaagcacccccaggcccacgtggacatctacgagaagcagcccgtgcccttcggcctggtgagattcggcgtggcccccgaccaccccgaggtgaagaacgtgatcaacaccttcacccagaccgcccacagcggcagatgcgccttctggggcaacgtggaggtgggcagagacgtgaccgtgcccgagctgagagaggcctaccacgccgtggtgctgagctacggcgccgaggaccacagagccctggagatccccggcgaggagctgcccggcgtgtgcagcgccagagccttcgtgggctggtacaacggcctgcccgagaaccaggagctggagcccgacctgagctgcgacaccgccgtgatcctgggccagggcaacgtggccctggacgtggccagaatcctgctgaccccccccgagcacctggaggccctgctgctgtgccagagaaccgacatcaccaaggccgccctgggcgtgctgagacagagcagagtgaagaccgtgtggctggtgggcagaagaggccccctgcaggtggccttcaccatcaaggagctgagagagatgatccagctgcccggcgccagacccatcctggaccccgtggacttcctgggcctgcaggacaagatcaaggaggtgcccagacccagaaagagactgaccgagctgctgctgagaaccgccaccgagaagcccggccccgccgaggccgccagacaggccagcgccagcagagcctggggcctgagattcttcagaagcccccagcaggtgctgcccagccccgacggcagaagagccgccggcgtgagactggccgtgaccagactggagggcgtggacgaggccaccagagccgtgcccaccggcgacatggaggacctgccctgcggcctggtgctgagcagcatcggctacaagagcagacccgtggaccccagcgtgcccttcgacagcaagctgggcgtgatccccaacgtggagggcagagtgatggacgtgcccggcctgtactgcagcggctgggtgaagagaggccccaccggcgtgatcgccaccaccatgaccgacagcttcctgaccggccagatgctgctgcaggacctgaaggccggcctgctgcccagcggccccagacccggctacgccgccatccaggccctgctgagcagcagaggcgtgagacccgtgagcttcagcgactgggagaagctggacgccgaggaggtggccagaggccagggcaccggcaagcccagagagaagctggtggacccccaggagatgctgagactgctgggccactag

SEQ ID NO: 143566 - protein, 380 aa, Artificial Sequence
  derived and/or modified sequence
MGIQGLAKLIADVAPSAIRENDIKSYFGRKVAIDASMSIYQFLIAVRQGGDVLQNEEGETTSHLMGMFYRTIRMMENGIKPVYVFDGKPPQLKSGELAKRSERRAEAEKQLQQAQAAGAEQEVEKFTKRLVKVTKQHNDECKHLLSLMGIPYLDAPSEAEASCAALVKAGKVYAAATEDMDCLTFGSPVLMRHLTASEAKKLPIQEFHLSRILQELGLNQEQFVDLCILLGSDYCESIRGIGPKRAVDLIQKHKSIEEIVRRLDPNKYPVPENWLHKEAHQLFLEPEVLDPESVELKWSEPNEEELIKFMCGEKQFSEERIRSGVKRLSKSRQGSTQGRLDDFFKVTGSLSSAKRKEPEPKGSTKKKAKTGAAGKFKRGK

SEQ ID NO: 143567 - protein, 165 aa, Artificial Sequence
  derived and/or modified sequence
MGIQGLAKLIADVAPSAIRENDIKSYFGRKVAIDASMSIYQFLIAVRQGGDVLQNEEGETTSHLMGMFYRTIRMMENGIKPVYVFDGKPPQLKSGELAKRSERRAEAEKQLQQAQAAGAEQEVEKFTKRLVKVTKQHNDECKHLLSLMGIPYLDAPSEAEASCAA

SEQ ID NO: 143568 - DNA, 1143 bp, Artificial Sequence
  derived and/or modified sequence
atgggcatccagggcctggccaagctgatcgccgacgtggcccccagcgccatcagagagaacgacatcaagagctacttcggcagaaaggtggccatcgacgccagcatgagcatctaccagttcctgatcgccgtgagacagggcggcgacgtgctgcagaacgaggagggcgagaccaccagccacctgatgggcatgttctacagaaccatcagaatgatggagaacggcatcaagcccgtgtacgtgttcgacggcaagcccccccagctgaagagcggcgagctggccaagagaagcgagagaagagccgaggccgagaagcagctgcagcaggcccaggccgccggcgccgagcaggaggtggagaagttcaccaagagactggtgaaggtgaccaagcagcacaacgacgagtgcaagcacctgctgagcctgatgggcatcccctacctggacgcccccagcgaggccgaggccagctgcgccgccctggtgaaggccggcaaggtgtacgccgccgccaccgaggacatggactgcctgaccttcggcagccccgtgctgatgagacacctgaccgccagcgaggccaagaagctgcccatccaggagttccacctgagcagaatcctgcaggagctgggcctgaaccaggagcagttcgtggacctgtgcatcctgctgggcagcgactactgcgagagcatcagaggcatcggccccaagagagccgtggacctgatccagaagcacaagagcatcgaggagatcgtgagaagactggaccccaacaagtaccccgtgcccgagaactggctgcacaaggaggcccaccagctgttcctggagcccgaggtgctggaccccgagagcgtggagctgaagtggagcgagcccaacgaggaggagctgatcaagttcatgtgcggcgagaagcagttcagcgaggagagaatcagaagcggcgtgaagagactgagcaagagcagacagggcagcacccagggcagactggacgacttcttcaaggtgaccggcagcctgagcagcgccaagagaaaggagcccgagcccaagggcagcaccaagaagaaggccaagaccggcgccgccggcaagttcaagagaggcaagtag

SEQ ID NO: 143569 - DNA, 498 bp, Artificial Sequence
  derived and/or modified sequence
atgggcatccagggcctggccaagctgatcgccgacgtggcccccagcgccatcagagagaacgacatcaagagctacttcggcagaaaggtggccatcgacgccagcatgagcatctaccagttcctgatcgccgtgagacagggcggcgacgtgctgcagaacgaggagggcgagaccaccagccacctgatgggcatgttctacagaaccatcagaatgatggagaacggcatcaagcccgtgtacgtgttcgacggcaagcccccccagctgaagagcggcgagctggccaagagaagcgagagaagagccgaggccgagaagcagctgcagcaggcccaggccgccggcgccgagcaggaggtggagaagttcaccaagagactggtgaaggtgaccaagcagcacaacgacgagtgcaagcacctgctgagcctgatgggcatcccctacctggacgcccccagcgaggccgaggccagctgcgccgcctag

SEQ ID NO: 143570 - DNA, 1143 bp, Artificial Sequence
  derived and/or modified sequence
atgggtattcagggcttggccaagctgatcgccgacgtcgctccctccgctattagggagaacgatataaagagctacttcggtaggaaggtggccattgatgcaagtatgtccatctatcaatttctgatcgctgttaggcagggtggggatgtcttacagaatgaggagggcgaaaccaccagtcacttgatggggatgttttaccgcaccattcgaatgatggagaacgggatcaagcctgtgtacgtgtttgacggcaaaccgccgcagcttaaatctggcgaacttgctaagcgctcagaacgcagagccgaggctgagaaacagctacaacaggcgcaggccgccggtgcggagcaagaagtggaaaagttcacaaagcgactggtgaaagtgactaagcagcacaacgacgagtgtaagcacctgctttcactcatgggaatcccttaccttgatgctcctagcgaggccgaggcctcgtgtgcagcactcgtgaaagccggcaaagtatacgcggcagctaccgaggacatggattgtcttactttcggatcacccgtgctgatgcgacacctaaccgcatccgaggcaaagaagctcccaatacaggagttccatctgtcacggatcctgcaagagctgggcctgaaccaggaacagttcgtggatctgtgcatcctgctggggagcgattactgcgagtccattcgcgggattggacctaagagggcagtggacctaatacaaaagcataagagtatcgaggagatagtcaggcgcctggacccaaataaatatcctgtgccagagaattggctgcataaagaggcacaccaattatttctcgaaccagaagtcctggatcccgagagtgtagaattgaaatggagtgaaccaaatgaagaagagctgattaaattcatgtgcggggagaaacagttctctgaggagaggataagatctggagtcaaaaggctcagcaaaagccgccagggctccacacaaggacgcctggatgatttctttaaggttacaggctctctctcatctgctaagagaaaggagccggaacctaaggggagtaccaaaaagaaagccaagaccggtgcggcgggcaaattcaaacgcgggaagtag

SEQ ID NO: 143571 - DNA, 498 bp, Artificial Sequence
  derived and/or modified sequence
atggggatccaggggctggccaagctgatcgcggatgtcgccccctctgcgattcgggaaaatgatatcaaaagctactttggacgcaaagttgccatagacgccagcatgtctatatatcaattcctgattgctgtgcgccaaggcggagatgttcttcagaacgaggaaggagagacaacctcacacttgatgggaatgttctatagaactatacgcatgatggagaatggaattaagccggtgtacgtgttcgacggtaaacctccgcaactgaagtccggagaactagcgaagagatcagagcggcgagccgaggctgagaaacagttgcaacaggcacaggctgcaggagccgaacaggaagtggagaaattcacaaagcgactagtaaaagtgaccaagcagcacaacgatgaatgcaaacacctgctgtccctgatgggtataccctacctggacgctccaagcgaagcagaggcttcgtgtgccgcttag

SEQ ID NO: 143572 - DNA, 2296 bp, Artificial Sequence
  derived and/or modified sequence
aaaggaagtgcctccggcgcaagtggcattgagggacttgtagtcctgcgatttcgggtgtagagggagcaggggcctgcggggacctggtgtgggtggagtggggacaagcggtggagaagggtacgccagggtcgctgagagactctgttctccctggagggactggttgccatgagagcagccgtctgaggggacgcagcctgcactacgcgccccaagaggctgtgcgtggcgagcaggtcacgtgacgggagcgcgggctttggaaggcggctgaacgtcaggccacccgccgctaagctgagaagggagagcgagcttaggaccgcctgcccggggcaaccccgaaccaagctttagccgccgaggccgcgtgtcccaaaggccagtcatccctcctctgtgttgccatgggaattcaaggcctggccaaactaattgctgatgtggcccccagtgccatccgggagaatgacatcaagagctactttggccgtaaggtggccattgatgcctctatgagcatttatcagttcctgattgctgttcgccagggtggggatgtgctgcagaatgaggagggtgagaccaccagccacctgatgggcatgttctaccgcaccattcgcatgatggagaacggcatcaagcccgtgtatgtctttgatggcaagccgccacagctcaagtcaggcgagctggccaaacgcagtgagcggcgggctgaggcagagaagcagctgcagcaggctcaggctgctggggccgagcaggaggtggaaaaattcactaagcggctggtgaaggtcactaagcagcacaatgatgagtgcaaacatctgctgagcctcatgggcatcccttatcttgatgcacccagtgaggcagaggccagctgtgctgccctggtgaaggctggcaaagtctatgctgcggctaccgaggacatggactgcctcaccttcggcagccctgtgctaatgcgacacctgactgccagtgaagccaaaaagctgccaatccaggaattccacctgagccggattctgcaggagctgggcctgaaccaggaacagtttgtggatctgtgcatcctgctaggcagtgactactgtgagagtatccggggtattgggcccaagcgggctgtggacctcatccagaagcacaagagcatcgaggagatcgtgcggcgacttgaccccaacaagtaccctgtgccagaaaattggctccacaaggaggctcaccagctcttcttggaacctgaggtgctggacccagagtctgtggagctgaagtggagcgagccaaatgaagaagagctgatcaagttcatgtgtggtgaaaagcagttctctgaggagcgaatccgcagtggggtcaagaggctgagtaagagccgccaaggcagcacccagggccgcctggatgatttcttcaaggtgaccggctcactctcttcagctaagcgcaaggagccagaacccaagggatccactaagaagaaggcaaagactggggcagcagggaagtttaaaaggggaaaataaatgtgtttccccattatacctccttcaccccagaatatttgccgtcttgtacccttaagagctacagctagagaaaccttcacggggtggagagaggattctaaggcttttctagcgtgacccttttcagtagtgctagtcccttttttacttgatcttaatggcaagaaggccacagaggtacttttccttttttagctcaggaaaatatgtcaggctcaaaccacttctcaggcagtttaatggacactaagtccattgttacatgaaagtgatagatagcaacaagttttggagaagagagagggagataaaagggggagacaaaagatgtacagaaatgatttcctggctggccaactggtggccagtgggaggtgatggtggacctagactgtgcttttctgtcttgttcagccttgacccaccttgagagagagccaccaggaaggcgcatcttagcagatgggaggaactgctgagagaagatgggcagaaagctggagcccctggagttggctgtgtctgtgtttgtgactgattactggctgtgtcttgggtgggcagaaactcgaacttgctatgtaatttgtgtctagttattcagaggagtaagatggtgatgttcacctggcaatcagctgagttgagactttggaataagacactggttttcatgcgctgtttttgttttaaagttatgaagaaaaaagtcaataaaattctaaaagtaaccaaaa

SEQ ID NO: 143573 - DNA, 776 bp, Artificial Sequence
  derived and/or modified sequence
gagcgagcttaggaccgcctgcccggggcaaccccgaaccaagctttagccgccgaggccgcgtgtcccaaaggccaggtgagaccccatgggaagcgcctccgggagcgacggggtccgcttggcgctgggggccgtggggagccggggtctggagtgcgcgggattcgcagtcaagaggtcccgccacttttccccctgtgagccttgggccagtcgcgtaagctccgagcctctctttcctccattgtagaaaagcgtcatccctcctctgtgttgccatgggaattcaaggcctggccaaactaattgctgatgtggcccccagtgccatccgggagaatgacatcaagagctactttggccgtaaggtggccattgatgcctctatgagcatttatcagttcctgattgctgttcgccagggtggggatgtgctgcagaatgaggagggtgagaccaccagccacctgatgggcatgttctaccgcaccattcgcatgatggagaacggcatcaagcccgtgtatgtctttgatggcaagccgccacagctcaagtcaggcgagctggccaaacgcagtgagcggcgggctgaggcagagaagcagctgcagcaggctcaggctgctggggccgagcaggaggtggaaaaattcactaagcggctggtgaaggtcactaagcagcacaatgatgagtgcaaacatctgctgagcctcatgggcatcccttatcttgatgcacccagtgaggcagaggccagctgtgctgcc

SEQ ID NO: 143574 - DNA, 1143 bp, Artificial Sequence
  derived and/or modified sequence
atgggcatccagggcctggccaagctgattgctgatgtggcccccagcgccatccgggagaatgacatcaagagctactttggaaggaaggtggccattgatgcctccatgagcatctaccagttcctgattgctgtgcggcagggcggagatgtgctgcagaatgaggagggggagaccaccagccacctgatgggcatgttctaccgcaccatccgcatgatggagaatggcatcaagcctgtgtatgtgtttgatggcaagccaccccagctgaagagcggggagctggccaagagaagtgaaagaagagctgaggccgagaagcagctgcagcaggcccaggccgccggggctgagcaggaggtggagaagttcaccaagaggctggtgaaggtgaccaagcagcacaatgatgagtgcaagcacctgctgagcctgatgggcatcccctacctggatgcccccagcgaggccgaggccagctgtgccgccctggtgaaggccggcaaggtgtatgctgctgccacagaggacatggactgcctgaccttcggcagccctgtgctgatgaggcacctgacagccagcgaggccaagaagctgcccatccaggagttccacctgagccgcatcctgcaggagctgggcctgaaccaggagcagtttgtggacctgtgcatcctgctgggcagtgactactgtgagagcatccggggcatcggccccaagagagctgtggacctgatccagaagcacaagagcattgaggagatcgtgcggcggctggaccccaacaagtaccctgtgcctgagaactggctgcacaaggaggcccaccagctgttcctggagcctgaggtgctggaccctgagagcgtggagctgaagtggagcgagcccaatgaggaggagctgatcaagttcatgtgtggggagaagcagttcagcgaggagcgcatccgctctggagtgaagaggctgagcaagagccggcagggcagcacccagggccgcctggatgacttcttcaaggtgacaggcagcctgagcagcgccaagaggaaggagcctgagcccaagggcagcaccaagaagaaggccaagacaggagctgctgggaagttcaagaggggcaagtag

SEQ ID NO: 143575 - DNA, 498 bp, Artificial Sequence
  derived and/or modified sequence
atgggcatccagggcctggccaagctgattgctgatgtggcccccagcgccatccgggagaatgacatcaagagctactttggaaggaaggtggccattgatgcctccatgagcatctaccagttcctgattgctgtgcggcagggcggagatgtgctgcagaatgaggagggggagaccaccagccacctgatgggcatgttctaccgcaccatccgcatgatggagaatggcatcaagcctgtgtatgtgtttgatggcaagccaccccagctgaagagcggggagctggccaagagaagtgaaagaagagctgaggccgagaagcagctgcagcaggcccaggccgccggggctgagcaggaggtggagaagttcaccaagaggctggtgaaggtgaccaagcagcacaatgatgagtgcaagcacctgctgagcctgatgggcatcccctacctggatgcccccagcgaggccgaggccagctgtgccgcctag

SEQ ID NO: 143576 - DNA, 1143 bp, Artificial Sequence
  derived and/or modified sequence
atgggcatccagggcctggccaagctgatcgccgacgtggccccctctgcaattcgagagaacgatatcaagtcttatttcggtcggaaggtggcaatcgatgcttctatgtctatataccagtttctcatcgcggtgagacagggaggtgatgtactccagaacgaggaaggagagacaaccagccatcttatgggcatgttttataggaccatcagaatgatggaaaacggaataaaacctgtttatgtatttgacgggaagcctccccagctgaagagcggagaactcgcaaagcggagcgagcggagggctgaagcggaaaagcaactgcaacaggctcaggcagcgggagcggagcaagaagtagagaagttcacgaaacgattagtcaaggttaccaaacagcacaatgacgagtgtaaacacctgctgagcctaatgggtattccttacctggacgctccctcagaagccgaggccagctgcgctgcccttgtgaaagccggcaaagtgtacgcggccgcaacagaggacatggactgtctgacgttcggcagccccgtgctaatgcgtcacctcactgcgtctgaggccaagaaactacccatccaggagtttcatttaagccggatcctgcaagaactgggactaaatcaggaacagttcgttgacttatgtatcctgctcggaagtgactactgtgagtccattaggggaataggtcccaaaagggccgttgatttgatccagaaacataagagtatagaagaaatagtccgtcggctggaccccaacaagtatcccgtcccggagaactggctccataaagaggcgcatcaacttttcctcgagcctgaggtcctcgatccggagagcgtggagctgaaatggtcagagcctaatgaggaagagctgatcaaattcatgtgtggcgaaaagcagtttagcgaggagcgtatacgcagcggtgttaagaggctctccaagagccgccagggttcgacacaaggccggctcgacgacttcttcaaagtcaccgggagtctcagtagcgccaaacgtaaggaacccgaaccaaagggcagcaccaagaaaaaggctaaaacaggtgccgccggtaagttcaagcggggaaagtag

SEQ ID NO: 143577 - DNA, 498 bp, Artificial Sequence
  derived and/or modified sequence
atgggcatccagggcctggccaagctgatcgccgacgtggccccctccgctattcgggagaacgacattaagagctattttggcaggaaggtggctatagacgcatccatgagcatttaccagttcctaattgcagttagacagggtggagatgtattgcagaacgaggagggagagaccacctctcaccttatgggtatgttctatcggaccatccggatgatggagaatgggattaagcccgtttacgtgttcgatggaaagccacctcagttaaaatccggcgaattggcaaaacgctctgaacgtagggcagaggctgagaagcaactccagcaggctcaggccgcgggtgccgagcaagaggtcgagaagtttactaagcgcttggtgaaggtgacgaaacagcacaatgatgagtgtaaacacctcctgtcactcatggggatcccatacctcgacgctccctctgaagccgaggcatcttgtgcggcctag

SEQ ID NO: 143578 - DNA, 1143 bp, Artificial Sequence
  derived and/or modified sequence
atggggattcagggactggccaaactgatagcagacgtggcaccgagtgctattcgggagaatgatatcaagtcgtatttcggacgcaaggtggcaatcgacgcttctatgtctatataccagttcttgatcgcagtgcggcagggcggtgacgtgttgcaaaatgaggaaggcgagacgacaagccatttgatgggcatgttctaccgtacaattcgcatgatggagaacgggataaaacccgtgtacgtcttcgatggcaaaccccctcagctcaagagcggtgaactggctaagaggtcagaaaggcgggctgaggccgagaagcagctacaacaggcccaggccgcaggtgctgagcaggaggtggagaaatttaccaagcggctcgtgaaagtgactaaacagcataacgacgagtgtaagcacttactcagcctcatgggcatcccatatttggatgcacctagtgaggcggaggcttcctgtgcggctctcgtgaaagctggcaaggtgtatgctgctgccaccgaggatatggactgcctgacattcgggtcaccagtgcttatgaggcacctgacagcttccgaggccaaaaaactgcccattcaggagtttcacctgagccggattctgcaggagttgggcctaaatcaggagcagtttgtggacctttgtatcctgctgggcagcgactactgtgaatccattcgcggaatcggaccaaaacgagccgtggacttgattcagaagcacaaaagcattgaagaaattgtcaggcgcttggatcccaacaagtaccccgtgcctgagaattggcttcacaaggaagctcatcaacttttcctcgagcctgaggtgctcgatcccgagtcggtggagctgaagtggagcgagcccaatgaagaagagttgataaagttcatgtgtggggaaaaacaatttagcgaggaacggatacgctccggagtcaaacgactaagcaaatccagacaggggagcacacagggcaggttggatgactttttcaaagtcactggtagcctgtcttccgcaaagagaaaagaaccggagcccaagggatccacaaaaaagaaagccaagaccggggcagctgggaaatttaagcggggaaaatag

SEQ ID NO: 143579 - DNA, 498 bp, Artificial Sequence
  derived and/or modified sequence
atgggaattcaaggtctggcaaaactgatagctgacgtggccccatcagccattagggagaacgacattaagtcttatttcggacggaaggtggccattgacgcaagtatgagtatctaccagttcctaattgcagtgagacaagggggagatgtgctgcagaacgaagaaggcgagacaacctcgcacctgatgggcatgttctacaggaccatccgtatgatggaaaatggcatcaaaccagtatacgtgtttgacgggaagcctccacagctgaaatccggcgagctcgccaagagaagcgaaaggcgggctgaggcagagaagcagctgcagcaggcgcaggccgctggtgctgagcaggaagtggaaaaattcacaaagcgacttgtgaaggtgacaaagcagcacaacgacgagtgcaaacaccttttgagcttgatgggcattccctacctggatgcccctagcgaagccgaagcttcttgcgctgcgtag

SEQ ID NO: 143580 - protein, 225 aa, Artificial Sequence
  derived and/or modified sequence
MAALASSLIRQKREVREPGGSRPVSAQRRVCPRGTKSLCQKQLLILLSKVRLCGGRPARPDRGPEPQLKGIVTKLFCRQGFYLQANPDGSIQGTPEDTSSFTHFNLIPVGLRVVTIQSAKLGHYMAMNAEGLLYSSPHFTAECRFKECVFENYYVLYASALYRQRRSGRAWYLGLDKEGQVMKGNRVKKTKAAAHFLPKLLEVAMYQEPSLHSVPEASPSSPPAP

SEQ ID NO: 143581 - DNA, 678 bp, Artificial Sequence
  derived and/or modified sequence
atggccgccctggccagcagcctgatcagacagaagagagaggtgagagagcccggcggcagcagacccgtgagcgcccagagaagagtgtgccccagaggcaccaagagcctgtgccagaagcagctgctgatcctgctgagcaaggtgagactgtgcggcggcagacccgccagacccgacagaggccccgagccccagctgaagggcatcgtgaccaagctgttctgcagacagggcttctacctgcaggccaaccccgacggcagcatccagggcacccccgaggacaccagcagcttcacccacttcaacctgatccccgtgggcctgagagtggtgaccatccagagcgccaagctgggccactacatggccatgaacgccgagggcctgctgtacagcagcccccacttcaccgccgagtgcagattcaaggagtgcgtgttcgagaactactacgtgctgtacgccagcgccctgtacagacagagaagaagcggcagagcctggtacctgggcctggacaaggagggccaggtgatgaagggcaacagagtgaagaagaccaaggccgccgcccacttcctgcccaagctgctggaggtggccatgtaccaggagcccagcctgcacagcgtgcccgaggccagccccagcagcccccccgccccctag

SEQ ID NO: 143582 - DNA, 678 bp, Artificial Sequence
  derived and/or modified sequence
atggctgctctggcgtcttcactaattagacagaagagggaggttcgggaaccgggagggtcacgtcctgtgagtgcacaaaggcgcgtgtgtccaaggggaacaaagtcgctctgtcagaagcagctgctgatccttctgagcaaggtgagactctgcggcggacgccccgcccgccctgaccgcggccccgagccgcagctgaagggaattgtgactaaactcttttgcagacagggtttctacctgcaggccaatccggatgggagcattcagggtacgccagaggacacttcttcttttacccattttaatttgatccctgtaggactgcgtgtggtcactattcagtccgcaaagcttggtcactacatggctatgaatgcagaaggcctgctttattctagccctcattttactgccgagtgccggttcaaggagtgtgtgttcgagaattattatgtgctgtatgctagcgcgctttaccggcagcgacgctccgggcgggcttggtatctcgggctggataaagaaggacaagttatgaaagggaaccgggtcaagaagactaaggcagccgcacactttctaccaaagctgttggaagttgctatgtatcaagagccatcactccatagtgtcccagaagctagccctagtagtcctcctgcgccttag

SEQ ID NO: 143583 - DNA, 678 bp, Artificial Sequence
  derived and/or modified sequence
atggccgccctggccagcagcctcatccggcagaagcgggaggtgcgggagcccggcggcagcaggcctgtgtctgcccagaggagagtgtgcccccggggcaccaagagcctgtgccagaagcagctgctgatcctgctgagcaaggtgcggctgtgtggcggccgcccagcccggccagaccggggccctgagccccagctgaagggcatcgtgaccaagctgttctgccggcagggcttctacctgcaggccaacccagatggcagcatccagggcaccccagaggacaccagcagcttcacccacttcaacctgatccctgtgggcctgcgggtggtgaccatccagagcgccaagctgggccactacatggccatgaatgctgagggcctgctgtacagcagcccccacttcaccgctgagtgccgcttcaaggaatgtgtgtttgagaactactacgtgctgtatgccagcgccctgtaccggcagaggagaagtggccgggcctggtacctgggcctggacaaggagggccaggtgatgaagggcaacagagtgaagaagaccaaggctgctgcccacttcctgcccaagctgctggaggtggccatgtaccaggagcccagcctgcacagcgtgcctgaggccagccccagcagccccccagccccctag

SEQ ID NO: 143584 - DNA, 678 bp, Artificial Sequence
  derived and/or modified sequence
atggccgccctggccagcagcctgatccggcagaagcgggaggtgcgtgagccgggcgggtctcggccagtctccgcacagcggagagtgtgccctcgaggcactaaaagcttgtgtcagaagcaactgctgatattactatctaaagtgcggctgtgcgggggtcgacctgcccgtcccgaccgtggtcccgagccccaactgaaggggattgttacaaaattgttttgtaggcaagggttctacctgcaggcaaatcctgacggctcaattcagggcacgccggaggacacttcatccttcacccattttaatctcattccagttggactgcgtgtggtcacaattcagtccgcaaagttgggccattatatggcgatgaacgcggagggactcctgtactccagtccccacttcactgctgagtgtcgatttaaggagtgcgttttcgaaaattactatgtgctgtatgcctccgcactataccgccagcggcggtctggccgcgcatggtaccttggcctggacaaggagggacaggtcatgaagggtaatagggtcaagaaaacaaaggccgccgcacatttcctacctaaactgctcgaggtggccatgtaccaggagccgagcctccattctgtgcctgaggcaagcccgtctagtcctccagctccatag

SEQ ID NO: 143585 - DNA, 678 bp, Artificial Sequence
  derived and/or modified sequence
atggctgcactcgcctcaagccttatccggcagaaacgtgaggtgcgggaaccaggcggatctaggcctgtctcggctcagcgccgtgtatgtcccaggggaactaagtctttgtgccaaaagcagctactgatcctgctatctaaggtgaggctgtgcgggggtcggccagccagaccagaccgcggtcctgaaccacagctcaaaggcattgtaacaaagctcttctgtaggcagggcttctacctgcaggctaatcccgacggctccatccaaggcacgcctgaggacaccagtagcttcacacatttcaatctaattccagtgggtctcagagttgtcacgattcagagtgccaagctgggccactatatggccatgaacgcagagggcctcttatatagtagtccccattttacagctgagtgccgcttcaaggagtgcgtcttcgagaattattatgtgctctacgcaagcgctctgtaccggcagaggaggagcgggcgtgcatggtatctggggttggataaggaaggccaggttatgaagggcaatcgagtgaaaaaaactaaggctgccgcacactttctgcccaagctgttggaggtggccatgtatcaggagccttcgttgcactccgttcccgaggcctccccttcaagcccaccagcgccttag

SEQ ID NO: 143586 - DNA, 2720 bp, Artificial Sequence
  derived and/or modified sequence
gtgggatccactgaggagtacataggctgctggatctggtggagccagcactgggcccacgggtggtaactggctgctgtggaggggggtacgtgagggggggggtctggggcttatcctcaggtcctgtgggtggggcagcgagtcggggcctgagcgtcaagagcatgccctagtgagcgggctcctctgggggagcccagcgcgctccgggcgcctgccggtttgggggtgtctcctcccggggcgctatggcggcgctggccagtagcctgatccggcagaagcgggaggtccgcgagcccgggggcagccggccggtgtcggcgcagcggcgcgtgtgtccccgcggcaccaagtccctttgccagaagcagctcctcatcctgctgtccaaggtgcgactgtgcggggggcggcccgcgcggccggaccgcggcccggagcctcagctcaaaggcatcgtcaccaaactgttctgccgccagggtttctacctccaggcgaatcccgacggaagcatccagggcaccccagaggataccagctccttcacccacttcaacctgatccctgtgggcctccgtgtggtcaccatccagagcgccaagctgggtcactacatggccatgaatgctgagggactgctctacagttcgccgcatttcacagctgagtgtcgctttaaggagtgtgtctttgagaattactacgtcctgtacgcctctgctctctaccgccagcgtcgttctggccgggcctggtacctcggcctggacaaggagggccaggtcatgaagggaaaccgagttaagaagaccaaggcagctgcccactttctgcccaagctcctggaggtggccatgtaccaggagccttctctccacagtgtccccgaggcctccccttccagtccccctgccccctgaaatgtagtccctggactggaggttccctgcactcccagtgagccagccaccaccacaacctgtctcccagtcctgctctcacccctgctgccacacacatgccctgagcagccaggtcccactaggtgctctaccctgagggagcctaggggctgactgtgacttccgaggctgctgagacccttagatctttgggcctaggagggagtcagagagggggatgtctgaagatggtcctggctgatcacttctttctttccacactcacacaacgccatgccttttcctgagatggcgctgggagttcccacatggacagccagggcataaacacttcccaccccggctcagccagttcctggagtcctgtgccccttttcattgccactgagccatttctagattcactggagctcaggattcatgtgtccttctttccctactctaccttctaccttggtctggacacattctggaacactggacaccctcgccagggccacttctgcactagggctctgtgctggaacccaggcatgctgccagccttttctctggatctgtcaggcctctgtcattgactcagatggacccctggtttccaagtagaaagaggctagatttgggccttgtctagctgttggctttggcctgaaccggaaccagtctcagatgaccacgggtttaaccttcttatcccagagacacccaattctagagctttatggagccgtacttccccctgaatcctagctctaggacatagatcatgactctcagcccttttacccaggatggagctggggcctgtatagccatattattgttctaagtaagttctagccccaccctcccgccttcttgagtgatacctattacggatgagttctggaaaagacccagctatgattcataaaaacacttctggatgaatcaagaaccatttcttgtttttcctagataattctctaaaaatatgattcttccatatagaatgctaagcttatttttacatgcagtttctagctccttcaacccagctgaggtcgtgccagggagacagagtctggagaagggcagaggaattttggaaggatccctggctcatagtagggaagctgggatgggggaggggtcaaaattatggcatgactgaacctgcatctgtgttgggtggacatgaatacttagctacctcagcaggaattccttccaggtcccctttaaagctgaggtccttagagtaatatgtccttaataaaaaggacaaatggatacagccttgaccctcccagtgaggagaccccaattcagcaataagtctcacccttctcccctacaggtcaggccaagaagggtgaaggcctcttgcactccagacctcatacgccccaacagcttctaattggatagaacttgctttaccttacagctcacaacctcagctgggttttaggtacccaaaaagggcctgtctagattttttcagaaaaacgtggagtgctaggggcagcctggaaaagatggggaacctgctagtgaactaggagggagacttccatagcctcagacttggatagggtaggctgagggggccctaagggagggactaaggctccaaggcaggtcacttttccttaggctgttctacttctggcttgttgcaagaggagtagatgccccctcacccacacaaaccccactcagtctccacccaactcctggcactgctcccaggggatcgggtctccactccagctttctcaattaaagacgatttatacaactgaa

SEQ ID NO: 143587 - DNA, 2763 bp, Artificial Sequence
  derived and/or modified sequence
gtgggatccactgaggagtacataggctgctggatctggtggagccagcactgggcccacgggtggtaactggctgctgtggaggggggtacgtgagggggggggtctggggcttatcctcaggtcctgtgggtggggcagcgagtcggggcctgagcgtcaagagcatgccctagtgagcgggctcctctgggggagcccagcgcgctccgggcgcctgccggtttgggggtgtctcctcccggggcgctatggcggcgctggccagtagcctgatccggcagaagcgggaggtccgcgagcccgggggcagccggccggtgtcggcgcagcggcgcgtgtgtccccgcggcaccaagtccctttgccagaagcagctcctcatcctgctgtccaaggtgcgactgtgcggggggcggcccgcgcggccggaccgcggcccggagcctcagctcaaaggcatcgtcaccaaactgttctgccgccagggtttctacctccaggcgaatcccgacggaagcatccagggcaccccagaggataccagctccttcacccacttcaacctgatccctgtgggcctccgtgtggtcaccatccagagcgccaagctgggtcactacatggccatgaatgctgagggactgctctacagttcgccgcatttcacagctgagtgtcgctttaaggagtgtgtctttgagaattactacgtcctgtacgcctctgctctctaccgccagcgtcgttctggccgggcctggtacctcggcctggacaaggagggccaggtcatgaagggaaaccgagttaagaagaccaaggcagctgcccactttctgcccaagctcctggaggtggccatgtaccaggagccttctctccacagtgtccccgaggcctccccttccagtccccctgccccctgaaatgtagtccctggactggaggttccctgcactcccagtgagccagccaccaccacaacctgtctcccagtcctgctctcacccctgctgccacacacatgccctgagcagccaggtcccactaggtgctctaccctgagggagcctaggggctgactgtgacttccgaggctgctgagacccttagatctttgggcctaggagggagtcagagagggggatgtctgaagatggtcctggctgatcacttctttctttccacactcacacaaccccatgccttttcctgagatggcgctgggagttcccacatggacagccagggcataaacacttcccaccccggctcagccagttcctggagtcctgtgccccttttcattgccactgagccatttctagattcactggagctcaggattcatgtgtccttctttccctactctaccttctaccttggtctggacacattctggaacactggacaccctcgccagggccacttctgcactagggctctgtgctggaacccaggcatgctgccagccttttctctggatctgtcaggcctctgtccttgactcagatggacccctggtttccaagtagaaagaggctagatttgggccttgtctagctgttggctttggcctgaaccggaaccagtctcagatgaccacgggtttaaccttcttatcccagagacacccaattctagagctttatggagccgtacttccccctgaatcctagctctaggacatagatcatgactctcagcccttttacccaggatggagctggggcctgtatagccatattattgttctaagtaagttctagccccaccctcccgccttcttgagtgatacctattacggatgagttctggaaaagacccagctatgattcataaaaacacttctggatgaatcaagaaccatttcttgtttttcctagataattctctaaaaatatgattcttccatatagaatgctaagcttatttttacatgcagtttctagctccttcaacccagctgaggtcgtgccagggagacagagtctggagaagggcagaggaattttggaaggatccctggctcatagtagggaagctgggatgggggaggggtcaaaattatggcatgactgaacctgcatctgtgttgggtggacatgaatacttagctacctcagcaggaattccttccaggtcccctttaaagctgaggtccttagagtaatatgtccttaataaaaaggacaaatggatacagccttgaccctcccagtgaggagaccccaattcagcaataagtctcacccttctcccctacaggtcaggccaagaagggtgaaggcctcttgcactccagacctcatacgccccaacagcttctaattggatagaacttgctttaccttacagctcacaacctcagctgggttttaggtacccaaaaagggcctgtctagattttttcagaaaaacgtggagtgctaggggcagcctggaaaagatggggaacctgctagtgaactaggagggagacttccatagcctcagacttggatagggtaggctgagggggccctaagggagggactaaggctccaaggcaggtcacttttccttaggctgttctacttctggcttgttgcaagaggagtagatgccccctcacccacacaaaccccactcagtctccacccaactcctggcactgctcccaggggatcgggtctccactccagctttctcaattaaagacgatttatacaaaaaaaaaaaaaaaaaaaaaaaaaaaaaaaaaaaaaaaaaaaaaaaaaa

SEQ ID NO: 143588 - protein, 181 aa, Artificial Sequence
  derived and/or modified sequence
MESKEPQLKGIVTRLFSQQGYFLQMHPDGTIDGTKDENSDYTLFNLIPVGLRVVAIQGVKASLYVAMNGEGYLYSSDVFTPECKFKESVFENYYVIYSSTLYRQQESGRAWFLGLNKEGQIMKGNRVKKTKPSSHFVPKPIEVCMYREPSLHEIGEKQGRSRKSSGTPTMNGGKVVNQDST

SEQ ID NO: 143589 - protein, 107 aa, Artificial Sequence
  derived and/or modified sequence
MESKEPQLKGIVTRLFSQQGYFLQMHPDGTIDGTKDENSDYTLFNLIPVGLRVVAIQGVKASLYVAMNGEGYLYSSDVFTPECKFKESVFENYYVIYSSTLYRQQES

SEQ ID NO: 143590 - DNA, 546 bp, Artificial Sequence
  derived and/or modified sequence
atggagagcaaggagccccagctgaagggcatcgtgaccagactgttcagccagcagggctacttcctgcagatgcaccccgacggcaccatcgacggcaccaaggacgagaacagcgactacaccctgttcaacctgatccccgtgggcctgagagtggtggccatccagggcgtgaaggccagcctgtacgtggccatgaacggcgagggctacctgtacagcagcgacgtgttcacccccgagtgcaagttcaaggagagcgtgttcgagaactactacgtgatctacagcagcaccctgtacagacagcaggagagcggcagagcctggttcctgggcctgaacaaggagggccagatcatgaagggcaacagagtgaagaagaccaagcccagcagccacttcgtgcccaagcccatcgaggtgtgcatgtacagagagcccagcctgcacgagatcggcgagaagcagggcagaagcagaaagagcagcggcacccccaccatgaacggcggcaaggtggtgaaccaggacagcacctag

SEQ ID NO: 143591 - DNA, 546 bp, Artificial Sequence
  derived and/or modified sequence
atggagaagaccgagccccagctgaagggcatcgtgaccagactgttcagccagcagggctacttcctgcagatgcaccccgacggcaccatcgacggcaccaaggacgagaacagcgactacaccctgttcaacctgatccccgtgggcctgagagtggtggccatccagggcgtgaaggccagcctgtacgtggccatgaacggcgagggctacctgtacagcagcgacgtgttcacccccgagtgcaagttcaaggagagcgtgttcgagaactactacgtgatctacagcagcaccctgtacagacagcaggagagcggcagagcctggttcctgggcctgaacaaggagggccagatcatgaagggcaacagagtgaagaagaccaagcccagcagccacttcgtgcccaagcccatcgaggtgtgcatgtacagagagcccagcctgcacgagatcggcgagaagcagggcagaagcagaaagagcagcggcacccccaccatgaacggcggcaaggtggtgaaccaggacagcacctag

SEQ ID NO: 143592 - DNA, 324 bp, Artificial Sequence
  derived and/or modified sequence
atggagagcaaggagccccagctgaagggcatcgtgaccagactgttcagccagcagggctacttcctgcagatgcaccccgacggcaccatcgacggcaccaaggacgagaacagcgactacaccctgttcaacctgatccccgtgggcctgagagtggtggccatccagggcgtgaaggccagcctgtacgtggccatgaacggcgagggctacctgtacagcagcgacgtgttcacccccgagtgcaagttcaaggagagcgtgttcgagaactactacgtgatctacagcagcaccctgtacagacagcaggagagctag

SEQ ID NO: 143593 - DNA, 546 bp, Artificial Sequence
  derived and/or modified sequence
atggaaagcaaggagccgcagctgaaaggaatcgtcacgcgtttgttcagtcagcagggatatttcttacagatgcatccggatggcaccatcgacggcactaaggacgagaattccgactatacactgttcaatctgatcccagtaggcctgagagtggttgccatccagggcgttaaagcttccctctacgtggcaatgaacggtgaagggtatctctattccagtgacgtgttcacacccgaatgcaagttcaaggaaagcgtctttgagaattactacgtcatctactctagcactctttaccgacagcaggagtctggcagagcgtggttccttggcctgaataaggaagggcagattatgaaggggaacagagtaaaaaaaacgaagcccagctcccatttcgtccctaaacctatcgaagtatgcatgtatagagagccctccctccatgaaataggagaaaagcagggaagaagccgaaagagttcgggaactccgactatgaacgggggcaaagtcgtcaaccaggactcaacttag

SEQ ID NO: 143594 - DNA, 546 bp, Artificial Sequence
  derived and/or modified sequence
atggagaagacggagcctcagctgaagggcatagtgactcggcttttctcacagcagggctacttcctgcaaatgcatccagatgggaccatcgatgggactaaggacgaaaacagtgattacaccttgttcaatctgattcctgtaggtctgcgtgtggtcgctatccagggcgtaaaagcgagtctctatgtggccatgaacggcgagggatatctgtattctagtgacgtgtttacccctgagtgcaaatttaaggaatccgtctttgaaaactactatgtaatctattctagcaccctgtataggcagcaggaatccggccgcgcctggtttctgggactgaacaaggagggacagataatgaagggcaatcgtgtgaaaaagacaaaaccaagtagtcactttgttcctaaacccatcgaggtgtgcatgtatcgcgaacctagcttgcatgagataggcgaaaaacagggccggtcccggaagtcgagcggtaccccgacgatgaatggggggaaggtggtgaaccaggatagtacttag

SEQ ID NO: 143595 - DNA, 324 bp, Artificial Sequence
  derived and/or modified sequence
atggaatcaaaagaaccacagttaaaaggtatcgtcaccaggctctttagccagcagggctactttctgcaaatgcaccccgatggaactatcgacggtactaaagatgagaactctgattacaccttatttaacctgattcctgtgggactacgggtggtggctatccagggagttaaggcatcgctctacgtggcaatgaatggtgaaggctacctgtactcttcagacgtctttacccccgaatgcaagtttaaggagagcgtcttcgagaattactacgtcatctacagctcaaccctgtataggcaacaggaatcctag

SEQ ID NO: 143596 - DNA, 546 bp, Artificial Sequence
  derived and/or modified sequence
atggaatcaaaagagccccagctgaagggtatcgttacaagactgtttagtcagcaggggtatttcctgcaaatgcatccagacgggaccatcgacggcactaaggatgagaacagcgattatacgttgttcaacctgataccagtaggactgagagtcgtcgcaatccagggagtaaaagcgtccctgtacgtggctatgaatggtgaagggtatctctacagctccgacgtttttacacccgaatgcaagtttaaggaatcagtttttgagaattactacgtaatctatagcagcactctctacaggcagcaggaatccggtagggcctggtttctcgggttaaataaggagggtcagattatgaagggcaaccgcgttaagaaaactaagccttcgtcccacttcgtcccaaaaccaatcgaggtatgcatgtatagggagccgtccttgcatgagatcggagaaaagcagggacgttctcgtaaaagctcgggtacgcccactatgaatggcgggaaggtcgtgaatcaggattcaacatag

SEQ ID NO: 143597 - DNA, 546 bp, Artificial Sequence
  derived and/or modified sequence
atggagtccaaagagccgcagctgaagggcatcgtgactcgcttgttttcgcagcaagggtatttcctgcagatgcaccccgacgggaccatcgatggcactaaagatgaaaactctgactacaccctcttcaacttgatcccagtcggactcagggtagtcgcaatccagggagttaaggcttcactatatgttgctatgaatggggaggggtacctctacagcagcgatgtattcacaccagagtgtaagttcaaggagagcgtgttcgagaattactacgtgatctactccagcaccctttacaggcagcaagagtctggacgagcctggttcctggggttgaataaggaggggcagattatgaagggtaatagggtgaagaagacgaaacccagctcccacttcgtgcctaagccgatcgaagtctgcatgtatcgggagccgtctttgcatgagatcggggagaaacagggccgctctcggaaatcatctggcactcctacaatgaatggaggcaaagtagtaaaccaagacagtacatag

SEQ ID NO: 143598 - DNA, 546 bp, Artificial Sequence
  derived and/or modified sequence
atggagagcaaggagccccagctgaagggcatcgtgaccaggctcttcagccagcagggctacttcctgcagatgcacccagatggcaccattgatggcaccaaggatgaaaattctgactacaccctcttcaacctgatccctgtgggcctgcgggtggtggccatccagggcgtgaaggccagcctgtatgtggccatgaatggagagggctacctgtacagcagtgatgtgttcaccccagagtgcaagttcaaggagagcgtgtttgagaactactacgtgatctacagcagcaccctgtaccggcagcaggagagcggccgggcctggttcctgggcctgaacaaggagggccagatcatgaagggcaacagagtgaagaagaccaagcccagcagccactttgtgcccaagcccatcgaggtgtgcatgtaccgggagcccagcctgcacgagatcggggagaagcagggccgcagcaggaagagcagcggcacccccaccatgaatggaggcaaggtggtgaaccaggacagcacctag

SEQ ID NO: 143599 - DNA, 546 bp, Artificial Sequence
  derived and/or modified sequence
atggagaagacagagccccagctgaagggcatcgtgaccaggctcttcagccagcagggctacttcctgcagatgcacccagatggcaccattgatggcaccaaggatgaaaattctgactacaccctcttcaacctgatccctgtgggcctgcgggtggtggccatccagggcgtgaaggccagcctgtatgtggccatgaatggagagggctacctgtacagcagtgatgtgttcaccccagagtgcaagttcaaggagagcgtgtttgagaactactacgtgatctacagcagcaccctgtaccggcagcaggagagcggccgggcctggttcctgggcctgaacaaggagggccagatcatgaagggcaacagagtgaagaagaccaagcccagcagccactttgtgcccaagcccatcgaggtgtgcatgtaccgggagcccagcctgcacgagatcggggagaagcagggccgcagcaggaagagcagcggcacccccaccatgaatggaggcaaggtggtgaaccaggacagcacctag

SEQ ID NO: 143600 - DNA, 324 bp, Artificial Sequence
  derived and/or modified sequence
atggagagcaaggagccccagctgaagggcatcgtgaccaggctcttcagccagcagggctacttcctgcagatgcacccagatggcaccattgatggcaccaaggatgaaaattctgactacaccctcttcaacctgatccctgtgggcctgcgggtggtggccatccagggcgtgaaggccagcctgtatgtggccatgaatggagagggctacctgtacagcagtgatgtgttcaccccagagtgcaagttcaaggagagcgtgtttgagaactactacgtgatctacagcagcaccctgtaccggcagcaggagagctag

SEQ ID NO: 143601 - DNA, 546 bp, Artificial Sequence
  derived and/or modified sequence
atggagagcaaggagccccagctgaagggcatcgtgacccggctgttctcacagcagggttatttccttcaaatgcaccctgatggtactattgacgggaccaaagacgaaaactccgattacaccctattcaatctcattcccgtcggacttcgcgttgtggctattcaaggggtgaaggcctccctttatgtggccatgaatggagagggatacctttactcttcagatgtcttcacacccgagtgcaagtttaaggagtctgtgtttgaaaactattatgtgatatatagcagtaccctatacagacagcaggagtccggacgtgcatggttccttggactgaacaaagagggccaaatcatgaaaggcaatagagttaagaagacaaaaccaagcagccattttgtgccaaagcccatcgaggtgtgcatgtatcgcgaaccaagcctgcacgaaataggggaaaagcagggaaggagcaggaaatcctccggtacaccaactatgaatggtggcaaggtcgtgaatcaggactccacctag

SEQ ID NO: 143602 - DNA, 546 bp, Artificial Sequence
  derived and/or modified sequence
atggagaagaccgagccccagctgaagggcatcgtgacccggctgttcagccaacagggttatttcctgcagatgcatccagatggcaccatagatggcaccaaggatgaaaactcggactacacgctgttcaacctgattccagtcggcttgcgagtggtggccattcaaggtgtgaaggcctcactgtacgtcgcaatgaacggagaaggttacctctatagctccgatgtgttcacccccgagtgcaagttcaaggagagcgtctttgagaattattacgtgatttacagctccacactgtacagacaacaggagtccggaagagcctggttccttggcctgaataaagagggccagatcatgaaaggtaaccgggtgaaaaagacaaaaccaagcagccattttgtccctaaacctatagaggtgtgcatgtacagggagccgagtttgcacgagattggcgagaagcagggtaggagtaggaaatcatctggtacccctacaatgaacgggggaaaggtagtgaatcaagacagtacctag

SEQ ID NO: 143603 - DNA, 324 bp, Artificial Sequence
  derived and/or modified sequence
atggagagcaaggagccccagctgaagggcatcgtgacccggctgttctcccaacaggggtattttcttcagatgcaccctgacgggacaatcgacggcaccaaagacgagaatagtgactataccctttttaatctcattcctgtcgggctgcgagtggttgcgatccagggcgtgaaagccagtctctatgtggcaatgaacggagagggatacttgtactccagtgacgtgttcacccccgagtgtaagtttaaagaaagcgtgtttgagaactactatgtgatatatagctcaaccctctaccggcagcaggagagctag

SEQ ID NO: 143604 - DNA, 546 bp, Artificial Sequence
  derived and/or modified sequence
atggagagcaaggagccccagctgaagggcatcgtgacccggctgttttcccaacaaggctactttctgcaaatgcaccctgatgggactatcgacggaaccaaggatgagaatagcgactacaccctgtttaacttgatcccggttggcctaagggtggtggccattcagggcgtcaaagccagcctgtatgttgcaatgaacggggagggctatctgtactctagcgatgtctttacccccgaatgtaaattcaaggagtctgttttcgagaactactatgtaatctactcatccactctgtaccgacagcaggagtccggcagggcatggttccttgggctgaacaaggaaggacaaataatgaaaggaaaccgagttaaaaagaccaagccgtccagccactttgttcccaaacccatcgaggtgtgcatgtatcgagaaccttcactccacgagatcggcgagaaacagggccgcagccggaagtcctcgggcaccccgacgatgaacggtggaaaagtggtaaatcaagactccacatag

SEQ ID NO: 143605 - DNA, 546 bp, Artificial Sequence
  derived and/or modified sequence
atggagagcaaggagccccagctgaagggcatcgtgacccggctgttctctcagcagggatacttcctgcaaatgcacccagacggtacaattgatggcaccaaggacgaaaactcagactatacgctctttaatctcatccccgtcgggttgagagtcgtggctatccagggggtcaaggcttctttatacgtggcaatgaacggggaggggtatttgtattccagcgacgtttttaccccagagtgtaaattcaaggagtctgtgtttgagaattattacgtgatttactcctcgacactctacagacagcaggagtcaggcagggcatggtttctgggacttaataaggaggggcagatcatgaaggggaatagagtgaaaaagaccaaaccctcctctcactttgtccccaagcccatcgaggtgtgtatgtacagggaaccttcccttcatgaaatcggggagaaacagggtaggtctaggaaatctagtggaactcctactatgaatggtgggaaggtcgtgaaccaagacagtacctag

SEQ ID NO: 143606 - DNA, 546 bp, Artificial Sequence
  derived and/or modified sequence
atggagtctaaggagccccagcttaaaggaattgtgacgcgcctctttagtcagcaggggtattttctacaaatgcaccccgacggaacaatcgacggcactaaggacgagaatagcgattatactctgttcaaccttattcccgttggcctcagggtggtggcgattcagggtgttaaagctagtctttatgtggccatgaacggcgaggggtatttatattcatctgacgtcttcacccccgagtgtaaattcaaggagagcgtcttcgaaaattactatgtcatttatagctcaactctctatagacagcaggagagcgggagagcgtggttcctgggcttaaataaggaagggcagatcatgaagggcaatagagttaaaaagacaaaaccttcctctcactttgtgcccaagccaattgaggtctgcatgtatcgggaaccatcacttcacgagattggcgagaagcagggccgtagccgtaagagctccggcacacccactatgaacggaggcaaggtggtaaatcaggattcaacctag

SEQ ID NO: 143607 - DNA, 546 bp, Artificial Sequence
  derived and/or modified sequence
atggagaagactgaaccacagctaaagggcatcgtcactagactcttttctcagcaaggttactttctccagatgcaccctgatggcactatcgatggcaccaaagatgagaattcggactacaccctgttcaatctgatcccggtcggcctgagggtggttgctatacaaggggttaaagccagtctgtatgtggccatgaacggagaaggttatctatattcctcggacgtgtttacaccggagtgcaaatttaaggagagcgtatttgagaattactatgtaatctactcttccacattataccgccagcaggagagcggtagagcgtggtttctgggcctaaataaagaaggtcagatcatgaaaggaaaccgggtcaaaaaaactaagccctcctcccatttcgttcctaagcctattgaggtctgcatgtatcgcgagcccagcctgcatgagattggagaaaagcaggggagatctcgtaagagctctggaactcccaccatgaatggagggaaggtagtgaaccaagatagcacgtag

SEQ ID NO: 143608 - DNA, 324 bp, Artificial Sequence
  derived and/or modified sequence
atggaaagcaaggaacctcagctgaagggaattgtcactcgtttgttttcacagcagggctacttccttcagatgcaccccgacggcactatcgacggaaccaaggatgagaattctgactatactctgttcaaccttatccccgtggggctgcgggtcgttgccatacaaggcgtgaaagcgtccctgtatgtggccatgaacggggagggctatttgtactcatccgacgtgttcacacctgaatgcaaatttaaagagtccgtattcgagaactactatgtgatttactcctccacactttatcgacaacaggagtcatag

SEQ ID NO: 143609 - DNA, 546 bp, Artificial Sequence
  derived and/or modified sequence
atggagtccaaggagccacagctgaagggtatcgtgactcggctgttttcacagcaagggtacttcctgcagatgcaccccgacggaacaatcgatggcacaaaagacgaaaacagtgattataccctgtttaacctgatccccgtgggacttcgggtggttgcaatacagggagtgaaggcttccttgtacgtcgccatgaacggcgagggatacttgtacagctctgatgtttttactcctgagtgcaaatttaaggagtccgttttcgagaactactacgtcatttacagctccacgctctacaggcaacaggaatcgggcagggcatggttcctggggctcaataaagaggggcagatcatgaaggggaacagagtcaaaaaaacaaagccttccagtcacttcgtccctaagcccattgaggtgtgtatgtaccgggaaccatctctgcacgagatcggggaaaaacagggccgaagtcgcaaaagtagcggaactcctactatgaacgggggaaaagtggttaatcaggactccacctag

SEQ ID NO: 143610 - DNA, 546 bp, Artificial Sequence
  derived and/or modified sequence
atggagtcgaaagaaccacaactcaaaggtatcgtgactcgcttgttctcacagcagggttacttcctgcagatgcaccctgatggcaccattgatggtaccaaggatgaaaattcggattataccctgttcaacctgatccctgtaggtttgcgggtagtggcgattcagggtgttaaagcaagcctctatgtggctatgaacggggaggggtatctttattcttccgatgtgttcactcctgaatgcaaatttaaggaatctgtcttcgaaaattactacgttatatactccagcacactgtaccggcagcaggagagcgggcgtgcatggtttctggggctcaataaagagggacagattatgaaaggaaatagagtgaaaaaaactaaaccaagttctcattttgtccctaaaccaattgaagtgtgtatgtaccgggagccctccctgcatgagataggcgagaagcagggcaggagccggaaaagcagtggaacacccaccatgaacggaggaaaagtcgtgaatcaggacagtacttag

SEQ ID NO: 143611 - DNA, 2660 bp, Artificial Sequence
  derived and/or modified sequence
atggagagcaaagaaccccagctcaaagggattgtgacaaggttattcagccagcagggatacttcctgcagatgcacccagatggtaccattgatgggaccaaggacgaaaacagcgactacactctcttcaatctaattcccgtgggcctgcgtgtagtggccatccaaggagtgaaggctagcctctatgtggccatgaatggtgaaggctatctctacagttcagatgttttcactccagaatgcaaattcaaggaatctgtgtttgaaaactactatgtgatctattcttccacactgtaccgccagcaagaatcaggccgagcttggtttctgggactcaataaagaaggtcaaattatgaaggggaacagagtgaagaaaaccaagccctcatcacattttgtaccgaaacctattgaagtgtgtatgtacagagaaccatcgctacatgaaattggagaaaaacaagggcgttcaaggaaaagttctggaacaccaaccatgaatggaggcaaagttgtgaatcaagattcaacatagctgagaactctccccttcttccctctctcatcccttccccttcccttccttcccatttacccatttccttccagtaaatccacccaaggagaggaaaataaaatgacaacgcaagacctagtggctaagattctgcactcaaaatcttcctttgtgtaggacaagaaaattgaaccaaagcttgcttgttgcaatgtggtagaaaattcacgtgcacaaagattagcacacttaaaagcaaaggaaaaaataaatcagaactccataaatattaaattaaactgtattgttattagtagaaggctaattgtaatgaagacattaataaagatgaaataaacttattactttaaaggaaaggatttggagaattgaactcacaaactgatgttatatactcaatagcttaaactcatgataatgctgcgatgtgtggttttgcttgattttgtattttatttgggcatctggaattgacacaccattacattctgtttgcaggattttttttgtaaccatgaaattgaacatttccaaattataaactatgttaatacctataaaatatatagccaggaaccatttatcatcaagaaaagtgtaagaaattatttttgagatgtaatttaagattgttttatgtaaaaggaaaatcttgtatggcatcgaatagccttaatgagtttaattctttcacaaaaatgatttcaaattatcctagagtataacatttttatcaaagatattatttccggagttcttctttctttcttttttttttttttttagtaatttagcaaaaacattactgttctaatgctgaagtgacttttgccagtgccatgtccaggtggtgaggtataagttacttgctcttagcatttggtctgatttttttgctttgtggacacctttgagagtatccacaaagcaatgtctcaggtgtggacacctgagagcatgttttagaaagctttgtaccctgtcttgtggcaggaaagaaagaacaggggttttacataaggaaataagtcctaggaaattagtcaacgcaaattgcatttgcgtttgtaccttaccacagtcttatattgttttttaaactctgccatgaaatttggagacatgactgtgaaattcctaacttactatcttacaaagccagtagctaatttgttgctctatgtatgatcctgttacaagtccagtttgcaattcatttgtttcctagaacacagaagggtaccagtaatacactaaattttcaaggtgtgtagagaaataatatggaattagcagctatgactccaacagacaggattgtgtgagcagctgaaaggagcaaaaaagaactcagtgtaagagaaggcacatacatagttaagaatactaaagtatttttaaaaatcaaggaagaaataaatgttacacaatttgcattggaataaatagatctatttagtcctacaaatcaggagtggtgtagagacatccaaatttaaagaaaaaaaaacacaaaacagaatgttaaaaaatgtatgcagatttatggatattatcaatgagaagacatagcatgtaacttctcctatatctctactgtccagcatgtattgttccaaatatgactccctaaaatatatacactttgcagaagctctaggccctcacctcaaaccttgccattggttgccgtatttcaaggtcaatatagtttccctcactttacacaatcattattcttcaatagtggaccatatccttcaccaggtatcctatttctgttatctagaggttagcagaaaatgaaatgaaggaatttccctaagcagttgggaagaacaaattgtatgcatgtaggcaaagattttgaagatacatttgcaagagatatttgtttaaccaaaatatttggaaagtaacaaataaagacatttaaattttctaaaaatggacttgctcttctaggaaaagaatacccctggggcaaaaatataactctagctgtatttcttcttgtcactcttgattcaacttgattataaatacacctgtcactaccagaaccaaaaaaaaaaagaaaaaaatcccaagcacaaagcttattttatttg

SEQ ID NO: 143612 - DNA, 2660 bp, Artificial Sequence
  derived and/or modified sequence
atggaaaaaacagaaccccagctcaaagggattgtgacaaggttattcagccagcagggatacttcctgcagatgcacccagatggtaccattgatgggaccaaggacgaaaacagcgactacactctcttcaatctaattcccgtgggcctgcgtgtagtggccatccaaggagtgaaggctagcctctatgtggccatgaatggtgaaggctatctctacagttcagatgttttcactccagaatgcaaattcaaggaatctgtgtttgaaaactactatgtgatctattcttccacactgtaccgccagcaagaatcaggccgagcttggtttctgggactcaataaagaaggtcaaattatgaaggggaacagagtgaagaaaaccaagccctcatcacattttgtaccgaaacctattgaagtgtgtatgtacagagaaccatcgctacatgaaattggagaaaaacaagggcgttcaaggaaaagttctggaacaccaaccatgaatggaggcaaagttgtgaatcaagattcaacatagctgagaactctccccttcttccctctctcatcccttccccttcccttccttcccatttacccatttccttccagtaaatccacccaaggagaggaaaataaaatgacaacgcaagacctagtggctaagattctgcactcaaaatcttcctttgtgtaggacaagaaaattgaaccaaagcttgcttgttgcaatgtggtagaaaattcacgtgcacaaagattagcacacttaaaagcaaaggaaaaaataaatcagaactccataaatattaaattaaactgtattgttattagtagaaggctaattgtaatgaagacattaataaagatgaaataaacttattactttaaaggaaaggatttggagaattgaactcacaaactgatgttatatactcaatagcttaaactcatgataatgctgcgatgtgtggttttgcttgattttgtattttatttgggcatctggaattgacacaccattacattctgtttgcaggattttttttgtaaccatgaaattgaacatttccaaattataaactatgttaatacctataaaatatatagccaggaaccatttatcatcaagaaaagtgtaagaaattatttttgagatgtaatttaagattgttttatgtaaaaggaaaatcttgtatggcatcgaatagccttaatgagtttaattctttcacaaaaatgatttcaaattatcctagagtataacatttttatcaaagatattatttccggagttcttctttctttcttttttttttttttttagtaatttagcaaaaacattactgttctaatgctgaagtgacttttgccagtgccatgtccaggtggtgaggtataagttacttgctcttagcatttggtctgatttttttgctttgtggacacctttgagagtatccacaaagcaatgtctcaggtgtggacacctgagagcatgttttagaaagctttgtaccctgtcttgtggcaggaaagaaagaacaggggttttacataaggaaataagtcctaggaaattagtcaacgcaaattgcatttgcgtttgtaccttaccacagtcttatattgttttttaaactctgccatgaaatttggagacatgactgtgaaattcctaacttactatcttacaaagccagtagctaatttgttgctctatgtatgatcctgttacaagtccagtttgcaattcatttgtttcctagaacacagaagggtaccagtaatacactaaattttcaaggtgtgtagagaaataatatggaattagcagctatgactccaacagacaggattgtgtgagcagctgaaaggagcaaaaaagaactcagtgtaagagaaggcacatacatagttaagaatactaaagtatttttaaaaatcaaggaagaaataaatgttacacaatttgcattggaataaatagatctatttagtcctacaaatcaggagtggtgtagagacatccaaatttaaagaaaaaaaaacacaaaacagaatgttaaaaaatgtatgcagatttatggatattatcaatgagaagacatagcatgtaacttctcctatatctctactgtccagcatgtattgttccaaatatgactccctaaaatatatacactttgcagaagctctaggccctcacctcaaaccttgccattggttgccgtatttcaaggtcaatatagtttccctcactttacacaatcattattcttcaatagtggaccatatccttcaccaggtatcctatttctgttatctagaggttagcagaaaatgaaatgaaggaatttccctaagcagttgggaagaacaaattgtatgcatgtaggcaaagattttgaagatacatttgcaagagatatttgtttaaccaaaatatttggaaagtaacaaataaagacatttaaattttctaaaaatggacttgctcttctaggaaaagaatacccctggggcaaaaatataactctagctgtatttcttcttgtcactcttgattcaacttgattataaatacacctgtcactaccagaaccaaaaaaaaaaagaaaaaaatcccaagcacaaagcttattttatttg

SEQ ID NO: 143613 - DNA, 653 bp, Artificial Sequence
  derived and/or modified sequence
cacgctcggaggacagctcctgcctgcagcttccagacccaggtaaaaaaaaaaaaaaaaaaatctgagcgggcactgtgcatgcatttcagtatcagatgcgcgtcgcaacgtatcccctgtagaggcaatctgctgctgctcctaagtgtcctttggtggctgattgcagcttcaaggtttaagaaatcccatctttcaggaagcctgaggggaaggaaggaagtacgggcgaaatcatcagattggcttcccagatttgggaatctgaagcgggcccacatcttccggccaacttccattgaacttcccagcactcgaaagggaccgaaatggagagcaaagaaccccagctcaaagggattgtgacaaggttattcagccagcagggatacttcctgcagatgcacccagatggtaccattgatgggaccaaggacgaaaacagcgactacactctcttcaatctaattcccgtgggcctgcgtgtagtggccatccaaggagtgaaggctagcctctatgtggccatgaatggtgaaggctatctctacagttcagatgttttcactccagaatgcaaattcaaggaatctgtgtttgaaaactactatgtgatctattcttccacactgtaccgccagcaagaatca

SEQ ID NO: 143614 - DNA, 2743 bp, Artificial Sequence
  derived and/or modified sequence
gtgccagcgcccatgcaaatctgctgtgcatccagagagcaaagtgggatgatctgtcactacacctgcagcaccacgctcggaggacagctcctgcctgcagcttccagacccaggaagcctgaggggaaggaaggaagtacgggcgaaatcatcagattggcttcccagatttgggaatctgaagcgggcccacatcttccggccaacttccattgaacttcccagcactcgaaagggaccgaaatggagagcaaagaaccccagctcaaagggattgtgacaaggttattcagccagcagggatacttcctgcagatgcacccagatggtaccattgatgggaccaaggacgaaaacagcgactacactctcttcaatctaattcccgtgggcctgcgtgtagtggccatccaaggagtgaaggctagcctctatgtggccatgaatggtgaaggctatctctacagttcagatgttttcactccagaatgcaaattcaaggaatctgtgtttgaaaactactatgtgatctattcttccacactgtaccgccagcaagaatcaggccgagcttggtttctgggactcaataaagaaggtcaaattatgaaggggaacagagtgaagaaaaccaagccctcatcacattttgtaccgaaacctattgaagtgtgtatgtacagagaaccatcgctacatgaaattggagaaaaacaagggcgttcaaggaaaagttctggaacaccaaccatgaatggaggcaaagttgtgaatcaagattcaacatagctgagaactctccccttcttccctctctcatcccttccccttcccttccttcccatttacccatttccttccagtaaatccacccaaggagaggaaaataaaatgacaacgcaagacctagtggctaagattctgcactcaaaatcttcctttgtgtaggacaagaaaattgaaccaaagcttgcttgttgcaatgtggtagaaaattcacgtgcacaaagattagcacacttaaaagcaaaggaaaaaataaatcagaactccataaatattaaattaaactgtattgttattagtagaaggctaattgtaatgaagacattaataaagatgaaataaacttattactttaaaggaaaggatttggagaattgaactcacaaactgatgttatatactcaatagcttaaactcatgataatgctgcgatgtgtggttttgcttgattttgtattttatttgggcatctggaattgacacaccattacattctgtttgcaggattttttttgtaaccatgaaattgaacatttccaaattataaactatgttaatacctataaaatatatagccaggaaccatttatcatcaagaaaagtgtaagaaattatttttgagatgtaatttaagattgttttatgtaaaaggaaaatcttgtatggcatcgaatagccttaatgagtttaattctttcacaaaaatgatttcaaattatcctagagtataacatttttatcaaagatattatttccggagttcttctttctttcttttttttttttttttagtaatttagcaaaaacattactgttctaatgctgaagtgacttttgccagtgccatgtccaggtggtgaggtataagttacttgctcttagcatttggtctgatttttttgctttgtggacacctttgagagtatccacaaagcaatgtctcaggtgtggacacctgagagcatgttttagaaagctttgtaccctgtcttgtggcaggaaagaaagaacaggggttttacataaggaaataagtcctaggaaattagtcaacgcaaattgcatttgcgtttgtaccttaccacagtcttatattgttttttaaactctgccatgaaatttggagacatgactgtgaaattcctaacttactatcttacaaagccagtagctaatttgttgctctatgtatgatcctgttacaagtccagtttgcaattcatttgtttcctagaacacagaagggtaccagtaatacactaaattttcaaggtgtgtagagaaataatatggaattagcagctatgactccaacagacaggattgtgtgagcagctgaaaggagcaaaaaagaactcagtgtaagagaaggcacatacatagttaagaatactaaagtatttttaaaaatcaaggaagaaataaatgttacacaatttgcattggaataaatagatctatttagtcctacaaatcaggagtggtgtagagacatccaaatttaaagaaaaaaaaacacaaaacagaatgttaaaaaatgtatgcagatttatggatattatcaatgagaagacatagcatgtaacttctcctatatctctactgtccagcatgtattgttccaaatatgactccctaaaatatatacactttgcagaagctctaggccctcacctcaaaccttgccattggttgccgtatttcaaggtcaatatagtttccctcactttacacaatcattattcttcaatagtggaccatatccttcaccaggtatcctatttctgttatctagaggttagcagaaaatgaaatgaaggaatttccctaagcagttgggaagaacaaattgtatgcatgtaggcaaagattttgaagatacatttgcaagagatatttgtttaaccaaaatatttggaaagtaacaaataaagacatttaaattttctaaaaa

SEQ ID NO: 143615 - DNA, 768 bp, Artificial Sequence
  derived and/or modified sequence
ttaaagcaggagccttgagagcctgataagctgttgacacaagtgcttttgagaatagcaggaagcctgaggggaaggaaggaagtacgggcgaaatcatcagattggcttcccagatttgggaatctgaagcgggcccacatcttccggccaacttccattgaacttcccagcactcgaaagggaccgaaatggagagcaaagaaccccagctcaaagggattgtgacaaggttattcagccagcagggatacttcctgcagatgcacccagatggtaccattgatgggaccaaggacgaaaacagcgactacactctcttcaatctaattcccgtgggcctgcgtgtagtggccatccaaggagtgaaggctagcctctatgtggccatgaatggtgaaggctatctctacagttcagatgttttcactccagaatgcaaattcaaggaatctgtgtttgaaaactactatgtgatctattcttccacactgtaccgccagcaagaatcaggccgagcttggtttctgggactcaataaagaaggtcaaattatgaaggggaacagagtgaagaaaaccaagccctcatcacattttgtaccgaaacctattgaagtgtgtatgtacagagaaccatcgctacatgaaattggagaaaaacaagggcgttcaaggaaaagttctggaacaccaaccatgaatggaggcaaagttgtgaatcaagattcaacatagctgagaactctccccttcttccctctctcat

SEQ ID NO: 143616 - DNA, 5408 bp, Artificial Sequence
  derived and/or modified sequence
gtgccagcgcccatgcaaatctgctgtgcatccagagagcaaagtgggatgatctgtcactacacctgcagcaccacgctcggaggacagctcctgcctgcagcttccagacccaggaagcctgaggggaaggaaggaagtacgggcgaaatcatcagattggcttcccagatttgggaatctgaagcgggcccacatcttccggccaacttccattgaacttcccagcactcgaaagggaccgaaatggagagcaaagaaccccagctcaaagggattgtgacaaggttattcagccagcagggatacttcctgcagatgcacccagatggtaccattgatgggaccaaggacgaaaacagcgactacactctcttcaatctaattcccgtgggcctgcgtgtagtggccatccaaggagtgaaggctagcctctatgtggccatgaatggtgaaggctatctctacagttcagatgttttcactccagaatgcaaattcaaggaatctgtgtttgaaaactactatgtgatctattcttccacactgtaccgccagcaagaatcaggccgagcttggtttctgggactcaataaagaaggtcaaattatgaaggggaacagagtgaagaaaaccaagccctcatcacattttgtaccgaaacctattgaagtgtgtatgtacagagaaccatcgctacatgaaattggagaaaaacaagggcgttcaaggaaaagttctggaacaccaaccatgaatggaggcaaagttgtgaatcaagattcaacatagctgagaactctccccttcttccctctctcatcccttccccttcccttccttcccatttacccatttccttccagtaaatccacccaaggagaggaaaataaaatgacaacgcaagacctagtggctaagattctgcactcaaaatcttcctttgtgtaggacaagaaaattgaaccaaagcttgcttgttgcaatgtggtagaaaattcacgtgcacaaagattagcacacttaaaagcaaaggaaaaaataaatcagaactccataaatattaaattaaactgtattgttattagtagaaggctaattgtaatgaagacattaataaagatgaaataaacttattactttaaaggaaaggatttggagaattgaactcacaaactgatgttatatactcaatagcttaaactcatgataatgctgcgatgtgtggttttgcttgattttgtattttatttgggcatctggaattgacacaccattacattctgtttgcaggattttttttgtaaccatgaaattgaacatttccaaattataaactatgttaatacctataaaatatatagccaggaaccatttatcatcaagaaaagtgtaagaaattatttttgagatgtaatttaagattgttttatgtaaaaggaaaatcttgtatggcatcgaatagccttaatgagtttaattctttcacaaaaatgatttcaaattatcctagagtataacatttttatcaaagatattatttccggagttcttctttctttcttttttttttttttttagtaatttagcaaaaacattactgttctaatgctgaagtgacttttgccagtgccatgtccaggtggtgaggtataagttacttgctcttagcatttggtctgatttttttgctttgtggacacctttgagagtatccacaaagcaatgtctcaggtgtggacacctgagagcatgttttagaaagctttgtaccctgtcttgtggcaggaaagaaagaacaggggttttacataaggaaataagtcctaggaaattagtcaacgcaaattgcatttgcgtttgtaccttaccacagtcttatattgttttttaaactctgccatgaaatttggagacatgactgtgaaattcctaacttactatcttacaaagccagtagctaatttgttgctctatgtatgatcctgttacaagtccagtttgcaattcatttgtttcctagaacacagaagggtaccagtaatacactaaattttcaaggtgtgtagagaaataatatggaattagcagctatgactccaacagacaggattgtgtgagcagctgaaaggagcaaaaaagaactcagtgtaagagaaggcacatacatagttaagaatactaaagtatttttaaaaatcaaggaagaaataaatgttacacaatttgcattggaataaatagatctatttagtcctacaaatcaggagtggtgtagagacatccaaatttaaagaaaaaaaaacacaaaacagaatgttaaaaaatgtatgcagatttatggatattatcaatgagaagacatagcatgtaacttctcctatatctctactgtccagcatgtattgttccaaatatgactccctaaaatatatacactttgcagaagctctaggccctcacctcaaaccttgccattggttgccgtatttcaaggtcaatatagtttccctcactttacacaatcattattcttcaatagtggaccatatccttcaccaggtatcctatttctgttatctagaggttagcagaaaatgaaatgaaggaatttccctaagcagttgggaagaacaaattgtatgcatgtaggcaaagattttgaagatacatttgcaagagatatttgtttaaccaaaatatttggaaagtaacaaataaagacatttaaattttctaaaaatggacttgctcttctaggaaaagaatacccctggggcaaaaatataactctagctgtatttcttcttgtcactcttgattcaacttgattataaatacacctgtcactaccagaaccaaaaaaaaaaagaaaaaaatcccaagcacaaagcttattttatttgaaaaaaataaaaaagaaacttcaacactatgggacactggctcttttagcatgaaatgacttgagcttttgtagtgatgatacacatacacactcatcagtaaaacgatggtttcataaataacacaattgatgcaaatcataaaaatcaattacaattatgatttcatgacaaaatatatttaattaagtttgttatgaaaaaaatagagatatgaatcactaacaaaattcctccattttcagtggctattcatcatttatcatctagactcacatttgtctccttcctgatagcagttaagaaaaaattctaaccacacaatttgtatattgtttttctccgtattatgttaagcaaatgttcactgcagtaaaatgttttggaaattagctttgtcttatttccagtttagttcagagaattaattggaaacctgatttcttttacacataaacctgacaaaaaatgtagcttagagcaaagggtgaatgtttgcttaactcctgcttacttctcaagtacatgaaaactttaatagaatatgccagtattcactgagtttttaaaaatattaccatgtgtaaacatataatatccaacttcatccaaaaatatggttgagtttaagtactttgtttttcaggcttatttcaagtataataattctttgattttcattgttctgatttctgggtcttcaattcattcgtcacttttcctttttaagtaaaataagcttttttttttttttttttttttttttggagttgcattgggatttttcccaggaaaaaatatggcttttagtaatgctttgcaattggctacgcagatataaattaagatatgtttattctgagttcttattggaataagtttcaaaatcaacgagcttaagaatgaaaacaaaacttttgagagtctcacaaaatagctttctggtcaatacaccttacttgatttttaagctcgcagaataaagtatagaaacaaatggagctgaagttccatttgctaattcagagacttttgtgcttccgcaaattggagggcagcaagccatcctattctcatagtaatcgttttggctttgaaatttacatacaatttaatagcacatttttagccattatggattggcgcaataaagagatatcaatgtaatgcaatgtgatgctttatgggcctcattctaattcagaaagcttgtttaaaagaactaagactcttctgtttaataaaatagcaacaatctaatatctagattggtagtcctgcggtgccactagtgggagatgagagtattaagacaagagtaaggacaaggaaagacttaaaggttgcatattgaaaagtttggaattcctaatttgggagcactgatttcttggtgaagaagtaagtatgactacgttgccagtaattttttaaaaacatagacccagaaatagcaaatcgatttcaccctcataccttagtctacaaggccttgctcttgagaaggttttccatgatattgcttaatttcatctgcacaagatgagacacaaacataaaaattccctgctcattttaataccataaaaggctgaggttatttctctgtcataaaattgtaaatagcattttttaagtcaaaattacatttaaaacagtggattgttctacaaatatatatgtgtatatatacatatgcttctgaaataaggatatattatatgagtttttatttgatttgtggtctttagtcataggtaatcaaaaataaagagatttgaatgcaaaactttatacattaatgtacatttctaatgatggtacaaattgccactttataataaaaaagaaacaggtgggaataataatcaaagcacgtgttccttcagtactttggtgatttttaatcccccttgtgatgcacaggaaattattttttagttacaaaaagttatcttagaaatctatacttcccaatacagatttcatgttaagtcatatcaaattgagaatttgtggtgaaagaataggaaaaggatgctagatgctgatctttctttttcaggatttttcctggagcccaagttaaaaattcaatacttaaatctaagttaagtgaaaattaataatgttcagaatgatgtattgagctttagtaacagacggaagcaaaaaaaaataagaatatttaacattatgataatagccttaaaataatgtaataaaaattgcatcattaaatgttctattagttggaaagaatgagctgatgtttctttgtctttgctccaagtacaatttaaagacagtgacattcattttacttaaaattgttcaaaaagtccaaaacatactcccatggctagaattggtattagctccaatacaaggttaaatgttacaatcttaagaaattattgacactgaaatgtttagtaaacatgttgtatgagaaactaaacaaattaatgtttcatttttccattaaagcacagattattc

SEQ ID NO: 143617 - protein, 245 aa, Artificial Sequence
  derived and/or modified sequence
MAAAIASSLIRQKRQAREREKSNACKCVSSPSKGKTSCDKNKLNVFSRVKLFGSKKRRRRRPEPQLKGIVTKLYSRQGYHLQLQADGTIDGTKDEDSTYTLFNLIPVGLRVVAIQGVQTKLYLAMNSEGYLYTSELFTPECKFKESVFENYYVTYSSMIYRQQQSGRGWYLGLNKEGEIMKGNHVKKNKPAAHFLPKPLKVAMYKEPSLHDLTEFSRSGSGTPTKSRSVSGVLNGGKSMSHNEST

SEQ ID NO: 143618 - DNA, 738 bp, Artificial Sequence
  derived and/or modified sequence
atggccgccgccatcgccagcagcctgatcagacagaagagacaggccagagagagagagaagagcaacgcctgcaagtgcgtgagcagccccagcaagggcaagaccagctgcgacaagaacaagctgaacgtgttcagcagagtgaagctgttcggcagcaagaagagaagaagaagaagacccgagccccagctgaagggcatcgtgaccaagctgtacagcagacagggctaccacctgcagctgcaggccgacggcaccatcgacggcaccaaggacgaggacagcacctacaccctgttcaacctgatccccgtgggcctgagagtggtggccatccagggcgtgcagaccaagctgtacctggccatgaacagcgagggctacctgtacaccagcgagctgttcacccccgagtgcaagttcaaggagagcgtgttcgagaactactacgtgacctacagcagcatgatctacagacagcagcagagcggcagaggctggtacctgggcctgaacaaggagggcgagatcatgaagggcaaccacgtgaagaagaacaagcccgccgcccacttcctgcccaagcccctgaaggtggccatgtacaaggagcccagcctgcacgacctgaccgagttcagcagaagcggcagcggcacccccaccaagagcagaagcgtgagcggcgtgctgaacggcggcaagagcatgagccacaacgagagcacctag

SEQ ID NO: 143619 - DNA, 738 bp, Artificial Sequence
  derived and/or modified sequence
atggctgctgccattgcaagctctctgattagacagaaacggcaagctcgagagagagaaaaatctaacgcctgtaagtgtgtttctagccccagtaagggcaaaacctcatgcgataaaaataagttgaatgtgttcagtcgcgtcaagttgttcggcagcaagaagaggaggcgccggcgccccgaaccacagctaaagggcattgtgaccaaactatactcacggcagggctatcatcttcagttgcaggccgacggcaccatcgacgggacgaaagacgaggactccacctatactctctttaacctgatccctgtgggtttgcgcgtggttgctatccaaggcgtgcagactaagctgtacctggccatgaacagtgaaggctatctgtatacttcagagctgttcacacccgaatgtaagtttaaggagagtgtatttgagaattattacgtgacatattcatccatgatctatcgccagcagcagtccggtcgggggtggtatctcggacttaataaagagggggagattatgaaaggaaatcacgtgaaaaagaataagccagctgctcacttcctacccaaacccctgaaagtggccatgtataaggagccaagcctgcacgatttaaccgaattctctaggtctgggtccgggactcctaccaagagtaggtccgtgtcaggcgtcctcaatggaggcaagagtatgagtcataatgaatctacatag

SEQ ID NO: 143620 - DNA, 738 bp, Artificial Sequence
  derived and/or modified sequence
atggctgctgccatcgccagcagcctcatccggcagaagaggcaggcccgggagcgggagaagagcaatgcctgcaagtgtgtgagcagccccagcaagggcaagaccagctgtgacaagaacaagctgaatgtgttcagccgggtgaagctgtttggcagcaagaagagaagaagaagaagacctgagccccagctgaagggcatcgtgaccaagctgtacagccggcagggctaccacctgcagctgcaggctgatggcaccattgatggcaccaaggatgaggacagcacctacaccctcttcaacctgatccctgtgggcctgcgggtggtggccatccagggcgtgcagaccaagctgtacctggccatgaacagcgagggctacctgtacaccagcgagctgttcaccccagagtgcaagttcaaggagagcgtgtttgagaactactacgtgacctacagctccatgatctaccggcagcagcagagcggccggggctggtacctgggcctgaacaaggagggggagatcatgaagggcaaccacgtgaagaagaacaagccagctgcccacttcctgcccaagcccctgaaggtggccatgtacaaggagcccagcctgcatgacctgacagagttcagccgcagcggcagcggcacccccaccaagagccgctctgtgtctggagtgctgaatggaggcaagtccatgagccacaatgaaagcacctag

SEQ ID NO: 143621 - DNA, 738 bp, Artificial Sequence
  derived and/or modified sequence
atggccgccgccatcgccagcagcctgatccggcagaagcggcaggcgcgagaaagggagaaatccaatgcctgcaagtgcgtctcctctccgagcaaagggaagacctcgtgcgacaagaacaaactgaatgtgttttctcgggtgaaactcttcggatccaagaaaagaaggcggaggaggcctgaaccccagcttaaagggatagttactaagctttattctaggcagggttaccatttgcagttacaggctgacggtaccatcgacggaacgaaggatgaagactcaacttatacgctcttcaacctcatacctgtgggcttgcgcgtggtggccatacagggagttcagacaaaactgtacctggccatgaattccgagggttacctctacacctcagagctgttcacgccagagtgcaaatttaaggaatctgtttttgagaactactacgttacctattcttctatgatctataggcagcaacagagtggtcgtgggtggtacctaggactgaataaagagggcgagatcatgaaaggcaaccatgtgaaaaaaaacaagcccgcagcccactttctccccaaacccctgaaagtcgccatgtacaaggagccttccctccatgatctgactgaattcagtcggagtggttcaggaactcctacaaaaagccgctcagtgtccggcgtacttaacggaggcaaatctatgagccataacgaaagtacctag

SEQ ID NO: 143622 - DNA, 738 bp, Artificial Sequence
  derived and/or modified sequence
atggcagctgccatcgcctcctctttgatcaggcagaagcggcaggccagggaacgggaaaagtcgaacgcatgcaaatgtgtgagtagtccttccaaggggaagacctcctgcgataaaaataagctgaacgtcttcagccgcgtcaagcttttcggcagtaagaagaggcgcaggcggcgaccagagccccagctgaaaggcatcgtgacgaaactgtattctcgccagggatatcatttgcagttgcaggccgatgggactattgatggcaccaaggacgaggatagcacatacacgctatttaacctcatccctgtcgggctgagagtcgtggccatccagggcgtgcagaccaaactgtacctggcaatgaactccgagggttatctgtacacaagtgaactgtttaccccagagtgcaaatttaaagaatcagtgtttgagaattattacgtaacttactcttcaatgatttaccgacaacaacagtcagggagaggatggtatctaggtcttaacaaagaaggagaaattatgaaggggaatcacgtgaagaagaataaaccagccgcacacttcctgccaaaaccattgaaggtcgccatgtacaaagaacctagtctccacgacctgactgagtttagcagaagcggtagcgggacacccacgaagagccgctccgtatccggggtcctgaacggcggtaagagtatgagccacaatgaaagtacatag

SEQ ID NO: 143623 - DNA, 2676 bp, Artificial Sequence
  derived and/or modified sequence
gtgccgcgcccagagcagcagcaacagcgaagatgcgaggccattacctgtttgatccctgtcggaaacctggcacgggccaacttttcccgattatcacgccaagaagttgcaaggactagtcgaagactcggaggggccagggcgagggcgcgctcccccgcgcgctgcctcgtccctcctccgtccggccgcccgagctcccggcctctctcccgcccgcgctcactccctccgcccgcctccctcctctggcccccatcagaagggcaacagggcgagggggtccggcgaaattcggaccggagcagctggacatgcacggtgtccgccgggcgcaggggccgaccacacgcagtcgcgcagttcagcatccgcgtgccagtctcgcccgcgatcccgggcccggggctgtggcgtcgactccgacccaggcagccagcagcccgcgcgggagccggaccgccgccggaggagctcggacggcatgctgagccccctccttggctgaagcccgagtgcggagaagcccgggcaaacgcaggctaaggagaccaaagcggcgaagtcgcgagacagcggacaagcagcggaggagaaggaggaggaggcgaacccagagaggggcagcaaaagaagcggtggtggtgggcgtcgtggccatggcggcggctatcgccagctcgctcatccgtcagaagaggcaagcccgcgagcgcgagaaatccaacgcctgcaagtgtgtcagcagccccagcaaaggcaagaccagctgcgacaaaaacaagttaaatgtcttttcccgggtcaaactcttcggctccaagaagaggcgcagaagaagaccagagcctcagcttaagggtatagttaccaagctatacagccgacaaggctaccacttgcagctgcaggcggatggaaccattgatggcaccaaagatgaggacagcacttacactctgtttaacctcatccctgtgggtctgcgagtggtggctatccaaggagttcaaaccaagctgtacttggcaatgaacagtgagggatacttgtacacctcggaacttttcacacctgagtgcaaattcaaagaatcagtgtttgaaaattattatgtgacatattcatcaatgatataccgtcagcagcagtcaggccgagggtggtatctgggtctgaacaaagaaggagagatcatgaaaggcaaccatgtgaagaagaacaagcctgcagctcattttctgcctaaaccactgaaagtggccatgtacaaggagccatcactgcacgatctcacggagttctcccgatctggaagcgggaccccaaccaagagcagaagtgtctctggcgtgctgaacggaggcaaatccatgagccacaatgaatcaacgtagccagtgagggcaaaagaagggctctgtaacagaaccttacctccaggtgctgttgaattcttctagcagtccttcacccaaaagttcaaatttgtcagtgacatttaccaaacaaacaggcagagttcactattctatctgccattagaccttcttatcatccatactaaagccccattatttagattgagcttgtgcataagaatgccaagcattttagtgaactaaatctgagagaaggactgccaaattttctcatgatctcacctatactttggggatgataatccaaaagtatttcacagcactaatgctgatcaaaatttgctctcccaccaagaaaatgtaaaagaccacaattgttcttcaaaaacaaacaaaacaaaacaaaacaaaattaactgcttaaatgttttgtcggggcaaacaaaattatgtgaattgtgttgttttcttggcttgatgttttctatctacgcttgattcacatgtactcttttctttggcatagtgcaactttatgatttctgaaattcaatggttctattgactttttgcgtcacttaatccaaatcaaccaaattcagggttgaatctgaattggcttctcaggctcaaggtaacagtgttcttgtggtttgaccaattgtttttctttctttttttttttttttagatttgtggtattctggtcaagttattgtgctgtactttgtgcgtagaaattgagttgtattgtcaaccccagtcagtaaagagaacttcaaaaaattatcctcaagtgtagatttctcttaattccatttgtgtatcatgttaaactattgttgtggcttcttgtgtaaagacaggaactgtggaactgtgatgttgtcttttgtgttgttaaaataagaaatgtcttatctgtatatgtatgagtcttcctgtcattgtatttggcacatgaatattgtgtacaaggaattgttaagactggttttccctcaacaacatatattatacttgctactggaaaagtgtttaagacttagctaggtttccatttagatcttcatatctgttgcatggaagaaagttgggttcttggcatagagttgcatgatatgtaagattttgtgcattcataattgttaaaaatctgtgttccaaaagtggacatagcatgtacaggcagttttctgtcctgtgcacaaaaagtttaaaaaagttgtttaatatttgttgttgtatacccaaatacgcaccgaataaactctttatattcattcaaaga

SEQ ID NO: 143624 - DNA, 2705 bp, Artificial Sequence
  derived and/or modified sequence
gtgccgcgcccagagcagcagcaacagcgaagatgcgaggccattacctgtttgatccctgtcggaaacctggcacgggccaacttttcccgattatcacgccaagaagttgcaaggactagtcgaagactcggaggggccagggcgagggcgcgctcccccgcgcgctgcctcgtccctcctccgtccggccgcccgagctcccggcctctctcccgcccgcgctcactccctccgcccgcctccctcctctggcccccatcagaagggcaacagggcgagggggtccggcgaaattcggaccggagcagctggacatgcacggtgtccgccgggcgcaggggccgaccacacgcagtcgcgcagttcagcatccgcgtgccagtctcgcccgcgatcccgggcccggggctgtggcgtcgactccgacccaggcagccagcagcccgcgcgggagccggaccgccgccggaggagctcggacggcatgctgagccccctccttggctgaagcccgagtgcggagaagcccgggcaaacgcaggctaaggagaccaaagcggcgaagtcgcgagacagcggacaagcagcggaggagaaggaggaggaggcgaacccagagaggggcagcaaaagaagcggtggtggtgggcgtcgtggccatggcggcggctatcgccagctcgctcatccgtcagaagaggcaagcccgcgagcgcgagaaatccaacgcctgcaagtgtgtcagcagccccagcaaaggcaagaccagctgcgacaaaaacaagttaaatgtcttttcccgggtcaaactcttcggctccaagaagaggcgcagaagaagaccagagcctcagcttaagggtatagttaccaagctatacagccgacaaggctaccacttgcagctgcaggcggatggaaccattgatggcaccaaagatgaggacagcacttacactctgtttaacctcatccctgtgggtctgcgagtggtggctatccaaggagttcaaaccaagctgtacttggcaatgaacagtgagggatacttgtacacctcggaacttttcacacctgagtgcaaattcaaagaatcagtgtttgaaaattattatgtgacatattcatcaatgatataccgtcagcagcagtcaggccgagggtggtatctgggtctgaacaaagaaggagagatcatgaaaggcaaccatgtgaagaagaacaagcctgcagctcattttctgcctaaaccactgaaagtggccatgtacaaggagccatcactgcacgatctcacggagttctcccgatctggaagcgggaccccaaccaagagcagaagtgtctctggcgtgctgaacggaggcaaatccatgagccacaatgaatcaacgtagccagtgagggcaaaagaagggctctgtaacagaaccttacctccaggtgctgttgaattcttctagcagtccttcacccaaaagttcaaatttgtcagtgacatttaccaaacaaacaggcagagttcactattctatctgccattagaccttcttatcatccatactaaagccccattatttagattgagcttgtgcataagaatgccaagcattttagtgaactaaatctgagagaaggactgccaaattttctcatgatctcacctatactttggggatgataatccaaaagtatttcacagcactaatgctgatcaaaatttgctctcccaccaagaaaatgtaaaagaccacaattgttcttcaaaaacaaacaaaacaaaacaaaacaaaattaactgcttaaatgttttgtcggggcaaacaaaattatgtgaattgtgttgttttcttggcttgatgttttctatctacgcttgattcacatgtactcttttctttggcatagtgcaactttatgatttctgaaattcaatggttctattgactttttgcgtcacttaatccaaatcaaccaaattcagggttgaatctgaattggcttctcaggctcaaggtaacagtgttcttgtggtttgaccaattgtttttctttctttttttttttttttagatttgtggtattctggtcaagttattgtgctgtactttgtgcgtagaaattgagttgtattgtcaaccccagtcagtaaagagaacttcaaaaaattatcctcaagtgtagatttctcttaattccatttgtgtatcatgttaaactattgttgtggcttcttgtgtaaagacaggaactgtggaactgtgatgttgtcttttgtgttgttaaaataagaaatgtcttatctgtatatgtatgagtcttcctgtcattgtatttggcacatgaatattgtgtacaaggaattgttaagactggttttccctcaacaacatatattatacttgctactggaaaagtgtttaagacttagctaggtttccatttagatcttcatatctgttgcatggaagaaagttgggttcttggcatagagttgcatgatatgtaagattttgtgcattcataattgttaaaaatctgtgttccaaaagtggacatagcatgtacaggcagttttctgtcctgtgcacaaaaagtttaaaaaagttgtttaatatttgttgttgtatacccaaatacgcaccgaataaactctttatattcattcaaagaaaaaaaaaaaaaaaaaaaaaaaaaaaaaa

SEQ ID NO: 143625 - protein, 247 aa, Artificial Sequence
  derived and/or modified sequence
MAAAIASGLIRQKRQAREQHWDRPSASRRRSSPSKNRGLCNGNLVDIFSKVRIFGLKKRRLRRQDPQLKGIVTRLYCRQGYYLQMHPDGALDGTKDDSTNSTLFNLIPVGLRVVAIQGVKTGLYIAMNGEGYLYPSELFTPECKFKESVFENYYVIYSSMLYRQQESGRAWFLGLNKEGQAMKGNRVKKTKPAAHFLPKPLEVAMYREPSLHDVGETVPKPGVTPSKSTSASAIMNGGKPVNKSKTT

SEQ ID NO: 143626 - DNA, 744 bp, Artificial Sequence
  derived and/or modified sequence
atggccgccgccatcgccagcggcctgatcagacagaagagacaggccagagagcagcactgggacagacccagcgccagcagaagaagaagcagccccagcaagaacagaggcctgtgcaacggcaacctggtggacatcttcagcaaggtgagaatcttcggcctgaagaagagaagactgagaagacaggacccccagctgaagggcatcgtgaccagactgtactgcagacagggctactacctgcagatgcaccccgacggcgccctggacggcaccaaggacgacagcaccaacagcaccctgttcaacctgatccccgtgggcctgagagtggtggccatccagggcgtgaagaccggcctgtacatcgccatgaacggcgagggctacctgtaccccagcgagctgttcacccccgagtgcaagttcaaggagagcgtgttcgagaactactacgtgatctacagcagcatgctgtacagacagcaggagagcggcagagcctggttcctgggcctgaacaaggagggccaggccatgaagggcaacagagtgaagaagaccaagcccgccgcccacttcctgcccaagcccctggaggtggccatgtacagagagcccagcctgcacgacgtgggcgagaccgtgcccaagcccggcgtgacccccagcaagagcaccagcgccagcgccatcatgaacggcggcaagcccgtgaacaagagcaagaccacctag

SEQ ID NO: 143627 - DNA, 744 bp, Artificial Sequence
  derived and/or modified sequence
atggcagccgcaattgcaagtggactgatcagacagaagcgccaggctagggagcagcactgggacaggcccagcgcctccaggcggcggtcctctccatcgaagaaccgggggctgtgtaacggtaatcttgtcgacattttctctaaagttcgcatttttggcctgaaaaagaggaggttacgccggcaagacccccaactcaaagggattgtcacaagactgtactgcagacaaggatactacctgcagatgcacccagacggcgcactggacgggaccaaggacgattccactaattctacgctgtttaacctcattcctgtgggcctccgcgtagtcgctattcagggagtcaagaccggcctctacatcgccatgaacggggaaggatatctataccccagcgagctgtttacccccgaatgcaagttcaaagaatccgttttcgagaattattacgtgatctacagcagcatgctgtatcgtcagcaggaatccgggcgggcatggttcctgggactcaacaaggaagggcaggctatgaagggcaaccgggtcaaaaagaccaagcccgcagcccacttccttcctaagcctctcgaggttgcaatgtatagggaaccgagcctgcacgatgtgggagaaaccgtcccaaaacctggagtcactccaagtaaatcgacgtccgcctccgccatcatgaacggtggtaagcccgtaaataagtccaagaccacttag

SEQ ID NO: 143628 - DNA, 744 bp, Artificial Sequence
  derived and/or modified sequence
atggctgctgccatcgccagcggcctcatccggcagaagaggcaggcccgggagcagcactgggaccggcccagcgccagcagaagaagaagcagccccagcaagaacagaggcctgtgcaatggaaacctggtggacatcttcagcaaggtgcgcatcttcggcctgaagaagaggcggctgcggcggcaggacccccagctgaagggcatcgtgacccggctgtactgccggcagggctactacctgcagatgcacccagatggagccctggatggcaccaaggatgacagcaccaacagcaccctcttcaacctgatccctgtgggcctgcgggtggtggccatccagggcgtgaagacaggcctgtacatcgccatgaatggagagggctacctgtaccccagcgagctgttcaccccagagtgcaagttcaaggagagcgtgtttgagaactactacgtgatctacagctccatgctgtaccggcagcaggagagcggccgggcctggttcctgggcctgaacaaggagggccaggccatgaagggcaacagagtgaagaagaccaagccagctgcccacttcctgcccaagcccctggaggtggccatgtaccgggagcccagcctgcatgatgtgggggagaccgtgcccaagccaggagtgacccccagcaagagcaccagcgccagcgccatcatgaatggaggcaagcctgtgaacaagagcaagaccacctag

SEQ ID NO: 143629 - DNA, 744 bp, Artificial Sequence
  derived and/or modified sequence
atggccgccgccatcgccagcggcctgatccggcagaagcggcaggccagagaacaacattgggaccggccctccgcttccaggcggcggtcgtctccaagcaaaaaccggggactatgcaacggaaacctggtagacatcttctcaaaagtgagaattttcggtctgaagaaacgccgtttgaggcggcaggatccgcagttgaaaggaattgtgacccggctctattgccggcaggggtactacctccagatgcacccggatggcgccctggatggcaccaaagatgattccactaactcgaccctgtttaatctgattccagtcgggctgagggtggtggcaatccagggggtgaagactggcctctacatcgccatgaacggagaaggatacctgtacccctctgaactgttcactcccgaatgtaagtttaaagagtcagtgttcgagaactactacgtgatatatagctctatgctttacaggcagcaggagtctggccgggcttggttccttgggttaaacaaggagggacaagccatgaagggtaatagggtcaagaagacaaagcctgccgcccacttcctccctaaaccattagaggttgcgatgtacagggaaccctccttacatgatgttggagagactgtgcccaaacctggggtgactccgagtaaaagcacatctgcttccgcaatcatgaatggagggaaacctgtgaacaagtccaagaccacctag

SEQ ID NO: 143630 - DNA, 744 bp, Artificial Sequence
  derived and/or modified sequence
atggccgctgccatcgccagtgggcttattcgccagaagagacaagcccgagaacaacactgggaccgcccttcagccagcagacggaggtcgtcaccatccaaaaatagaggcctatgcaacggtaatttagtcgacatcttctctaaagttagaatcttcgggcttaaaaagcgtcgactcagaaggcaagaccctcagctcaaggggatcgtgacccgactgtattgtcgccagggctattatctgcaaatgcacccagatggggctctcgacggcaccaaggatgattctaccaattctacactattcaatctgatacctgtcggccttcgcgtggtggccattcagggagtgaagacaggcctgtacatcgcgatgaatggcgaagggtacttgtatccgtctgagctcttcaccccagagtgcaagttcaaggagtcggtattcgaaaattattacgttatttacagcagtatgttgtacaggcagcaggaaagtggcagggcctggttcctgggattaaacaaagagggacaggccatgaaggggaatagagtgaaaaagaccaaacccgctgctcactttttgcctaaacccctcgaggtagcaatgtaccgagagccctcactgcatgacgtgggcgagactgttcccaagccaggtgtgactccgtccaagagtactagtgcctccgccattatgaacggtgggaagcctgtcaataagagcaaaactacatag

SEQ ID NO: 143631 - DNA, 744 bp, Artificial Sequence
  derived and/or modified sequence
atggccgcggccatcgctagcggcttgatccgccagaagcggcaggcgcgggagcagcactgggaccggccgtctgccagcaggaggcggagcagccccagcaagaaccgcgggctctgcaacggcaacctggtggatatcttctccaaagtgcgcatcttcggcctcaagaagcgcaggttgcggcgccaagatccccagctcaagggtatagtgaccaggttatattgcaggcaaggctactacttgcaaatgcaccccgatggagctctcgatggaaccaaggatgacagcactaattctacactcttcaacctcataccagtgggactacgtgttgttgccatccagggagtgaaaacagggttgtatatagccatgaatggagaaggttacctctacccatcagaactttttacccctgaatgcaagtttaaagaatctgtttttgaaaattattatgtaatctactcatccatgttgtacagacaacaggaatctggtagagcctggtttttgggattaaataaggaagggcaagctatgaaagggaacagagtaaagaaaaccaaaccagcagctcattttctacccaagccattggaagttgccatgtaccgagaaccatctttgcatgatgttggggaaacggtcccgaagcctggggtgacgccaagtaaaagcacaagtgcgtctgcaataatgaatggaggcaaaccagtcaacaagagtaagacaacatag

SEQ ID NO: 143632 - DNA, 2720 bp, Artificial Sequence
  derived and/or modified sequence
atggccgcggccatcgctagcggcttgatccgccagaagcggcaggcgcgggagcagcactgggaccggccgtctgccagcaggaggcggagcagccccagcaagaaccgcgggctctgcaacggcaacctggtggatatcttctccaaagtgcgcatcttcggcctcaagaagcgcaggttgcggcgccaagatccccagctcaagggtatagtgaccaggttatattgcaggcaaggctactacttgcaaatgcaccccgatggagctctcgatggaaccaaggatgacagcactaattctacactcttcaacctcataccagtgggactacgtgttgttgccatccagggagtgaaaacagggttgtatatagccatgaatggagaaggttacctctacccatcagaactttttacccctgaatgcaagtttaaagaatctgtttttgaaaattattatgtaatctactcatccatgttgtacagacaacaggaatctggtagagcctggtttttgggattaaataaggaagggcaagctatgaaagggaacagagtaaagaaaaccaaaccagcagctcattttctacccaagccattggaagttgccatgtaccgagaaccatctttgcatgatgttggggaaacggtcccgaagcctggggtgacgccaagtaaaagcacaagtgcgtctgcaataatgaatggaggcaaaccagtcaacaagagtaagacaacatagccagatcctcacaggtgttgtgacttattcgtcctgagcacagttgagtgatttatcctcaccagacattcctgctccgtggctgaagagcagcaggaagtaagctaatgcttattctttgctgtctccgaacttctctgttgcaagtggataaatctcaacctgttgcaccccccacaacaagaagacacctggataaccagctaaactcagaccatggaatgccctaccagatatggaatgcctttttaatatcttttctgtgactgtgacacttcatgtgaatgacatacttcacaagtacactcgataccttgcctgctgacagctacccataatcctttttgagtcctgtttcagcgaaatctatgtgtttaagttcaattttgtagcacacaaataatattgagtaatttctagttagacgctgtaaacctgtgctattacggatttctcttcttcccatttttacagggctgctcgctccactgtctgtgaccttttgcagggattttgttcctctaaatcttaaatgttgcagttggcttaggtcggagagcaatcagggaatcaggaagccttctaaacctattattacaaattgcatctataaagaaagattaagaaagattgttgtctctggctcacactatcgattaaacacacatatacgctctgtccagtagcagatactgtgctcccaaggtcggcattgcctgggtgggaaatggctcaaacacaatccagggaagctctctatgatatgtgtttgacatccccctctagtttctttgtgtgtgtgtgttttatacatatcacaagcttactggtaatggtaacatttgccttgcccagcgagcaagacccactggtttttgagaaagtgggtccaaagatttctgtaggccttgtaggcctgattaaggttcatttttcatctattaattctcattatttggaaaaaaaaaaaaaggaaaatcagtaattataacctacaagaattgcgctacctaaatccatttcagatatactccgtcctgtttttaatgaaccaaacttaacgccatccccgtttctggctgcgttcccctcatactcagcagagcatgggcaagacggctgttgtgttctttcctgcagcagcaatgcaaacgttagttataaattaattagactttaatatttttggtgtttaatgacaagtttttaaactggacatattaggaaaaatattttttttagctcagcatgctgagtccggtactgtgtatttcaccagtacatgcctctagctcagcatctggggctcatgttgcccagtggctgggttagaggtgccttgccatgatctcagaatacagtctgttgaattatcctagatgaaaataaaggcaaaccaacacattcatccatgaggattttggtccattccatttattttcttttattttgcattcttaatttcctttttagtttaacactgtttgtttgagcttagggaagacaactaccaagaaaggccaggaacagttgactacacaatgaagattccatgcaaaatgttcaatattggatctaaaggggttcaaaatgtttcatactaaactgtttgggaatttatttgttaactctgtgtacacctaataaaattcaatgttttcttctcagaagagttcattgagaccaaactgaacctcatttattgaaaattatatgtgggatcaatgtactggcctcttgttattctttctatgtgggaggatgacccagtcatcattttccccatctgcactgtatttattgggaaattattttgtcactgctttcataaatcttcttcatgacagcccttgcccagcattaaaaaattctggcctgcttagctgattaaaggtttagtagaaatttaactgtttgtttatgcttatttcattttcatattggattctacttgaataaataaaaagttagcagaa

SEQ ID NO: 143633 - protein, 108 aa, Artificial Sequence
  derived and/or modified sequence
MGVEIETISPGDGRTFPKKGQTCVVHYTGMLQNGKKFDSSRDRNKPFKFRIGKQEVIKGFEEGAAQMSLGQRAKLTCTPDVAYGATGHPGVIPPNATLIFDVELLNLE

SEQ ID NO: 143634 - DNA, 952 bp, Artificial Sequence
  derived and/or modified sequence
gactccagccgcacctcctccggctctgcagtggcggcgaggaggcgagccggagcgacggcggggctggggccggagccgagccggggtcgggcagcagcagggaccccccagaggcggggcctgtgggaccgctatgggcgtggagatcgagaccatctcccccggagacggaaggacattccccaagaagggccaaacgtgtgtggtgcactacacaggaatgctccaaaatgggaagaagtttgattcatccagagacagaaacaaacctttcaagttcagaattggcaaacaggaagtcatcaaaggttttgaagagggtgcagcccagatgagcttggggcagagggcgaagctgacctgcacccctgatgtggcatatggagccacgggccaccccggtgtcatccctcccaatgccaccctcatctttgacgtggagctgctcaacttagagtgaaggcaggaaggaactcaaggtggctggagatggctgctgctcaccctcctagcctgctctgccactgggacggctcctgcttttggggctcttgatcagtgtgctaacctcactgcctcatggcatcatccattctctctgcccaagttgctctgtatgtgttcgtcagtgttcatgcgaattcttgcttgaggaaacttcggttgcagattgaagcatttcaggttgtgcattttgtgtgatgcatgtagtagcctttcctgatgacagaacacagatctcttgttcgcacaatctacactgccttaccttcacttaaaccacacacacaaggtgctcagacatgaaatgtacatggcgtaccgtacacagagggacttgagccagttacctttgctgtcactttctctcttataaattctgttagctgctcacttaaacaatgtcctctttgagaaaatgtaaaataaaggctctgtgcttgacaaa

SEQ ID NO: 143635 - DNA, 1010 bp, Artificial Sequence
  derived and/or modified sequence
ccgcgcaggtcccgactccagccgcacctcctccggctctgcagtggcggcgaggaggcgagccggagcgacggcggggctggggccggagccgagccggggtcgggcagcagcagggaccccccagaggcggggcctgtgggaccgctatgggcgtggagatcgagaccatctcccccggagacggaaggacattccccaagaagggccaaacgtgtgtggtgcactacacaggaatgctccaaaatgggaagaagtttgattcatccagagacagaaacaaacctttcaagttcagaattggcaaacaggaagtcatcaaaggttttgaagagggtgcagcccagctgggtcctctttctcctctccccatctgcccccatccctgctagatgagcttggggcagagggcgaagctgacctgcacccctgatgtggcatatggagccacgggccaccccggtgtcatccctcccaatgccaccctcatctttgacgtggagctgctcaacttagagtgaaggcaggaaggaactcaaggtggctggagatggctgctgctcaccctcctagcctgctctgccactgggacggctcctgcttttggggctcttgatcagtgtgctaacctcactgcctcatggcatcatccattctctctgcccaagttgctctgtatgtgttcgtcagtgttcatgcgaattcttgcttgaggaaacttcggttgcagattgaagcatttcaggttgtgcattttgtgtgatgcatgtagtagcctttcctgatgacagaacacagatctcttgttcgcacaatctacactgccttaccttcacttaaaccacacacacaaggtgctcagacatgaaatgtacatggcgtaccgtacacagagggacttgagccagttacctttgctgtcactttctctcttataaattctgttagctgctcacttaaacaatgtcctctttgagaaaatgtaaaataaaggctctgtgcttgacaaa

SEQ ID NO: 143636 - DNA, 327 bp, Artificial Sequence
  derived and/or modified sequence
atgggagtggaaatagagaccataagtccaggggacggacgcacattcccaaagaagggccagacttgcgtcgttcactacaccgggatgctgcagaacggaaaaaaatttgactcatctcgagaccggaacaagccctttaaattcagaatcggtaagcaagaagtcattaagggctttgaagagggcgctgcgcaaatgagtcttggccagcgagccaaattaacttgcacccccgatgtcgcatacggggccactggccacccgggtgttatcccccctaacgcaactctcattttcgatgttgaacttcttaacctcgaatag

SEQ ID NO: 143637 - DNA, 327 bp, Artificial Sequence
  derived and/or modified sequence
atgggcgtggagattgagaccatcagccctggagatggccgcaccttccccaagaagggccagacctgtgtggtgcactacacaggcatgctgcagaatggcaagaagtttgacagcagccgggacaggaacaagcccttcaagttcagaattggcaagcaggaggtgatcaagggctttgaggagggcgccgcccagatgagcctgggccagagggccaagctgacctgcaccccagatgtggcctatggagccaccggccaccctggggtcatccccccaaatgccaccctcatctttgatgtggagctgctgaacctggagtag

SEQ ID NO: 143638 - DNA, 327 bp, Artificial Sequence
  derived and/or modified sequence
atgggcgtggagatcgagaccatcagccccggcgacggccggacctttcccaaaaaagggcagacttgtgtcgtacactatactggcatgctgcagaatggtaagaaatttgattcctcacgagatcggaacaaaccgttcaaatttcgcataggaaagcaagaggtcatcaagggcttcgaagagggcgccgcccagatgtccctcgggcaacgcgctaagctgacttgcacccccgacgtagcctacggggcgacaggtcatcccggtgtcatcccccccaacgcaactcttatcttcgatgtagagctgcttaacctcgaatag

SEQ ID NO: 143639 - DNA, 327 bp, Artificial Sequence
  derived and/or modified sequence
atgggagtggagatcgagaccatttcgccaggtgatggcaggacattccccaagaaaggacaaacgtgcgtcgtgcactataccggtatgctgcagaacggcaaaaaattcgactcctcacgcgaccggaacaagcccttcaaattccggatcggcaagcaggaggtgatcaagggttttgaggagggcgctgctcaaatgtcactgggccaacgagcaaaattaacatgtacccccgatgttgcctatggcgctacggggcatcccggagtgataccaccgaacgcaacactgatctttgatgtggaactgttaaatctggagtag

SEQ ID NO: 143640 - DNA, 327 bp, Artificial Sequence
  derived and/or modified sequence
atgggcgtggagatcgagaccatcagccccggcgacggcagaaccttccccaagaagggccagacctgcgtggtgcactacaccggcatgctgcagaacggcaagaagttcgacagcagcagagacagaaacaagcccttcaagttcagaatcggcaagcaggaggtgatcaagggcttcgaggagggcgccgcccagatgagcctgggccagagagccaagctgacctgcacccccgacgtggcctacggcgccaccggccaccccggcgtgatcccccccaacgccaccctgatcttcgacgtggagctgctgaacctggagtag

SEQ ID NO: 143641 - protein, 993 aa, Artificial Sequence
  derived and/or modified sequence
MPALARDGGQLPLLVVFSAMIFGTITNQDLPVIKCVLINHKNNDSSVGKSSSYPMVSESPEDLGCALRPQSSGTVYEAAAVEVDVSASITLQVLVDAPGNISCLWVFKHSSLNCQPHFDLQNRGVVSMVILKMTETQAGEYLLFIQSEATNYTILFTVSIRNTLLYTLRRPYFRKMENQDALVCISESVPEPIVEWVLCDSQGESCKEESPAVVKKEEKVLHELFGTDIRCCARNELGRECTRLFTIDLNQTPQTTLPQLFLKVGEPLWIRCKAVHVNHGFGLTWELENKALEEGNYFEMSTYSTNRTMIRILFAFVSSVARNDTGYYTCSSSKHPSQSALVTIVEKGFINATNSSEDYEIDQYEEFCFSVRFKAYPQIRCTWTFSRKSFPCEQKGLDNGYSISKFCNHKHQPGEYIFHAENDDAQFTKMFTLNIRRKPQVLAEASASQASCFSDGYPLPSWTWKKCSDKSPNCTEEITEGVWNRKANRKVFGQWVSSSTLNMSEAIKGFLVKCCAYNSLGTSCETILLNSPGPFPFIQDNISFYATIGVCLLFIVVLTLLICHKYKKQFRYESQLQMVQVTGSSDNEYFYVDFREYEYDLKWEFPRENLEFGKVLGSGAFGKVMNATAYGISKTGVSIQVAVKMLKEKADSSEREALMSELKMMTQLGSHENIVNLLGACTLSGPIYLIFEYCCYGDLLNYLRSKREKFHRTWTEIFKEHNFSFYPTFQSHPNSSMPGSREVQIHPDSDQISGLHGNSFHSEDEIEYENQKRLEEEEDLNVLTFEDLLCFAYQVAKGMEFLEFKSCVHRDLAARNVLVTHGKVVKICDFGLARDIMSDSNYVVRGNARLPVKWMAPESLFEGIYTIKSDVWSYGILLWEIFSLGVNPYPGIPVDANFYKLIQNGFKMDQPFYATEEIYIIMQSCWAFDSRKRPSFPNLTSFLGCQLADAEEAMYQNVDGRVSECPHTYQNRRPFSREMDLGLLSPQAQVEDS

SEQ ID NO: 143642 - protein, 996 aa, Artificial Sequence
  derived and/or modified sequence
MPALARDGGQLPLLVVFSAMIFGTITNQDLPVIKCVLINHKNNDSSVGKSSSYPMVSESPEDLGCALRPQSSGTVYEAAAVEVDVSASITLQVLVDAPGNISCLWVFKHSSLNCQPHFDLQNRGVVSMVILKMTETQAGEYLLFIQSEATNYTILFTVSIRNTLLYTLRRPYFRKMENQDALVCISESVPEPIVEWVLCDSQGESCKEESPAVVKKEEKVLHELFGTDIRCCARNELGRECTRLFTIDLNQTPQTTLPQLFLKVGEPLWIRCKAVHVNHGFGLTWELENKALEEGNYFEMSTYSTNRTMIRILFAFVSSVARNDTGYYTCSSSKHPSQSALVTIVEKGFINATNSSEDYEIDQYEEFCFSVRFKAYPQIRCTWTFSRKSFPCEQKGLDNGYSISKFCNHKHQPGEYIFHAENDDAQFTKMFTLNIRRKPQVLAEASASQASCFSDGYPLPSWTWKKCSDKSPNCTEEITEGVWNRKANRKVFGQWVSSSTLNMSEAIKGFLVKCCAYNSLGTSCETILLNSPGPFPFIQDNISFYATIGVCLLFIVVLTLLICHKYKKQFRYESQLQMVQVTGSSDNEYFYVDFREYEYDLKWEFPRENLEFGKVLGSGAFGKVMNATAYGISKTGVSIQVAVKMLKEKADSSEREALMSELKMMTQLGSHENIVNLLGACTLSGPIYLIFEYCCYGDLLNYLRSKREKFHRTWTEIFKEHNFSFYPTFQSHPNSSMPGSREVQIHPDSDQISGLHGNSFHSEDEIEYENQKRLEEEEDLNVLTFEDLLCFAYQVAKGMEFLEFKSCVHRDLAARNVLVTHGKVVKICDFGLARDIMSDSNYVVRGNVRLARLPVKWMAPESLFEGIYTIKSDVWSYGILLWEIFSLGVNPYPGIPVDANFYKLIQNGFKMDQPFYATEEIYIIMQSCWAFDSRKRPSFPNLTSFLGCQLADAEEAMYQNVDGRVSECPHTYQNRRPFSREMDLGLLSPQAQVEDS

SEQ ID NO: 143643 - protein, 952 aa, Artificial Sequence
  derived and/or modified sequence
MPALARDGGQLPLLVVFSAMIFGTITNQDLPVIKCVLINHKNNDSSVGKSSSYPMVSESPEDLGCALRPQSSGTVYEAAAVEVDVSASITLQVLVDAPGNISCLWVFKHSSLNCQPHFDLQNRGVVSMVILKMTETQAGEYLLFIQSEATNYTILFTVSIRNTLLYTLRRPYFRKMENQDALVCISESVPEPIVEWVLCDSQGESCKEESPAVVKKEEKVLHELFGTDIRCCARNELGRECTRLFTIDLNQTPQTTLPQLFLKVGEPLWIRCKAVHVNHGFGLTWELENKALEEGNYFEMSTYSTNRTMIRILFAFVSSVARNDTGYYTCSSSKHPSQSALVTIVEKGFINATNSSEDYEIDQYEEFCFSVRFKAYPQIRCTWTFSRKSFPCEQKGLDNGYSISKFCNHKHQPGEYIFHAENDDAQFTKMFTLNIRRKPQVLAEASASQASCFSDGYPLPSWTWKKCSDKSPNCTEEITEGVWNRKANRKVFGQWVSSSTLNMSEAIKGFLVKCCAYNSLGTSCETILLNSPGPFPFIQDNISFYATIGVCLLFIVVLTLLICHKYKKQFRYESQLQMVQVTGSSDNEYFYVDFREYEYDLKWEFPRENLEFGKVLGSGAFGKVMNATAYGISKTGVSIQVAVKMLKEKADSSEREALMSELKMMTQLGSHENIVNLLGACTLSGPIYLIFEYCCYGDLLNYLRSKREKFHRTWTEIFKEHNFSFYPTFQSHPNSSMPGSREVQIHPDSDQISGLHGNSFHSEDEIEYENQKRLEEEEDLNVLTFEDLLCFAYQVAKGMEFLEFKSARLPVKWMAPESLFEGIYTIKSDVWSYGILLWEIFSLGVNPYPGIPVDANFYKLIQNGFKMDQPFYATEEIYIIMQSCWAFDSRKRPSFPNLTSFLGCQLADAEEAMYQNVDGRVSECPHTYQNRRPFSREMDLGLLSPQAQVEDS

SEQ ID NO: 143644 - DNA, 3842 bp, Artificial Sequence
  derived and/or modified sequence
acctgcagcgcgaggcgcgccgctccaggcggcatcgcagggctgggccggcgcggcctggggaccccgggctccggaggccatgccggcgttggcgcgcgacggcggccagctgccgctgctcgttgttttttctgcaatgatatttgggactattacaaatcaagatctgcctgtgatcaagtgtgttttaatcaatcataagaacaatgattcatcagtggggaagtcatcatcatatcccatggtatcagaatccccggaagacctcgggtgtgcgttgagaccccagagctcagggacagtgtacgaagctgccgctgtggaagtggatgtatctgcttccatcacactgcaagtgctggtcgacgccccagggaacatttcctgtctctgggtctttaagcacagctccctgaattgccagccacattttgatttacaaaacagaggagttgtttccatggtcattttgaaaatgacagaaacccaagctggagaatacctactttttattcagagtgaagctaccaattacacaatattgtttacagtgagtataagaaataccctgctttacacattaagaagaccttactttagaaaaatggaaaaccaggacgccctggtctgcatatctgagagcgttccagagccgatcgtggaatgggtgctttgcgattcacagggggaaagctgtaaagaagaaagtccagctgttgttaaaaaggaggaaaaagtgcttcatgaattatttgggacggacataaggtgctgtgccagaaatgaactgggcagggaatgcaccaggctgttcacaatagatctaaatcaaactcctcagaccacattgccacaattatttcttaaagtaggggaacccttatggataaggtgcaaagctgttcatgtgaaccatggattcgggctcacctgggaattagaaaacaaagcactcgaggagggcaactactttgagatgagtacctattcaacaaacagaactatgatacggattctgtttgcttttgtatcatcagtggcaagaaacgacaccggatactacacttgttcctcttcaaagcatcccagtcaatcagctttggttaccatcgtagaaaagggatttataaatgctaccaattcaagtgaagattatgaaattgaccaatatgaagagttttgtttttctgtcaggtttaaagcctacccacaaatcagatgtacgtggaccttctctcgaaaatcatttccttgtgagcaaaagggtcttgataacggatacagcatatccaagttttgcaatcataagcaccagccaggagaatatatattccatgcagaaaatgatgatgcccaatttaccaaaatgttcacgctgaatataagaaggaaacctcaagtgctcgcagaagcatcggcaagtcaggcgtcctgtttctcggatggatacccattaccatcttggacctggaagaagtgttcagacaagtctcccaactgcacagaagagatcacagaaggagtctggaatagaaaggctaacagaaaagtgtttggacagtgggtgtcgagcagtactctaaacatgagtgaagccataaaagggttcctggtcaagtgctgtgcatacaattcccttggcacatcttgtgagacgatccttttaaactctccaggccccttccctttcatccaagacaacatctcattctatgcaacaattggtgtttgtctcctcttcattgtcgttttaaccctgctaatttgtcacaagtacaaaaagcaatttaggtatgaaagccagctacagatggtacaggtgaccggctcctcagataatgagtacttctacgttgatttcagagaatatgaatatgatctcaaatgggagtttccaagagaaaatttagagtttgggaaggtactaggatcaggtgcttttggaaaagtgatgaacgcaacagcttatggaattagcaaaacaggagtctcaatccaggttgccgtcaaaatgctgaaagaaaaagcagacagctctgaaagagaggcactcatgtcagaactcaagatgatgacccagctgggaagccacgagaatattgtgaacctgctgggggcgtgcacactgtcaggaccaatttacttgatttttgaatactgttgctatggtgatcttctcaactatctaagaagtaaaagagaaaaatttcacaggacttggacagagattttcaaggaacacaatttcagtttttaccccactttccaatcacatccaaattccagcatgcctggttcaagagaagttcagatacacccggactcggatcaaatctcagggcttcatgggaattcatttcactctgaagatgaaattgaatatgaaaaccaaaaaaggctggaagaagaggaggacttgaatgtgcttacatttgaagatcttctttgctttgcatatcaagttgccaaaggaatggaatttctggaatttaagtcgtgtgttcacagagacctggccgccaggaacgtgcttgtcacccacgggaaagtggtgaagatatgtgactttggattggctcgagatatcatgagtgattccaactatgttgtcaggggcaatgcccgtctgcctgtaaaatggatggcccccgaaagcctgtttgaaggcatctacaccattaagagtgatgtctggtcatatggaatattactgtgggaaatcttctcacttggtgtgaatccttaccctggcattccggttgatgctaacttctacaaactgattcaaaatggatttaaaatggatcagccattttatgctacagaagaaatatacattataatgcaatcctgctgggcttttgactcaaggaaacggccatccttccctaatttgacttcgtttttaggatgtcagctggcagatgcagaagaagcgatgtatcagaatgtggatggccgtgtttcggaatgtcctcacacctaccaaaacaggcgacctttcagcagagagatggatttggggctactctctccgcaggctcaggtcgaagattcgtagaggaacaatttagttttaaggacttcatccctccacctatccctaacaggctgtagattaccaaaacaagattaatttcatcactaaaagaaaatctattatcaactgctgcttcaccagacttttctctagaagctgtctgcgtttactcttgttttcaaagggacttttgtaaaatcaaatcatcctgtcacaaggcaggaggagctgataatgaactttattggagcattgatctgcatccaaggccttctcaggctggcttgagtgaattgtgtacctgaagtacagtatattcttgtaaatacataaaacaaaagcattttgctaaggagaagctaatatgattttttaagtctatgttttaaaataatatgtaaatttttcagctatttagtgatatattttatgggtgggaataaaatttctactacagaattgcccattattgaattatttacatggtataattagggcaagtcttaactggagttcacgaaccccctgaaattgtgcacccatagccacctacacattccttccagagcacgtgtgcttttaccccaagatacaaggaatgtgtaggcagctatggttgtcacagcctaagatttctgcaacaacaggggttgtattgggggaagtttataatgaataggtgttctaccataaagagtaatacatcacctagacactttggcggccttcccagactcagggccagtcagaagtaacatggaggattagtattttcaataaagttactcttgtccccaca

SEQ ID NO: 143645 - DNA, 3848 bp, Artificial Sequence
  derived and/or modified sequence
acctgcagcgcgaggcgcgccgctccaggcggcatcgcagggctgggccggcgcggcctggggaccccgggctccggaggccatgccggcgttggcgcgcgacggcggccagctgccgctgctcgttgttttttctgcaatgatatttgggactattacaaatcaagatctgcctgtgatcaagtgtgttttaatcaatcataagaacaatgattcatcagtggggaagtcatcatcatatcccatggtatcagaatccccggaagacctcgggtgtgcgttgagaccccagagctcagggacagtgtacgaagctgccgctgtggaagtggatgtatctgcttccatcacactgcaagtgctggtcgacgccccagggaacatttcctgtctctgggtctttaagcacagctccctgaattgccagccacattttgatttacaaaacagaggagttgtttccatggtcattttgaaaatgacagaaacccaagctggagaatacctactttttattcagagtgaagctaccaattacacaatattgtttacagtgagtataagaaataccctgctttacacattaagaagaccttactttagaaaaatggaaaaccaggacgccctggtctgcatatctgagagcgttccagagccgatcgtggaatgggtgctttgcgattcacagggggaaagctgtaaagaagaaagtccagctgttgttaaaaaggaggaaaaagtgcttcatgaattatttgggacggacataaggtgctgtgccagaaatgaactgggcagggaatgcaccaggctgttcacaatagatctaaatcaaactcctcagaccacattgccacaattatttcttaaagtaggggaacccttatggataaggtgcaaagctgttcatgtgaaccatggattcgggctcacctgggaattagaaaacaaagcactcgaggagggcaactactttgagatgagtacctattcaacaaacagaactatgatacggattctgtttgcttttgtatcatcagtggcaagaaacgacaccggatactacacttgttcctcttcaaagcatcccagtcaatcagctttggttaccatcgtagaaaagggatttataaatgctaccaattcaagtgaagattatgaaattgaccaatatgaagagttttgtttttctgtcaggtttaaagcctacccacaaatcagatgtacgtggaccttctctcgaaaatcatttccttgtgagcaaaagggtcttgataacggatacagcatatccaagttttgcaatcataagcaccagccaggagaatatatattccatgcagaaaatgatgatgcccaatttaccaaaatgttcacgctgaatataagaaggaaacctcaagtgctcgcagaagcatcggcaagtcaggcgtcctgtttctcggatggatacccattaccatcttggacctggaagaagtgttcagacaagtctcccaactgcacagaagagatcacagaaggagtctggaatagaaaggctaacagaaaagtgtttggacagtgggtgtcgagcagtactctaaacatgagtgaagccataaaagggttcctggtcaagtgctgtgcatacaattcccttggcacatcttgtgagacgatccttttaaactctccaggccccttccctttcatccaagacaacatctcattctatgcaacaattggtgtttgtctcctcttcattgtcgttttaaccctgctaatttgtcacaagtacaaaaagcaatttaggtatgaaagccagctacagatggtacaggtgaccggctcctcagataatgagtacttctacgttgatttcagagaatatgaatatgatctcaaatgggagtttccaagagaaaatttagagtttgggaaggtactaggatcaggtgcttttggaaaagtgatgaacgcaacagcttatggaattagcaaaacaggagtctcaatccaggttgccgtcaaaatgctgaaagaaaaagcagacagctctgaaagagaggcactcatgtcagaactcaagatgatgacccagctgggaagccacgagaatattgtgaacctgctgggggcgtgcacactgtcaggaccaatttacttgatttttgaatactgttgctatggtgatcttctcaactatctaagaagtaaaagagaaaaatttcacaggacttggacagagattttcaaggaacacaatttcagtttttaccccactttccaatcacatccaaattccagcatgcctggttcaagagaagttcagatacacccggactcggatcaaatctcagggcttcatgggaattcatttcactctgaagatgaaattgaatatgaaaaccaaaaaaggctggaagaagaggaggacttgaatgtgcttacatttgaagatcttctttgctttgcatatcaagttgccaaaggaatggaatttctggaatttaagtcgtgtgttcacagagacctggccgccaggaacgtgcttgtcacccacgggaaagtggtgaagatatgtgactttggattggctcgagatatcatgagtgattccaactatgttgtcaggggcaatgtgaggctggcccgtctgcctgtaaaatggatggcccccgaaagcctgtttgaaggcatctacaccattaagagtgatgtctggtcatatggaatattactgtgggaaatcttctcacttggtgtgaatccttaccctggcattccggttgatgctaacttctacaaactgattcaaaatggatttaaaatggatcagccattttatgctacagaagaaatatacattataatgcaatcctgctgggcttttgactcaaggaaacggccatccttccctaatttgacttcgtttttaggatgtcagctggcagatgcagaagaagcgatgtatcagaatgtggatggccgtgtttcggaatgtcctcacacctaccaaaacaggcgacctttcagcagagagatggatttggggctactctctccgcaggctcaggtcgaagattcgtagaggaacaatttagttttaaggacttcatccctccacctatccctaacaggctgtagattaccaaaacaagattaatttcatcactaaaagaaaatctattatcaactgctgcttcaccagacttttctctagaagctgtctgcgtttactcttgttttcaaagggacttttgtaaaatcaaatcatcctgtcacaaggcaggaggagctgataatgaactttattggagcattgatctgcatccaaggccttctcaggctggcttgagtgaattgtgtacctgaagtacagtatattcttgtaaatacataaaacaaaagcattttgctaaggagaagctaatatgattttttaagtctatgttttaaaataatatgtaaatttttcagctatttagtgatatattttatgggtgggaataaaatttctactacagaattgcccattattgaattatttacatggtataattagggcaagtcttaactggagttcacgaaccccctgaaattgtgcacccatagccacctacacattccttccagagcacgtgtgcttttaccccaagatacaaggaatgtgtaggcagctatggttgtcacagcctaagatttctgcaacaacaggggttgtattgggggaagtttataatgaataggtgttctaccataaagagtaatacatcacctagacactttggcggccttcccagactcagggccagtcagaagtaacatggaggattagtattttcaataaagttactcttgtcccc

SEQ ID NO: 143646 - DNA, 3178 bp, Artificial Sequence
  derived and/or modified sequence
ctccaggcggcatcgcagggctgggccggcgcggcctggggaccccgggctccggaggccatgccggcgttggcgcgcgacggcggccagctgccgctgctcgttgttttttctgcaatgatatttgggactattacaaatcaagatctgcctgtgatcaagtgtgttttaatcaatcataagaacaatgattcatcagtggggaagtcatcatcatatcccatggtatcagaatccccggaagacctcgggtgtgcgttgagaccccagagctcagggacagtgtacgaagctgccgctgtggaagtggatgtatctgcttccatcacactgcaagtgctggtcgacgccccagggaacatttcctgtctctgggtctttaagcacagctccctgaattgccagccacattttgatttacaaaacagaggagttgtttccatggtcattttgaaaatgacagaaacccaagctggagaatacctactttttattcagagtgaagctaccaattacacaatattgtttacagtgagtataagaaataccctgctttacacattaagaagaccttactttagaaaaatggaaaaccaggacgccctggtctgcatatctgagagcgttccagagccgatcgtggaatgggtgctttgcgattcacagggggaaagctgtaaagaagaaagtccagctgttgttaaaaaggaggaaaaagtgcttcatgaattatttgggacggacataaggtgctgtgccagaaatgaactgggcagggaatgcaccaggctgttcacaatagatctaaatcaaactcctcagaccacattgccacaattatttcttaaagtaggggaacccttatggataaggtgcaaagctgttcatgtgaaccatggattcgggctcacctgggaattagaaaacaaagcactcgaggagggcaactactttgagatgagtacctattcaacaaacagaactatgatacggattctgtttgcttttgtatcatcagtggcaagaaacgacaccggatactacacttgttcctcttcaaagcatcccagtcaatcagctttggttaccatcgtagaaaagggatttataaatgctaccaattcaagtgaagattatgaaattgaccaatatgaagagttttgtttttctgtcaggtttaaagcctacccacaaatcagatgtacgtggaccttctctcgaaaatcatttccttgtgagcaaaagggtcttgataacggatacagcatatccaagttttgcaatcataagcaccagccaggagaatatatattccatgcagaaaatgatgatgcccaatttaccaaaatgttcacgctgaatataagaaggaaacctcaagtgctcgcagaagcatcggcaagtcaggcgtcctgtttctcggatggatacccattaccatcttggacctggaagaagtgttcagacaagtctcccaactgcacagaagagatcacagaaggagtctggaatagaaaggctaacagaaaagtgtttggacagtgggtgtcgagcagtactctaaacatgagtgaagccataaaagggttcctggtcaagtgctgtgcatacaattcccttggcacatcttgtgagacgatccttttaaactctccaggccccttccctttcatccaagacaacatctcattctatgcaacaattggtgtttgtctcctcttcattgtcgttttaaccctgctaatttgtcacaagtacaaaaagcaatttaggtatgaaagccagctacagatggtacaggtgaccggctcctcagataatgagtacttctacgttgatttcagagaatatgaatatgatctcaaatgggagtttccaagagaaaatttagagtttgggaaggtactaggatcaggtgcttttggaaaagtgatgaacgcaacagcttatggaattagcaaaacaggagtctcaatccaggttgccgtcaaaatgctgaaagaaaaagcagacagctctgaaagagaggcactcatgtcagaactcaagatgatgacccagctgggaagccacgagaatattgtgaacctgctgggggcgtgcacactgtcaggaccaatttacttgatttttgaatactgttgctatggtgatcttctcaactatctaagaagtaaaagagaaaaatttcacaggacttggacagagattttcaaggaacacaatttcagtttttaccccactttccaatcacatccaaattccagcatgcctggttcaagagaagttcagatacacccggactcggatcaaatctcagggcttcatgggaattcatttcactctgaagatgaaattgaatatgaaaaccaaaaaaggctggaagaagaggaggacttgaatgtgcttacatttgaagatcttctttgctttgcatatcaagttgccaaaggaatggaatttctggaatttaagtcggcccgtctgcctgtaaaatggatggcccccgaaagcctgtttgaaggcatctacaccattaagagtgatgtctggtcatatggaatattactgtgggaaatcttctcacttggtgtgaatccttaccctggcattccggttgatgctaacttctacaaactgattcaaaatggatttaaaatggatcagccattttatgctacagaagaaatatacattataatgcaatcctgctgggcttttgactcaaggaaacggccatccttccctaatttgacttcgtttttaggatgtcagctggcagatgcagaagaagcgatgtatcagaatgtggatggccgtgtttcggaatgtcctcacacctaccaaaacaggcgacctttcagcagagagatggatttggggctactctctccgcaggctcaggtcgaagattcgtagaggaacaatttagttttaaggacttcatccctccacctatccctaacaggctgtagattaccaaaacaagattaatttcatcactaaaagaaaatctattatcaactgctgcttcaccagacttttctctagaagctgtctgcgtttactcttgttttcaaagggacttttgtaaaatcaaatcatcctgtcacaaggcaggaggagctgataatgaactttattggagcattgatctgcatccaaggccttctcaggc

SEQ ID NO: 143647 - DNA, 2982 bp, Artificial Sequence
  derived and/or modified sequence
atgcctgccctcgctcgggatgggggccagctccctttgttggttgtgttttcagccatgatcttcggcaccatcacgaaccaggatctgcctgtgatcaagtgcgtcctcatcaaccacaagaacaacgattccagtgtgggaaaatcatcgtcgtatcccatggtgtcggaatcccccgaggatctgggctgtgctctacgcccacagagcagcgggactgtgtacgaggcagctgctgtagaagtagatgtgtcggcctctattaccctccaagtattagtagacgcacccgggaatatctcttgcctgtgggtgtttaaacactcctccctaaattgccagccccatttcgacctgcagaatcgaggggtggtatccatggtgattctgaagatgacagaaactcaagccggcgagtatttgctgttcatccagagcgaggccacgaactataccattctgttcaccgttagtatcagaaataccctcctttatactctgcgccgaccctacttccgcaagatggagaatcaggatgcgctggtgtgcatcagtgaaagtgtgccggaaccgatcgtcgagtgggtgctctgcgacagccaaggcgaaagctgcaaggaggagtccccggcagtagtgaaaaaggaagagaaggtcttacatgagcttttcggaactgatatccgctgttgcgctcgtaatgaactgggcagagagtgcacacggctttttacgattgatctgaatcagacccctcagacaactctaccacagctgttcctgaaggtcggcgagcctctctggattaggtgcaaggccgtgcacgtgaatcatgggttcggcttgacgtgggagttggagaataaggccctcgaagaaggcaactacttcgaaatgtcgacctactcaaccaaccgcactatgatccgcatactttttgcattcgtttcttccgtggctaggaatgacacggggtattacacctgctcctcaagcaagcacccttcccagtcagccctggtgactatcgtggagaaagggttcattaacgccactaacagttccgaagattatgaaattgaccaatacgaggagttttgtttttccgtcagatttaaagcctatccacagatcagatgtacatggacattctcacgtaagtcgtttccatgcgagcaaaaaggactggataatggctactccatttctaagttctgcaatcacaagcaccaaccaggagagtacatcttccatgcagagaatgacgacgcccagtttaccaaaatgttcacacttaacatccgacgcaaaccccaggttcttgctgaggcgtccgctagtcaagccagctgcttctctgacggatacccactgcccagctggacatggaagaaatgttccgacaagtctcctaactgtactgaggagataaccgaaggagtctggaacaggaaagctaacaggaaagtgttcggacaatgggtcagctcatcaactttgaacatgtccgaagctatcaaaggcttcctggtgaagtgctgtgcatacaacagtctgggaacctcctgtgagaccatcttacttaattccccggggccattcccatttatccaggataatataagcttttacgcaacaataggggtgtgccttctgtttattgttgtccttacactgctcatatgccacaaatacaaaaagcaatttcgatatgagagtcagttgcagatggtgcaggttactggaagctctgacaacgagtacttctacgtggacttccgggagtatgagtatgatctgaagtgggaatttccccgggagaatctggagtttggaaaagtgctggggtcgggcgcctttggcaaagtcatgaacgcaactgcctacggcattagcaagactggtgtcagcatccaggttgccgtgaagatgttgaaggagaaggccgattctagcgagcgcgaggccctgatgtccgaactgaagatgatgacacagttgggttcacacgagaatatcgtaaacctgctgggagcttgcaccctcagcggtcctatctatctcatcttcgaatattgctgctacggtgacctcctgaactaccttcgtagcaaacgcgagaaatttcataggacttggactgaaatctttaaggagcataactttagcttctatccgaccttccagagccatccaaattcgtctatgccaggttcaagggaagtacagatacatccagattcagatcaaattagtgggctccacggaaactcatttcactccgaagatgaaatcgagtacgaaaaccagaagagactggaggaggaagaagacctgaacgtactaacgtttgaggacctgctgtgcttcgcctaccaggtggccaaagggatggagttccttgagttcaaaagttgtgttcaccgcgatctcgccgctcgcaacgtgttggttacgcacggcaaggtggtgaagatctgtgactttgggctcgccagggacatcatgagcgactccaattacgtcgtgagggggaacgctcgactgccagtgaaatggatggcccctgagagcctgtttgagggtatctatactataaaaagtgatgtgtggagctatggaatcctgttgtgggaaatcttttcacttggtgtaaacccttatcccggaatccccgtagacgctaatttctacaagctgatccagaatggcttcaagatggaccagcctttctacgccacagaggaaatctatatcattatgcaaagttgttgggctttcgatagcagaaagaggccttcttttcctaacttgacatcattcctgggttgccagttagccgacgctgaggaagcaatgtaccagaacgtcgacgggcgggtcagtgagtgccctcatacttaccaaaataggcgcccttttagccgcgagatggacctagggctgctctcacctcaggcccaggtagaggactcctag

SEQ ID NO: 143648 - DNA, 2991 bp, Artificial Sequence
  derived and/or modified sequence
atgccggcgctggcccgagacggaggccagcttcctctcctggttgtgttctccgcaatgatcttcggaaccattactaatcaggacctgcccgtgatcaaatgtgtgctgatcaaccataagaacaacgatagctcagtgggaaagagcagctcttatcccatggtgagtgaaagccctgaagatctcggctgcgctctgcggcctcagtcgtctggcacagtgtacgaggcagccgccgtcgaagttgatgtgtcagcatctattactttacaggtccttgtcgatgcacccggaaacatctcgtgcctctgggtctttaagcatagtagtcttaattgccaaccccattttgatctgcagaacaggggagtggttagcatggtgatcctgaaaatgactgaaacacaagctggcgaatatctgttgtttatccaatccgaagccactaactacaccattctcttcaccgtctccatccgcaacaccctgttatataccctcagacggccgtatttccgcaagatggaaaaccaagacgcactcgtctgtatttccgagtctgtcccagagccaattgtcgagtgggtactgtgcgactcacagggtgagagttgcaaggaagagtcccctgctgtggtgaagaaggaggagaaagtgcttcatgaactcttcggcaccgatattaggtgctgcgcacgcaacgaactaggaagagaatgtaccaggctcttcacgatcgacttaaaccaaacaccccaaaccaccctcccccagcttttcctgaaagttggggagcctttgtggataagatgcaaagccgtccatgtgaatcatggctttgggttgacctgggaacttgaaaataaagcactggaagaggggaactattttgagatgtcaacatattctactaaccgaaccatgattaggatactgtttgccttcgttagctcagtggcaaggaatgacactgggtactatacttgctcgtcctcaaaacacccttcgcaatcggccctggtgacgattgttgagaagggattcatcaacgctacaaactcgagtgaagactacgagattgaccagtatgaggaattttgtttctccgtgcggtttaaagcctatcctcagattagatgcacctggactttctctaggaagtcgtttccatgcgaacagaaagggctggacaacggttactctatatctaagttctgcaaccacaagcaccagcccggagaatacatctttcatgcagagaacgacgatgctcagtttaccaagatgttcacactgaacatcagaaggaagccgcaggtgctggcagaggctagcgctagtcaggcctcttgtttctctgatggctatcccctgcccagctggacctggaagaaatgcagtgataagagtccgaattgcacagaggaaatcaccgaaggggtgtggaataggaaggccaaccgaaaagtgtttggtcagtgggtgtcttcctccactctgaacatgtctgaggctatcaagggatttctggtgaagtgttgcgcttataacagcttgggaactagctgtgagacaatactattaaattcacctgggccttttccgttcatccaggacaacatctccttctatgctactattggtgtttgtttactgttcattgtggtgctgacactgctgatatgtcataagtacaaaaagcagttccgttacgagtcccaacttcagatggtgcaggtcaccggttctagcgacaatgaatatttctacgtcgacttccgggaatacgaatatgacctgaaatgggaattccccagagagaacctggagttcgggaaggtattaggatcaggcgcttttggcaaggtgatgaacgctactgcttacggcatctccaaaaccggcgtgtcaattcaggtggcagtaaaaatgcttaaggaaaaagcggatagctccgaacgggaagctttaatgagcgagctaaagatgatgactcagctaggaagccatgagaacatcgtgaacttgctgggtgcctgtacactcagtgggcccatttacttaatttttgagtattgctgctatggcgatctgctaaattatctgaggtccaaaagggagaagtttcaccggacatggacagaaatttttaaagaacacaactttagcttctatccaacgtttcagtcccatcccaatagtagcatgccagggtcgcgtgaagtgcagatccaccccgattctgaccaaatcagcggactgcatggaaactccttccattccgaggacgaaatcgagtacgaaaaccagaaacggctcgaagaagaggaggatcttaatgtgctgacattcgaggacctcctttgtttcgcttatcaggtagccaagggcatggaatttctagaattcaaaagttgcgtgcaccgtgatttggccgcacgcaatgtgctggtaactcacggcaaggtggtcaaaatctgtgattttgggctggcgcgagatattatgagtgattccaattacgtggtccgcgggaatgtgaggctggctcgacttcctgttaaatggatggcccctgaaagcctgtttgagggtatctacaccattaaatctgatgtgtggtcctacgggatcctcctttgggagattttctctctgggtgtgaatccatacccgggcattcctgttgacgcaaacttttataagctgatacaaaatggttttaaaatggaccagcctttctatgccacggaagaaatttatatcattatgcagtcgtgttgggcctttgactctcggaaacggccttcctttccaaatctaacttcttttcttggctgtcaactggccgatgccgaggaggctatgtaccaaaatgtggacgggcgagtaagcgaatgtcctcacacctaccaaaatagacgaccattcagcagggagatggatcttggactgctgagtcctcaggcacaagttgaggattcatag

SEQ ID NO: 143649 - DNA, 2859 bp, Artificial Sequence
  derived and/or modified sequence
atgcccgccctcgcacgcgatggaggccagctacctctgctagtggtgttctcagcaatgatatttgggaccattaccaaccaggacctccctgtgatcaaatgcgtgctgatcaaccacaagaataatgactcgagcgtgggaaaatctagttcatatcccatggtttcggagtcacccgaggatctgggttgtgcactaaggccacagagcagtggaaccgtgtatgaagcggccgccgtggaggtcgacgtgtccgcttcaattacgctgcaagtgcttgtggatgcacccgggaatatcagctgtctctgggtttttaaacactccagcttgaactgccaaccccacttcgatctacagaaccgaggggtagtttccatggtaatcctcaagatgacggaaactcaagcgggcgagtacctgctgtttattcaatctgaggccaccaactacaccatcctttttacggtcagcattagaaataccctgctctacaccctgcgacggccatactttcgcaagatggagaatcaggatgccctcgtctgcatctcggagtctgtacccgagccaattgtggaatgggtattatgcgattcccagggcgaaagctgcaaagaagaaagccctgcagtggtaaaaaaggaggagaaagtgttgcacgaactgttcggtaccgatattcggtgctgtgcgcggaatgagctgggacgagagtgcacccgcctgtttaccatcgatctgaatcagacacctcagacgacgctgcctcaactgtttctgaaggttggcgagcctctctggattcgatgcaaggctgtgcacgttaaccacggtttcggtcttacatgggagctggagaacaaggctctggaggaaggcaattattttgagatgagcacctactctaccaatcgtaccatgatcaggatactgtttgctttcgtatcgtccgtagccaggaacgacaccgggtattacacctgctcctcttctaaacatccctcccagagcgcactggttaccatcgtggaaaagggctttattaatgccaccaattcctctgaagattatgagattgaccagtatgaggaattttgtttcagcgtccgtttcaaagcctatccgcagattcgctgcacttggaccttctcgagaaagtcatttccctgcgagcagaagggtctggacaatggatacagcatcagtaagttctgtaatcataagcaccagccaggcgaatacatctttcatgccgagaatgacgatgcccagttcacaaagatgtttacactgaacatacgaaggaagccccaggttttggctgaggctagcgccagccaggccagttgcttcagcgatggctatcctctgcctagctggacctggaaaaaatgctcagacaaatctccaaactgcaccgaggagattacagagggggtgtggaatcggaaagccaatcggaaagtcttcgggcagtgggtttcatcttccactcttaatatgagcgaagccatcaagggtttcctggtgaagtgttgcgcttacaattcactgggaaccagttgcgagacaatcctcctaaacagtcctggaccctttccctttatacaggataatattagtttctacgctacaataggagtctgtttgctcttcattgtcgtgctgaccctgctcatttgccacaaatacaaaaagcaatttaggtatgaatcccaattacaaatggtccaggtgaccgggagctctgataacgagtacttctacgttgactttagggagtacgagtacgacctgaagtgggagtttcctcgggagaacctggagttcggcaaggtcctgggcagtggggcctttggcaaagtgatgaacgcaactgcatacggaatttcaaaaacaggagttagtattcaggtggccgtcaagatgctaaaggaaaaggccgattctagcgaaagagaggctctcatgagcgaactgaagatgatgacacagttgggttcacacgagaacatcgtgaatctccttggggcctgcacactgtccggtccgatatacctgatttttgagtactgctgttacggcgacttgctgaactacctcagatctaaacgggagaaattccaccgaacatggacagagatctttaaggagcacaacttttcgttttaccccacttttcagtcccatcccaacagctcaatgccaggttcgagagaagtgcaaatccatcctgattcagatcagatctctggtctgcacggcaatagcttccatagcgaagatgagattgagtatgagaaccagaagcgcctggaggaagaggaggatctgaatgtgctcactttcgaggatctgctgtgttttgcgtatcaggtagccaaaggcatggaatttctcgaattcaaatcggcgcgcctaccggtgaaatggatggcaccggagtctctcttcgagggaatctacacaatcaagagcgacgtgtggagttacggaattctgctgtgggagatttttagcctgggcgtcaacccttatcccgggattccagtcgacgcaaacttctacaagctcattcagaatgggttcaaaatggatcagcccttctacgccaccgaagaaatttacataattatgcagtcctgctgggcttttgacagtcgcaaacgtccctccttccctaatctgacttctttcttaggctgccaattggctgacgccgaagaagcgatgtaccaaaacgtggatggtcgcgtctctgaatgtccccatacctaccagaaccggaggccctttagccgcgaaatggacctgggcctgctctccccacaggctcaggtggaggattcttag

SEQ ID NO: 143650 - DNA, 2982 bp, Artificial Sequence
  derived and/or modified sequence
atgcctgccctggccagagatggcggccagctgcccctgctggtggtgttcagcgccatgatcttcggcaccatcaccaaccaggacctgcctgtgatcaagtgtgtgctgatcaaccacaagaacaatgacagctctgtgggcaagagcagcagctaccccatggtgtctgagagccctgaggacctgggctgtgccctgcggccccagagcagcggcaccgtgtatgaggccgctgctgtggaggtggatgtgtctgccagcatcaccctgcaggtgctggtggatgcccctggcaacatcagctgcctgtgggtgttcaagcacagcagcctgaactgccagccccactttgacctgcagaacagaggagtggtgtccatggtgatcctgaagatgacagagacccaggccggggagtacctgctcttcatccagagcgaggccaccaactacaccatcctcttcaccgtgtccatccggaacaccctgctgtacaccctgcggcggccctacttcaggaagatggagaaccaggatgccctggtgtgcatcagcgagagcgtgcctgagcccatcgtggagtgggtgctgtgtgacagccagggcgagagctgcaaggaggagagccctgctgtggtgaagaaggaggagaaggtgctgcacgagctgtttggaacagacatccgctgctgtgccagaaatgagctgggccgggagtgcaccaggctcttcaccatcgacctgaaccagaccccccagaccaccctgccccagctgttcctgaaggtgggggagcccctgtggatccgctgcaaggctgtgcacgtgaaccacggcttcggcctgacctgggagctggagaacaaggccctggaggagggcaactactttgagatgagcacctacagcaccaacagaaccatgatccgcatcctgtttgcctttgtgtcctctgtggccagaaatgacaccggctactacacctgcagcagcagcaagcaccccagccagagcgccctggtgaccatcgtggagaagggcttcatcaatgccaccaacagcagtgaagattatgaaattgaccagtatgaggagttctgcttctctgtgcgcttcaaggcctacccccagatccgctgcacctggaccttcagcaggaagagcttcccctgtgagcagaagggcctggacaatggctacagcatcagcaagttctgcaaccacaagcaccagcctggagagtacatcttccacgcagaaaatgatgatgcccagttcaccaagatgttcaccctgaacatccggaggaagccccaggtgctggccgaggccagcgccagccaggccagctgcttcagtgatggctaccccctgcccagctggacctggaagaagtgcagcgacaagagccccaactgcacagaggagatcacagaaggagtgtggaacaggaaggccaacaggaaggtgtttggccagtgggtgagcagcagcaccctgaacatgtctgaggccatcaagggcttcctggtgaagtgctgtgcctacaacagcctgggcaccagctgtgagaccatcctgctgaacagccctggccccttccccttcatccaggacaacatctccttctacgccaccatcggcgtgtgcctgctcttcatcgtggtgctgaccctgctgatctgccacaagtacaagaagcagttccgctatgagagccagctgcagatggtgcaggtgacaggcagcagtgacaatgagtacttctacgtggacttccgggagtatgaatatgacctgaagtgggagttcccccgggagaacctggagtttgggaaggtgctgggcagcggggccttcggcaaggtgatgaatgccacagcctacggcatcagcaagacaggagtgtccatccaggtggccgtgaagatgctgaaggagaaggctgacagcagcgagcgggaggccctgatgtctgagctgaagatgatgacccagctgggcagccatgagaacatcgtgaacctgctgggcgcctgcaccctgagcggccccatctacctgatctttgagtactgctgctacggggacctgctgaactacctgcggagcaagcgggagaagttccacaggacctggacagagatcttcaaggagcacaacttctccttctaccccaccttccagagccaccccaacagctccatgcctggcagccgggaggtgcagatccacccagacagcgaccagatcagcggcctgcacggcaacagcttccacagtgaagatgaaattgaatatgagaaccagaagaggctggaggaggaggaggacctgaatgtgctgacctttgaggacctgctgtgctttgcctaccaggtggccaagggcatggagttcctggagttcaagagctgtgtgcaccgggacctggccgccagaaatgtgctggtgacccacggcaaggtggtgaagatctgtgactttggcctggcccgggacatcatgtctgacagcaactacgtggtgagaggaaatgcccggctgcctgtgaagtggatggcccctgagagcctgtttgagggcatctacaccatcaagagtgatgtgtggagctatggcatcctgctgtgggagatcttcagcctgggcgtgaacccctacccaggcatccctgtggatgccaacttctacaagctgatccagaatggcttcaagatggaccagcccttctacgccacagaggagatctacatcatcatgcagagctgctgggcctttgacagcaggaagaggcccagcttccccaacctgaccagcttcctgggctgccagctggctgatgctgaggaggccatgtaccagaatgtggatggccgggtgtctgagtgcccccacacctaccagaacagaagacccttcagccgggagatggacctgggcctgctgagcccccaggcccaggtggaggacagctag

SEQ ID NO: 143651 - DNA, 2991 bp, Artificial Sequence
  derived and/or modified sequence
atgcctgccctggccagagatggcggccagctgcccctgctggtggtgttcagcgccatgatcttcggcaccatcaccaaccaggacctgcctgtgatcaagtgtgtgctgatcaaccacaagaacaatgacagctctgtgggcaagagcagcagctaccccatggtgtctgagagccctgaggacctgggctgtgccctgcggccccagagcagcggcaccgtgtatgaggccgctgctgtggaggtggatgtgtctgccagcatcaccctgcaggtgctggtggatgcccctggcaacatcagctgcctgtgggtgttcaagcacagcagcctgaactgccagccccactttgacctgcagaacagaggagtggtgtccatggtgatcctgaagatgacagagacccaggccggggagtacctgctcttcatccagagcgaggccaccaactacaccatcctcttcaccgtgtccatccggaacaccctgctgtacaccctgcggcggccctacttcaggaagatggagaaccaggatgccctggtgtgcatcagcgagagcgtgcctgagcccatcgtggagtgggtgctgtgtgacagccagggcgagagctgcaaggaggagagccctgctgtggtgaagaaggaggagaaggtgctgcacgagctgtttggaacagacatccgctgctgtgccagaaatgagctgggccgggagtgcaccaggctcttcaccatcgacctgaaccagaccccccagaccaccctgccccagctgttcctgaaggtgggggagcccctgtggatccgctgcaaggctgtgcacgtgaaccacggcttcggcctgacctgggagctggagaacaaggccctggaggagggcaactactttgagatgagcacctacagcaccaacagaaccatgatccgcatcctgtttgcctttgtgtcctctgtggccagaaatgacaccggctactacacctgcagcagcagcaagcaccccagccagagcgccctggtgaccatcgtggagaagggcttcatcaatgccaccaacagcagtgaagattatgaaattgaccagtatgaggagttctgcttctctgtgcgcttcaaggcctacccccagatccgctgcacctggaccttcagcaggaagagcttcccctgtgagcagaagggcctggacaatggctacagcatcagcaagttctgcaaccacaagcaccagcctggagagtacatcttccacgcagaaaatgatgatgcccagttcaccaagatgttcaccctgaacatccggaggaagccccaggtgctggccgaggccagcgccagccaggccagctgcttcagtgatggctaccccctgcccagctggacctggaagaagtgcagcgacaagagccccaactgcacagaggagatcacagaaggagtgtggaacaggaaggccaacaggaaggtgtttggccagtgggtgagcagcagcaccctgaacatgtctgaggccatcaagggcttcctggtgaagtgctgtgcctacaacagcctgggcaccagctgtgagaccatcctgctgaacagccctggccccttccccttcatccaggacaacatctccttctacgccaccatcggcgtgtgcctgctcttcatcgtggtgctgaccctgctgatctgccacaagtacaagaagcagttccgctatgagagccagctgcagatggtgcaggtgacaggcagcagtgacaatgagtacttctacgtggacttccgggagtatgaatatgacctgaagtgggagttcccccgggagaacctggagtttgggaaggtgctgggcagcggggccttcggcaaggtgatgaatgccacagcctacggcatcagcaagacaggagtgtccatccaggtggccgtgaagatgctgaaggagaaggctgacagcagcgagcgggaggccctgatgtctgagctgaagatgatgacccagctgggcagccatgagaacatcgtgaacctgctgggcgcctgcaccctgagcggccccatctacctgatctttgagtactgctgctacggggacctgctgaactacctgcggagcaagcgggagaagttccacaggacctggacagagatcttcaaggagcacaacttctccttctaccccaccttccagagccaccccaacagctccatgcctggcagccgggaggtgcagatccacccagacagcgaccagatcagcggcctgcacggcaacagcttccacagtgaagatgaaattgaatatgagaaccagaagaggctggaggaggaggaggacctgaatgtgctgacctttgaggacctgctgtgctttgcctaccaggtggccaagggcatggagttcctggagttcaagagctgtgtgcaccgggacctggccgccagaaatgtgctggtgacccacggcaaggtggtgaagatctgtgactttggcctggcccgggacatcatgtctgacagcaactacgtggtgagaggaaatgtgcggctggcccggctgcctgtgaagtggatggcccctgagagcctgtttgagggcatctacaccatcaagagtgatgtgtggagctatggcatcctgctgtgggagatcttcagcctgggcgtgaacccctacccaggcatccctgtggatgccaacttctacaagctgatccagaatggcttcaagatggaccagcccttctacgccacagaggagatctacatcatcatgcagagctgctgggcctttgacagcaggaagaggcccagcttccccaacctgaccagcttcctgggctgccagctggctgatgctgaggaggccatgtaccagaatgtggatggccgggtgtctgaatgtccccacacctaccagaacagaagacccttcagccgggagatggacctgggcctgctgagcccccaggcccaggtggaggacagctag

SEQ ID NO: 143652 - DNA, 2859 bp, Artificial Sequence
  derived and/or modified sequence
atgcctgccctggccagagatggcggccagctgcccctgctggtggtgttcagcgccatgatcttcggcaccatcaccaaccaggacctgcctgtgatcaagtgtgtgctgatcaaccacaagaacaatgacagctctgtgggcaagagcagcagctaccccatggtgtctgagagccctgaggacctgggctgtgccctgcggccccagagcagcggcaccgtgtatgaggccgctgctgtggaggtggatgtgtctgccagcatcaccctgcaggtgctggtggatgcccctggcaacatcagctgcctgtgggtgttcaagcacagcagcctgaactgccagccccactttgacctgcagaacagaggagtggtgtccatggtgatcctgaagatgacagagacccaggccggggagtacctgctcttcatccagagcgaggccaccaactacaccatcctcttcaccgtgtccatccggaacaccctgctgtacaccctgcggcggccctacttcaggaagatggagaaccaggatgccctggtgtgcatcagcgagagcgtgcctgagcccatcgtggagtgggtgctgtgtgacagccagggcgagagctgcaaggaggagagccctgctgtggtgaagaaggaggagaaggtgctgcacgagctgtttggaacagacatccgctgctgtgccagaaatgagctgggccgggagtgcaccaggctcttcaccatcgacctgaaccagaccccccagaccaccctgccccagctgttcctgaaggtgggggagcccctgtggatccgctgcaaggctgtgcacgtgaaccacggcttcggcctgacctgggagctggagaacaaggccctggaggagggcaactactttgagatgagcacctacagcaccaacagaaccatgatccgcatcctgtttgcctttgtgtcctctgtggccagaaatgacaccggctactacacctgcagcagcagcaagcaccccagccagagcgccctggtgaccatcgtggagaagggcttcatcaatgccaccaacagcagtgaagattatgaaattgaccagtatgaggagttctgcttctctgtgcgcttcaaggcctacccccagatccgctgcacctggaccttcagcaggaagagcttcccctgtgagcagaagggcctggacaatggctacagcatcagcaagttctgcaaccacaagcaccagcctggagagtacatcttccacgcagaaaatgatgatgcccagttcaccaagatgttcaccctgaacatccggaggaagccccaggtgctggccgaggccagcgccagccaggccagctgcttcagtgatggctaccccctgcccagctggacctggaagaagtgcagcgacaagagccccaactgcacagaggagatcacagaaggagtgtggaacaggaaggccaacaggaaggtgtttggccagtgggtgagcagcagcaccctgaacatgtctgaggccatcaagggcttcctggtgaagtgctgtgcctacaacagcctgggcaccagctgtgagaccatcctgctgaacagccctggccccttccccttcatccaggacaacatctccttctacgccaccatcggcgtgtgcctgctcttcatcgtggtgctgaccctgctgatctgccacaagtacaagaagcagttccgctatgagagccagctgcagatggtgcaggtgacaggcagcagtgacaatgagtacttctacgtggacttccgggagtatgaatatgacctgaagtgggagttcccccgggagaacctggagtttgggaaggtgctgggcagcggggccttcggcaaggtgatgaatgccacagcctacggcatcagcaagacaggagtgtccatccaggtggccgtgaagatgctgaaggagaaggctgacagcagcgagcgggaggccctgatgtctgagctgaagatgatgacccagctgggcagccatgagaacatcgtgaacctgctgggcgcctgcaccctgagcggccccatctacctgatctttgagtactgctgctacggggacctgctgaactacctgcggagcaagcgggagaagttccacaggacctggacagagatcttcaaggagcacaacttctccttctaccccaccttccagagccaccccaacagctccatgcctggcagccgggaggtgcagatccacccagacagcgaccagatcagcggcctgcacggcaacagcttccacagtgaagatgaaattgaatatgagaaccagaagaggctggaggaggaggaggacctgaatgtgctgacctttgaggacctgctgtgctttgcctaccaggtggccaagggcatggagttcctggagttcaagagcgcccggctgcctgtgaagtggatggcccctgagagcctgtttgagggcatctacaccatcaagagtgatgtgtggagctatggcatcctgctgtgggagatcttcagcctgggcgtgaacccctacccaggcatccctgtggatgccaacttctacaagctgatccagaatggcttcaagatggaccagcccttctacgccacagaggagatctacatcatcatgcagagctgctgggcctttgacagcaggaagaggcccagcttccccaacctgaccagcttcctgggctgccagctggctgatgctgaggaggccatgtaccagaatgtggatggccgggtgtctgaatgtccccacacctaccagaacagaagacccttcagccgggagatggacctgggcctgctgagcccccaggcccaggtggaggacagctag

SEQ ID NO: 143653 - DNA, 2982 bp, Artificial Sequence
  derived and/or modified sequence
atgcccgccctggcccgggacggcggccagctgcccctgctggtggtgttctcagccatgatctttggcacaattactaatcaggacctgcctgtgatcaagtgtgtcctcatcaaccacaagaacaatgactccagcgtggggaaatcttcctcttatcccatggtgagcgagagcccggaggatctgggctgtgctttaagacctcagagctcgggcactgtatacgaggctgccgccgtcgaggtggatgtaagcgccagcatcactttgcaggtattggtggatgcccccggcaatatctcttgcttatgggtatttaagcatagctctctcaactgtcagccccattttgatctgcagaatcggggtgttgtgtcaatggtgatcttgaagatgacagaaacccaagccggggaatatctgctgttcatccagtctgaggccaccaattacactatcctctttacagtgtcaattagaaatacactgctttacaccctgcggcgaccatatttcaggaagatggagaatcaggatgccttggtatgcatttcagagagtgtgccggagccaattgtggagtgggtgctgtgcgactctcagggcgagagctgtaaggaggagagccctgccgtagttaagaaagaagaaaaggtcctccatgagcttttcgggacagacatccgctgttgcgcccgcaatgagctgggaagagagtgtacgagattgttcaccatcgatctgaatcagacacctcagacaacccttccccagctgtttttaaaggtgggggaacccctctggatcaggtgcaaggccgtgcatgtcaatcacggctttggcctcacgtgggagctggaaaataaagcattggaggaaggcaactactttgagatgagcacctactccaccaatagaacaatgatccggatacttttcgccttcgtgagcagtgtggcaaggaatgatacaggatactacacttgtagttcaagcaagcatcccagccagtctgctctggtgaccatcgtggagaagggatttattaatgcaactaactcttccgaagattatgaaatcgaccagtacgaagagttctgcttttccgtgagattcaaggcgtatccccaaatccggtgcacctggacattcagccgaaagtccttcccttgtgagcagaaaggcctagacaacggatattctatctccaagttttgcaaccacaaacatcagccgggagagtatattttccacgcagagaatgatgacgctcaattcaccaagatgtttaccttgaatattcgtcgaaagccccaagtgctggccgaagcttctgcatcccaagcctcctgttttagcgatgggtatcctttgccatcgtggacctggaagaagtgttcagacaaatctcccaactgtaccgaagagattacagaaggagtgtggaataggaaagctaacagaaaagtgttcggccaatgggtgagttcttccacactgaacatgtctgaggccataaagggcttcctggtcaagtgttgtgcttataatagtctggggactagctgcgaaactatccttctcaactcacctggcccattccctttcattcaggacaatatctctttctatgccacaatcggcgtttgtctgctcttcatcgtggtattaactctgctgatatgccacaaatataagaaacagttcaggtatgaatctcagctgcagatggtacaagtgacggggtcctctgacaacgagtatttttacgtcgacttccgcgaatatgaatacgacctcaagtgggaatttccacgagaaaaccttgaatttggcaaagtgctgggctctggagccttcggtaaggtgatgaacgccactgcctacgggatctccaagactggagtgtccatacaagttgccgtaaagatgttgaaggagaaagcagattccagcgagagggaggcactgatgtcagagctgaaaatgatgacacagctcggttcacacgaaaatattgtgaatctcctgggcgcctgtaccttgtctggccctatctatctaatttttgaatattgttgctatggggaccttcttaactacctgaggagtaagcgggagaagtttcacagaacttggactgaaatctttaaggagcataacttcagtttttatcctacgtttcagtctcatccaaacagctcaatgcctggatccagagaagttcagatccatcctgattcagaccagatctcaggtctgcacggcaatagcttccattccgaggacgagatcgagtacgaaaatcagaagcggctcgaggaagaggaagacctgaacgtactcactttcgaggacctgctctgtttcgcctatcaagtggcgaagggcatggagttcttagagtttaagtcctgcgtgcaccgcgacctcgcagctcgcaacgtcctggtgacgcacggcaaggtggtgaaaatttgcgattttgggctcgctcgcgacatcatgagcgacagcaattacgttgtgcgaggtaatgcccgattgccagtcaagtggatggccccggaatcactcttcgaggggatttacactattaagtcagacgtatggtcatacgggatactgctgtgggaaattttttctttaggtgttaatccctacccaggaattcccgtagatgcgaacttttataaacttattcaaaatggctttaagatggatcagcccttctacgccactgaagaaatttacatcattatgcaatcgtgttgggcttttgacagccggaagagaccctcttttccgaatctgactagctttttgggttgtcaactagcggatgccgaggaagcaatgtaccaaaacgtggacggtagggtgtccgagtgcccacatacctatcagaacaggaggcccttcagtcgagagatggatctggggctgctctcaccccaggctcaagtggaggacagctag

SEQ ID NO: 143654 - DNA, 2991 bp, Artificial Sequence
  derived and/or modified sequence
atgcccgccctggcccgggacggcggccagctgcccctgctggtggttttttctgcaatgatcttcggcaccatcaccaaccaggatctaccagtcattaagtgcgtcctaattaaccacaagaacaatgattcctcagttggaaagtcgtcgtcctatcccatggtaagtgagtctccagaagatctgggatgtgcattaaggccacagagctccggtaccgtgtacgaggccgcagccgtggaggtggatgtgagcgcctcaatcaccctacaggtcctggtggatgcacccgggaatatatcctgcctgtgggtgtttaagcattcgtcactcaattgccagccccattttgacctgcaaaatcgtggcgtggttagcatggtcatccttaagatgacggaaacccaggcgggggagtatcttctgttcattcagtcagaagcgaccaactacaccatattattcactgttagcatccgcaacacactactttacaccctgagacggccgtacttccggaagatggaaaaccaggatgcgcttgtgtgcatctctgagtctgttccggagcctattgtggaatgggtgctttgtgattcacagggggagtcctgtaaagaggaaagccccgcagtggtcaagaaagaagagaaagttcttcatgaattgttcggcacagacatccgctgctgtgcccgcaacgaactcggcagggaatgcacgcgactatttaccatcgatctgaatcagaccccacaaacgaccctaccacagctcttcctcaaggtcggagaaccattatggatccggtgtaaggccgtgcacgttaaccacggcttcggcctgacctgggagctggagaacaaagcattggaagagggcaactactttgagatgtcgacgtactcaaccaaccgtaccatgatccgaattctgttcgccttcgtgagctctgtggcccgtaatgatacaggctactacacatgctcttcgtccaagcacccctctcagagtgctctggttactatcgttgaaaaaggtttcatcaatgcaacgaactcgtccgaggactacgagatcgatcagtatgaagagttttgtttctctgtcagatttaaagcgtacccccagatcaggtgcacctggactttcagccgcaagagttttccatgtgagcaaaagggcctggacaatgggtactccatttcaaagttttgtaaccacaaacaccaacccggcgaatatatatttcatgcagagaatgacgatgcacagtttacaaagatgtttacacttaatattcgccggaagcctcaagtgctcgcagaagcatccgcctcacaggcttcttgctttagtgatggctaccccttgccttcatggacctggaagaaatgcagtgacaaaagtccaaactgtactgaggagattacagagggagtgtggaatcggaaagccaatcgtaaagtctttggccaatgggtctcttcaagcaccctaaatatgagtgaggcaatcaaaggctttttggtgaagtgctgcgcttataattccctgggcacctcatgtgaaaccattctcctcaacagcccaggacctttccctttcatccaggataatatctccttttacgctacaatcggagtatgcttgttgttcatcgtcgtgttgacccttctgatttgccacaagtataaaaagcagtttcgctacgaatcgcagctgcagatggtccaggttactgggtcttccgacaatgaatacttttacgtcgattttcgggagtatgaatatgacctgaagtgggagtttcccagggagaacctcgagttcggtaaagttctgggcagcggcgcttttggtaaagttatgaatgccaccgcgtatggaatctctaagacaggtgtctccatccaggttgccgtgaagatgctcaaggagaaggctgactcgtccgaaagggaagcgctgatgtcagaactgaagatgatgacccaactgggttcccacgaaaatatcgttaacctgttaggtgcatgcactttgtccggcccaatctacctaatattcgaatattgttgctacggcgacctgctgaactacctgagaagcaaacgggaaaagtttcataggacctggaccgaaatattcaaggaacacaactttagtttttaccctacattccagagccatcctaactcttccatgccaggatccagagaagtgcagatccatcctgatagcgatcagattagcggcttgcacgggaattccttccactccgaagacgagatagaatatgagaaccagaagcggctggaagaggaggaagacctgaatgtgctgaccttcgaggatttgctttgtttcgcttaccaggtggctaaagggatggagtttctcgaatttaagtcctgcgtccatcgggacctggccgcacgaaatgtgttagtgacacatggtaaagtagttaaaatttgcgactttgggctggcccgcgatataatgagtgattctaattatgtagtgagaggcaatgtcagattagcacgcctccccgtaaagtggatggccccagagtcgctgttcgagggcatatatactatcaagagtgacgtctggtcatacgggattcttctttgggagatcttcagcctcggagtgaacccttaccccgggatccctgttgacgctaatttttataagctgatccagaatggattcaaaatggaccagcctttttatgcgaccgaagaaatttatatcattatgcagtcgtgctgggcattcgactcaaggaagcgaccttcattccctaatctgacaagtttcctggggtgtcagcttgccgatgctgaggaggcgatgtatcaaaatgtggacggaagagtgtcagaatgtccccatacgtatcagaaccgaagaccattttcacgggaaatggacctgggcctactgtctccccaggcgcaggtcgaggattcctag

SEQ ID NO: 143655 - DNA, 2859 bp, Artificial Sequence
  derived and/or modified sequence
atgcccgccctggcccgggacggcggccagctgcccctgctggtggtcttctctgccatgatttttgggacaatcaccaaccaagatctgccggtgatcaaatgcgtgttgataaaccacaaaaataatgattccagcgtcggaaaaagtagctcttatccaatggtgtctgagagcccagaggatctgggctgtgcgcttcgccctcagtctagtggaaccgtgtacgaagctgcagcagtggaagtagatgtttccgcttccatcactctgcaggtattggtcgatgctcccgggaacatttcttgtctctgggtctttaagcactcttccctgaactgccagcctcactttgatcttcagaacaggggcgtggttagtatggtgatcctgaagatgaccgaaactcaagccggtgagtacctcctttttatccagtctgaggccactaattacaccatcctgtttactgtgtcaattcgaaataccctcctgtatacgctccgccgcccctactttcgcaagatggaaaaccaagacgccttggtgtgtattagcgagtccgtgccggagccgattgttgagtgggtactgtgcgactcacaaggtgagtcctgcaaggaagaaagcccggccgtggttaagaaagaagaaaaggtcctgcatgagctcttcggaaccgatatcaggtgttgcgcacgtaacgaactggggcgcgagtgcacacggcttttcactatcgatttgaatcagaccccgcagaccaccttgccccagctcttcctgaaagtaggcgagccgttgtggatccgatgtaaggccgttcatgtgaaccacggtttcgggctgacctgggaactggagaacaaggccctggaggaaggcaactattttgagatgtccacatacagcacgaataggactatgatcagaatcctcttcgcttttgtgagctccgtggctcgaaacgacaccggatactatacatgctcttcttctaaacatcctagtcaatccgcactcgtcactatcgtcgaaaaaggcttcatcaacgccactaattcttcagaagattacgagattgaccagtatgaggaattctgcttttctgtgcgatttaaagcttacccacaaattaggtgcacctggacgtttagtaggaagagcttcccttgcgaacagaaggggctcgacaacggctactccatttcaaagttctgcaaccacaaacatcagccgggtgagtacatctttcacgccgaaaacgatgatgcccagttcaccaaaatgttcacattgaacatcagaagaaagccacaggttctcgcagaggcttcagcgtcccaggccagctgcttttccgacgggtacccactgccatcttggacatggaagaagtgctcagacaagtcccctaattgtaccgaggagatcaccgaaggggtgtggaacagaaaagctaaccgcaaagtgttcggacagtgggtctccagctctacactgaacatgagcgaagctattaaaggtttcttggttaagtgttgtgcctataattcacttggaactagctgcgaaacaatccttcttaatagccccggtccctttcccttcatccaggacaatatatctttctatgccaccataggcgtctgtctactttttatcgtggtgctcaccctcttaatctgtcataagtacaaaaagcagtttcggtacgagtcccagttgcagatggtccaggttaccggatcgtccgataatgaatacttctatgtcgattttcgtgagtacgaatacgacttgaaatgggaattcccacgggagaatctcgagttcggaaaagttctgggctcaggagcgtttggcaaggtgatgaacgctactgcctacggaataagcaaaactggcgtttctatacaggtcgcagtgaagatgctgaaggaaaaggcagatagttctgaacgggaggcactgatgtcggagctgaaaatgatgacccagctgggatctcacgaaaatatagtcaatcttctgggcgcgtgcacactgtccgggcctatttacctcatctttgagtactgttgttacggagatctgctcaattacctgcgctcaaagcgggagaagtttcaccggacctggaccgagatcttcaaggagcacaacttcagtttttaccccacctttcaaagccatccgaactccagcatgcccggctcccgcgaggttcaaattcacccggatagtgatcaaatctctggtctccatgggaactcttttcatagcgaggacgagatagagtacgagaaccaaaagcgattggaggaagaggaagacctgaacgtcctcactttcgaagacctgctttgtttcgcctatcaagtcgccaaggggatggagtttttggaatttaaatccgccaggctgccagtgaaatggatggcccccgagtccttgtttgagggaatctatacaattaaaagcgacgtatggtcatacggaattctactgtgggaaatcttcagtttgggagtgaacccctaccctggaattcccgttgatgccaatttttataagctaattcagaatggatttaagatggaccaacctttttatgcgactgaggaaatttacattatcatgcagtcctgttgggcgtttgactcgagaaaaaggccctcattccccaatcttacatcctttctcggttgtcaactggccgatgccgaggaggccatgtatcaaaatgtggacggaagagtgagtgaatgccctcacacttatcagaaccggcggccatttagtcgcgagatggacctcggtctccttagtccgcaggctcaagtggaggattcttag

SEQ ID NO: 143656 - DNA, 2982 bp, Artificial Sequence
  derived and/or modified sequence
atgcccgctctggccagggacggcggacagcttcctctgctggtggtatttagcgctatgatttttgggactattacaaaccaggatcttccagtcatcaagtgcgtgctgatcaaccataaaaataacgatagcagtgtggggaaatcgagttcttacccaatggtctccgagagtccagaggacctgggttgcgcactgaggccgcaaagctctggcaccgtttacgaggcagccgcagtggaagtggatgtatcagcctctattaccctccaagtcttggtggacgcacccggaaacatcagctgcctgtgggttttcaagcactcctccctcaactgtcagcctcacttcgacctccaaaacagaggcgtggtgtctatggtgatactcaagatgactgagacgcaggccggtgagtacctgctcttcattcagagcgaggcaacaaactatacaatactgtttacagtgtccatccgtaatacactgctctacacattgaggcgtccctacttcaggaagatggagaatcaggacgccctggtttgcatttctgaaagtgtcccagagcccatagttgaatgggtcctttgtgattcgcagggagagagctgcaaggaagaatccccagctgttgtcaagaaggaagagaaggtactccatgagctgtttggaacggacattcggtgttgcgcaagaaacgaattgggccgagaatgtactagattatttactattgatttgaaccagactcctcagactaccctgcctcaactgttcctaaaagtcggcgagcccttatggatacgttgtaaagcagtgcacgtcaaccatggtttcggtttaacgtgggagctggaaaataaagccttggaggagggaaactactttgaaatgagtacatactctactaaccgcacaatgatccggattctgtttgcctttgtgtcctcggtggctcgcaacgacaccggctattatacttgtagcagctctaagcatcccagccagagcgcccttgtgacaatagtcgagaaggggtttattaacgccacaaattctagcgaggactatgaaattgatcaatacgaggagttctgcttttccgtgcgctttaaagcatatccccagatcagatgtacttggacttttagcagaaagtcctttccctgcgagcagaagggcttggataatggctactcaatttctaagttctgtaatcataagcatcaacctggggaatacatcttccacgccgagaatgatgacgctcagttcactaaaatgttcactctgaatattcggagaaagccccaggtgctcgctgaggctagcgcgagtcaggctagttgcttctccgatggctacccgctgccaagctggacctggaaaaagtgctccgataagagtccaaactgtaccgaggagataaccgaaggagtgtggaatcggaaggctaacagaaaggtcttcggccagtgggtctctagtagtaccctgaacatgtccgaagctatcaagggtttcctagtgaagtgctgtgcttataacagcctgggcacctcttgtgaaacaatcctgttgaatagtccaggtccattcccttttatccaggataatataagcttctacgcaaccataggggtatgcctgttattcatcgtggtgctgacccttctaatctgccacaaatataagaagcagtttagatatgagagccaattgcagatggtccaggttaccgggtcctcggacaatgagtatttttatgtggactttcgcgagtacgagtacgatttaaaatgggagtttccaagagagaacctcgagtttggcaaggtgctgggctctggcgcattcggcaaggtcatgaatgccactgcctatgggatctcaaaaacaggagtgagcatacaagtggctgtgaaaatgctgaaggaaaaggctgatagttcagaaagagaagccttgatgtccgaacttaagatgatgacacagttgggcagccatgaaaacatagttaatctccttggcgcatgcactctgtctggacctatctacctgatattcgagtactgttgctatggggaccttctcaactatctgcgctcaaagcgcgagaaattccaccgaacctggactgagatatttaaagaacataatttcagcttctacccaacttttcagtcacatcctaacagtagtatgccagggtcccgcgaggttcagatccaccctgactctgaccaaattagcggcctgcacggcaatagttttcactcggaagatgagatcgagtacgagaatcagaagcgcctggaggaagaggaagacttgaatgtgttgacatttgaggaccttctctgttttgcatatcaggttgctaaaggcatggagtttctggagtttaaaagctgcgtgcacagagatctagccgctcgaaatgtgctggttacacatgggaaagtcgtcaaaatttgcgacttcgggctagccagggatatcatgagcgacagtaattacgtagtaagaggcaacgctcgcctccctgtgaagtggatggcgccagaatccctgtttgagggcatttacactatcaagtccgacgtctggtcctacggcatattgctgtgggaaatcttctcgcttggagtgaacccttacccaggcattcccgtggacgccaacttttataagttgattcagaatgggtttaagatggatcagcctttctatgctactgaggagatctacatcatcatgcaatcctgttgggctttcgacagcagaaagcggccaagcttcccaaacctcacctcgttcctcgggtgtcaactggcagatgctgaagaagccatgtatcaaaatgtggatggccgagtttcggagtgcccacacacatatcagaacagacgccctttttcacgcgagatggaccttggcctgctcagtccccaggcccaggtggaagactcatag

SEQ ID NO: 143657 - DNA, 2991 bp, Artificial Sequence
  derived and/or modified sequence
atgcctgcacttgctcgcgacggcggacagttgccattgcttgtggtcttctctgccatgattttcggcaccataacaaaccaagacctcccagtcatcaagtgtgttttaatcaaccataaaaataatgattcaagcgtcgggaaatcaagttcttatccaatggtgtccgagtccccagaggatctgggctgcgctctccgccctcagtctagcggaactgtgtacgaagctgccgcagtcgaggtggatgtcagtgcctcaatcacactacaggtgcttgtagacgctcccggaaatatcagttgtctgtgggtgtttaaacatagctccctgaactgtcagcctcattttgatttgcagaatagaggggtggtgagcatggtgatccttaaaatgaccgagacacaagccggagaatacctcctcttcattcaaagcgaagcaaccaactacaccattctgttcactgtgagcattcgcaacaccctgctgtataccctgaggaggccttatttccgaaagatggaaaatcaggatgcacttgtttgtatctccgagtccgtgccggagccaattgtagagtgggtattatgtgattctcagggcgagtcctgtaaagaggaaagccccgctgtggtgaagaaggaggagaaagtgctacatgagctctttggaacggacatacgttgttgcgccaggaacgagctgggaagggaatgcactcgactgttcaccatcgatctgaaccagacacctcagaccacgttgccacagctctttctgaaggtcggggagcccttatggatcagatgtaaggcagtgcatgtcaaccacggctttgggctgacgtgggagctcgagaacaaagctctcgaggagggcaattactttgaaatgtccacgtatagtacaaaccggaccatgatccgaatactgttcgcctttgtgtccagtgtagcacgtaacgacacaggttactatacatgcagcagctcaaaacatcctagtcaatctgcactggttacaattgtggaaaaaggcttcattaatgcaactaactcctccgaggactacgaaattgaccagtatgaagagttctgcttctccgttaggtttaaagcttatccccaaattagatgcacatggaccttctcaaggaaaagcttcccatgcgaacagaagggccttgataatggttattccatcagcaagttctgcaaccacaagcatcagccaggggagtatatctttcatgccgagaatgatgatgctcagtttactaagatgttcaccctgaatattcggcgtaagcctcaggttctcgcagaagcctccgcctcacaggcttcctgcttcagcgatgggtaccccctgccttcttggacctggaaaaaatgtagcgataaatctcccaattgtaccgaggaaatcaccgagggggtgtggaataggaaggcaaaccggaaggtgttcggccagtgggtcagttctagtacactgaacatgtctgaggccattaaggggttcttagtaaagtgttgcgcatataactccctaggaaccagttgcgaaaccatcctgttgaattcaccaggcccattcccgttcatacaggataatatttcattctacgccacaattggtgtctgtctgttgtttatcgtggtgctgacactgctgatttgccacaagtacaaaaagcaattcagatacgagtcccagctgcagatggtgcaggtcactggctcctctgacaacgaatacttttatgtcgactttcgcgagtatgaatacgatctcaaatgggagtttcccagggagaatctcgagttcgggaaggtcctggggagcggagcctttggaaaagtgatgaatgcgactgcatacggtatcagcaagacaggcgtatctatccaggtcgctgttaagatgctgaaagagaaagcagatagcagcgagagagaagccttaatgtccgaactgaaaatgatgacgcagttgggatcgcatgagaatatcgtgaatttgctgggggcttgcacactgtctggcccaatttatcttatcttcgagtattgttgttacggcgatttgctcaactacctccggagcaagcgcgaaaaatttcacaggacctggactgaaattttcaaagagcacaacttctctttttacccaactttccaaagtcacccaaattcttcaatgcccggtagcagagaagtccagatccatccggattcggatcagatctctggcctgcacggtaacagtttccactctgaagatgagattgagtatgaaaaccagaagcgattggaagaggaggaagacttgaacgtgctgacctttgaagacttactgtgctttgcttaccaggttgcaaaggggatggagttcctggaattcaaatcttgtgtccacagagacttggctgctaggaatgtcctagtgacccatggcaaggttgttaagatctgcgattttggcctcgctcgggacatcatgagcgactccaattacgtggtgaggggaaatgtaagactcgccaggctcccggttaagtggatggcccctgagtcactgttcgagggaatttatactattaagtcggatgtttggtcctacggtatcctattgtgggaaatcttctcactcggcgtgaacccttacccaggtatcccagtagatgccaatttttataagttaatacagaacggatttaagatggatcagcccttctacgccacagaggaaatctatataattatgcagagttgctgggcctttgattcccggaagcggccaagtttcccaaacctcacatcctttctcgggtgccagctggctgacgctgaggaagcaatgtatcaaaatgtggacggcagggtgagcgagtgcccgcacacctaccagaaccgaaggcccttcagccgggaaatggacctcggactgttgagtccccaagcacaggttgaggactcctag

SEQ ID NO: 143658 - DNA, 2859 bp, Artificial Sequence
  derived and/or modified sequence
atgcccgcactcgctcgcgacggcggacagctccctctcctagtcgtgttttcggccatgattttcggaacgataaccaaccaggacctaccggtgatcaaatgcgtgcttatcaaccacaaaaacaacgactcaagcgttgggaaaagcagctcctatcctatggtgtccgagtccccagaggacctcggctgcgctctgaggcctcagagttccggcaccgtgtatgaagctgcagctgtcgaggtggatgtttcggcatcaataacactgcaggttctcgttgacgctcctggcaacatctcctgtctctgggtgttcaaacacagcagtttgaattgccagccacactttgacctacagaaccggggtgtcgtgagcatggttatcctgaaaatgaccgagactcaggcaggcgagtacctgctgtttatccagtctgaagcaaccaactacaccatcctgttcaccgtttcaattaggaacaccttgctctataccctgcgccgaccctatttcagaaagatggagaaccaggatgcactggtttgcatcagcgaatctgtccccgaacccattgtcgaatgggtactgtgcgattctcagggtgaatcctgcaaggaagagtcccccgcagtcgtaaaaaaggaggagaaagtgctccacgagctcttcggaaccgatatacgatgctgtgcccgaaatgaattgggcagggaatgcaccagactgtttaccattgacctcaatcagacaccacagacaacactcccccagctgtttcttaaggtcggcgagccactttggatccgatgcaaagccgtgcacgtgaaccatgggtttggcttgacatgggagcttgagaataaagccctcgaagagggaaactactttgaaatgtcgacttattctacaaatcggaccatgatcagaattttgttcgccttcgtgagctccgtggccaggaatgatactggctactacacttgctcctctagtaagcacccatcccaaagcgcgctggtgactattgttgagaagggctttataaatgctactaactcatctgaagactatgagatcgaccagtacgaggagttctgtttttccgtacgttttaaagcgtaccctcagataagatgcacatggaccttctccagaaaatccttcccctgtgagcagaaaggactggataatggatactccataagcaaattttgcaaccacaaacatcaacctggggagtatatcttccacgcggaaaacgacgacgcccagtttactaaaatgttcacactaaatattcggagaaaacctcaagtgctggcagaggcttcagcttctcaagcaagctgttttagcgatgggtacccgctgccctcatggacctggaagaagtgtagtgataagagtcctaattgtactgaggagattaccgaaggggtgtggaacagaaaagcgaatcgtaaagtgtttggccaatgggtgagctctagcacgctcaatatgtccgaggccattaagggatttctcgtcaagtgctgcgcttataactccctgggtacctcttgtgaaacgatcctgcttaattcacccggaccctttccctttatccaggacaatatcagtttctatgcaactatcggcgtgtgtctgctatttatcgtggtattaactctcctgatttgccacaaatacaagaagcagttccgttacgaaagccagctgcagatggtgcaggtgaccggcagtagcgataatgagtatttttatgtagactttagagagtatgaatatgatctcaagtgggagtttccaagggaaaaccttgaattcggtaaggtgttgggctctggtgccttcggcaaagtgatgaatgcgaccgcttacgggatctcaaagacaggggttagtattcaggtagctgtgaagatgctaaaggagaaggccgatagctctgaacgcgaagcactcatgtcagaactgaagatgatgacccaactgggatcccatgagaacatcgtgaacctgctcggagcctgtaccctgagcggcccaatttatcttatctttgagtattgttgctacggtgatcttcttaattacttgaggagcaagagagaaaaattccataggacttggactgaaatctttaaagaacataatttctccttctacccaaccttccagagtcaccctaattcctccatgccgggtagcagagaggtccagatccaccccgattcagatcagatttccggcttgcacgggaactccttccatagcgaagacgaaattgagtacgaaaaccagaagcggctggaagaggaagaagacctgaatgtgttgacattcgaggatctgctctgttttgcataccaggtcgcaaaaggaatggagtttttagagttcaagtccgccaggctccctgtaaaatggatggcgcctgaatcgctgttcgaaggcatatacaccatcaaatctgacgtctggtcctacggcattcttctatgggaaattttcagccttggggtgaacccgtatcccggtatccccgtggacgcgaatttctataaactaattcagaacgggttcaaaatggaccagccattttacgcgaccgaagaaatttatataattatgcagagctgttgggccttcgattcacggaagcgccctagtttcccaaatctcacatctttcttggggtgtcagctcgcagacgcagaggaggccatgtaccagaatgtggacggaagggtctctgagtgtccgcacacataccagaataggagacccttcagtagggagatggatctggggctgctctccccacaggcccaggtggaagactcttag

SEQ ID NO: 143659 - DNA, 2982 bp, Artificial Sequence
  derived and/or modified sequence
atgcccgccctggccagagacggcggccagctgcccctgctggtggtgttcagcgccatgatcttcggcaccatcaccaaccaggacctgcccgtgatcaagtgcgtgctgatcaaccacaagaacaacgacagcagcgtgggcaagagcagcagctaccccatggtgagcgagagccccgaggacctgggctgcgccctgagaccccagagcagcggcaccgtgtacgaggccgccgccgtggaggtggacgtgagcgccagcatcaccctgcaggtgctggtggacgcccccggcaacatcagctgcctgtgggtgttcaagcacagcagcctgaactgccagccccacttcgacctgcagaacagaggcgtggtgagcatggtgatcctgaagatgaccgagacccaggccggcgagtacctgctgttcatccagagcgaggccaccaactacaccatcctgttcaccgtgagcatcagaaacaccctgctgtacaccctgagaagaccctacttcagaaagatggagaaccaggacgccctggtgtgcatcagcgagagcgtgcccgagcccatcgtggagtgggtgctgtgcgacagccagggcgagagctgcaaggaggagagccccgccgtggtgaagaaggaggagaaggtgctgcacgagctgttcggcaccgacatcagatgctgcgccagaaacgagctgggcagagagtgcaccagactgttcaccatcgacctgaaccagaccccccagaccaccctgccccagctgttcctgaaggtgggcgagcccctgtggatcagatgcaaggccgtgcacgtgaaccacggcttcggcctgacctgggagctggagaacaaggccctggaggagggcaactacttcgagatgagcacctacagcaccaacagaaccatgatcagaatcctgttcgccttcgtgagcagcgtggccagaaacgacaccggctactacacctgcagcagcagcaagcaccccagccagagcgccctggtgaccatcgtggagaagggcttcatcaacgccaccaacagcagcgaggactacgagatcgaccagtacgaggagttctgcttcagcgtgagattcaaggcctacccccagatcagatgcacctggaccttcagcagaaagagcttcccctgcgagcagaagggcctggacaacggctacagcatcagcaagttctgcaaccacaagcaccagcccggcgagtacatcttccacgccgagaacgacgacgcccagttcaccaagatgttcaccctgaacatcagaagaaagccccaggtgctggccgaggccagcgccagccaggccagctgcttcagcgacggctaccccctgcccagctggacctggaagaagtgcagcgacaagagccccaactgcaccgaggagatcaccgagggcgtgtggaacagaaaggccaacagaaaggtgttcggccagtgggtgagcagcagcaccctgaacatgagcgaggccatcaagggcttcctggtgaagtgctgcgcctacaacagcctgggcaccagctgcgagaccatcctgctgaacagccccggccccttccccttcatccaggacaacatcagcttctacgccaccatcggcgtgtgcctgctgttcatcgtggtgctgaccctgctgatctgccacaagtacaagaagcagttcagatacgagagccagctgcagatggtgcaggtgaccggcagcagcgacaacgagtacttctacgtggacttcagagagtacgagtacgacctgaagtgggagttccccagagagaacctggagttcggcaaggtgctgggcagcggcgccttcggcaaggtgatgaacgccaccgcctacggcatcagcaagaccggcgtgagcatccaggtggccgtgaagatgctgaaggagaaggccgacagcagcgagagagaggccctgatgagcgagctgaagatgatgacccagctgggcagccacgagaacatcgtgaacctgctgggcgcctgcaccctgagcggccccatctacctgatcttcgagtactgctgctacggcgacctgctgaactacctgagaagcaagagagagaagttccacagaacctggaccgagatcttcaaggagcacaacttcagcttctaccccaccttccagagccaccccaacagcagcatgcccggcagcagagaggtgcagatccaccccgacagcgaccagatcagcggcctgcacggcaacagcttccacagcgaggacgagatcgagtacgagaaccagaagagactggaggaggaggaggacctgaacgtgctgaccttcgaggacctgctgtgcttcgcctaccaggtggccaagggcatggagttcctggagttcaagagctgcgtgcacagagacctggccgccagaaacgtgctggtgacccacggcaaggtggtgaagatctgcgacttcggcctggccagagacatcatgagcgacagcaactacgtggtgagaggcaacgccagactgcccgtgaagtggatggcccccgagagcctgttcgagggcatctacaccatcaagagcgacgtgtggagctacggcatcctgctgtgggagatcttcagcctgggcgtgaacccctaccccggcatccccgtggacgccaacttctacaagctgatccagaacggcttcaagatggaccagcccttctacgccaccgaggagatctacatcatcatgcagagctgctgggccttcgacagcagaaagagacccagcttccccaacctgaccagcttcctgggctgccagctggccgacgccgaggaggccatgtaccagaacgtggacggcagagtgagcgagtgcccccacacctaccagaacagaagacccttcagcagagagatggacctgggcctgctgagcccccaggcccaggtggaggacagctag

SEQ ID NO: 143660 - DNA, 2991 bp, Artificial Sequence
  derived and/or modified sequence
atgcccgccctggccagagacggcggccagctgcccctgctggtggtgttcagcgccatgatcttcggcaccatcaccaaccaggacctgcccgtgatcaagtgcgtgctgatcaaccacaagaacaacgacagcagcgtgggcaagagcagcagctaccccatggtgagcgagagccccgaggacctgggctgcgccctgagaccccagagcagcggcaccgtgtacgaggccgccgccgtggaggtggacgtgagcgccagcatcaccctgcaggtgctggtggacgcccccggcaacatcagctgcctgtgggtgttcaagcacagcagcctgaactgccagccccacttcgacctgcagaacagaggcgtggtgagcatggtgatcctgaagatgaccgagacccaggccggcgagtacctgctgttcatccagagcgaggccaccaactacaccatcctgttcaccgtgagcatcagaaacaccctgctgtacaccctgagaagaccctacttcagaaagatggagaaccaggacgccctggtgtgcatcagcgagagcgtgcccgagcccatcgtggagtgggtgctgtgcgacagccagggcgagagctgcaaggaggagagccccgccgtggtgaagaaggaggagaaggtgctgcacgagctgttcggcaccgacatcagatgctgcgccagaaacgagctgggcagagagtgcaccagactgttcaccatcgacctgaaccagaccccccagaccaccctgccccagctgttcctgaaggtgggcgagcccctgtggatcagatgcaaggccgtgcacgtgaaccacggcttcggcctgacctgggagctggagaacaaggccctggaggagggcaactacttcgagatgagcacctacagcaccaacagaaccatgatcagaatcctgttcgccttcgtgagcagcgtggccagaaacgacaccggctactacacctgcagcagcagcaagcaccccagccagagcgccctggtgaccatcgtggagaagggcttcatcaacgccaccaacagcagcgaggactacgagatcgaccagtacgaggagttctgcttcagcgtgagattcaaggcctacccccagatcagatgcacctggaccttcagcagaaagagcttcccctgcgagcagaagggcctggacaacggctacagcatcagcaagttctgcaaccacaagcaccagcccggcgagtacatcttccacgccgagaacgacgacgcccagttcaccaagatgttcaccctgaacatcagaagaaagccccaggtgctggccgaggccagcgccagccaggccagctgcttcagcgacggctaccccctgcccagctggacctggaagaagtgcagcgacaagagccccaactgcaccgaggagatcaccgagggcgtgtggaacagaaaggccaacagaaaggtgttcggccagtgggtgagcagcagcaccctgaacatgagcgaggccatcaagggcttcctggtgaagtgctgcgcctacaacagcctgggcaccagctgcgagaccatcctgctgaacagccccggccccttccccttcatccaggacaacatcagcttctacgccaccatcggcgtgtgcctgctgttcatcgtggtgctgaccctgctgatctgccacaagtacaagaagcagttcagatacgagagccagctgcagatggtgcaggtgaccggcagcagcgacaacgagtacttctacgtggacttcagagagtacgagtacgacctgaagtgggagttccccagagagaacctggagttcggcaaggtgctgggcagcggcgccttcggcaaggtgatgaacgccaccgcctacggcatcagcaagaccggcgtgagcatccaggtggccgtgaagatgctgaaggagaaggccgacagcagcgagagagaggccctgatgagcgagctgaagatgatgacccagctgggcagccacgagaacatcgtgaacctgctgggcgcctgcaccctgagcggccccatctacctgatcttcgagtactgctgctacggcgacctgctgaactacctgagaagcaagagagagaagttccacagaacctggaccgagatcttcaaggagcacaacttcagcttctaccccaccttccagagccaccccaacagcagcatgcccggcagcagagaggtgcagatccaccccgacagcgaccagatcagcggcctgcacggcaacagcttccacagcgaggacgagatcgagtacgagaaccagaagagactggaggaggaggaggacctgaacgtgctgaccttcgaggacctgctgtgcttcgcctaccaggtggccaagggcatggagttcctggagttcaagagctgcgtgcacagagacctggccgccagaaacgtgctggtgacccacggcaaggtggtgaagatctgcgacttcggcctggccagagacatcatgagcgacagcaactacgtggtgagaggcaacgtgagactggccagactgcccgtgaagtggatggcccccgagagcctgttcgagggcatctacaccatcaagagcgacgtgtggagctacggcatcctgctgtgggagatcttcagcctgggcgtgaacccctaccccggcatccccgtggacgccaacttctacaagctgatccagaacggcttcaagatggaccagcccttctacgccaccgaggagatctacatcatcatgcagagctgctgggccttcgacagcagaaagagacccagcttccccaacctgaccagcttcctgggctgccagctggccgacgccgaggaggccatgtaccagaacgtggacggcagagtgagcgagtgcccccacacctaccagaacagaagacccttcagcagagagatggacctgggcctgctgagcccccaggcccaggtggaggacagctag

SEQ ID NO: 143661 - DNA, 2859 bp, Artificial Sequence
  derived and/or modified sequence
atgcccgccctggccagagacggcggccagctgcccctgctggtggtgttcagcgccatgatcttcggcaccatcaccaaccaggacctgcccgtgatcaagtgcgtgctgatcaaccacaagaacaacgacagcagcgtgggcaagagcagcagctaccccatggtgagcgagagccccgaggacctgggctgcgccctgagaccccagagcagcggcaccgtgtacgaggccgccgccgtggaggtggacgtgagcgccagcatcaccctgcaggtgctggtggacgcccccggcaacatcagctgcctgtgggtgttcaagcacagcagcctgaactgccagccccacttcgacctgcagaacagaggcgtggtgagcatggtgatcctgaagatgaccgagacccaggccggcgagtacctgctgttcatccagagcgaggccaccaactacaccatcctgttcaccgtgagcatcagaaacaccctgctgtacaccctgagaagaccctacttcagaaagatggagaaccaggacgccctggtgtgcatcagcgagagcgtgcccgagcccatcgtggagtgggtgctgtgcgacagccagggcgagagctgcaaggaggagagccccgccgtggtgaagaaggaggagaaggtgctgcacgagctgttcggcaccgacatcagatgctgcgccagaaacgagctgggcagagagtgcaccagactgttcaccatcgacctgaaccagaccccccagaccaccctgccccagctgttcctgaaggtgggcgagcccctgtggatcagatgcaaggccgtgcacgtgaaccacggcttcggcctgacctgggagctggagaacaaggccctggaggagggcaactacttcgagatgagcacctacagcaccaacagaaccatgatcagaatcctgttcgccttcgtgagcagcgtggccagaaacgacaccggctactacacctgcagcagcagcaagcaccccagccagagcgccctggtgaccatcgtggagaagggcttcatcaacgccaccaacagcagcgaggactacgagatcgaccagtacgaggagttctgcttcagcgtgagattcaaggcctacccccagatcagatgcacctggaccttcagcagaaagagcttcccctgcgagcagaagggcctggacaacggctacagcatcagcaagttctgcaaccacaagcaccagcccggcgagtacatcttccacgccgagaacgacgacgcccagttcaccaagatgttcaccctgaacatcagaagaaagccccaggtgctggccgaggccagcgccagccaggccagctgcttcagcgacggctaccccctgcccagctggacctggaagaagtgcagcgacaagagccccaactgcaccgaggagatcaccgagggcgtgtggaacagaaaggccaacagaaaggtgttcggccagtgggtgagcagcagcaccctgaacatgagcgaggccatcaagggcttcctggtgaagtgctgcgcctacaacagcctgggcaccagctgcgagaccatcctgctgaacagccccggccccttccccttcatccaggacaacatcagcttctacgccaccatcggcgtgtgcctgctgttcatcgtggtgctgaccctgctgatctgccacaagtacaagaagcagttcagatacgagagccagctgcagatggtgcaggtgaccggcagcagcgacaacgagtacttctacgtggacttcagagagtacgagtacgacctgaagtgggagttccccagagagaacctggagttcggcaaggtgctgggcagcggcgccttcggcaaggtgatgaacgccaccgcctacggcatcagcaagaccggcgtgagcatccaggtggccgtgaagatgctgaaggagaaggccgacagcagcgagagagaggccctgatgagcgagctgaagatgatgacccagctgggcagccacgagaacatcgtgaacctgctgggcgcctgcaccctgagcggccccatctacctgatcttcgagtactgctgctacggcgacctgctgaactacctgagaagcaagagagagaagttccacagaacctggaccgagatcttcaaggagcacaacttcagcttctaccccaccttccagagccaccccaacagcagcatgcccggcagcagagaggtgcagatccaccccgacagcgaccagatcagcggcctgcacggcaacagcttccacagcgaggacgagatcgagtacgagaaccagaagagactggaggaggaggaggacctgaacgtgctgaccttcgaggacctgctgtgcttcgcctaccaggtggccaagggcatggagttcctggagttcaagagcgccagactgcccgtgaagtggatggcccccgagagcctgttcgagggcatctacaccatcaagagcgacgtgtggagctacggcatcctgctgtgggagatcttcagcctgggcgtgaacccctaccccggcatccccgtggacgccaacttctacaagctgatccagaacggcttcaagatggaccagcccttctacgccaccgaggagatctacatcatcatgcagagctgctgggccttcgacagcagaaagagacccagcttccccaacctgaccagcttcctgggctgccagctggccgacgccgaggaggccatgtaccagaacgtggacggcagagtgagcgagtgcccccacacctaccagaacagaagacccttcagcagagagatggacctgggcctgctgagcccccaggcccaggtggaggacagctag

SEQ ID NO: 143662 - protein, 586 aa, Artificial Sequence
  derived and/or modified sequence
MARGYGATVSLVLLGLGLALAVIVLAVVLSRHQAPCGPQAFAHAAVAADSKVCSDIGRAILQQQGSPVDATIAALVCTSVVNPQSMGLGGGVIFTIYNVTTGKVEVINARETVPASHAPSLLDQCAQALPLGTGAQWIGVPGELRGYAEAHRRHGRLPWAQLFQPTIALLRGGHVVAPVLSRFLHNSILRPSLQASTLRQLFFNGTEPLRPQDPLPWPALATTLETVATEGVEVFYTGRLGQMLVEDIAKEGSQLTLQDLAKFQPEVVDALEVPLGDYTLYSPPPPAGGAILSFILNVLRGFNFSTESMARPEGRVNVYHHLVETLKFAKGQRWRLGDPRSHPKLQNASRDLLGETLAQLIRQQIDGRGDHQLSHYSLAEAWGHGTGTSHVSVLGEDGSAVAATSTINTPFGAMVYSPRTGIILNNELLDLCERCPRGSGTTPSPVSGDRVGGAPGRCWPPVPGERSPSSMVPSILINKAQGSKLVIGGAGGELIISAVAQAIMSKLWLGFDLRAAIAAPILHVNSKGCVEYEPNFSQEVQRGLQDRGQNQTQRPFFLNVVQAVSQEGACVYAVSDLRKSGEAAGY

SEQ ID NO: 143663 - protein, 501 aa, Artificial Sequence
  derived and/or modified sequence
MGLGGGVIFTIYNVTTGKVEVINARETVPASHAPSLLDQCAQALPLGTGAQWIGVPGELRGYAEAHRRHGRLPWAQLFQPTIALLRGGHVVAPVLSRFLHNSILRPSLQASTLRQLFFNGTEPLRPQDPLPWPALATTLETVATEGVEVFYTGRLGQMLVEDIAKEGSQLTLQDLAKFQPEVVDALEVPLGDYTLYSPPPPAGGAILSFILNVLRGFNFSTESMARPEGRVNVYHHLVETLKFAKGQRWRLGDPRSHPKLQNASRDLLGETLAQLIRQQIDGRGDHQLSHYSLAEAWGHGTGTSHVSVLGEDGSAVAATSTINTPFGAMVYSPRTGIILNNELLDLCERCPRGSGTTPSPVSGDRVGGAPGRCWPPVPGERSPSSMVPSILINKAQGSKLVIGGAGGELIISAVAQAIMSKLWLGFDLRAAIAAPILHVNSKGCVEYEPNFSQEVQRGLQDRGQNQTQRPFFLNVVQAVSQEGACVYAVSDLRKSGEAAGY

SEQ ID NO: 143664 - DNA, 1761 bp, Artificial Sequence
  derived and/or modified sequence
atggcgcgcggttatggagcgaccgtgagcctggtgctccttgggctgggactggctttagccgtgattgtgctggcagtggtcctaagcaggcatcaggccccatgcgggcctcaggcttttgctcacgcagccgtggcagccgattctaaggtatgctccgatataggccgggcaatattgcagcaacaaggctcccccgttgacgctacaatcgccgcattggtgtgcacttccgttgtaaacccacaaagtatgggactgggcggtggagtgatttttacaatatacaatgtgacaactggcaaagtagaggtaatcaatgcgcgcgaaaccgtgcctgcgagccatgctcctagcttactggatcagtgcgcccaggccctgcccttggggactggggcacagtggatcggggtcccaggcgagctcagaggttatgcagaggcccacagacgccatggacgtcttccatgggcccagctgtttcaacctaccatagccttgctgcggggcggacacgtggtggcacccgtgctgagccgcttcttacataatagcattcttcgaccatctctccaggctagcactctgcggcagctcttcttcaacggcacagaacccttaaggcctcaagaccccctgccttggcccgcattggccacaactctagagacggtggctaccgaaggcgtcgaggtgttttataccggcaggctggggcagatgctggtcgaagacatcgcaaaagagggatcacagttgacgctccaggaccttgcaaaatttcaacccgaggttgtggacgctttggaggtaccactcggcgattataccctgtactctcctcctcccccagctgggggagccatattaagctttattttgaacgtgctgcgcgggttcaatttctccaccgagtcaatggcccgcccagaaggaagagtgaacgtgtaccatcacctggtggaaaccctgaagtttgcgaaaggccaacggtggcgattgggggatccccgcagtcaccctaagctccagaatgcctccagagacttactgggagagaccctcgcccagttaattcgccaacaaattgatggccgcggagaccatcagctgtcacactattctcttgctgaggcttggggacatggaactggaacaagccatgtttcagtgttgggcgaggatggctcagcagtggccgccacaagcaccatcaatactccttttggtgcaatggtttacagtccccggacaggcattattttgaacaatgagctgctggacctttgcgagcgttgtcccaggggctctggtaccaccccaagccccgtttcaggtgacagggtgggaggggctccaggacgctgttggccaccggtcccaggtgagcgctcacccagctctatggtgccgtctatactaatcaacaaggcgcaggggagcaaactagtgatcggaggagcaggtggcgaactgatcattagtgccgtcgcccaggctattatgtcaaaactctggctcggtttcgaccttagagccgccattgcagcgcctatattgcacgtcaatagcaagggctgtgtggaatacgaacccaacttctcccaggaggtgcagagaggcctgcaggaccggggtcagaatcagacacagcggccatttttcttaaatgtcgtgcaggctgtgtctcaggaaggggcctgtgtgtacgccgtcagtgacttgagaaagtcgggagaagccgccggctattag

SEQ ID NO: 143665 - DNA, 1506 bp, Artificial Sequence
  derived and/or modified sequence
atgggcctggggggtggagtgatcttcaccatttacaatgttaccaccggtaaggtagaggttataaacgctagagagacggttcctgcatcccatgcgccctcccttctggaccagtgtgcacaggcattgcctttagggacaggcgcccagtggatcggcgttccaggagagctccgtggttacgcagaagcccaccgcagacatgggcggctgccttgggcgcagcttttccagcccacaatcgccctgctaaggggtgggcatgtggtcgctcccgttctttccagattccttcataactcgatcctaagaccctcactccaggcctcaacactgaggcagttgttttttaatggaaccgagcctttgcgtcctcaagaccccctgccctggcccgcgttggctacgactctcgagactgttgcaacagaaggcgtggaggtcttctatacaggccggctggggcagatgctggtggaggatatcgccaaggaaggaagtcaacttaccctccaggatctcgccaagttccagcctgaagtcgtggatgcgttggaggtgcccctgggagactacactctttatagtcctcctccccccgccgggggggctatcttatcttttatactgaatgtgctgaggggcttcaacttcagtaccgaaagtatggcaaggcctgaaggtagagtaaacgtgtaccaccatctggtcgagacactaaagtttgccaagggacagaggtggcgcttgggcgatcccaggtctcatcctaagctgcagaatgcctcacgggatctcctgggcgagaccctggctcaactcattagacagcagatcgatggtcgtggggaccaccagctcagccactactcactggccgaagcctgggggcacggcaccgggacgtcccatgtgagcgttctgggtgaggacgggtctgccgtagctgccacttccactataaataccccctttggcgccatggtgtactcacctagaaccggcatcattcttaacaatgagttgcttgatctctgcgagagatgtccgcgaggttcgggaacgacgccctcgcctgtgtccggcgacagagtgggtggcgcccctgggcggtgctggcctccagtgcccggggagcgaagtccctctagcatggttcccagcatcctcattaataaagcacaaggcagcaagctagttatcgggggggccggcggcgaactgattatttcagccgtcgcacaggccataatgagcaagctttggctgggctttgatctccgggctgcaatcgccgcacccatcctgcacgtgaattcaaagggctgtgtagagtatgagcctaatttttcccaggaggtccagagagggctgcaggatagaggtcagaaccagactcagcgtccatttttcctcaatgtcgtgcaggcggtctcgcaggagggggcctgtgtttacgcagtgtctgacctacggaagtccggggaagccgcaggctattag

SEQ ID NO: 143666 - DNA, 2494 bp, Artificial Sequence
  derived and/or modified sequence
tgcctggcctcctgccagcaacaagcaggagctgaaaaccagaagttgaggcgtgagtttggccactccgtagtgtgcacttggtgagggcagcagctcgccacagctgccagccatctgtccattcacccatctgtccatctggcagcccgctgttcagacctgtctgtctgtccgcccatctgtaagcccatctctgtcccattgtctatctgaccatctttctcttactgtcctctttgtctagctatctggcctatctgtcgatccatcttcgtgtctgtcttcagcccccacctgtttgtccatctgtccaattacctgtgactctgtgcatcttcttgtccattcatctgcccacccatccgtccctccgtctgcccaccagccgcccctctcctcctgggctgcagagccatggcccggggctacggggccacggtcagcctagtcctgctgggtctggggctggcgctggctgtcattgtgctggctgtggtcctctctcgacaccaggccccatgtggcccccaggcctttgcccacgctgctgttgccgccgactccaaggtctgctcggatattggacgagccatcctccagcagcagggctcacccgtggatgccaccatcgcggctctggtctgcaccagcgtcgtcaaccctcagagcatgggcctgggcggaggggtcatcttcaccatctacaatgtgacaacagggaaggtggaggtcatcaatgcccgggagacggtgccggccagccacgccccgagcctgctggaccagtgtgcacaggctctgccactgggcacaggggcccagtggatcggggtgcccggggagctccgtggctatgccgaggcccaccgccgccatggccgcctgccctgggcgcagctgttccagcccaccatcgcgctgctccgaggggggcatgtggtggcccctgtcctcagccgtttcctgcacaacagcatcctgcggccttccttgcaggcgtcaaccctgcgccagctcttcttcaacgggacagaacccctgaggcctcaggacccactcccatggcctgcactggccaccaccctggagaccgtggccacagagggcgtggaggtcttctacacggggaggctgggccagatgctggtggaggacattgccaaggaagggagccagctgacgctgcaggacctggccaagttccagcccgaggtggtggatgccctggaggtgcccctgggggactataccctgtactcaccaccgccgcctgcagggggtgccattctcagctttatcctcaacgtgctaagagggttcaacttctcaacagagtctatggccaggcctgaagggagggtgaacgtgtaccaccaccttgtagagacgctcaagtttgccaaggggcagaggtggaggctgggggaccctcgaagccacccgaagctccagaatgcctcccgggacctgctgggggagaccctggcccagctcatccgccaacagatcgatggccggggggaccaccagctcagccactacagcttggccgaggcctggggccacgggacaggcacgtcccatgtgtctgtgctgggggaggatggcagcgccgtggctgccaccagcaccatcaacacaccctttggagcgatggtgtattcaccacggacaggcatcatcctcaacaacgagctcctggacttatgcgagcgatgcccccggggttccggcaccaccccctcacctgtgagtggagacagggtgggtggagctcccggaaggtgctggcccccagttccaggcgagcgttccccatcctccatggtgccctccatcttgatcaacaaagcccaggggtcgaagctagtgattggcggggctggcggggagctcatcatctctgctgtggcccaggccatcatgagcaagctgtggcttggctttgacctgagagcggccattgcagcccccatcctgcatgtcaacagcaagggctgtgtggagtacgagcccaacttcagccaggaggtgcagaggggactccaagaccgtggccagaaccagacccagaggcccttcttcctgaacgtggtccaggctgtgtcccaggagggggcctgtgtgtacgccgtctcggacctgaggaagagtggggaggccgcaggctactaagacactgctctgcccagagctgaagtctggccccaccatgagtcctgtgtccaggccggacatggctgggggaccaactactctggcaggatctggacccctggcaggggagtccagctgagagtggaagaggtggcggggaccagctgggcagatgagaggctgagcctcatccctaaccccctttcccagagcccctggtggtcctgaaccggcccctctatccctccgcaggcctcttgcctggggccactctcccaccctctcgatctgtatatcctccagtccaagattaaagaggcggactgtggcctga

SEQ ID NO: 143667 - DNA, 2268 bp, Artificial Sequence
  derived and/or modified sequence
actccgtagtgtgcacttggtgagggcagcagctcgccacagctgccagccatctgtccattcacccatctgtccatctggcagcccgctgttcagacctgtctgtctgtccgcccatctgtaagcccatctctgtcccattgtctatctgaccatctttctcttactgtcctctttgtctagctatctggcctatctgtcgatccatcttcgtgtctgtcttcagcccccacctgtttgtccatctgtccaattacctgtgactctgtgcatcttcttgtccattcatctgcccacccatccgtccctccgtctgcccacgctgctgttgccgccgactccaaggtctgctcggatattggacgagccatcctccagcagcagggctcacccgtggatgccaccatcgcggctctggtctgcaccagcgtcgtcaaccctcagagcatgggcctgggcggaggggtcatcttcaccatctacaatgtgacaacagggaaggtggaggtcatcaatgcccgggagacggtgccggccagccacgccccgagcctgctggaccagtgtgcacaggctctgccactgggcacaggggcccagtggatcggggtgcccggggagctccgtggctatgccgaggcccaccgccgccatggccgcctgccctgggcgcagctgttccagcccaccatcgcgctgctccgaggggggcatgtggtggcccctgtcctcagccgtttcctgcacaacagcatcctgcggccttccttgcaggcgtcaaccctgcgccagctcttcttcaacgggacagaacccctgaggcctcaggacccactcccatggcctgcactggccaccaccctggagaccgtggccacagagggcgtggaggtcttctacacggggaggctgggccagatgctggtggaggacattgccaaggaagggagccagctgacgctgcaggacctggccaagttccagcccgaggtggtggatgccctggaggtgcccctgggggactataccctgtactcaccaccgccgcctgcagggggtgccattctcagctttatcctcaacgtgctaagagggttcaacttctcaacagagtctatggccaggcctgaagggagggtgaacgtgtaccaccaccttgtagagacgctcaagtttgccaaggggcagaggtggaggctgggggaccctcgaagccacccgaagctccagaatgcctcccgggacctgctgggggagaccctggcccagctcatccgccaacagatcgatggccggggggaccaccagctcagccactacagcttggccgaggcctggggccacgggacaggcacgtcccatgtgtctgtgctgggggaggatggcagcgccgtggctgccaccagcaccatcaacacaccctttggagcgatggtgtattcaccacggacaggcatcatcctcaacaacgagctcctggacttatgcgagcgatgcccccggggttccggcaccaccccctcacctgtgagtggagacagggtgggtggagctcccggaaggtgctggcccccagttccaggcgagcgttccccatcctccatggtgccctccatcttgatcaacaaagcccaggggtcgaagctagtgattggcggggctggcggggagctcatcatctctgctgtggcccaggccatcatgagcaagctgtggcttggctttgacctgagagcggccattgcagcccccatcctgcatgtcaacagcaagggctgtgtggagtacgagcccaacttcagccaggaggtgcagaggggactccaagaccgtggccagaaccagacccagaggcccttcttcctgaacgtggtccaggctgtgtcccaggagggggcctgtgtgtacgccgtctcggacctgaggaagagtggggaggccgcaggctactaagacactgctctgcccagagctgaagtctggccccaccatgagtcctgtgtccaggccggacatggctgggggaccaactactctggcaggatctggacccctggcaggggagtccagctgagagtggaagaggtggcggggaccagctgggcagatgagaggctgagcctcatccctaaccccctttcccagagcccctggtggtcctgaaccggcccctctatccctccgcaggcctcttgcctggggccactctcccaccctctcgatctgtatatcctccagtccaagattaaagaggcggactgtggcctg

SEQ ID NO: 143668 - DNA, 1761 bp, Artificial Sequence
  derived and/or modified sequence
atggcccggggctatggagccaccgtgtccctggtgctgctgggcctgggcctggccctggccgtgattgtgctggccgtggtgctgagccgccaccaggccccctgtggcccccaggcctttgcccacgccgctgtggccgctgacagcaaggtgtgcagcgacatcggccgggccatcctgcagcagcagggcagccctgtggatgccaccatcgccgccctggtgtgcacctctgtggtgaacccccagagcatgggcctgggcggcggcgtcatcttcaccatctacaacgtgaccaccgggaaggtggaggtgatcaatgcccgggagaccgtgcctgccagccacgcccccagcctgctggaccagtgtgcccaggccctgcccctgggcactggagcccagtggattggagtgcctggagagctgcggggctacgccgaggcccaccggcggcacggccgcctgccctgggcccagctgttccagcccaccatcgccctgctgcggggcggccacgtggtggcccctgtgctgagccgcttcctgcacaacagcatcctgcggcccagcctgcaggccagcaccctgcggcagctgttcttcaacggcacagagcccctgcggccccaggaccccctgccctggccagccctggccaccaccctggagaccgtggccacagaaggagtggaggtgttctacacaggccgcctgggccagatgctggtggaggacatcgccaaggagggcagccagctgaccctgcaggacctggccaagttccagcctgaggtggtggatgccctggaggtgcccctgggggactacaccctgtacagccccccacctcctgctggaggagccatcctgtccttcatcctgaatgtgctgcggggcttcaacttcagcacagagagcatggcccggcctgagggccgggtgaatgtgtaccaccacctggtggagaccctgaagtttgccaagggccagcgctggaggctgggggaccccaggagccaccccaagctgcagaatgccagccgggacctgctgggggagaccctggcccagctgatccggcagcagattgatggccgcggggaccaccagctgagccactacagcctggccgaggcctggggccacggcaccggcaccagccacgtgtctgtgctgggggaggatggcagcgctgtggccgccaccagcaccatcaacaccccatttggagccatggtgtacagccccaggacaggcatcatcctgaacaatgagctgctggacctgtgtgagcgctgcccccggggcagcggcaccacccccagccctgtgtctggggacagagtgggcggggcccctggccgctgctggccccctgtgcctggagagaggagccccagctccatggtgcccagcatcctgatcaacaaggcccagggcagcaagctggtgattggaggagctggaggagagctgatcatctctgctgtggcccaggccatcatgagcaagctgtggctgggctttgacctgcgggccgccatcgccgcccccatcctgcacgtgaacagcaagggctgtgtggagtatgagcccaacttcagccaggaggtgcagaggggcctgcaggaccggggccagaaccagacccagaggcccttcttcctgaatgtggtgcaggccgtgtcccaggagggcgcctgtgtgtatgctgtgtctgacctgaggaagagcggggaggccgccggctactag

SEQ ID NO: 143669 - DNA, 1506 bp, Artificial Sequence
  derived and/or modified sequence
atgggcctgggcggcggcgtcatcttcaccatctacaacgtgaccaccgggaaggtggaggtgatcaatgcccgggagaccgtgcctgccagccacgcccccagcctgctggaccagtgtgcccaggccctgcccctgggcaccggggcccagtggattggagtgcctggagagctgcggggctatgcagaggcccacagaagacatggccgcctgccctgggcccagctgttccagcccaccatcgccctgctgcggggcggccacgtggtggcccctgtgctgagccgcttcctgcacaacagcatcctgcggcccagcctgcaggccagcaccctgcggcagctgttcttcaatggaacagagcccctgcggccccaggaccccctgccctggccagccctggccaccaccctggagaccgtggccacagagggcgtggaggtgttctacacaggccgcctgggccagatgctggtggaggacatcgccaaggagggcagccagctgaccctgcaggacctggccaagttccagcctgaggtggtggatgccctggaggtgcccctgggggactacaccctgtacagccccccacctcctgctgggggcgccatcctgtccttcatcctgaatgtgctgcggggcttcaacttcagcacagagagcatggcccggcctgagggccgggtgaatgtgtaccaccacctggtggagaccctgaagtttgccaagggccagcgctggaggctgggggaccccaggagccaccccaagctgcagaatgccagccgggacctgctgggggagaccctggcccagctgatccggcagcagattgatggccgcggggaccaccagctgagccactacagcctggccgaggcctggggccatggaacaggcaccagccacgtgtctgtgctgggagaagatggcagcgctgtggccgccaccagcaccatcaacaccccatttggagccatggtgtacagccccaggacaggcatcatcctgaacaatgagctgctggacctgtgtgagcgctgcccccggggcagcggcaccacccccagccctgtgtctggggacagagtgggcggggcccctggccgctgctggccccctgtgcctggagagaggagccccagctccatggtgcccagcatcctgatcaacaaggcccagggcagcaagctggtgattggaggagctggaggagagctgatcatctctgctgtggcccaggccatcatgagcaagctgtggctgggctttgacctgcgggccgccatcgccgcccccatcctgcacgtgaacagcaagggctgtgtggagtatgagcccaacttcagccaggaggtgcagaggggcctgcaggaccggggccagaaccagacccagaggcccttcttcctgaatgtggtgcaggccgtgtcccaggagggcgcctgtgtgtatgctgtgtctgacctgaggaagtctggagaggccgccggctactag

SEQ ID NO: 143670 - DNA, 1761 bp, Artificial Sequence
  derived and/or modified sequence
atggcccggggctacggcgccaccgtgagcctggtgctgctgggcctgggtctggccctagcagtcatcgtgctagccgtggtgctgagcaggcatcaggccccctgtggaccccaggccttcgcccacgccgcagtggctgctgacagcaaggtgtgcagcgacattggccgggcaatcctccagcaacaagggagtccggtagacgccactattgctgctctagtctgcacttctgtggtcaatccccagtccatgggactgggcgggggagtgatttttactatctacaatgtaaccacggggaaggtggaagtcattaatgccagagagactgtccccgccagccatgccccaagtctcctggaccagtgtgctcaggctctgcccctgggaaccggagctcagtggattggagtgcccggagagctacggggatacgctgaagcccacaggcggcacggtaggctcccttgggctcagctattccagcccactatcgccctactgcgcggtgggcatgtcgtggcccccgtgttgagcagattcctgcataacagtatcctgcgcccgtccctacaggcatccacgcttcgccagctcttcttcaatggaactgagcctctgcgcccacaagaccccctgccctggcctgcgctagccacaaccctggagacagtcgcaacggagggagtggaagtgttctatacaggcagactaggccagatgctggtggaagatattgcaaaggaaggctcccagctaacgcttcaggatctcgccaagtttcagcccgaggtggtcgatgcgctcgaggtaccactcggcgactacaccctctattcacctccccccccagccggaggcgcgatcctgagctttatactaaatgtgctgcggggtttcaacttttcaaccgagtcaatggctcgccccgagggacgcgtgaatgtgtatcatcatcttgtcgaaacactcaagttcgctaagggccagagatggagactaggggatcctcgctcccacccaaagctgcagaacgcctccagggacctcctgggagagactctggcccaattgatcaggcagcaaattgacggcagaggcgaccaccagttatcccactactctctggctgaagcgtggggccacggcacaggtacctctcacgtgagcgtgctcggagaggatggttctgctgtggcagcaacatccaccattaatacccctttcggtgccatggtctactctccgcgaactggcattatcctcaataatgagctattggacctgtgcgagagatgcccgcgcggttcgggcactactccatccccagtttctggagatcgtgttgggggggctcccggtcgctgctggccacctgtacccggtgagagaagtccctcctccatggtgccgagcatcttgatcaacaaagcgcagggctccaagctcgtcatcggcggagccggtggtgaactgatcatatctgcagttgcacaggccatcatgtcgaagctgtggcttggcttcgacctccgtgccgcaatcgctgcaccgatcctgcacgtgaactccaaaggatgcgttgagtacgagcccaatttcagtcaggaagttcaaagagggttgcaagaccgaggtcaaaaccagacacagcggccattcttccttaacgtcgtgcaggccgtttctcaggagggtgcatgcgtgtatgccgtgagcgacctcagaaagagtggtgaggcagcaggatattag

SEQ ID NO: 143671 - DNA, 1506 bp, Artificial Sequence
  derived and/or modified sequence
atgggcctgggcggcggcgtgatcttcaccatctacaacgtgaccactggaaaggttgaggtaattaatgcacgtgagaccgtgccggcctcccatgcaccgagcctcctggaccagtgtgcgcaagctctccccctcggcaccggggctcagtggatcggagtaccgggggaactcaggggttatgcagaagctcatcggagacatggccggctcccatgggcccagcttttccagccaaccatcgccctgcttagaggtggacacgtggtcgccccggtgctgtcccggttccttcataactctatcctccgcccgtctcttcaggcgtctacattaagacagctgtttttcaacggcaccgagccattaagaccccaagatcccctgccttggcctgccctcgcaaccacgctggagaccgttgcgacagaaggggtggaggttttctacactggcaggctcggtcagatgctggttgaggatatcgccaaagagggttcacagctgaccctgcaagacctcgccaagtttcagccggaagtggtagatgcgctagaggtcccgctcggagactacaccttatactcccccccgccacccgccggcggagctattttgtcgttcatcctcaacgttctgcgagggttcaactttagtactgaatccatggcccgcccggagggtcgtgtaaacgtttatcaccacctggtggagaccctcaaattcgcaaaaggtcaacgctggaggttgggagacccgcggagccatccaaagctgcagaatgctagcagggacctgctgggcgagacactcgcccagctgatacgccagcagattgatgggcggggtgaccaccaactaagtcattatagcctggctgaagcttggggacacggcactggcacaagtcacgtttccgtcctgggcgaggacgggtccgcagtggccgccacttcaactataaatacaccttttggcgctatggtctactctccacggactgggattatactgaacaacgaactgctggacttgtgtgagcggtgtcctagaggaagcggcacgacgccttcccctgttagtggagatcgagtgggtggggcccctggaagatgctggcccccggtgccgggcgagcggagcccgagttcaatggtgccttccatacttattaataaagcccagggcagtaagctggtaattggaggcgccggaggcgaacttattatctcagctgtcgctcaggcgatcatgtcaaagctatggctgggcttcgatctgagagccgccatcgcagcaccaatcctgcacgtcaactctaagggatgcgtggaatacgaacccaatttttcacaggaggtgcagcggggcctgcaagaccgcggccagaatcagacccagaggccattctttctgaatgttgtgcaagcagtcagccaggaaggcgcgtgcgtgtacgctgtatccgatctgcggaaatccggagaggccgccggttactag

SEQ ID NO: 143672 - DNA, 1761 bp, Artificial Sequence
  derived and/or modified sequence
atggctagaggctatggtgcaactgtgtccctcgtgctgctgggactgggactagccctggctgtgatcgtgctggcagtcgtgctatccaggcaccaagcgccttgtggcccacaggccttcgctcacgctgccgtcgcagcagactccaaagtctgctctgacattgggagagctattctgcagcagcagggatctccagtggacgccacaatcgccgcactggtgtgcacatccgtggtgaatccgcaaagtatgggcctgggcggtggggttatctttaccatctacaacgtgaccaccgggaaagtggaggtcattaatgcccgtgagacagtgcccgcttcacacgcaccctcgctgctggatcaatgcgctcaagctctgcctctgggcacgggagcacaatggatcggagttcctggggaattgcgcggttatgccgaagcccatagacggcatgggcgacttccatgggcccagctgttccaacctacgatcgctctgttacggggtggtcacgtcgtggcgccagtactctcgaggttcctacacaattcaatcttgcgcccttctttacaagcgagcactctgagacagttgttcttcaatggaacagagccccttcgcccacaagacccattgccatggcctgccctggcgactacattggaaactgtagccacagagggtgttgaggtgttctatacaggtagacttgggcagatgctagtggaagacatcgcaaaagaagggtcgcagcttaccttacaggatcttgctaagttccagccagaagtcgtggatgcgttagaggtgcctctgggcgactataccttgtattctccccctcccccagccggaggtgcaatcctgtcctttatcctgaacgtgctgcggggattcaatttcagcaccgaatctatggccaggccggagggtagagtcaacgtatatcatcatctcgttgagacgctgaagttcgcaaagggccagaggtggcgattgggtgatcctagaagtcatcctaagcttcaaaatgccagcagagacctgttgggggagaccctggctcagctcatcagacaacaaatcgacgggcgaggtgatcatcagcttagccattactcactcgccgaagcctggggccacggtactgggacgtcccacgtatcagtcctgggggaagacggaagtgctgtagccgcaactagtactatcaacacccccttcggcgcaatggtttatagcccaagaacggggattattctaaataatgagctgctggatctctgcgagcgttgcccacggggatccgggactacacccagtcctgtctccggcgaccgggtgggcggagcccctgggaggtgctggccaccagtgccgggagaacggtccccttcttctatggttccgagtattttgataaataaggcccaaggttccaaactggtcatcggcggtgcgggaggcgagctcatcatctcagctgtggcccaggccatcatgagcaaactttggcttggatttgacctgcgcgctgcgatcgccgcacccatcctgcatgtgaacagcaaaggatgcgtagaatatgaaccgaattttagccaggaggtgcaaagaggacttcaagataggggccaaaaccagacccagcgtcctttcttccttaatgtggtacaggcagtgtctcaagaaggtgcttgtgtttatgcagttagcgacctccgaaagtctggcgaagccgcagggtattag

SEQ ID NO: 143673 - DNA, 1506 bp, Artificial Sequence
  derived and/or modified sequence
atgggactcggcggaggcgtcatattcaccatctataacgtcacaacggggaaggtggaagtcatcaatgctcgggagacggtgcctgcatctcacgcgccaagtttgcttgaccagtgcgcgcaggctctccccctcggtaccggagcacagtggatcggcgtccctggagagctgcgtggctatgccgaagcccaccgacgccatggcaggctgccctgggcccagttgtttcagccgactattgctctgctccgcggaggtcacgtggtggccccagtcctatcacggtttctgcataacagtatcctgagaccgtcactgcaggcctcaacacttcgccagctgttcttcaacgggacggagccactgcgacctcaggaccccctgccgtggccggcattggctacaaccctggaaactgtagctacagagggagtcgaggtcttttataccggcagattgggacaaatgctggtcgaggacattgcaaaagaaggctcccagctaacactccaggatttggctaagtttcagcccgaggtggtagatgctctggaagtacccctgggagattacacactctactctcctccaccaccagcaggtggggcaatcctatctttcatcctgaatgttctccgagggttcaatttttctacggagtctatggcccgtcccgaaggcagagtaaatgtctatcatcacctggtggaaactttgaagtttgccaagggtcagagatggagactgggcgacccacgcagccatccgaagttacaaaacgccagcagggatctcctcggcgaaactctcgcgcagctcatcagacagcagatcgacggtagaggggatcaccagctgtctcactacagcctcgccgaggcctggggccacggaacaggaacctctcacgttagcgtgcttggtgaagatgggtctgctgtagcagcaacctctacaataaacacgccatttggcgctatggtgtattcaccccgtacaggtatcattctcaacaatgaactactcgatttatgtgaacggtgtcctagaggaagcggcacaactccgagtcccgtgagtggcgaccgggtgggtggcgctccgggtagatgttggcctcccgtgccgggagaaagatctccgagttctatggtgccctccatcctgatcaacaaagctcagggctccaagctcgttattggtggcgcagggggagagctcattatttccgcagtagctcaagccatcatgtcaaaactctggctcggattcgatctgagagctgctatcgctgcccctatactgcacgtgaattccaagggatgcgtagagtacgagcccaactttagtcaggaggttcagcgcggtttgcaggaccggggtcagaatcagacccagaggccatttttcttgaatgtggttcaggcagtcagtcaggaaggggcatgtgtttatgccgtttccgatctacgcaagtctggtgaggcagccggttactag

SEQ ID NO: 143674 - DNA, 1761 bp, Artificial Sequence
  derived and/or modified sequence
atggccagaggctacggcgccaccgtgagcctggtgctgctgggcctgggcctggccctggccgtgatcgtgctggccgtggtgctgagcagacaccaggccccctgcggcccccaggccttcgcccacgccgccgtggccgccgacagcaaggtgtgcagcgacatcggcagagccatcctgcagcagcagggcagccccgtggacgccaccatcgccgccctggtgtgcaccagcgtggtgaacccccagagcatgggcctgggcggcggcgtgatcttcaccatctacaacgtgaccaccggcaaggtggaggtgatcaacgccagagagaccgtgcccgccagccacgcccccagcctgctggaccagtgcgcccaggccctgcccctgggcaccggcgcccagtggatcggcgtgcccggcgagctgagaggctacgccgaggcccacagaagacacggcagactgccctgggcccagctgttccagcccaccatcgccctgctgagaggcggccacgtggtggcccccgtgctgagcagattcctgcacaacagcatcctgagacccagcctgcaggccagcaccctgagacagctgttcttcaacggcaccgagcccctgagaccccaggaccccctgccctggcccgccctggccaccaccctggagaccgtggccaccgagggcgtggaggtgttctacaccggcagactgggccagatgctggtggaggacatcgccaaggagggcagccagctgaccctgcaggacctggccaagttccagcccgaggtggtggacgccctggaggtgcccctgggcgactacaccctgtacagcccccccccccccgccggcggcgccatcctgagcttcatcctgaacgtgctgagaggcttcaacttcagcaccgagagcatggccagacccgagggcagagtgaacgtgtaccaccacctggtggagaccctgaagttcgccaagggccagagatggagactgggcgaccccagaagccaccccaagctgcagaacgccagcagagacctgctgggcgagaccctggcccagctgatcagacagcagatcgacggcagaggcgaccaccagctgagccactacagcctggccgaggcctggggccacggcaccggcaccagccacgtgagcgtgctgggcgaggacggcagcgccgtggccgccaccagcaccatcaacacccccttcggcgccatggtgtacagccccagaaccggcatcatcctgaacaacgagctgctggacctgtgcgagagatgccccagaggcagcggcaccacccccagccccgtgagcggcgacagagtgggcggcgcccccggcagatgctggccccccgtgcccggcgagagaagccccagcagcatggtgcccagcatcctgatcaacaaggcccagggcagcaagctggtgatcggcggcgccggcggcgagctgatcatcagcgccgtggcccaggccatcatgagcaagctgtggctgggcttcgacctgagagccgccatcgccgcccccatcctgcacgtgaacagcaagggctgcgtggagtacgagcccaacttcagccaggaggtgcagagaggcctgcaggacagaggccagaaccagacccagagacccttcttcctgaacgtggtgcaggccgtgagccaggagggcgcctgcgtgtacgccgtgagcgacctgagaaagagcggcgaggccgccggctactag

SEQ ID NO: 143675 - DNA, 1506 bp, Artificial Sequence
  derived and/or modified sequence
atgggcctgggcggcggcgtgatcttcaccatctacaacgtgaccaccggcaaggtggaggtgatcaacgccagagagaccgtgcccgccagccacgcccccagcctgctggaccagtgcgcccaggccctgcccctgggcaccggcgcccagtggatcggcgtgcccggcgagctgagaggctacgccgaggcccacagaagacacggcagactgccctgggcccagctgttccagcccaccatcgccctgctgagaggcggccacgtggtggcccccgtgctgagcagattcctgcacaacagcatcctgagacccagcctgcaggccagcaccctgagacagctgttcttcaacggcaccgagcccctgagaccccaggaccccctgccctggcccgccctggccaccaccctggagaccgtggccaccgagggcgtggaggtgttctacaccggcagactgggccagatgctggtggaggacatcgccaaggagggcagccagctgaccctgcaggacctggccaagttccagcccgaggtggtggacgccctggaggtgcccctgggcgactacaccctgtacagcccccccccccccgccggcggcgccatcctgagcttcatcctgaacgtgctgagaggcttcaacttcagcaccgagagcatggccagacccgagggcagagtgaacgtgtaccaccacctggtggagaccctgaagttcgccaagggccagagatggagactgggcgaccccagaagccaccccaagctgcagaacgccagcagagacctgctgggcgagaccctggcccagctgatcagacagcagatcgacggcagaggcgaccaccagctgagccactacagcctggccgaggcctggggccacggcaccggcaccagccacgtgagcgtgctgggcgaggacggcagcgccgtggccgccaccagcaccatcaacacccccttcggcgccatggtgtacagccccagaaccggcatcatcctgaacaacgagctgctggacctgtgcgagagatgccccagaggcagcggcaccacccccagccccgtgagcggcgacagagtgggcggcgcccccggcagatgctggccccccgtgcccggcgagagaagccccagcagcatggtgcccagcatcctgatcaacaaggcccagggcagcaagctggtgatcggcggcgccggcggcgagctgatcatcagcgccgtggcccaggccatcatgagcaagctgtggctgggcttcgacctgagagccgccatcgccgcccccatcctgcacgtgaacagcaagggctgcgtggagtacgagcccaacttcagccaggaggtgcagagaggcctgcaggacagaggccagaaccagacccagagacccttcttcctgaacgtggtgcaggccgtgagccaggagggcgcctgcgtgtacgccgtgagcgacctgagaaagagcggcgaggccgccggctactag

SEQ ID NO: 143676 - protein, 289 aa, Artificial Sequence
  derived and/or modified sequence
MWNATPSEEPGFNLTLADLDWDASPGNDSLGDELLQLFPAPLLAGVTATCVALFVVGIAGNLLTMLVVSRFRELRTTTNLYLSSMAFSDLLIFLCMPLDLVRLWQYRPWNFGDLLCKLFQFVSESCTYATVLTITALSVERYFAICFPLRAKVVVTKGRVKLVIFVIWAVAFCSAGPIFVLVGVEHENGTDPWDTNECRPTEFAVRSGLLTVMVWVSSIFFFLPVFCLTVLYSLIGRKLWRRRRGDAVVGASLRDQNHKQTVKMLGGSQRALRLSLAGPILSLCLLPSL

SEQ ID NO: 143677 - DNA, 870 bp, Artificial Sequence
  derived and/or modified sequence
atgtggaatgccaccccctccgaggagccaggatttaacctcactttggcagacttagactgggatgccagcccgggtaacgattccttgggagatgagctcctgcaattgttccctgccccactactcgctggagtgacagccacttgcgtagcgctcttcgtggtggggatcgctggcaatctattgaccatgttggtagtgtccaggttccgggagttaagaacaaccacgaatctgtatctgtcaagcatggccttttccgatcttcttatcttcttatgcatgcccctcgatctggtaagactttggcagtatagaccctggaattttggcgatttgctgtgtaaactcttccaattcgtctccgagtcctgcacatacgccactgtgcttacaataacagcattaagtgtggaaagatacttcgctatctgcttccctttgagagcaaaggtcgtggtcacgaagggccgcgttaaactggtgatctttgtgatttgggcagtcgccttctgttctgcaggtccaatttttgtcctcgtaggagtggagcacgaaaacggaacagatccatgggatacaaatgagtgtcggcctactgagttcgccgtcagaagtggtttgctcaccgtgatggtgtgggtgagttcaatattctttttcttgcctgtgttttgcttgacggttctctactcactcatcggacgtaaattgtggcgtcgccggaggggtgacgcagtcgttggggcttcactgcgagaccagaatcacaaacagacggtcaagatgctgggcggctcccagcgggccttgagactgagcttggctggacccatcctgtccctctgcctgcttccctccctttag

SEQ ID NO: 143678 - DNA, 912 bp, Artificial Sequence
  derived and/or modified sequence
agcgcagtcacgtcccagagcctgttcagctgagccggcagcatgtggaacgcgacgcccagcgaagagccggggttcaacctcacactggccgacctggactgggatgcttcccccggcaacgactcgctgggcgacgagctgctgcagctcttccccgcgccgctgctggcgggcgtcacagccacctgcgtggcactcttcgtggtgggcatcgctggcaacctgctcaccatgctggtggtgtcgcgcttccgcgagctgcgcaccaccaccaacctctacctgtccagcatggccttctccgatctgctcatcttcctctgcatgcccctggacctcgttcgcctctggcagtaccggccctggaacttcggcgacctcctctgcaaactcttccaattcgtcagtgagagctgcacctacgccacggtgctcaccatcacagcgctgagcgtcgagcgctacttcgccatctgcttcccactccgggccaaggtggtggtcaccaaggggcgggtgaagctggtcatcttcgtcatctgggccgtggccttctgcagcgccgggcccatcttcgtgctagtcggggtggagcacgagaacggcaccgacccttgggacaccaacgagtgccgccccaccgagtttgcggtgcgctctggactgctcacggtcatggtgtgggtgtccagcatcttcttcttccttcctgtcttctgtctcacggtcctctacagtctcatcggcaggaagctgtggcggaggaggcgcggcgatgctgtcgtgggtgcctcgctcagggaccagaaccacaagcaaaccgtgaaaatgctgggtgggtctcagcgcgcgctcaggctttctctcgcgggtcctatcctctccctgtgccttctcccttctctctga

SEQ ID NO: 143679 - DNA, 870 bp, Artificial Sequence
  derived and/or modified sequence
atgtggaatgccaccccatctgaggagcccggcttcaacctgaccctggccgacctggactgggatgccagccctggaaatgacagcctgggagatgagctgctgcagctgtttcctgcccccctgctggccggcgtgacagccacctgtgtggccctgtttgtggtgggcattgctggcaacctgctgaccatgctggtggtgagccgcttccgggagctgcggaccaccaccaacctgtacctgagctccatggccttcagtgacctgctgatcttcctgtgcatgcccctggacctggtgcggctgtggcagtaccggccctggaactttggagacctgctgtgcaagctgttccagtttgtgtctgagagctgcacctacgccaccgtgctgaccatcacagccctgtctgtggagcgctactttgccatctgcttccccctgcgggccaaggtggtggtgaccaagggccgggtgaagctggtgatctttgtgatctgggccgtggccttctgcagcgctggccccatctttgtgctggtgggcgtggagcatgaaaatggaacagacccctgggacaccaatgaatgtcggcccacagaatttgctgtgcgcagcggcctgctgactgtgatggtgtgggtgagcagcatcttcttcttcctgcccgtcttctgcctgactgtgctgtacagcctgattggaaggaagctgtggaggagaagaagaggagatgctgtggtgggcgccagcctgcgggaccagaaccacaagcagacagtgaagatgctgggcggcagccagagggccctgcggctgagcctggccggccccatcctgagcctgtgcctgctgcccagcctgtag

SEQ ID NO: 143680 - DNA, 870 bp, Artificial Sequence
  derived and/or modified sequence
atgtggaacgccacccccagcgaggagcccggcttcaacctgaccctggcggacctggattgggacgcgtcaccggggaatgattcattgggagatgagctattacagcttttccccgcgcctctgttggcgggcgttacggctacctgtgtcgccttatttgtggtaggtatcgcagggaatttgctgactatgcttgtggtgagtcggttccgggagctccgaactaccactaacctgtacctgtctagcatggcattctccgacctgctgatcttcttgtgtatgccgctcgaccttgtgcggctctggcagtaccggccgtggaacttcggagacctgttatgtaagttgtttcagttcgtatcagagtcatgtacatatgccactgttttaaccattacagctctttctgtggagcgctattttgcgatttgcttccctctccgggccaaggtggtggttaccaaaggccgcgtcaagctcgtaatcttcgtgatttgggctgtcgccttctgtagtgcagggccgatattcgttctcgtgggtgtggagcacgagaacggaacagatccctgggatactaatgagtgccggcctacagagttcgccgtccggagtggtctcctaactgtgatggtttgggtctcttcaatcttcttctttcttcccgtcttctgccttaccgtgctatactcgttgataggacggaagctatggcgccggcgccgtggtgacgccgtggtcggtgccagcctgcgggatcagaatcataagcagaccgtgaaaatgttgggcggctctcagcgcgctcttaggctgagcctggctggtccaatcctgagcctgtgccttctaccgtcgttatag

SEQ ID NO: 143681 - DNA, 870 bp, Artificial Sequence
  derived and/or modified sequence
atgtggaatgcaactccctcggaagaaccgggtttcaacctgaccctggccgacctcgactgggatgcgagtccaggcaacgattcgttgggagacgagctcctgcaactgttccctgcacccttgcttgccggtgtcactgccacctgtgtcgcactcttcgtggttggaatcgccggtaacctgttgaccatgctggtggtgtcccggtttcgtgaactcaggactacgacgaacttgtacctgtcctcgatggcgtttagtgatttactgatttttctgtgcatgcccctcgacttggttcgcctttggcagtaccgcccttggaactttggggacctgctgtgcaaattgttccaatttgtgagcgaaagctgtacttacgccacagtgctcaccatcaccgctctgtcagtcgagaggtacttcgccatttgcttccctctgcgcgctaaggttgttgtcaccaaaggccgagtgaagttggtgatattcgtgatctgggctgtggccttttgctcggccggacctatttttgtcctggtgggggtggagcatgagaacggtacagacccctgggatacaaacgagtgccgcccaacagagtttgctgtacgaagcgggctgttgaccgttatggtatgggtttcctccatattcttttttcttcctgtattttgcttaactgtactctactcacttattgggaggaagctgtggcggagacgaaggggcgacgcggtggtgggagcctcactcagagatcagaaccacaaacagactgtgaagatgctgggaggctcacagcgggctctgcgcctgtccctcgccggtccgatacttagtctgtgtctgttaccttccctgtag

SEQ ID NO: 143682 - DNA, 870 bp, Artificial Sequence
  derived and/or modified sequence
atgtggaacgccacccccagcgaggagcccggcttcaacctgaccctggccgacctggactgggacgccagccccggcaacgacagcctgggcgacgagctgctgcagctgttccccgcccccctgctggccggcgtgaccgccacctgcgtggccctgttcgtggtgggcatcgccggcaacctgctgaccatgctggtggtgagcagattcagagagctgagaaccaccaccaacctgtacctgagcagcatggccttcagcgacctgctgatcttcctgtgcatgcccctggacctggtgagactgtggcagtacagaccctggaacttcggcgacctgctgtgcaagctgttccagttcgtgagcgagagctgcacctacgccaccgtgctgaccatcaccgccctgagcgtggagagatacttcgccatctgcttccccctgagagccaaggtggtggtgaccaagggcagagtgaagctggtgatcttcgtgatctgggccgtggccttctgcagcgccggccccatcttcgtgctggtgggcgtggagcacgagaacggcaccgacccctgggacaccaacgagtgcagacccaccgagttcgccgtgagaagcggcctgctgaccgtgatggtgtgggtgagcagcatcttcttcttcctgcccgtgttctgcctgaccgtgctgtacagcctgatcggcagaaagctgtggagaagaagaagaggcgacgccgtggtgggcgccagcctgagagaccagaaccacaagcagaccgtgaagatgctgggcggcagccagagagccctgagactgagcctggccggccccatcctgagcctgtgcctgctgcccagcctgtag

SEQ ID NO: 143683 - protein, 36 aa, Artificial Sequence
  derived and/or modified sequence
ISDYSIAMDKIRQQDFVNWLLAQKGKKSDWKHNITQ

SEQ ID NO: 143684 - protein, 153 aa, Artificial Sequence
  derived and/or modified sequence
MVATKTFALLLLSLFLAVGLGEKKEGHFSALPSLPVGSHAKVSSPQPRGPRYAEGTFISDYSIAMDKIHQQDFVNWLLAQKGKKNDWKHNITQREARALELASQANRKEEEAVEPQSSPAKNPSDEDLLRDLLIQELLACLLDQTNLCRLRSR

SEQ ID NO: 143685 - DNA, 462 bp, Artificial Sequence
  derived and/or modified sequence
atggtggccacaaagaccttcgcactcctcctgctgtccctgttcctggccgtgggactgggcgaaaaaaaggaggggcacttctcggctctgccttcactccccgtagggtcccatgctaaagtgagttcaccacagcctcgaggcccccggtatgccgagggcacgttcatctcagactactcgatcgccatggacaagattcatcagcaggactttgtcaattggctgttagcccagaaaggaaaaaagaacgattggaaacacaacatcacccagcgagaagctcgggcgctggaactggctagtcaggcaaacagaaaggaggaggaagcggtggagccccagagtagccccgcaaaaaacccgtctgacgaagaccttctaagagacctgttgattcaggagttgttggcatgtctcctagaccagaccaacctctgccgactaaggtccagatag

SEQ ID NO: 143686 - DNA, 716 bp, Artificial Sequence
  derived and/or modified sequence
agcaggctcagaaggtccagaaatcaggggaaggagacccctatctgtccttcttctggaagagctggaaaggaagtctgctcaggaaataaccttggaagatggtggccacgaagacctttgctctgctgctgctgtccctgttcctggcagtgggactaggagagaagaaagagggtcacttcagcgctctcccctccctgcctgttggatctcatgctaaggtgagcagccctcaacctcgaggccccaggtacgcggaagggactttcatcagtgactacagtattgccatggacaagattcaccaacaagactttgtgaactggctgctggcccaaaaggggaagaagaatgactggaaacacaacatcacccagagggaggctcgggcgctggagctggccagtcaagctaataggaaggaggaggaggcagtggagccacagagctccccagccaagaaccccagcgatgaagatttgctgcgggacttgctgattcaagagctgttggcctgcttgctggatcagacaaacctctgcaggctcaggtctcggtgactctgaccacacccagctcaggactggattctgcccttcacttagcacctgcctcagccccactccagaatagccaagagaacccaaaccaataaagtttatgctaagtcgagcccattgtgaaaatttattaaaatgactactgagcactaa

SEQ ID NO: 143687 - DNA, 462 bp, Artificial Sequence
  derived and/or modified sequence
atggtggccaccaagacctttgccctgctgctgctgagcctcttcctggccgtgggcctgggggagaagaaggagggccacttcagcgccctgcccagcctgcctgtgggcagccacgccaaggtgagcagcccccagccccggggccccaggtatgcagagggcaccttcatcagtgactacagcatcgccatggacaagatccaccagcaggactttgtgaactggctgctggcccagaagggcaagaagaatgactggaagcacaacatcacccagcgggaggcccgggccctggagctggccagccaggccaacaggaaggaggaggaggccgtggagccccagagcagccctgccaagaaccccagtgatgaggacctgctgcgggacctgctgatccaggagctgctggcctgcctgctggaccagaccaacctgtgccgcctgcggagcaggtag

SEQ ID NO: 143688 - DNA, 462 bp, Artificial Sequence
  derived and/or modified sequence
atggtggccaccaagaccttcgccctgctgctgctgagcctgttcctcgctgtaggtttaggggagaagaaggagggacacttctccgcactgcccagcctcccggtgggaagtcacgcaaaagtgagcagcccgcagcccaggggaccaaggtatgccgaggggacttttatcagcgattatagcatcgccatggacaaaattcaccagcaggatttcgttaactggttgctagcacagaagggcaagaaaaatgactggaagcacaacatcacacagcgcgaggcacgggccttagaactggctagccaagccaatcgaaaagaggaagaagctgtagagccgcagtccagccccgctaagaatcccagcgacgaggaccttctaagagacctcctaattcaggaactgttggcatgtttacttgaccagacgaacctctgcagattgcggtctagatag

SEQ ID NO: 143689 - DNA, 462 bp, Artificial Sequence
  derived and/or modified sequence
atggttgctacaaagaccttcgccttactgttgctcagcttgttcctcgctgtcgggcttggagagaaaaaagagggccacttcagcgctctacctagcctgcccgtcgggtcacacgctaaagtaagcagtccccagcccaggggtcctcgctacgccgaagggacattcatttccgattattctattgccatggataagatccaccagcaagacttcgtgaattggctgctggctcagaagggaaagaaaaatgactggaaacacaatatcacgcaaagagaggcgagagccctcgaactggcctcgcaggctaatcggaaggaggaggaggcagtggaaccccagtcatcacctgccaaaaatccctctgacgaggacctgctgcgggacctgcttattcaagaactgcttgcttgtctgcttgaccaaaccaatttgtgcagactccgttctagatag

SEQ ID NO: 143690 - DNA, 462 bp, Artificial Sequence
  derived and/or modified sequence
atggtggccaccaagaccttcgccctgctgctgctgagcctgttcctggccgtgggcctgggcgagaagaaggagggccacttcagcgccctgcccagcctgcccgtgggcagccacgccaaggtgagcagcccccagcccagaggccccagatacgccgagggcaccttcatcagcgactacagcatcgccatggacaagatccaccagcaggacttcgtgaactggctgctggcccagaagggcaagaagaacgactggaagcacaacatcacccagagagaggccagagccctggagctggccagccaggccaacagaaaggaggaggaggccgtggagccccagagcagccccgccaagaaccccagcgacgaggacctgctgagagacctgctgatccaggagctgctggcctgcctgctggaccagaccaacctgtgcagactgagaagcagatag

SEQ ID NO: 143691 - protein, 153 aa, Artificial Sequence
  derived and/or modified sequence
MSESLVVCDVAEDLVEKLRKFRFRKETNNAAIIMKIDKDKRLVVLDEELEGISPDELKDELPERQPRFIVYSYKYQHDDGRVSYPLCFIFSSPVGCKPEQQMMYAGSKNKLVQTAELTKVFEIRNTEDLTEEWLREKLFFTNVNFCVSKVFMY

SEQ ID NO: 143692 - protein, 142 aa, Artificial Sequence
  derived and/or modified sequence
MSESLVVCDVAEDLVEKLRKFRFRKETNNAAIIMKIDKDKRLVVLDEELEGISPDELKDELPERQPRFIVYSYKYQHDDGRVSYPLCFIFSSPVGCKPEQQMMYAGSKNKLVQTAELTKVFEIRNTEDLTEEWLREKLGFFH

SEQ ID NO: 143693 - DNA, 462 bp, Artificial Sequence
  derived and/or modified sequence
atgagcgagagcctggtggtgtgcgacgtggccgaggacctggtggagaagctgagaaagttcagattcagaaaggagaccaacaacgccgccatcatcatgaagatcgacaaggacaagagactggtggtgctggacgaggagctggagggcatcagccccgacgagctgaaggacgagctgcccgagagacagcccagattcatcgtgtacagctacaagtaccagcacgacgacggcagagtgagctaccccctgtgcttcatcttcagcagccccgtgggctgcaagcccgagcagcagatgatgtacgccggcagcaagaacaagctggtgcagaccgccgagctgaccaaggtgttcgagatcagaaacaccgaggacctgaccgaggagtggctgagagagaagctgttcttcaccaacgtgaacttctgcgtgagcaaggtgttcatgtactag

SEQ ID NO: 143694 - DNA, 429 bp, Artificial Sequence
  derived and/or modified sequence
atgagcgagagcctggtggtgtgcgacgtggccgaggacctggtggagaagctgagaaagttcagattcagaaaggagaccaacaacgccgccatcatcatgaagatcgacaaggacaagagactggtggtgctggacgaggagctggagggcatcagccccgacgagctgaaggacgagctgcccgagagacagcccagattcatcgtgtacagctacaagtaccagcacgacgacggcagagtgagctaccccctgtgcttcatcttcagcagccccgtgggctgcaagcccgagcagcagatgatgtacgccggcagcaagaacaagctggtgcagaccgccgagctgaccaaggtgttcgagatcagaaacaccgaggacctgaccgaggagtggctgagagagaagctgggcttcttccactag

SEQ ID NO: 143695 - DNA, 462 bp, Artificial Sequence
  derived and/or modified sequence
atgtctgaaagcctggtagtgtgcgatgtggcagaagatctggtagagaagctacggaaatttagattccggaaggagaccaacaacgctgcgataattatgaaaatcgacaaggataaaagactcgtggtcctggatgaagagttggaagggattagccccgatgagctcaaagatgaactacctgaacggcagccccgctttatcgtgtacagctacaaatatcagcacgatgatggccgcgtgagttatccgctgtgttttattttttcatctcccgtcggctgtaagcctgagcagcagatgatgtatgctggcagcaaaaataaactcgtccagaccgccgagcttaccaaagtttttgagatacggaacaccgaagatctgaccgaggaatggctaagagagaaactgttcttcacaaatgtgaatttctgcgtgtcgaaagtattcatgtactag

SEQ ID NO: 143696 - DNA, 429 bp, Artificial Sequence
  derived and/or modified sequence
atgagcgagagtctcgttgtgtgtgacgtggccgaggacttggttgagaagcttcgcaagtttaggtttcggaaggaaacgaataatgccgccattattatgaagattgataaagataagcggctcgtggtgcttgatgaggagcttgaagggataagccccgacgaactcaaggatgagttacccgaaaggcaaccacgattcattgtttattcttataagtaccaacatgatgacggacgagtgagctaccccctatgcttcattttttcctccccagtggggtgtaaaccagaacagcagatgatgtacgccgggagcaagaacaagctggtgcagactgctgagctgaccaaagtcttcgaaatccgaaacacagaggatttgaccgaagagtggttgcgggaaaagctgggctttttccactag

SEQ ID NO: 143697 - DNA, 462 bp, Artificial Sequence
  derived and/or modified sequence
atgtctgagagcctggtggtgtgtgatgtggccgaggacctggtggagaagctgaggaagttccgcttcaggaaggagaccaacaatgctgccatcatcatgaagattgacaaggacaagaggctggtggtgctggatgaggagctggagggcatcagcccagatgagctgaaggatgagctgcctgagcggcagccccgcttcatcgtgtacagctacaagtaccagcatgatgatggccgggtgtcctaccccctgtgcttcatcttcagcagccctgtgggctgcaagccagagcagcagatgatgtatgccggcagcaagaacaagctggtgcagacagctgagctgaccaaggtgtttgagatccggaacacagaggacctgacagaggagtggctgcgggagaagctgttcttcaccaacgtgaacttctgtgtgtccaaggtgttcatgtactag

SEQ ID NO: 143698 - DNA, 429 bp, Artificial Sequence
  derived and/or modified sequence
atgtctgagagcctggtggtgtgtgatgtggccgaggacctggtggagaagctgaggaagttccgcttcaggaaggagaccaacaatgctgccatcatcatgaagattgacaaggacaagaggctggtggtgctggatgaggagctggagggcatcagcccagatgagctgaaggatgagctgcctgagcggcagccccgcttcatcgtgtacagctacaagtaccagcatgatgatggccgggtgtcctaccccctgtgcttcatcttcagcagccctgtgggctgcaagccagagcagcagatgatgtatgccggcagcaagaacaagctggtgcagacagctgagctgaccaaggtgtttgagatccggaacacagaggacctgacagaggagtggctgcgggagaagctgggcttcttccactag

SEQ ID NO: 143699 - DNA, 561 bp, Artificial Sequence
  derived and/or modified sequence
cgactgggccaggcgccggggcaggaagggaggcggccgccgtgccattcttaaaggcgcccgagtgtaggcgacaggccgctgacggccggaaggaaaatgagtgagtctttggttgtttgtgatgttgccgaagatttagtggaaaagctgagaaagtttcgttttcgcaaagaaacgaacaacgctgctattataatgaagattgacaaggataaacgcctggtggtactggatgaggagcttgagggcatttcaccagatgaacttaaagatgaactacctgaacgacaacctcgattcattgtgtatagttataaatatcaacatgatgatggaagagtttcatatcctctgtgctttattttctccagtcctgttggatgtaagcctgaacaacagatgatgtatgctggaagtaagaataagctagtccagacagctgaactaaccaaggtatttgaaataagaaataccgaagacctaactgaagaatggttacgtgagaaactttttttcactaatgtgaacttctgtgtttctaaagtatttatgtattaa

SEQ ID NO: 143700 - DNA, 4301 bp, Artificial Sequence
  derived and/or modified sequence
acttgcagccaggcagagcgtcctcctctagagggagcagggaaaagaaaaaaaaaaaaaaaaaaaaaaaaaaaaaaatcaggcgatcgcattctgtctaattttgagccgcgccttttgccgtccgccatcacgtgccggcccgctgaggccgcgttgataggtgggggcgactgggccaggcgccggggcaggaagggaggcggccgccgtgccattcttaaaggcgcccgagtgtaggcgacaggccgctgacggccggaaggaaaatgagtgagtctttggttgtttgtgatgttgccgaagatttagtggaaaagctgagaaagtttcgttttcgcaaagaaacgaacaacgctgctattataatgaagattgacaaggataaacgcctggtggtactggatgaggagcttgagggcatttcaccagatgaacttaaagatgaactacctgaacgacaacctcgcttcattgtgtatagttataaatatcaacatgatgatggaagagtttcatatcctctgtgctttattttctccagtcctgttggatgtaagcctgaacaacagatgatgtatgctggaagtaagaataagctagtccagacagctgaactaaccaaggtatttgaaataagaaataccgaagacctaactgaagaatggttacgtgagaaacttggattttttcactaatgtgaacttctgtgtttctaaagtatttatgtattaacctgaccatactggaatcagacataaatacttatttatgcctaaaaatgcactgttacttacagtttgtttcctgcagtaaagaaaaattcttcatttgtgcaaaatttgaacaaagaggaaatcatcttcatagtaatgaaactttgtaaagtgtttccttatattggtaattgttaggtggactacttttctccagggactttttgcactcttgtgactaatttctataacttatggttcggaatttgttactatttacagacaccattggaaagtggatatattagattgtgagagacaacagttgcctccttttgacaaatactggatattagcagtttatttatgaaaatagcgtattatcacttgtcaaatcattgaaattcatttggggtcaaagacttgagtgacccagtattgagccatgaataatttagtgtaacctgtattacaagtacattgatgaattctgtatcttctttggtttcctgtatctttttaatcaagtctagaaactatgttcatcagtcactcatttttaaggtcgggagttagattttatgatagaattatgactgttagcttttctccttatagcatcttagtcttagaaattggtgggttgtaataatcaagggcttcattccttttatgtcatttctagacagttttgaatctaggttaataacactttatttataaagcacctcaatgtcctgtgaacactaattattttaaatgtgttaatactgtgcctttgatttgttagctttaaagttagtttaagacttttacactgccagtattccacatttggtgaaattaatacttttttaaagggtccaaataaaataattttctaatgtgtatatctgaaatttgtaataaaatcaacttcatattttaaaaattccaactatctgcttgcattggtgaatatatggcagtcgagagttataattttgggtatacttgtggttagttttgtgccataggaaaaaattatcttaaaactttggccatagttaataacattaacacttcaatagcaatcacatcttatatcctaaatgtcagaagatattctgaactggatgcctgaatagttaactaaaccagtcttgttagatgatggtactcttggcataaagcgaggattctgatatttggcatacttgtaaaaacaaatacataagtaaccattgaacattaatttgataataggtctagagactctaaaaactaaccaaacttggtgagtgtattcttatattaagaatatcttagtcatctcaaaactagcaaaatttaaattttggcatgttttccattcatatgttctttgcattttatttttgaggtttctgtgagaagtaaagatagttggaatttttgcgatattgaatagaacatcttctgttcccaacactgtttggcttcactaatttagaagtcaggaagcaatagaaagttggagatgaggaagtgctagagtaggtgtttgttttggttcttggagggaaaagattctttattccaatttccagagagaagagaaaactcacccaggaagtttaaaaattctttaaacaggtattttgatattggagaataacatgcatataattctgtaggaatgcacatgtaatccaagtgagtggagagtgtttttaatgtttttgaatgaaggaaatgaggttttgtttcacctgttttgcagcagtaagagaaactagtgctgcaagaatgtattttttaatgaagttccttattttgtcttgcatgttttagttttgcttatttttaaatttggaggtcctccataatgtcagataatattgacctgccatacgttagcactcttagttccgctactgtctttaacaggagcaaagagctgtgataaaccatgcttttttgagcttgtctgactcctaattaataacatgtttttggcaagacaacagattgaggttagaggatcagtaggacatttttattccatctgtcctatggggaaatttacaaatcccgtgctctaaaatgttctcaaacatttatatagatttccctttcatcttactaaattttgcattgttcttttcaagtatgtttcgtatttactgtctttttttctgccatttcccaaataataactccagatttcataattccagtttttacattccgttatctttctggtacaaccattcccattcagccttaaatctgagtcctttttagcagcaacttttttcctgggatcctccttcgtggtcttctaagtcagtgttagttttgaaatttttggccctgcataagttctgcatagcatctaatgtcaaaatagaaccaactggtaatcacagtattatttagtgtggtttccatgacaacaaaaatacatacgaagaaaacttctcaggttactatgctgaaattccaaaatgtctgagttttgaatagtgatcactttgttctggtattgacgcaattatattaggaaaaaagttggttgactgtttttgtttaattgacttctaaaatgttcaaattgtctagttctaaaagtttactaaatgcctagtgcagttaaacatactcttgtttaagtgtgtgttgctaaattttttactgtcattactaaataatctgtgtggcaaaatgtgtgtcagcacttttccctccttttttatctcctattttcaggagtcaaatgtagccataaactgtatccttgtctgacactttagctaaaaatttccagttaggggagtttattgccaaattaaatttggctgttccccccaacccatatagatattaaggaaggtgtacttaaaaaatgtttggactgcttttaaaacctgagcaatgtcattaatccatatgtggactagtgatgaatagatattttcataagagtttaaatgctgatatttggtggaagtagagagtaactcatattctatcaattcaagtattcttactatggttgctttccctatttgttcaatagactgataatactggaatttatagagtttgagccattacaacttttgtgaggatgtgtttcaaacatttctggacaaatcttattttgtatttctggaagaatgtagtaatcttctagaccgcttaaaaccaatgctcccaagctgaatattcttgagaaatttgtttttattatgccatttgacatttcaaatcagtgctcatatacagtaaacttgtgatagaaattgtattttattgctttttggattataattcatataaatataattacttgaatattgtttgagatcattaacatgccagggcagttcccactgatttagatggtccaagataatctcattcaggaggcttgaaacattaatggtttagtcttgtgaattttaacagttctctgtcatcgtttaacaaaaccaacaactgacacaactccttaagctgtggtttcagtctctgctagttcatattgcatgtttattttggacagtcttttgttaagcatggtgcttgtactggtttaaataaaatgttaacattaaaaga

SEQ ID NO: 143701 - DNA, 462 bp, Artificial Sequence
  derived and/or modified sequence
atgagcgagagcctggtggtgtgcgacgtggccgaggacctggtggagaaacttcgtaaattccgcttcaggaaggagaccaacaatgccgctattatcatgaagatagataaggataagcgcttggtggtgttagacgaggagttagaagggatctcccccgatgagctgaaggacgagttgcctgagcgccagccgaggttcatagtgtactcatataaatatcagcacgacgatggcagggtgtcctatcccctgtgtttcattttctctagccccgtggggtgcaagcctgaacaacagatgatgtatgctgggtctaagaataaactggtgcaaactgccgagctgactaaagtcttcgaaatcaggaatactgaggatttgaccgaggagtggctccgcgagaagcttttcttcacaaatgtgaatttctgcgtaagcaaggtatttatgtattag

SEQ ID NO: 143702 - DNA, 429 bp, Artificial Sequence
  derived and/or modified sequence
atgagcgagagcctggtggtgtgcgacgtggccgaggacctggtggagaaattgagaaagttcagatttcggaaggagacaaacaacgctgccattatcatgaagattgataaagacaagagactggttgtgctggatgaggagctagagggcatctccccagatgagttgaaagatgagctgccggagcgccaaccccgattcatcgtgtacagctataagtaccagcatgacgatggaagggtgagctatccactctgtttcatttttagctccccagtgggctgcaagccagagcagcagatgatgtatgcaggctctaagaacaagttagtccagactgctgaactgactaaggtgttcgaaattcgcaacacagaagacctgaccgaggagtggttacgggagaaactggggttttttcactag

SEQ ID NO: 143703 - DNA, 462 bp, Artificial Sequence
  derived and/or modified sequence
atgagtgaaagcttggtggtgtgtgatgtggccgaggatctggtcgagaagttgagaaaattccgattcagaaaagagaccaataatgccgcaattataatgaaaatcgacaaagataaacgcctggtcgtgcttgacgaggagctcgaaggcatctcacccgatgaattaaaagacgaactaccagaacgacagcccaggttcatcgtctattcttacaagtatcagcacgatgacggaagggtgtcataccctctgtgttttatttttagcagtcctgtggggtgtaaacctgagcagcaaatgatgtacgccggatctaaaaataagctggttcagacagccgaactgacaaaagtttttgagattcgcaacacggaagatctcacagaggaatggctccgcgaaaagctcttctttaccaatgtgaacttctgtgtcagcaaagtgtttatgtattag

SEQ ID NO: 143704 - DNA, 429 bp, Artificial Sequence
  derived and/or modified sequence
atgagcgagagtctggtcgtgtgcgacgtggcagaggacctggtcgaaaagcttcgcaagtttaggtttcgcaaggaaacaaacaacgccgcaatcatcatgaagattgataaagataagagattagttgttcttgacgaggagttagagggcatcagccccgacgagctcaaagacgagctgccggaacgccaacccagattcattgtgtatagttataagtaccagcacgacgatggaagggtgagctaccccttgtgttttatcttttcctctcctgtgggatgtaagcccgagcagcagatgatgtacgccggatctaagaacaagctcgtgcaaaccgctgagctgaccaaagttttcgagattcgcaacacagaggatctgactgaagaatggctcagagagaaacttggcttcttccattag

SEQ ID NO: 143705 - protein, 73 aa, Artificial Sequence
  derived and/or modified sequence
MPALHIEDLPEKEKLKMEVEQLRKEVKLQRQQVSKCSEEIKNYIEERSGEDPLVKGIPEDKNPFKEKGSCVIS

SEQ ID NO: 143706 - DNA, 222 bp, Artificial Sequence
  derived and/or modified sequence
atgcccgccctgcacatcgaggacctgcccgagaaggagaagctgaagatggaggtggagcagctgagaaaggaggtgaagctgcagagacagcaggtgagcaagtgcagcgaggagatcaagaactacatcgaggagagaagcggcgaggaccccctggtgaagggcatccccgaggacaagaaccccttcaaggagaagggcagctgcgtgatcagctag

SEQ ID NO: 143707 - DNA, 222 bp, Artificial Sequence
  derived and/or modified sequence
atgcccgcccttcacatcgaggatctgccagagaaggagaaacttaagatggaagtagagcagctgaggaaagaggtgaagttacagcgtcaacaggtgtccaagtgtagcgaagagattaagaactacatcgaggaacggagtggggaggatcccctggtgaagggcatccccgaggataagaacccgtttaaagaaaagggctcatgtgttatcagctag

SEQ ID NO: 143708 - DNA, 964 bp, Artificial Sequence
  derived and/or modified sequence
gcgcggagaacacaaagtaaaacttctgctgttcccagtcctgcagccccagcccagccgtcccccgcgggcgtggcaggtcctgagtcagggcctgtccgtggccagcatccctgctgggcgattgagcagcgggaagctgcttggacccagtctcaaacttaaccctcatctagcacccgggcaggcctcctgggttgcagggacttgagaaaaggcagagttctcaggtcctaggaagctggggcacgctggcgtgacaagcgtcccggagaaagccaagccctcggggagctggggaccgcagcagggctgcagtcacatcctgcgcgggtgggcggcgggccaggccttcagttgtttcgggacgcgccgagcttcgccgctcttccagcggctccgctgccagagctagcccgagcccggttctggggcgaaaatgcctgcccttcacatcgaagatttgccagagaaggaaaaactgaaaatggaagttgagcagcttcgcaaagaagtgaagttgcagagacaacaagtgtctaaatgttctgaagaaataaagaactatattgaagaacgttctggagaggatcctctagtaaagggaattccagaagacaagaacccctttaaagaaaaaggcagctgtgttatttcataaataacttgggagaaactgcatcctaagtggaagaactagtttgttttagttttcccagataaaaccaacatgctttttaaggaaggaagaatgaaattaaaaggagactttcttaagcaccatatagatagggttatgtataaaagcatatgtgctactcatctttgctcactatgcagtcttttttaagagagcagagagtatcagatgtacaattatggaaataagaacattacttgagcatgacacttctttcagtatattgcttgatgcttcaaataaagttttgtcttgggaagatga

SEQ ID NO: 143709 - DNA, 222 bp, Artificial Sequence
  derived and/or modified sequence
atgcctgccctgcacatcgaggacctgcctgagaaggagaagctgaagatggaggtggagcagctgaggaaggaggtgaagctgcagaggcagcaggtgtccaaatgttctgaggagatcaagaactacatcgaggagaggtctggagaggaccccctggtgaagggcatccctgaggacaagaaccccttcaaggagaagggcagctgtgtgatctcctag

SEQ ID NO: 143710 - DNA, 222 bp, Artificial Sequence
  derived and/or modified sequence
atgcccgccctgcacatcgaggacctgcccgagaaggagaagctgaagatggaagtcgaacagctgcggaaggaggtgaaattacaacgtcagcaggtgagcaagtgctctgaggaaattaagaattacatagaagaaagatccggggaggaccccttagttaaggggattccagaggacaagaatccttttaaggagaaggggagttgcgtgatctcttag

SEQ ID NO: 143711 - DNA, 222 bp, Artificial Sequence
  derived and/or modified sequence
atgccagccctacacatcgaagatctcccagaaaaagagaagctgaagatggaagtggaacagcttcgcaaggaagtaaaacttcaacgccagcaagtgagcaaatgttctgaggagatcaaaaattatattgaagaaaggtctggcgaggatcctctcgtgaagggtatccccgaggacaaaaaccccttcaaggagaaagggagttgtgtgataagctag

SEQ ID NO: 143712 - protein, 249 aa, Artificial Sequence
  derived and/or modified sequence
MAERGELDLTGAKQNTGVWLVKVPKYLSQQWAKASGRGEVGKLRIAKTQGRTEVSFTLNEDLANIHDIGGKPASVSAPREHPFVLQSVGGQTLTVFTESSSDKLSLEGIVVQRAECRPAASENYMRLKRLQIEESSKPVRLSQQLDKVVTTNYKPVANHQYNIEYERKKKEDGKRARADKQHVLDMLFSAFEKHQYYNLKDLVDITKQPVVYLKEILKEIGVQNVKGIHKNTWELKPEYRHYQGEEKSD

SEQ ID NO: 143713 - DNA, 1469 bp, Artificial Sequence
  derived and/or modified sequence
gtgttcctcttttcctcggttcccagtgttctggcaggtaaggaacgccggctcttcgcctctcagcgcggcttgtcctttgttccggacgcccgctcctcagccctgcggctcctggggtcgctgctgcatcccgcacgcctccaccggctgcagacccatggccgagcgcggggaactcgacttgaccggcgccaaacagaacacaggagtgtggctagtcaaggttcctaaatatttgtcacagcaatgggctaaagcctctggaagaggtgaagttgggaaactgcggattgccaagactcaaggaaggactgaggtgtcatttactttgaatgaggatcttgcaaatattcatgatattggtggaaaaccagcttcagtcagtgctcctagagaacatccatttgtcttgcaaagtgttggaggacagacattaacagtatttactgagagctcatcagataagctgtcattggaaggaatagtggtacaaagagctgaatgccgaccagctgccagtgaaaactacatgcgattaaaaagattgcaaatagaagagtcttccaaaccagtgaggctatcacaacagctggacaaagttgtaacaaccaattacaaacctgttgctaatcatcaatacaatatcgaatatgaaaggaaaaagaaagaagacggaaagcgagctcgagctgataaacaacatgttttagacatgctattttcagcctttgagaaacatcaatactataatcttaaggacttggtggacatcacaaagcaacctgtggtgtacctgaaggaaatcttaaaagaaattggtgttcagaatgtaaaagggatccacaaaaacacatgggagctgaagccagagtacagacactatcaaggagaagaaaagagtgactaagaagactcctagccagcatgctagtgaaacgactagcagcgatgctatgcaaaaggcgctgatactggaaggcttgaacaccgtatgttaataggggttaagtgacagtactttgatttctctcggtaaattttttaaacctgtaattcttgtaaagtttcttaactgtttttttgaggagaaagaacagatttatttatagacttaacttgtattaaaccagattattcacagtaggaataggggttggaggattaagagggtttttcttaaatattagcttttaatgtgtacaattaggaaatttttttaagtgaggactctctacccttgccgtatctaaggagctgaggtaatacagatccaaggagaattgtatagcaagaaaaaaacagtcaactacagaaactcttaaaaggaataaaaacccaaagttccttattttgaaattgtcaaagaacaaagcggtgtttttcttttaaacaggtgatcacgtttcgtgttcatactcaacgttaataaaaggagagagtttgtagtgaaaaaaaaaaaaaaaaaa

SEQ ID NO: 143714 - DNA, 750 bp, Artificial Sequence
  derived and/or modified sequence
atggccgagagaggcgagctggacctgaccggcgccaagcagaacaccggcgtgtggctggtgaaggtgcccaagtacctgagccagcagtgggccaaggccagcggcagaggcgaggtgggcaagctgagaatcgccaagacccagggcagaaccgaggtgagcttcaccctgaacgaggacctggccaacatccacgacatcggcggcaagcccgccagcgtgagcgcccccagagagcaccccttcgtgctgcagagcgtgggcggccagaccctgaccgtgttcaccgagagcagcagcgacaagctgagcctggagggcatcgtggtgcagagagccgagtgcagacccgccgccagcgagaactacatgagactgaagagactgcagatcgaggagagcagcaagcccgtgagactgagccagcagctggacaaggtggtgaccaccaactacaagcccgtggccaaccaccagtacaacatcgagtacgagagaaagaagaaggaggacggcaagagagccagagccgacaagcagcacgtgctggacatgctgttcagcgccttcgagaagcaccagtactacaacctgaaggacctggtggacatcaccaagcagcccgtggtgtacctgaaggagatcctgaaggagatcggcgtgcagaacgtgaagggcatccacaagaacacctgggagctgaagcccgagtacagacactaccagggcgaggagaagagcgactag

SEQ ID NO: 143715 - DNA, 1432 bp, Artificial Sequence
  derived and/or modified sequence
ttcccagtgttctggcaggtaaggaacgccggctcttcgcctctcagcgcggcttgtcctttgttccggacgcccgctcctcagccctgcggctcctggggtcgctgctgcatcccgcacgcctccaccggctgcagacccatggccgagcgcggggaactcgacttgaccggcgccaaacagaacacaggagtgtggctagtcaaggttcctaaatatttgtcacagcaatgggctaaagcctctggaagaggtgaagttgggaaactgcggattgccaagactcaaggaaggactgaggtgtcatttactttgaatgaggatcttgcaaatattcatgatattggtggaaaaccagcttcagtcagtgctcctagagaacatccatttgtcttgcaaagtgttggaggacagacattaacagtatttactgagagctcatcagataagctgtcattggaaggaatagtggtacaaagagctgaatgccgaccagctgccagtgaaaactacatgcgattaaaaagattgcaaatagaagagtcttccaaaccagtgaggctatcacaacagctggacaaagttgtaacaaccaattacaaacctgttgctaatcatcaatacaatatcgaatatgaaaggaaaaagaaagaagacggaaagcgagctcgagctgataaacaacatgttttagacatgctattttcagcctttgagaaacatcaatactataatcttaaggacttggtggacatcacaaagcaacctgtggtgtacctgaaggaaatcttaaaagaaattggtgttcagaatgtaaaagggatccacaaaaacacatgggagctgaagccagagtacagacactatcaaggagaagaaaagagtgactaagaagactcctagccagcatgctagtgaaacgactagcagcgatgctatgcaaaaggcgctgatactggaaggcttgaacaccgtatgttaataggggttaagtgacagtactttgatttctctcggtaaattttttaaacctgtaattcttgtaaagtttcttaactgtttttttgaggagaaagaacagatttatttatagacttaacttgtattaaaccagattattcacagtaggaataggggttggaggattaagagggtttttcttaaatattagcttttaatgtgtacaattaggaaatttttttaagtgaggactctctacccttgccgtatctaaggagctgaggtaatacagatccaaggagaattgtatagcaagaaaaaaacagtcaactacagaaactcttaaaaggaataaaaacccaaagttccttattttgaaattgtcaaagaacaaagcggtgtttttcttttaaacaggtgatcacgtttcgtgttcatactcaacgttaataaaaggagagagtttgtagtg

SEQ ID NO: 143716 - DNA, 750 bp, Artificial Sequence
  derived and/or modified sequence
atggccgagaggggtgagctcgatctcacgggcgctaagcagaatacaggggtttggctggttaaggtcccaaagtatttgagccagcagtgggctaaagcttccggccggggtgaagtagggaagctaagaatcgccaaaacccagggcaggacggaagtctccttcactcttaacgaagatctggctaacatccacgatatcggaggcaaaccagcctcagtgtccgccccccgcgagcaccctttcgtcctccagagtgtcggcggacaaactctgacagtctttacagaatcctcatcagataaattgtccctggaaggcatagtggtccagagagctgaatgtcgtcccgctgcttccgaaaactacatgaggctgaagaggctacagatagaagaaagcagcaaacctgtacgcctttctcaacagctcgataaggtggtaacaacaaactacaaaccggtggcaaaccaccagtacaatattgagtatgagcgtaaaaaaaaggaggatgggaaacgcgcaagagccgacaaacagcacgtgctggatatgctcttttctgcgtttgagaagcatcaatattacaatctcaaggacctagtcgatatcactaaacagcctgtggtgtacctaaaagagatcctcaaggaaattggggtgcaaaacgttaaagggatacacaagaatacttgggagctcaagccagaatatcggcattatcagggtgaggagaaaagtgattag

SEQ ID NO: 143717 - DNA, 750 bp, Artificial Sequence
  derived and/or modified sequence
atggccgagcggggggagctggacctgaccggggccaagcagaacacaggagtgtggctggtgaaggtgcccaagtacctgagccagcagtgggccaaggccagcggccgcggggaggtgggcaagctgagaattgccaagacccagggccgcacagaggtgtccttcaccctgaatgaagacctggccaacatccatgacatcggcggcaagccagcctctgtgtctgccccccgggagcacccctttgtgctgcagagcgtgggcggccagaccctgaccgtcttcacagagagcagcagtgacaagctgagcctggagggcatcgtggtgcagagagcagaatgtagacctgctgccagcgagaactacatgaggctgaagaggctgcagatcgaggagagcagcaagcctgtgcggctgagccagcagctggacaaggtggtgaccaccaactacaagcctgtggccaaccaccagtacaacattgaatatgaaaggaagaagaaggaggatggcaagagggcccgggctgacaagcagcacgtgctggacatgctgttcagcgcctttgagaagcaccagtactacaacctgaaggacctggtggacatcaccaagcagcctgtggtgtacctgaaggagatcctgaaggagattggagtgcagaatgtgaagggcatccacaagaacacctgggagctgaagccagagtaccgccactaccagggcgaggagaagagtgactag

SEQ ID NO: 143718 - DNA, 750 bp, Artificial Sequence
  derived and/or modified sequence
atggccgagcggggcgagctggacctgaccggcgccaagcagaacacgggagtctggctcgtgaaggtgcctaagtacctcagccagcagtgggccaaggcatccggaagaggcgaggtcggaaagctgcgcattgcgaaaacacagggtcgcacagaggtcagttttacactgaatgaagatttagcgaacatacatgatatcggtgggaagcccgcctctgtcagcgccccacgggagcaccccttcgtgcttcagagcgtgggaggccagacactgacagtgtttacagagtcctcctcagacaagctgagtctcgagggaatcgtggtgcagagagccgagtgccggccagccgctagcgagaactacatgaggcttaaacggcttcagatagaggaatcctccaagcctgtgcggctctcccaacagcttgataaagtcgtgacaactaattacaaacctgttgccaaccatcagtacaacatagagtatgagcgaaaaaagaaagaggacgggaaacgagcccgcgctgacaagcagcacgtattggacatgttgtttagcgctttcgaaaagcatcaatactacaatctgaaagacttggtggacatcactaaacagcccgtcgtctacctgaaagagatcctgaaggagatcggcgtccagaacgtgaaggggatccataagaatacttgggagttgaagcctgagtataggcactaccagggagaggagaaaagtgattag

SEQ ID NO: 143719 - DNA, 750 bp, Artificial Sequence
  derived and/or modified sequence
atggcggagaggggcgagctggacctcaccggagccaagcaaaacaccggcgtctggctcgtgaaagttcctaaatatctcagccagcagtgggctaaagcgagcggccgtggcgaagtggggaagctgaggatcgctaagacccaaggacgcacggaggtgagttttacactgaatgaagacttagcaaatattcacgacatcggcggaaagcccgctagtgtttcagcacctcgcgagcacccattcgtgctacagagcgtggggggtcagacccttacggtgtttacagagtcctcctctgacaaacttagtctggagggaatagtcgtccagcgtgcagagtgtcgccctgctgcatctgaaaactacatgcgattaaagcggttgcaaattgaagaatcctcgaaaccggtgcgcctgagtcagcagttggataaggtggtgactacaaactataaaccagtggccaaccaccagtacaacatcgaatacgagaggaagaagaaggaggatggcaaaagagcacgggcagacaagcaacatgtcctcgacatgctattcagtgccttcgagaagcatcagtactataatctcaaagatttggtggatattacaaagcagccagtggtttacctcaaagagatcctgaaagagatcggcgtgcagaatgtgaaaggcatacataaaaacacctgggagttgaagccagaatacaggcactaccagggggaggagaaatctgattag

SEQ ID NO: 143720 - protein, 350 aa, Artificial Sequence
  derived and/or modified sequence
MTDQAFVTLTTNDAYAKGALVLGSSLKQHRTTRRLVVLATPQVSDSMRKVLETVFDEVIMVDVLDSGDSAHLTLMKRPELGVTLTKLHCWSLTQYSKCVFMDADTLVLANIDDLFDREELSAAPDPGWPDCFNSGVFVYQPSVETYNQLLHLASEQGSFDGGDQGILNTFFSSWATTDIRKHLPFIYNLSSISIYSYLPAFKVFGASAKVVHFLGRVKPWNYTYDPKTKSVKSEAHDPNMTHPEFLILWWNIFTTNVLPLLQQFGLVKDTCSYVNVLSDLVYTLAFSCGFCRKEDVSGAISHLSLGEIPAMAQPFVSSEERKERWEQGQADYMGADSFDNIKRKLDTYLQ

SEQ ID NO: 143721 - DNA, 1053 bp, Artificial Sequence
  derived and/or modified sequence
atgaccgaccaggccttcgtgacgttgaccaccaacgatgcatatgctaaaggggctctggtcctcggcagctccctgaagcagcacaggaccacacgtaggctggtcgtgctggcgacccctcaagtaagcgattcgatgagaaaggtgttagaaacggtatttgacgaggtcatcatggtggatgtgttggactccggtgactccgcacacttgacccttatgaagcggcccgaattgggagtcacacttacaaaattgcactgctggtcactgacccaatacagcaagtgcgtattcatggatgcggatactctggtcttagcaaatatcgacgacctgttcgaccgcgaggagctgagtgcagcccccgatccaggctggcccgactgcttcaattcaggcgtattcgtttaccagccctcagtggagacctacaaccagttgctccatctagcaagtgaacaagggtcttttgacgggggcgaccaaggtatcctgaataccttcttctctagttgggcgacaaccgatatacgaaagcacctgccattcatttataatttaagttctatttctatttactcctacctcccagcttttaaggtgtttggcgcttcagcaaaagtagtgcacttcttaggcagggtgaagccttggaattacacctatgacccaaaaactaaatcggtgaaaagcgaggctcacgaccccaacatgacacaccctgaattccttatcctctggtggaatatttttaccaccaatgtgctgcccctcctacagcagtttggactcgtgaaggacacttgcagttatgtcaatgtgttatccgatctggtgtacaccctggcctttagctgtggcttttgccgaaaagaagacgtctcgggcgccatttcccatctgtcacttggagaaattcctgccatggctcaaccttttgtgtctagcgaggaacgcaaggaaagatgggagcaggggcaggcagactatatgggggccgactcattcgataacataaaaagaaagctggatacatacctgcagtag

SEQ ID NO: 143722 - DNA, 2052 bp, Artificial Sequence
  derived and/or modified sequence
agcaggggcgccggtgagccgcagccgcagcggcagcctagccccgagggagggaggaggagccgagggagacgcgggacccggagccccgcgggccaccgcccctgccggccgcgcagctgggaggatgcggacggcagcgagagcgtgcgcggccacgtgacggccgctataagagcgcacggggcagacgctcggttccccgccgtgcctcctcgctggccgcgctccctcccggtgccggcttctctgagtcaccaacctgaggctgccccggccgcctgcgcacccggcagcaccatgacagatcaggcctttgtgacactaaccacaaacgatgcctacgccaaaggtgccctggtcctgggatcatctctgaaacagcacaggaccaccaggaggctggtcgtgctcgccacccctcaggtctcagactccatgagaaaagttttagagacagtctttgatgaagtcatcatggtagatgtcttggacagtggcgattctgctcatctaaccttaatgaagaggccagagttgggtgtcacgctgacaaagctccactgctggtcgcttacacagtattcaaaatgtgtattcatggatgcagatactctggtcctagcaaatattgatgatctttttgacagagaagaattgtcagcagcaccagacccagggtggcctgactgcttcaattccggagtcttcgtttatcagccttcagttgaaacatacaatcagctgttgcatcttgcttctgagcaaggtagttttgatggtggggaccaaggcatactgaacacattttttagcagctgggcaacaacagatatcagaaaacacctgccgtttatttataacctaagcagcatctctatatactcctacctcccggcatttaaagtgtttggtgcaagtgccaaagttgtgcatttcctgggacgagtcaaaccatggaattatacttatgatcccaaaacaaaaagtgtcaaaagtgaggcccatgatcccaacatgactcatccagagtttctcatcctgtggtggaacatctttaccaccaacgttttacctctgcttcaacaatttggccttgtcaaagacacctgctcatatgtaaatgtgctttcagacttggtctatacactggctttctcttgtggcttctgtagaaaggaagatgtctcaggagccatatcacatctgtcccttggggagatcccagctatggcacagccgtttgtatcctcggaagaacggaaggaacgatgggaacagggccaggctgattatatgggagcagattcctttgacaacatcaagaggaaacttgacacttacctccagtagaaacactgcatttttctgtgaacacatccacttcacaagccttgtttctgatacttagtatctagagctgggttgagaaaagtctgttacagttgctagaggttttcattaaaacttatcagatgagaggcttttttaggataagaggtgagaactgggcaaaagttgtgaagcagcaattctgttatatggacagtgttctgctttttaatcctatttagcttgtttcagaaattctcacttttgttgactgccaacatacaaagtaagggaaactcaagatattaagatggctgtatcagttcttaaaatctgcagagcctggttcaaaatcagtcactcccttcagaagcagacatggcatctgttccttgcttgcttgttggttgtgtacctttcacgagacctgaattttagaattgcccagtgctgccagagtgagtgagtgtaattctcctttcaggtaaagataggctatctcaacactgctgagtgattcataaacatatcaaccaatagcattaacccattttatttcctgtccttagtgtctgaagatgctcaccagttttctgtgtacagtaaggcagcatgctaaaatgcttttgttcagttctgtatatttgaaaatagcagtgtgttctctgatggttacctgcagtggcaccctgtacaaaaaataaaagacttattgctgta

SEQ ID NO: 143723 - DNA, 1053 bp, Artificial Sequence
  derived and/or modified sequence
atgacagaccaggcctttgtgaccctgaccaccaatgatgcctatgccaagggggccctggtgctgggcagcagcctgaagcagcacaggaccacccggcggctggtggtgctggccaccccccaggtgtctgacagcatgaggaaggtgctggagaccgtgtttgatgaggtgatcatggtggatgtgctggacagcggggacagcgcccacctgaccctgatgaagaggcctgagctgggcgtgaccctgaccaagctgcactgctggagcctgacccagtacagcaaatgtgtgttcatggatgctgacaccctggtgctggccaacattgatgacctgtttgaccgggaggagctgtctgctgccccagaccccggctggccagactgcttcaacagcggcgtgtttgtgtaccagcccagcgtggagacctacaaccagctgctgcacctggccagcgagcagggcagctttgatggaggagaccagggcatcctgaacaccttcttcagctcctgggccaccacagacatcaggaagcacctgcccttcatctacaacctgagcagcatcagcatctacagctacctgcctgccttcaaggtgtttggagccagcgccaaggtggtgcacttcctgggccgggtgaagccctggaactacacctatgaccccaagaccaagtctgtgaagtctgaggcccatgaccccaacatgacccaccctgagttcctgatcctgtggtggaacatcttcaccaccaacgtgctgcccctgctgcagcagtttggcctggtgaaggacacctgcagctatgtgaatgtgctgagtgacctggtgtacaccctggccttcagctgtggcttctgcaggaaggaggatgtgtctggggccatcagccacctgagcctgggggagatcccagccatggcccagccctttgtgagcagcgaggagaggaaggagcgctgggagcagggccaggccgactacatgggcgctgacagctttgacaacatcaagaggaagctggacacctacctgcagtag

SEQ ID NO: 143724 - DNA, 1053 bp, Artificial Sequence
  derived and/or modified sequence
atgaccgaccaggccttcgtgaccctgaccaccaacgacgcctacgccaagggggctctcgtgctgggatccagtctcaagcaacatcgcaccacaagaagacttgttgtgctggccaccccacaagtctccgacagcatgcggaaagtgctggagaccgtgtttgatgaggtaattatggtcgatgtcttggacagcggagactctgcccatctcacattgatgaagaggcccgagcttggtgtcacacttactaagctccattgttggtccctgacccaatactctaaatgcgttttcatggacgccgatacgttagtgctcgcaaacattgacgatctcttcgatagagaagaactgagcgccgctccagatcctgggtggccggattgtttcaactccggggtgtttgtgtaccagcctagcgtcgaaacttataaccagctgttacatttagcctctgagcagggctccttcgacggaggagaccagggtatccttaataccttcttcagcagttgggcgacaactgacattagaaaacacctgcccttcatatacaatctgagctcaatcagtatttactcctacttaccggcttttaaagtcttcggcgctagcgcaaaagtcgtgcatttcttgggtcgcgtgaagccatggaactatacctatgaccccaaaacaaagtcagtgaaaagtgaggctcacgacccaaacatgactcaccctgaatttctaatcctgtggtggaacatttttaccaccaacgttctcccactgctgcagcagtttggtctcgtgaaagatacctgcagctacgtaaacgtcctgtccgatctggtgtacaccctcgccttctcctgcggcttctgcaggaaagaggatgtctcaggggctatctcacatctcagcttaggcgagatcccagctatggctcagcccttcgtgagctccgaagagagaaaggaacggtgggaacagggccaggccgactacatgggagccgattccttcgataacattaaacgcaagctggacacgtacctgcagtag

SEQ ID NO: 143725 - DNA, 1053 bp, Artificial Sequence
  derived and/or modified sequence
atgactgaccaagcattcgtgaccctcacaacgaacgacgcctacgcaaagggtgctttggttctcgggagctctctgaagcagcacaggacgactaggcggctggtcgtgcttgccactccacaagtctccgactcaatgaggaaggtcctcgaaacggtgttcgatgaagtgatcatggtggacgttttggactctggggactcagcacaccttacattaatgaagcggccagagctcggcgtgacactgaccaagctgcactgttggtccttgacgcagtattctaaatgtgtgttcatggacgccgacaccctggtcctagctaatattgacgacctgttcgaccgggaagaactcagcgcagctcccgacccagggtggcctgactgcttcaatagcggagtcttcgtgtatcagccttcggtagagacctataaccaactcctccatctcgcatctgaacaaggctccttcgatggaggggatcaaggaatcctcaacacgttcttttcatcatgggctaccacggatattcggaagcatttgccgtttatctacaatctttcgagcatcagcatttactcatatctgccggcattcaaggtatttggcgcatctgcaaaagtagtgcatttcttgggccgagtgaagccctggaactacacctacgacccaaagacaaaaagtgtcaagtctgaggcgcacgatcctaacatgactcatcctgaattcctgatcctgtggtggaacatttttaccacaaacgtgctgcctttattacaacagtttggcctggttaaggacacctgtagttacgtgaatgtcctgagcgacctggtctatacactggccttttcatgtggcttctgccgcaaagaggatgtgtcaggagccataagccacctctcacttggagagatccccgcaatggcccagccattcgtgagttccgaggaacgtaaagaaagatgggaacaaggtcaggctgattacatgggagcggattcttttgacaacattaaacgaaagctggacacttatctgcagtag

SEQ ID NO: 143726 - DNA, 1053 bp, Artificial Sequence
  derived and/or modified sequence
atgaccgaccaggccttcgtgaccctgaccaccaacgacgcctacgccaagggcgccctggtgctgggcagcagcctgaagcagcacagaaccaccagaagactggtggtgctggccaccccccaggtgagcgacagcatgagaaaggtgctggagaccgtgttcgacgaggtgatcatggtggacgtgctggacagcggcgacagcgcccacctgaccctgatgaagagacccgagctgggcgtgaccctgaccaagctgcactgctggagcctgacccagtacagcaagtgcgtgttcatggacgccgacaccctggtgctggccaacatcgacgacctgttcgacagagaggagctgagcgccgcccccgaccccggctggcccgactgcttcaacagcggcgtgttcgtgtaccagcccagcgtggagacctacaaccagctgctgcacctggccagcgagcagggcagcttcgacggcggcgaccagggcatcctgaacaccttcttcagcagctgggccaccaccgacatcagaaagcacctgcccttcatctacaacctgagcagcatcagcatctacagctacctgcccgccttcaaggtgttcggcgccagcgccaaggtggtgcacttcctgggcagagtgaagccctggaactacacctacgaccccaagaccaagagcgtgaagagcgaggcccacgaccccaacatgacccaccccgagttcctgatcctgtggtggaacatcttcaccaccaacgtgctgcccctgctgcagcagttcggcctggtgaaggacacctgcagctacgtgaacgtgctgagcgacctggtgtacaccctggccttcagctgcggcttctgcagaaaggaggacgtgagcggcgccatcagccacctgagcctgggcgagatccccgccatggcccagcccttcgtgagcagcgaggagagaaaggagagatgggagcagggccaggccgactacatgggcgccgacagcttcgacaacatcaagagaaagctggacacctacctgcagtag

SEQ ID NO: 143727 - protein, 20 aa, Artificial Sequence
  derived and/or modified sequence
KPGQTCSVAGWGQTAPLGKS

SEQ ID NO: 143728 - protein, 247 aa, Artificial Sequence
  derived and/or modified sequence
MQPILLLLAFLLLPRADAGEIIGGHEAKPHSRPYMAYLMIWDQKSLKRCGGFLIRDDFVLTAAHCWGSSINVTLGAHNIKEQEPTQQFIPVKRPIPHPAYNPKNFSNDIMLLQLERKAKRTRAVQPLRLPSNKAQVKPGQTCSVAGWGQTAPLGKHSHTLQEVKMTVQEDRKCESDLRHYYDSTIELCVGDPEIKKTSFKGDSGGPLVCNKVAQGIVSYGRNNGMPPRACTKVSSFVHWIKKTMKRY

SEQ ID NO: 143729 - protein, 202 aa, Artificial Sequence
  derived and/or modified sequence
MQPILLLLAFLLLPRADAGEIIGGHEAKPHSRPYMAYLMIWDQKSLKRCGGFLIRDDFVLTAAHCWGRLERKAKRTRAVQPLRLPSNKAQVKPGQTCSVAGWGQTAPLGKHSHTLQEVKMTVQEDRKCESDLRHYYDSTIELCVGDPEIKKTSFKGDSGGPLVCNKVAQGIVSYGRNNGMPPRACTKVSSFVHWIKKTMKRY

SEQ ID NO: 143730 - protein, 281 aa, Artificial Sequence
  derived and/or modified sequence
MKSLSLLHLFPLPRAKREQGGNNSSSNQGSLPEKMQPILLLLAFLLLPRADAGEIIGGHEAKPHSRPYMAYLMIWDQKSLKRCGGFLIRDDFVLTAAHCWGSSINVTLGAHNIKEQEPTQQFIPVKRPIPHPAYNPKNFSNDIMLLQLERKAKRTRAVQPLRLPSNKAQVKPGQTCSVAGWGQTAPLGKHSHTLQEVKMTVQEDRKCESDLRHYYDSTIELCVGDPEIKKTSFKGDSGGPLVCNKVAQGIVSYGRNNGMPPRACTKVSSFVHWIKKTMKRY

SEQ ID NO: 143731 - DNA, 744 bp, Artificial Sequence
  derived and/or modified sequence
atgcagccaatactgcttctactagcattcctgctgttaccgcgcgctgacgccggagagattattggtgggcacgaggccaagccccactcccggccctatatggcttacctgatgatctgggaccagaagtctctgaagagatgcggaggcttcctaattcgcgatgattttgtgttgaccgcagcccactgttgggggagctccattaatgttaccctcggcgctcacaatattaaagagcaggagccaacccagcaattcatccccgtcaaacgccctattcctcatccggcatacaacccaaagaatttctcaaacgatatcatgttgttacagctggagaggaaggccaagcgcaccagggccgtgcaaccacttaggctcccttcaaataaagcgcaggttaagcctggacaaacttgttcagtcgccgggtgggggcagaccgcacctcttggcaaacatagccatacgctgcaagaggtgaaaatgacagtgcaagaggaccgcaagtgcgaaagcgaccttaggcactactacgacagtacgatcgagctgtgcgtcggagatccggaaatcaagaaaacttctttcaagggagacagcggcggcccgctcgtttgtaataaagtggcacagggcatcgtgtcctatggccggaataacggaatgcccccaagggcctgcaccaaagtttcttccttcgtgcactggataaaaaagaccatgaagaggtactag

SEQ ID NO: 143732 - DNA, 744 bp, Artificial Sequence
  derived and/or modified sequence
atgcagcccatcctgctgctgctggccttcctgctgctgcccagggcagatgctggggagatcatcggcggccacgaggccaagccccacagccggccctacatggcctacctgatgatctgggaccagaagagcctgaagagatgtggcggcttcctgatcagagatgactttgtgctgacagctgcccactgctggggcagcagcatcaacgtgaccctgggcgcccacaacatcaaggagcaggagcccacccagcagttcatccctgtgaagaggcccatcccccacccagcctacaaccccaagaacttcagcaatgacatcatgctgctgcagctggagaggaaggccaagaggaccagggctgtgcagcccctgcggctgcccagcaacaaggcccaggtgaagccaggccagacctgcagcgtggccggctggggccagacagcccccctgggcaagcacagccacaccctgcaggaggtgaagatgacagtgcaggaggacagaaaatgtgagagtgacctgcggcactactatgacagcaccatcgagctgtgtgtgggggaccctgagatcaagaagaccagcttcaagggggacagcggcggccccctggtgtgcaacaaggtggcccagggcatcgtgtcctatggaagaaataatggcatgccaccccgggcctgcaccaaggtgtcctcctttgtgcactggatcaagaagaccatgaagcgctactag

SEQ ID NO: 143733 - DNA, 744 bp, Artificial Sequence
  derived and/or modified sequence
atgcagcccatcctgctgctgctggccttcctgctgctgccccgggctgacgcaggtgagattatcggagggcacgaggcgaaaccgcattcccgaccatacatggcttatctcatgatctgggatcaaaaaagcctcaagaggtgcggaggatttcttatccgagacgatttcgtgctcaccgcagcccattgctgggggtcctcaataaatgtgacgcttggagcacataatatcaaagaacaggaacctacccagcagttcattccagtaaagagacccatacctcatcctgcatacaaccccaaaaatttctccaacgacattatgctgctccagctcgagcgaaaggccaagagaacccgcgcggtacagcctttgcgactgcccagtaacaaagctcaggttaaaccaggacagacttgctctgttgcaggatggggccagacggcccccctgggcaagcacagccacacactccaggaggtgaagatgacggtgcaagaagatagaaagtgtgaaagtgatctaagacattattacgacagtacgatcgagctttgtgtaggcgaccccgaaattaagaagacatcttttaagggtgattctgggggcccactcgtttgcaataaggtggctcagggcattgtctcctatggtcggaataacggcatgcctcccagagcgtgtacgaaagtctccagtttcgtgcattggattaaaaagacaatgaaaagatactag

SEQ ID NO: 143734 - DNA, 744 bp, Artificial Sequence
  derived and/or modified sequence
atgcagcctatcctgctgctgctcgctttcctgctgttgcccagagctgatgcaggtgaaatcataggcggacacgaagctaagcctcactccaggccatacatggcatacctgatgatttgggaccagaaatccttgaagagatgtggaggttttctgatacgtgacgactttgtcttgaccgccgcacactgttggggaagcagtataaatgtaaccctcggggcacacaatattaaggagcaggaacccacacagcagtttatccctgtaaagaggccaatcccccaccccgcatacaaccccaagaacttctctaatgatattatgttgctacagttggagagaaaagccaagcgaaccagagccgtccagccgctcagactgccctcaaacaaggcgcaggtgaaacccggtcagacatgtagcgtggccggttggggccaaacagcacctttgggcaaacacagccatacactgcaggaggttaaaatgactgtacaggaagataggaaatgcgagagcgatctgagacactattatgactccacgattgaactgtgtgtaggggatcctgagattaagaaaactagctttaagggagattctggtggtcccctggtttgtaataaggtggcccaaggaatcgtaagctatggcagaaacaacggaatgcctccccgagcctgcaccaaggtctcctcctttgtgcactggattaagaagacgatgaaacgatactag

SEQ ID NO: 143735 - DNA, 744 bp, Artificial Sequence
  derived and/or modified sequence
atgcagcccatcctgctgctgctggccttcctgctgctgcccagagccgacgccggcgagatcatcggcggccacgaggccaagccccacagcagaccctacatggcctacctgatgatctgggaccagaagagcctgaagagatgcggcggcttcctgatcagagacgacttcgtgctgaccgccgcccactgctggggcagcagcatcaacgtgaccctgggcgcccacaacatcaaggagcaggagcccacccagcagttcatccccgtgaagagacccatcccccaccccgcctacaaccccaagaacttcagcaacgacatcatgctgctgcagctggagagaaaggccaagagaaccagagccgtgcagcccctgagactgcccagcaacaaggcccaggtgaagcccggccagacctgcagcgtggccggctggggccagaccgcccccctgggcaagcacagccacaccctgcaggaggtgaagatgaccgtgcaggaggacagaaagtgcgagagcgacctgagacactactacgacagcaccatcgagctgtgcgtgggcgaccccgagatcaagaagaccagcttcaagggcgacagcggcggccccctggtgtgcaacaaggtggcccagggcatcgtgagctacggcagaaacaacggcatgccccccagagcctgcaccaaggtgagcagcttcgtgcactggatcaagaagaccatgaagagatactag

SEQ ID NO: 143736 - DNA, 609 bp, Artificial Sequence
  derived and/or modified sequence
atgcaaccgatcctgctgctgctggcatttctcttactaccccgggcagacgctggagagatcattggaggacatgaggcaaaacctcacagtcgcccttacatggcttacctgatgatctgggaccagaagagtcttaagcggtgcggaggcttccttatcagagatgacttcgtgcttactgcggcccactgttgggggaggctcgaaagaaaagccaagcgcactcgggcagtgcagcccttgcgtctcccctccaacaaagcccaagtgaagcccgggcagacatgcagtgtggctggatggggtcagacggctcccctgggcaagcacagccatacgctccaggaggtcaaaatgacggtccaggaagacagaaaatgtgagtctgacctgagacactattatgacagcactatcgaactgtgcgtcggagatcctgagattaagaagacctctttcaagggcgacagtgggggaccactcgtatgtaacaaagtggcccaggggattgtgtcctatggtcggaataatggtatgcctcctagagcatgcacaaaggtaagctcgttcgtacattggatcaagaaaaccatgaagaggtactag

SEQ ID NO: 143737 - DNA, 846 bp, Artificial Sequence
  derived and/or modified sequence
atgaagtccttgagtctcctacacctgttcccactgcctcgggccaaacgtgagcagggcggaaataactcgagcagcaaccagggttccctgcccgagaagatgcaacccatacttctgttattagcctttctgcttctaccaagggccgacgctggcgaaattataggtggccacgaggccaaacctcatagccgtccatacatggcttatctcatgatctgggaccaaaagtctttgaagaggtgcgggggttttctcattagggacgattttgtgttaacggccgcccattgctggggttcaagtattaacgtgacacttggcgcacataacatcaaggaacaggaacctacccagcaattcatccctgttaaaaggcctatcccccatcccgcctataaccccaaaaacttcagcaatgacataatgttgctgcagttagaacgaaaggctaaacgaacccgcgctgtccagccattgcgactaccctcaaataaggcgcaggtgaaaccagggcagacctgttccgtggcgggttggggccagacagctcctctgggcaagcatagccacaccctccaggaggtaaagatgactgtccaggaggaccgcaaatgcgaatctgatttacgtcattattacgacagtactatcgaattgtgcgtcggagaccccgaaatcaaaaaaacttcattcaaaggcgacagtgggggccccctggtatgcaacaaggttgcgcagggcatcgtttcttacggccggaacaacggcatgcctccaagagcatgtacaaaggttagctcatttgtgcactggattaagaagaccatgaagaggtattag

SEQ ID NO: 143738 - DNA, 968 bp, Artificial Sequence
  derived and/or modified sequence
ggaacatgaagtcactgagcctgctccacctctttcctctcccaagagctaaaagagagcaaggaggaaacaacagcagctccaaccagggcagccttcctgagaagatgcaaccaatcctgcttctgctggccttcctcctgctgcccagggcagatgcaggggagatcatcgggggacatgaggccaagccccactcccgcccctacatggcttatcttatgatctgggatcagaagtctctgaagaggtgcggtggcttcctgatacgagacgacttcgtgctgacagctgctcactgttggggaagctccataaatgtcaccttgggggcccacaatatcaaagaacaggagccgacccagcagtttatccctgtgaaaagacccatcccccatccagcctataatcctaagaacttctccaacgacatcatgctactgcagctggagagaaaggccaagcggaccagagctgtgcagcccctcaggctacctagcaacaaggcccaggtgaagccagggcagacatgcagtgtggccggctgggggcagacggcccccctgggaaaacactcacacacactacaagaggtgaagatgacagtgcaggaagatcgaaagtgcgaatctgacttacgccattattacgacagtaccattgagttgtgcgtgggggacccagagattaaaaagacttcctttaagggggactctggaggccctcttgtgtgtaacaaggtggcccagggcattgtctcctatggacgaaacaatggcatgcctccacgagcctgcaccaaagtctcaagctttgtacactggataaagaaaaccatgaaacgctactaactacaggaagcaaactaagcccccgctgtaatgaaacaccttctctggagccaagtccagatttacactgggagaggtgccagcaactgaataaatacctcttagctgagtggaaaa

SEQ ID NO: 143739 - DNA, 816 bp, Artificial Sequence
  derived and/or modified sequence
ggaacatgaagtcactgagcctgctccacctctttcctctcccaagagctaaaagagagcaaggaggaaacaacagcagctccaaccagggcagccttcctgagaagatgcaaccaatcctgcttctgctggccttcctcctgctgcccagggcagatgcaggggagatcatcgggggacatgaggccaagccccactcccgcccctacatggcttatcttatgatctgggatcagaagtctctgaagaggtgcggtggcttcctgatacgagacgacttcgtgctgacagctgctcactgttggggaagactggagagaaaggccaagcggaccagagctgtgcagcccctcaggctacctagcaacaaggcccaggtgaagccagggcagacatgcagtgtggccggctgggggcagacggcccccctgggaaaacactcacacacactacaagaggtgaagatgacagtgcaggaagatcgaaagtgcgaatctgacttacgccattattacgacagtaccattgagttgtgcgtgggggacccagagattaaaaagacttcctttaagggggactctggaggccctcttgtgtgtaacaaggtggcccagggcattgtctcctatggacgaaacaatggcatgcctccacgagcctgcaccaaagtctcaagctttgtacactggataaagaaaaccatgaaacgctactaactacaggaagcaaactaagcccccgctgtaatgaaacaccttctctggagccaagtccagatttacactgggagaggtgccagcaactgaataaatacct

SEQ ID NO: 143740 - DNA, 951 bp, Artificial Sequence
  derived and/or modified sequence
ggaacatgaagtcactgagcctgctccacctctttcctctcccaagagctaaaagagagcaaggaggaaacaacagcagctccaaccagggcagccttcctgagaagatgcaaccaatcctgcttctgctggccttcctcctgctgcccagggcagatgcaggggagatcatcgggggacatgaggccaagccccactcccgcccctacatggcttatcttatgatctgggatcagaagtctctgaagaggtgcggtggcttcctgatacgagacgacttcgtgctgacagctgctcactgttggggaagctccataaatgtcaccttgggggcccacaatatcaaagaacaggagccgacccagcagtttatccctgtgaaaagacccatcccccatccagcctataatcctaagaacttctccaacgacatcatgctactgcagctggagagaaaggccaagcggaccagagctgtgcagcccctcaggctacctagcaacaaggcccaggtgaagccagggcagacatgcagtgtggccggctgggggcagacggcccccctgggaaaacactcacacacactacaagaggtgaagatgacagtgcaggaagatcgaaagtgcgaatctgacttacgccattattacgacagtaccattgagttgtgcgtgggggacccagagattaaaaagacttcctttaagggggactctggaggccctcttgtgtgtaacaaggtggcccagggcattgtctcctatggacgaaacaatggcatgcctccacgagcctgcaccaaagtctcaagctttgtacactggataaagaaaaccatgaaacgctactaactacaggaagcaaactaagcccccgctgtaatgaaacaccttctctggagccaagtccagatttacactgggagaggtgccagcaactgaataaatacct

SEQ ID NO: 143741 - DNA, 609 bp, Artificial Sequence
  derived and/or modified sequence
atgcagcccatcctgctgctgctggccttcctgctgctgcccagggcagatgctggggagatcatcggcggccacgaggccaagccccacagccggccctacatggcctacctgatgatctgggaccagaagagcctgaagagatgtggcggcttcctgatcagagatgactttgtgctgacagctgcccactgctggggccgcctggagaggaaggccaagaggaccagggctgtgcagcccctgcggctgcccagcaacaaggcccaggtgaagccaggccagacctgcagcgtggccggctggggccagacagcccccctgggcaagcacagccacaccctgcaggaggtgaagatgacagtgcaggaggacagaaaatgtgagagtgacctgcggcactactatgacagcaccatcgagctgtgtgtgggggaccctgagatcaagaagaccagcttcaagggggacagcggcggccccctggtgtgcaacaaggtggcccagggcatcgtgtcctatggcaggaacaacggcatgccaccccgggcctgcaccaaggtgagcagctttgtgcactggatcaagaagaccatgaagcgctactag

SEQ ID NO: 143742 - DNA, 846 bp, Artificial Sequence
  derived and/or modified sequence
atgaagagcctgagcctgctgcacctgttccccctgccccgggccaagcgggagcagggcggcaacaacagcagcagcaaccagggcagcctgcctgagaagatgcagcccatcctgctgctgctggccttcctgctgctgcccagggcagatgctggggagatcatcggcggccacgaggccaagccccacagccggccctacatggcctacctgatgatctgggaccagaagagcctgaagagatgtggcggcttcctgatcagagatgactttgtgctgacagctgcccactgctggggcagcagcatcaacgtgaccctgggcgcccacaacatcaaggagcaggagcccacccagcagttcatccctgtgaagaggcccatcccccacccagcctacaaccccaagaacttcagcaatgacatcatgctgctgcagctggagaggaaggccaagaggaccagggctgtgcagcccctgcggctgcccagcaacaaggcccaggtgaagccaggccagacctgcagcgtggccggctggggccagacagcccccctgggcaagcacagccacaccctgcaggaggtgaagatgacagtgcaggaggacagaaaatgtgagagtgacctgcggcactactatgacagcaccatcgagctgtgtgtgggggaccctgagatcaagaagaccagcttcaagggggacagcggcggccccctggtgtgcaacaaggtggcccagggcatcgtgtcctatggaagaaataatggcatgccaccccgggcctgcaccaaggtgtcctcctttgtgcactggatcaagaagaccatgaagcgctactag

SEQ ID NO: 143743 - DNA, 609 bp, Artificial Sequence
  derived and/or modified sequence
atgcagcccatcctgctgctgctggccttcctgctgctgccccgggccgacgcaggcgagatcatcggtgggcacgaggccaagcctcacagccggccatatatggcgtacctgatgatttgggatcagaaaagcttgaagcgatgcggagggttcctcatcagggatgactttgtcctgactgctgctcactgttggggtcgtcttgaaaggaaagcgaagaggactagagctgtacagccactgagattgccaagtaacaaggcccaagtcaaacctggacagacgtgctcagtcgctggctggggacaaacagcccctctaggaaaacattcccacactctgcaagaggtgaaaatgaccgtccaggaggaccgtaagtgtgagtcagacttgagacactactatgactcaactatagagctttgtgtgggagatccggagataaaaaaaacctcctttaagggcgacagcggtggccctctcgtgtgtaataaggtagcccaaggaatagtgagctacggccgtaacaacgggatgcctccccgagcctgtaccaaggtttctagttttgtgcattggatcaagaagaccatgaagcggtactag

SEQ ID NO: 143744 - DNA, 846 bp, Artificial Sequence
  derived and/or modified sequence
atgaagagcctgagcctgctgcacctgttccccctgccccgggccaaaagagagcaaggaggcaataattcttccagtaatcaagggtccctgcctgagaagatgcaaccaattcttcttcttttggcgttcctgctactccctagagctgatgctggcgaaattattggcggtcacgaggccaaaccgcattccagaccctacatggcctacctgatgatctgggaccaaaaatctctcaagcgatgcggcgggttcctgatccgggatgactttgtgctgaccgcagcccactgttggggctcctccataaatgtgaccctgggtgcacacaatatcaaggagcaggagcctactcaacagtttattcccgtgaaacggccaattccccaccccgcctataatcctaaaaatttctctaacgacattatgctgttgcagctcgagagaaaggcgaagagaaccagggccgtgcagccactccggctgcctagcaataaagctcaggtgaagcctggacaaacctgctcagtggccggatggggccagacggcacccttaggcaagcattctcacacacttcaagaagtgaaaatgacagtccaggaagatagaaagtgcgaatccgacctgagacactactatgattccacgatcgagttgtgcgtgggcgacccggagataaagaaaacttcattcaagggtgactcaggtggaccccttgtgtgtaacaaagtggctcagggaatcgtgtcctatggtcggaataacggcatgcctccgagagcttgtaccaaggtctccagcttcgtgcattggatcaaaaagaccatgaagcgctactag

SEQ ID NO: 143745 - DNA, 609 bp, Artificial Sequence
  derived and/or modified sequence
atgcagcccatcctgctcctgttagcattcctccttctgccgcgagccgatgcgggagaaatcatcggaggacatgaagcaaaaccacattcccggccatacatggcatatcttatgatatgggaccagaaaagtttaaaacgatgtggcggtttcctgatcagggacgatttcgtgctgacagcagcacattgctggggccgactggagagaaaagcaaaaaggacacgtgcggttcagccactgcgcctaccgtcaaacaaagcacaggtcaagcccggacagacttgttctgtggccggttggggccagactgcccctctggggaagcactcgcacacactgcaggaagtgaaaatgacagtgcaggaggacagaaaatgtgaaagcgacctgcgccactattacgacagcaccatcgaactgtgtgtgggcgacccggagatcaaaaagacctccttcaagggagactcaggcggaccgctggtttgcaacaaagtggcccagggcatcgtcagctacggcagaaacaatggcatgccgcctcgcgcttgcactaaggtcagtagctttgtgcactggatcaagaagactatgaaaaggtactag

SEQ ID NO: 143746 - DNA, 846 bp, Artificial Sequence
  derived and/or modified sequence
atgaaaagcctgagcctcctgcacctattccccctgccgcgagcaaagcgggagcagggcggtaacaattcatcctctaaccagggctccctgcccgaaaagatgcaacccatcttactcttacttgcattcctgttgctgcctagagcggacgccggtgagataataggtggacacgaagcaaagccacattctcgcccttatatggcctacttaatgatatgggatcagaagtctcttaagcgttgtggaggattcttaatcagagacgactttgtgctcaccgccgctcactgttggggaagcagtattaacgttacccttggggcacacaatatcaaagaacaggaacccacacagcagtttattccagtgaagcggcctatcccccaccctgcctataaccctaagaacttttctaacgatataatgctcctgcagctggaaaggaaggcaaaaagaacacgcgcagtccagccgttaaggctaccatccaacaaagcccaggtgaagcccggacaaacctgttccgtcgcaggctggggtcagacagcacccttggggaagcatagccacacccttcaggaggttaaaatgacagtgcaggaagacaggaagtgtgagtctgatctgcgacactattacgactctacaatagagttatgcgtcggtgatcccgagataaagaaaaccagctttaaaggagacagcggtgggcctcttgtctgtaacaaggtcgcccagggcatcgtgtcctacgggcgaaataatgggatgccaccgcgtgcctgtactaaggtatccagtttcgttcattggatcaagaagaccatgaagagatactag

SEQ ID NO: 143747 - DNA, 609 bp, Artificial Sequence
  derived and/or modified sequence
atgcagcccatcctgctgctgctggccttcctgctgctgcccagagccgacgccggcgagatcatcggcggccacgaggccaagccccacagcagaccctacatggcctacctgatgatctgggaccagaagagcctgaagagatgcggcggcttcctgatcagagacgacttcgtgctgaccgccgcccactgctggggcagactggagagaaaggccaagagaaccagagccgtgcagcccctgagactgcccagcaacaaggcccaggtgaagcccggccagacctgcagcgtggccggctggggccagaccgcccccctgggcaagcacagccacaccctgcaggaggtgaagatgaccgtgcaggaggacagaaagtgcgagagcgacctgagacactactacgacagcaccatcgagctgtgcgtgggcgaccccgagatcaagaagaccagcttcaagggcgacagcggcggccccctggtgtgcaacaaggtggcccagggcatcgtgagctacggcagaaacaacggcatgccccccagagcctgcaccaaggtgagcagcttcgtgcactggatcaagaagaccatgaagagatactag

SEQ ID NO: 143748 - DNA, 846 bp, Artificial Sequence
  derived and/or modified sequence
atgaagagcctgagcctgctgcacctgttccccctgcccagagccaagagagagcagggcggcaacaacagcagcagcaaccagggcagcctgcccgagaagatgcagcccatcctgctgctgctggccttcctgctgctgcccagagccgacgccggcgagatcatcggcggccacgaggccaagccccacagcagaccctacatggcctacctgatgatctgggaccagaagagcctgaagagatgcggcggcttcctgatcagagacgacttcgtgctgaccgccgcccactgctggggcagcagcatcaacgtgaccctgggcgcccacaacatcaaggagcaggagcccacccagcagttcatccccgtgaagagacccatcccccaccccgcctacaaccccaagaacttcagcaacgacatcatgctgctgcagctggagagaaaggccaagagaaccagagccgtgcagcccctgagactgcccagcaacaaggcccaggtgaagcccggccagacctgcagcgtggccggctggggccagaccgcccccctgggcaagcacagccacaccctgcaggaggtgaagatgaccgtgcaggaggacagaaagtgcgagagcgacctgagacactactacgacagcaccatcgagctgtgcgtgggcgaccccgagatcaagaagaccagcttcaagggcgacagcggcggccccctggtgtgcaacaaggtggcccagggcatcgtgagctacggcagaaacaacggcatgccccccagagcctgcaccaaggtgagcagcttcgtgcactggatcaagaagaccatgaagagatactag

SEQ ID NO: 143749 - protein, 560 aa, Artificial Sequence
  derived and/or modified sequence
MFARMSDLHVLLLMALVGKTACGFSLMSLLESLDPDWTPDQYDYSYEDYNQEENTSSTLTHAENPDWYYTEDQADPCQPNPCEHGGDCLVHGSTFTCSCLAPFSGNKCQKVQNTCKDNPCGRGQCLITQSPPYYRCVCKHPYTGPSCSQVVPVCRPNPCQNGATCSRHKRRSKFTCACPDQFKGKFCEIGSDDCYVGDGYSYRGKMNRTVNQHACLYWNSHLLLQENYNMFMEDAETHGIGEHNFCRNPDADEKPWCFIKVTNDKVKWEYCDVSACSAQDVAYPEESPTEPSTKLPGFDSCGKTEIAERKIKRIYGGFKSTAGKHPWQASLQSSLPLTISMPQGHFCGGALIHPCWVLTAAHCTDIKTRHLKVVLGDQDLKKEEFHEQSFRVEKIFKYSHYNERDEIPHNDIALLKLKPVDGHCALESKYVKTVCLPDGSFPSGSECHISGWGVTETGKGSRQLLDAKVKLIANTLCNSRQLYDHMIDDSMICAGNLQKPGQDTCQGDSGGPLTCEKDGTYYVYGIVSWGLECGKRPGVYTQVTKFLNWIKATIKSESGF

SEQ ID NO: 143750 - protein, 280 aa, Artificial Sequence
  derived and/or modified sequence
MFARMSDLHVLLLMALVGKTACGFSLMSLLESLDPDWTPDQYDYSYEDYNQEENTSSTLTHAENPDWYYTEDQADPCQPNPCEHGGDCLVHGSTFTCSCLAPFSGNKCQKVQNTCKDNPCGRGQCLITQSPPYYRCVCKHPYTGPSCSQVVPVCRPNPCQNGATCSRHKRRSKFTCACPDQFKGKFCEIGSDDCYVGDGYSYRGKMNRTVNQHACLYWNSHLLLQENYNMFMEDAETHGIGEHNFCRNPDADEKPWCFIKVTNDKVKWEYCDVSACSAQA

SEQ ID NO: 143751 - protein, 534 aa, Artificial Sequence
  derived and/or modified sequence
MSLLESLDPDWTPDQYDYSYEDYNQEENTSSTLTHAENPDWYYTEDQADPCQPNPCEHGGDCLVHGSTFTCSCLAPFSGNKCQKVQNTCKDNPCGRGQCLITQSPPYYRCVCKHPYTGPSCSQVVPVCRPNPCQNGATCSRHKRRSKFTCACPDQFKGKFCEIGSDDCYVGDGYSYRGKMNRTVNQHACLYWNSHLLLQENYNMFMEDAETHGIGEHNFCRNPDADEKPWCFIKVTNDKVKWEYCDVSACSAQDVAYPEESPTEPSTKLPGFDSCGKTEIAERKIKRIYGGFKSTAGKHPWQASLQSSLPLTISMPQGHFCGGALIHPCWVLTAAHCTDIKTRHLKVVLGDQDLKKEEFHEQSFRVEKIFKYSHYNERDEIPHNDIALLKLKPVDGHCALESKYVKTVCLPDGSFPSGSECHISGWGVTETGKGSRQLLDAKVKLIANTLCNSRQLYDHMIDDSMICAGNLQKPGQDTCQGDSGGPLTCEKDGTYYVYGIVSWGLECGKRPGVYTQVTKFLNWIKATIKSESGF

SEQ ID NO: 143752 - DNA, 1683 bp, Artificial Sequence
  derived and/or modified sequence
atgtttgcccggatgtccgatctgcatgtgcttctcctgatggccttggttggaaaaaccgcttgtggcttctccctgatgtccttgctggagagcttggatccggactggacccccgatcagtatgattacagctatgaggattacaaccaggaagagaatactagtagcaccctgactcatgccgagaatcccgattggtactacactgaggaccaggcagatccttgtcaacccaatccttgcgaacatggcggagactgcctggtacacggttcaaccttcacctgtagttgcctggctccttttagcggtaataagtgtcagaaagtccagaacacttgtaaggataacccttgtggcaggggtcaatgtctgattacccaatcaccaccttattacaggtgcgtatgtaaacatccatacaccggtccgtcctgctcgcaggtagtccccgtgtgccggccaaacccttgccagaacggggctacctgcagccgccacaaaaggcgaagtaaatttacctgcgcgtgccccgaccaatttaagggcaaattttgcgagatcggatcagatgactgttatgtgggtgatggctatagttacaggggcaagatgaatcggactgtaaatcagcacgcatgcctgtactggaactcacacctcctgttgcaggagaattacaatatgttcatggaggacgcggagactcacggcataggggagcacaatttttgccgaaatccagacgccgatgagaaaccctggtgctttattaaggtaacgaacgataaggtaaagtgggaatattgtgatgtcagcgcctgcagcgctcaggacgtcgcctaccctgaagaatcccccacggagcccagtaccaaacttcccggattcgattcttgcggaaagacagagatcgcagagaggaagattaagcgtatttacggcggttttaaatcaactgccggtaagcatccttggcaggcttctttgcaaagctcattgcctcttaccatctcaatgccacagggccacttttgcggtggcgccctgatccacccttgctgggtgcttaccgccgcacactgtactgacatcaagacacggcacctcaaggttgtacttggcgatcaggatttgaaaaaggaggagttccacgagcagtctttcagagtggagaaaatcttcaaatacagccattataatgaaagggacgaaattccacacaatgatattgctctcctgaagctcaagcctgtggacggccattgcgccttagaaagtaaatacgttaagactgtgtgtctccccgatggcagcttcccctccggcagcgaatgccacatatccggctggggtgtcacggagaccggtaaaggttcgagacaattgctcgacgccaaggtaaagttaatagccaataccctttgcaattcacggcagctgtacgatcacatgattgatgattccatgatatgtgcaggcaacctgcaaaaacctgggcaagatacctgtcagggagactcaggcggcccgctgacttgtgagaaggatggcacttactacgtgtatgggattgtcagttggggtttagaatgtggaaaaaggcccggggtctatactcaggtcactaaattcctaaactggatcaaggcgaccatcaaatctgagtcagggttttag

SEQ ID NO: 143753 - DNA, 843 bp, Artificial Sequence
  derived and/or modified sequence
atgtttgcgcggatgtccgacctgcatgtcctgctcctgatggctctggtcgggaaaaccgcatgtgggttcagcctgatgagtctgcttgagtcgctcgacccagactggacgccagaccagtatgactatagttatgaggattataatcaagaggagaacactagcagcacactcactcatgccgaaaacccggactggtactatacagaagaccaggctgatccgtgccagccaaacccctgcgagcatggcggcgactgcctggtgcatggctccaccttcacatgctcatgcctggcgccattttctggaaataagtgtcagaaagtacagaacacgtgtaaagacaatccctgcggacgggggcagtgtctgattacccagtccccaccgtattacaggtgtgtgtgcaaacatccatataccggcccatcatgttctcaggttgtgccggtctgcaggcctaatccctgccaaaatggtgcaacatgtagtcggcataaaagaagaagtaagtttacttgtgcatgtcctgatcagtttaagggcaagttttgcgagatagggagcgacgactgctatgttggcgatggctactcttaccgcggtaaaatgaatcgaacggtgaaccagcatgcttgcctttactggaactcacatttactgttacaggagaactataatatgtttatggaggacgctgagacacatgggattggggagcataacttctgccgtaaccccgatgccgatgaaaagccgtggtgtttcattaaggttaccaatgacaaggtcaagtgggaatactgcgacgttagtgcatgctctgcccaggcctag

SEQ ID NO: 143754 - DNA, 3009 bp, Artificial Sequence
  derived and/or modified sequence
cctgaatccttggagactgacatttttcccccctaaaggcatagacaacaaaagaaattttattgagaggaaaacacaagtccttaaactgcaaagatgtttgccaggatgtctgatctccatgttctgctgttaatggctctggtgggaaagacagcctgtgggttctccctgatgtctttattggaaagcctggacccagactggacccctgaccagtatgattacagctacgaggattataatcaggaagagaacaccagtagcacacttacccacgctgagaatcctgactggtactacactgaggaccaagctgatccatgccagcccaacccctgtgaacacggtggggactgcctcgtccatgggagcaccttcacatgcagctgcctggctcctttctctgggaataagtgtcagaaagtgcaaaatacgtgcaaggacaacccatgtggccggggccaatgtctcattacccagagtcctccctactaccgctgtgtctgtaaacacccttacacaggtcccagctgctcccaagtggttcctgtatgcaggccaaacccctgccagaatggggctacctgctcccggcataagcggagatccaagttcacctgtgcctgtcccgaccagttcaaggggaaattctgtgaaataggttctgatgactgctatgttggcgatggctactcttaccgagggaaaatgaataggacagtcaaccagcatgcgtgcctttactggaactcccacctcctcttgcaggagaattacaacatgtttatggaggatgctgaaacccatgggattggggaacacaatttctgcagaaacccagatgcggacgaaaagccctggtgctttattaaagttaccaatgacaaggtgaaatgggaatactgtgatgtctcagcctgctcagcccaggacgttgcctacccagaggaaagccccactgagccatcaaccaagcttccggggtttgactcctgtggaaagactgagatagcagagaggaagatcaagagaatctatggaggctttaagagcacggcgggcaagcacccatggcaggcgtccctccagtcctcgctgcctctgaccatctccatgccccagggccacttctgtggtggggcgctgatccacccctgctgggtgctcactgctgcccactgcaccgacataaaaaccagacatctaaaggtggtgctaggggaccaggacctgaagaaagaagaatttcatgagcagagctttagggtggagaagatattcaagtacagccactacaatgaaagagatgagattccccacaatgatattgcattgctcaagttaaagccagtggatggtcactgtgctctagaatccaaatacgtgaagactgtgtgcttgcctgatgggtcctttccctctgggagtgagtgccacatctctggctggggtgttacagaaacaggaaaagggtcccgccagctcctggatgccaaagtcaagctgattgccaacactttgtgcaactcccgccaactctatgaccacatgattgatgacagtatgatctgtgcaggaaatcttcagaaacctgggcaagacacctgccagggtgactctggaggccccctgacctgtgagaaggacggcacctactacgtctatgggatagtgagctggggcctggagtgtgggaagaggccaggggtctacacccaagttaccaaattcctgaattggatcaaagccaccatcaaaagtgaaagtggcttctaaggtactgtcttctggacctcagagcccactctccttggcaccctgacaccgggaggcctcatggccaacaatggacacctccagagcctccaggggaccacacagtagactatccctactctaagcagagacaactgccacccagcctgggccttcccagaccagcatttgcacaatatcaccaggcttcttctgcctcccttggtaacccaaggaatgatggaatcaacacaacatagtatgtttgctttccttacccaattgtaccttctagaaaatcagtgttcacagagactgcctccaccacaggcatcctgcaaatgcagactccagaatccccagcatcagcgggaaccaccatcacatctttattcctcagcccagacactcgaggcactcaacagaatcagccatccacgtctaggtatcagagaggaccacaaatacaacattctccatctgctttcagagttattattttaataaaggaagatctgggatgggctggtgggccattccagcttgccgaaatcaaagccatctgaagcctgtctctggtgaacaaacttcctctctggcctctcaggaatcagggtggacatggctcacaacagcagggccttcttctttttgacgtgcagaatctcagtggcatctgggttcacctccccactctgatgatctccagcctccactgcttctgccccccgctgctgaaatcaaacataccccaagttaaaatgaagctcccccacccccactcccggccccggttcccacaggacacgctaagaagcacagggagcatttaacaggctcaccctccctttccttttcccctcttctaccctccccaagaaaaagggccttcaaggcaggaatgagaaagcaaagccaatctctcatttagacctggcttctttcttctgaacaaagtagggttcaaaatgcagactgtcatatccagcgagtccctgaccctttctgcgaatgtaacgagcaagcagtcagcacagcctgggctgccctggcccgggattgatgtagccccggtaggtttgcctctgcagaactaatggctgtgacttcagagaaagccctgcaggaagtttaacctgcgtgtcatctgcctggtcatctcagacccatgaaattaggcgccttgtttgagctgcgtttcacacttctttagagctagctgacctttggccaaaaataaactttgaaaag

SEQ ID NO: 143755 - DNA, 868 bp, Artificial Sequence
  derived and/or modified sequence
atagacaacaaaagaaattttattgagaggaaaacacaagtccttaaactgcaaagatgtttgccaggatgtctgatctccatgttctgctgttaatggctctggtgggaaagacagcctgtgggttctccctgatgtctttattggaaagcctggacccagatggaggaaaactttatttgctccaggaagacaatggccttatcttcaacctggatcctcagccctaaaaagactggacccctgaccagtatgattacagctacgaggattataatcaggaagagaacaccagtagcacacttacccacgctgagaatcctgactggtactacactgaggaccaagctgatccatgccagcccaacccctgtgaacacggtggggactgcctcgtccatgggagcaccttcacatgcagctgcctggctcctttctctgggaataagtgtcagaaagtgcaaaatacgtgcaaggacaacccatgtggccggggccaatgtctcattacccagagtcctccctactaccgctgtgtctgtaaacacccttacacaggtcccagctgctcccaagtggttcctgtatgcaggccaaacccctgccagaatggggctacctgctcccggcataagcggagatccaagttcacctgtgcctgtcccgaccagttcaaggggaaattctgtgaaataggttctgatgactgctatgttggcgatggctactcttaccgagggaaaatgaataggacagtcaaccagcatgcgtgcctttactggaactcccacctcctcttgcaggagaattacaacatgtttatggaggatgctgaaacccatgggattggggaacacaatttctgcag

SEQ ID NO: 143756 - DNA, 1042 bp, Artificial Sequence
  derived and/or modified sequence
aacaaaagaaattttattgagaggaaaacacaagtccttaaactgcaaagatgtttgccaggatgtctgatctccatgttctgctgttaatggctctggtgggaaagacagcctgtgggttctccctgatgtctttattggaaagcctggacccagactggacccctgaccagtatgattacagctacgaggattataatcaggaagagaacaccagtagcacacttacccacgctgagaatcctgactggtactacactgaggaccaagctgatccatgccagcccaacccctgtgaacacggtggggactgcctcgtccatgggagcaccttcacatgcagctgcctggctcctttctctgggaataagtgtcagaaagtgcaaaatacgtgcaaggacaacccatgtggccggggccaatgtctcattacccagagtcctccctactaccgctgtgtctgtaaacacccttacacaggtcccagctgctcccaagtggttcctgtatgcaggccaaacccctgccagaatggggctacctgctcccggcataagcggagatccaagttcacctgtgcctgtcccgaccagttcaaggggaaattctgtgaaataggttctgatgactgctatgttggcgatggctactcttaccgagggaaaatgaataggacagtcaaccagcatgcgtgcctttactggaactcccacctcctcttgcaggagaattacaacatgtttatggaggatgctgaaacccatgggattggggaacacaatttctgcagaaacccagatgcggacgaaaagccctggtgctttattaaagttaccaatgacaaggtgaaatgggaatactgtgatgtctcagcctgctcagcccaggcataaaaaccagacatctaaaggtggtgctaggggaccaggacctgaagaaagaagaatttcatgagcagagctttagggtggagaagatattcaagtacagccactacaatgaaagagatgagattccccacaatgatattggcaagttcctc

SEQ ID NO: 143757 - DNA, 2972 bp, Artificial Sequence
  derived and/or modified sequence
catagaaaccactaacgaaaattaactgtttactttttcactgtctgcccatctcctcctcaaccagttcacatctgcctccttcatccccacatcaccaatgcctggctcacagcagagcttctttctccctgatgtctttattggaaagcctggacccagactggacccctgaccagtatgattacagctacgaggattataatcaggaagagaacaccagtagcacacttacccacgctgagaatcctgactggtactacactgaggaccaagctgatccatgccagcccaacccctgtgaacacggtggggactgcctcgtccatgggagcaccttcacatgcagctgcctggctcctttctctgggaataagtgtcagaaagtgcaaaatacgtgcaaggacaacccatgtggccggggccaatgtctcattacccagagtcctccctactaccgctgtgtctgtaaacacccttacacaggtcccagctgctcccaagtggttcctgtatgcaggccaaacccctgccagaatggggctacctgctcccggcataagcggagatccaagttcacctgtgcctgtcccgaccagttcaaggggaaattctgtgaaataggttctgatgactgctatgttggcgatggctactcttaccgagggaaaatgaataggacagtcaaccagcatgcgtgcctttactggaactcccacctcctcttgcaggagaattacaacatgtttatggaggatgctgaaacccatgggattggggaacacaatttctgcagaaacccagatgcggacgaaaagccctggtgctttattaaagttaccaatgacaaggtgaaatgggaatactgtgatgtctcagcctgctcagcccaggacgttgcctacccagaggaaagccccactgagccatcaaccaagcttccggggtttgactcctgtggaaagactgagatagcagagaggaagatcaagagaatctatggaggctttaagagcacggcgggcaagcacccatggcaggcgtccctccagtcctcgctgcctctgaccatctccatgccccagggccacttctgtggtggggcgctgatccacccctgctgggtgctcactgctgcccactgcaccgacataaaaaccagacatctaaaggtggtgctaggggaccaggacctgaagaaagaagaatttcatgagcagagctttagggtggagaagatattcaagtacagccactacaatgaaagagatgagattccccacaatgatattgcattgctcaagttaaagccagtggatggtcactgtgctctagaatccaaatacgtgaagactgtgtgcttgcctgatgggtcctttccctctgggagtgagtgccacatctctggctggggtgttacagaaacaggaaaagggtcccgccagctcctggatgccaaagtcaagctgattgccaacactttgtgcaactcccgccaactctatgaccacatgattgatgacagtatgatctgtgcaggaaatcttcagaaacctgggcaagacacctgccagggtgactctggaggccccctgacctgtgagaaggacggcacctactacgtctatgggatagtgagctggggcctggagtgtgggaagaggccaggggtctacacccaagttaccaaattcctgaattggatcaaagccaccatcaaaagtgaaagtggcttctaaggtactgtcttctggacctcagagcccactctccttggcaccctgacaccgggaggcctcatggccaacaatggacacctccagagcctccaggggaccacacagtagactatccctactctaagcagagacaactgccacccagcctgggccttcccagaccagcatttgcacaatatcaccaggcttcttctgcctcccttggtaacccaaggaatgatggaatcaacacaacatagtatgtttgctttccttacccaattgtaccttctagaaaatcagtgttcacagagactgcctccaccacaggcatcctgcaaatgcagactccagaatccccagcatcagcgggaaccaccatcacatctttattcctcagcccagacactcgaggcactcaacagaatcagccatccacgtctaggtatcagagaggaccacaaatacaacattctccatctgctttcagagttattattttaataaaggaagatctgggatgggctggtgggccattccagcttgccgaaatcaaagccatctgaagcctgtctctggtgaacaaacttcctctctggcctctcaggaatcagggtggacatggctcacaacagcagggccttcttctttttgacgtgcagaatctcagtggcatctgggttcacctccccactctgatgatctccagcctccactgcttctgccccccgctgctgaaatcaaacataccccaagttaaaatgaagctcccccacccccactcccggccccggttcccacaggacacgctaagaagcacagggagcatttaacaggctcaccctccctttccttttcccctcttctaccctccccaagaaaaagggccttcaaggcaggaatgagaaagcaaagccaatctctcatttagacctggcttctttcttctgaacaaagtagggttcaaaatgcagactgtcatatccagcgagtccctgaccctttctgcgaatgtaacgagcaagcagtcagcacagcctgggctgccctggcccgggattgatgtagccccggtaggtttgcctctgcagaactaatggctgtgacttcagagaaagccctgcaggaagtttaacctgcgtgtcatctgcctggtcatctcagacccatgaaattaggcgccttgtttgagctgcgtttcacacttctttagagctagctgacctttggccaaaaataaactttgaaaagaaa

SEQ ID NO: 143758 - DNA, 1683 bp, Artificial Sequence
  derived and/or modified sequence
atgtttgccaggatgtctgacctgcacgtgctgctgctgatggccctggtgggcaagacagcctgtggcttcagcctgatgagcctgctggagagcctggaccctgactggaccccagaccagtatgactacagctatgaggactacaaccaggaggagaacaccagcagcaccctgacccatgctgaaaatccagactggtactacacagaggaccaggccgacccctgccagcccaacccctgtgagcacggcggggactgcctggtgcacggcagcaccttcacctgcagctgcctggcccccttcagcggcaacaagtgccagaaggtgcagaacacctgcaaggacaacccctgtggccggggccagtgcctgatcacccagagccccccctactaccgctgtgtgtgcaagcacccctacacaggccccagctgcagccaggtggtgcctgtgtgccggcccaacccctgccagaatggagccacctgcagccgccacaagaggaggagcaagttcacctgtgcctgcccagaccagttcaagggcaagttctgtgaaattggaagtgatgactgctacgtgggagatggctacagctaccggggcaagatgaacagaacagtgaaccagcacgcctgcctgtactggaacagccacctgctgctgcaggagaactacaacatgttcatggaggatgctgagacccacggcatcggggagcacaacttctgcagaaatccagatgctgatgagaagccctggtgcttcatcaaggtgaccaatgacaaggtgaagtgggagtactgtgatgtgtctgcctgcagcgcccaggatgtggcctacccagaggagagccccacagagcccagcaccaagctgcccggctttgacagctgtgggaagacagaaattgctgagaggaagatcaagaggatctatggaggcttcaagagcacagctgggaagcacccctggcaggccagcctgcagagcagcctgcccctgaccatctccatgccccagggccacttctgtggcggggccctgatccacccctgctgggtgctgacagctgcccactgcacagacatcaagaccaggcacctgaaggtggtgctgggggaccaggacctgaagaaggaggagttccacgagcagagcttccgggtggagaagatcttcaagtacagccactacaatgaaagagatgagatcccccacaatgacatcgccctgctgaagctgaagcctgtggatggccactgtgccctggagagcaaatatgtgaagacagtgtgcctgcctgatggcagcttccccagcggcagcgagtgccacatcagcggctggggcgtgacagaaacaggcaagggcagccggcagctgctggatgccaaggtgaagctgattgccaacaccctgtgcaacagccggcagctgtatgaccacatgattgatgacagcatgatctgtgccggcaacctgcagaagccaggccaggacacctgccagggcgacagcggcggccccctgacctgtgagaaggatggcacctactacgtgtatggcatcgtgtcctggggcctggagtgtgggaagaggcctggggtgtacacccaggtgaccaagttcctgaactggatcaaggccaccatcaagtctgagagcggcttctag

SEQ ID NO: 143759 - DNA, 843 bp, Artificial Sequence
  derived and/or modified sequence
atgtttgccaggatgtctgacctgcacgtgctgctgctgatggccctggtgggcaagacagcctgtggcttcagcctgatgagcctgctggagagcctggaccctgactggaccccagaccagtatgactacagctatgaggactacaaccaggaggagaacaccagcagcaccctgacccatgctgaaaatccagactggtactacacagaggaccaggccgacccctgccagcccaacccctgtgagcacggcggggactgcctggtgcacggcagcaccttcacctgcagctgcctggcccccttcagcggcaacaagtgccagaaggtgcagaacacctgcaaggacaacccctgtggccggggccagtgcctgatcacccagagccccccctactaccgctgtgtgtgcaagcacccctacacaggccccagctgcagccaggtggtgcctgtgtgccggcccaacccctgccagaatggagccacctgcagccgccacaagaggaggagcaagttcacctgtgcctgcccagaccagttcaagggcaagttctgtgaaattggaagtgatgactgctacgtgggagatggctacagctaccggggcaagatgaacagaacagtgaaccagcacgcctgcctgtactggaacagccacctgctgctgcaggagaactacaacatgttcatggaggatgctgagacccacggcatcggggagcacaacttctgcagaaatccagatgctgatgagaagccctggtgcttcatcaaggtgaccaatgacaaggtgaagtgggagtactgtgatgtgtctgcctgcagcgcccaggcctag

SEQ ID NO: 143760 - DNA, 1683 bp, Artificial Sequence
  derived and/or modified sequence
atgttcgcccggatgagcgacctgcacgtgctgctgctgatggccctggtcggcaagacagcttgcggattctcccttatgagcctgctggagtccctcgatcctgattggacacctgatcagtacgattactcatacgaagactataaccaggaggagaatacttcttctaccttaactcacgctgagaaccccgactggtattacactgaagatcaagccgacccgtgtcaaccgaacccatgcgagcatgggggcgattgtctcgtacacggcagcactttcacctgcagttgccttgcaccattctctggcaacaagtgccaaaaggtgcagaatacatgcaaagacaacccctgtggcagaggccagtgcctgatcacacagagccccccatactacaggtgcgtttgcaagcatccatatacaggtccatcttgttctcaggtggtccccgtctgtagacccaacccttgccaaaatggcgccacctgctcaagacataaaagacgcagtaaattcacctgcgcatgtccggatcaatttaaaggcaagttttgcgaaatcgggtcagatgactgttatgttggagatgggtattcctatcggggcaagatgaatcgaactgtgaatcagcatgcatgtctctattggaatagccacttactcctgcaggaaaactacaacatgtttatggaggatgctgagacccatgggataggagaacacaatttctgtcggaatcccgacgccgatgaaaagccttggtgctttattaaagtgactaacgataaggtcaagtgggagtattgcgatgtgagcgcatgtagtgctcaggatgtggcctatccagaagaatctccaactgaaccctctaccaagttaccaggatttgactcatgcggtaaaaccgagattgccgaacgcaaaatcaaacgaatatatggcggcttcaagtccactgccggaaagcacccctggcaggcctcacttcaatcttccctaccactgactatctccatgccacagggacatttctgcggcggagcccttatacatccctgttgggttctgactgccgcccactgcacagatatcaaaacacgccacttaaaggtggtccttggcgatcaggatctaaagaaggaggagtttcacgagcaaagtttcagagttgagaagattttcaagtattcgcactacaatgaaagggatgagattccacacaacgacattgcattgctaaagctcaagcctgtggacggccattgcgctctggaatctaaatatgtgaagacagtttgccttcctgacgggtcattccccagtggaagtgagtgccacatttccgggtggggagtgacagagactgggaaagggtcgcgccaactgctcgacgccaaggtgaaattgatagcaaatacactgtgcaactcgcgccagttgtacgatcatatgattgacgactccatgatctgtgccgggaacctgcagaaacccggtcaggatacctgtcaaggcgactcaggtgggcctttgacatgcgaaaaagatggcacttactatgtctacggtatcgtgagctggggactcgaatgcggaaaacgccctggagtatatacacaggtgaccaagttcctcaattggatcaaggccacaataaagtccgaatctggtttttag

SEQ ID NO: 143761 - DNA, 843 bp, Artificial Sequence
  derived and/or modified sequence
atgttcgcccggatgagcgacctgcacgtgctgctgctgatggccttggtggggaaaacagcatgcggattctctctgatgagcctcctggaaagcctcgaccccgattggactcctgaccagtatgattatagctacgaagattataaccaggaggagaacaccagctcgacactaacccatgcagagaatcccgattggtattacactgaagatcaggcggacccatgtcagcccaacccctgtgaacacggtggcgattgtctcgtgcacgggagcaccttcacatgtagctgtctggctcctttttctggtaataaatgccagaaagtccaaaacacatgcaaggacaacccttgcggtcgcggccagtgccttattacccagtctcccccatattatcgctgtgtttgcaagcatccgtacactggcccgagttgcagccaggtggtccccgtctgccggcctaacccctgccagaatggggctacttgttctcggcacaaacgaaggtcaaaattcacctgtgcctgtccagaccaattcaaaggcaagttttgtgaaatcggttctgacgattgttatgtcggcgatgggtatagctaccgcggaaaaatgaacagaaccgtaaatcagcacgcctgcctctactggaattcacatctgctgctccaagagaactataacatgtttatggaagacgccgaaacccatgggataggtgagcacaacttctgccggaatccagacgccgacgagaaaccgtggtgctttatcaaagtcaccaacgacaaggtcaagtgggaatactgcgatgtttcagcttgctcagcccaagcttag

SEQ ID NO: 143762 - DNA, 1683 bp, Artificial Sequence
  derived and/or modified sequence
atgttcgcgcgtatgagcgacctgcatgtattactactgatggctctggtgggaaagactgcatgcggtttcagtctgatgtccctgctggagagcttagacccggattggacccccgaccagtacgattatagttatgaagattataaccaagaagaaaatacctcatcgaccttgactcatgctgagaacccagactggtattataccgaggatcaggccgatccgtgccaaccaaacccctgcgagcacgggggagattgcctggtgcatggctccactttcacttgtagctgtctggcacccttttccggaaataagtgtcaaaaagtgcagaacacctgcaaggacaatccctgtggcagaggacagtgtctgatcacgcaaagccctccctattatcgctgtgtctgcaagcacccctacaccggcccatcctgcagtcaggttgtcccagtgtgtaggcctaatccatgccagaacggagccacctgttcaaggcacaagcgtcgaagtaagtttacatgcgcgtgtccggaccagttcaaagggaagttctgtgagataggaagtgacgattgctatgtaggcgatggctatagctatcgcggaaaaatgaaccggacagtcaaccaacacgcatgtctttattggaactcacacctcctcttacaggaaaattacaatatgtttatggaggatgctgagacgcacggaattggcgagcacaatttttgtcgcaaccctgacgcggatgaaaagccttggtgtttcatcaaggttacaaatgataaagtcaagtgggagtactgcgacgtgagcgcctgtagcgcgcaagacgtcgcctatccagaggagagcccgacagaacccagcacaaagttgcctggtttcgattcttgtggcaagacagagatcgctgaacgaaagataaaacgcatctatggaggctttaaaagcacagctggcaagcacccctggcaggcctccctgcaaagcagtctgccgctgacaatatccatgccgcaaggacacttttgcgggggtgctctgatacatccgtgttgggtactaactgccgctcactgcaccgatatcaagacgcgtcacctgaaggtggtcttgggcgatcaagatctgaaaaaggaagagttccatgagcagagttttcgcgtggaaaaaatatttaaatattcacactacaatgaacgggacgagattccccataacgatatcgcactcttaaaactcaaacctgtcgacggccactgcgccttagagtccaagtacgtaaaaacagtgtgcctgccagacggctccttcccaagcgggagtgaatgtcacatttccggatggggcgtgactgagacagggaaaggaagtaggcagctactggacgcgaaagttaaacttattgcgaacactttatgtaactctagacagctttatgaccacatgattgacgactcgatgatctgtgcaggcaacctccaaaaaccagggcaagacacttgccaaggcgattccggcggtccactgacatgcgagaaagacggtacctattacgtatacgggattgtgtcctggggactggagtgtggaaaaaggcccggagtgtacactcaagtgacgaagtttctgaactggataaaggcaacaatcaagagcgaatccgggttctag

SEQ ID NO: 143763 - DNA, 843 bp, Artificial Sequence
  derived and/or modified sequence
atgttcgctcgcatgtccgatctgcacgttctgctcctgatggctctagttggcaaaacagcctgtggttttagcctcatgtccctgctggagagccttgatcctgactggacaccagatcaatatgactacagctacgaagattacaaccaggaggaaaacaccagcagtacgttaactcacgcggagaatcccgactggtattacactgaagaccaggccgacccctgccaacccaacccatgtgagcatgggggtgactgtctggtacatggttccacatttacctgttcctgtctggcaccttttagtgggaacaaatgtcagaaagtacagaacacttgcaaagataatccctgtgggcgtggacagtgtttaataactcaaagtcctccctactaccggtgtgtatgcaagcacccttacacagggccatcttgctcccaggtagtaccagtttgtcgcccaaatccttgccagaatggagctacgtgttctagacacaagcgcaggtccaaattcacctgcgcatgtcccgatcagttcaagggcaaattttgcgaaatcgggtcagatgactgctacgtaggcgatgggtattcttaccggggaaagatgaacaggaccgtcaatcagcacgcatgtctctattggaactcccaccttctcctgcaggagaactacaatatgttcatggaagatgcagagacacatggaataggagaacataatttttgccgaaatcccgatgctgatgagaaaccctggtgtttcattaaagtgactaacgacaaggttaaatgggagtattgtgacgtatcagcttgctcagctcaggcctag

SEQ ID NO: 143764 - DNA, 1683 bp, Artificial Sequence
  derived and/or modified sequence
atgttcgccagaatgagcgacctgcacgtgctgctgctgatggccctggtgggcaagaccgcctgcggcttcagcctgatgagcctgctggagagcctggaccccgactggacccccgaccagtacgactacagctacgaggactacaaccaggaggagaacaccagcagcaccctgacccacgccgagaaccccgactggtactacaccgaggaccaggccgacccctgccagcccaacccctgcgagcacggcggcgactgcctggtgcacggcagcaccttcacctgcagctgcctggcccccttcagcggcaacaagtgccagaaggtgcagaacacctgcaaggacaacccctgcggcagaggccagtgcctgatcacccagagccccccctactacagatgcgtgtgcaagcacccctacaccggccccagctgcagccaggtggtgcccgtgtgcagacccaacccctgccagaacggcgccacctgcagcagacacaagagaagaagcaagttcacctgcgcctgccccgaccagttcaagggcaagttctgcgagatcggcagcgacgactgctacgtgggcgacggctacagctacagaggcaagatgaacagaaccgtgaaccagcacgcctgcctgtactggaacagccacctgctgctgcaggagaactacaacatgttcatggaggacgccgagacccacggcatcggcgagcacaacttctgcagaaaccccgacgccgacgagaagccctggtgcttcatcaaggtgaccaacgacaaggtgaagtgggagtactgcgacgtgagcgcctgcagcgcccaggacgtggcctaccccgaggagagccccaccgagcccagcaccaagctgcccggcttcgacagctgcggcaagaccgagatcgccgagagaaagatcaagagaatctacggcggcttcaagagcaccgccggcaagcacccctggcaggccagcctgcagagcagcctgcccctgaccatcagcatgccccagggccacttctgcggcggcgccctgatccacccctgctgggtgctgaccgccgcccactgcaccgacatcaagaccagacacctgaaggtggtgctgggcgaccaggacctgaagaaggaggagttccacgagcagagcttcagagtggagaagatcttcaagtacagccactacaacgagagagacgagatcccccacaacgacatcgccctgctgaagctgaagcccgtggacggccactgcgccctggagagcaagtacgtgaagaccgtgtgcctgcccgacggcagcttccccagcggcagcgagtgccacatcagcggctggggcgtgaccgagaccggcaagggcagcagacagctgctggacgccaaggtgaagctgatcgccaacaccctgtgcaacagcagacagctgtacgaccacatgatcgacgacagcatgatctgcgccggcaacctgcagaagcccggccaggacacctgccagggcgacagcggcggccccctgacctgcgagaaggacggcacctactacgtgtacggcatcgtgagctggggcctggagtgcggcaagagacccggcgtgtacacccaggtgaccaagttcctgaactggatcaaggccaccatcaagagcgagagcggcttctag

SEQ ID NO: 143765 - DNA, 843 bp, Artificial Sequence
  derived and/or modified sequence
atgttcgccagaatgagcgacctgcacgtgctgctgctgatggccctggtgggcaagaccgcctgcggcttcagcctgatgagcctgctggagagcctggaccccgactggacccccgaccagtacgactacagctacgaggactacaaccaggaggagaacaccagcagcaccctgacccacgccgagaaccccgactggtactacaccgaggaccaggccgacccctgccagcccaacccctgcgagcacggcggcgactgcctggtgcacggcagcaccttcacctgcagctgcctggcccccttcagcggcaacaagtgccagaaggtgcagaacacctgcaaggacaacccctgcggcagaggccagtgcctgatcacccagagccccccctactacagatgcgtgtgcaagcacccctacaccggccccagctgcagccaggtggtgcccgtgtgcagacccaacccctgccagaacggcgccacctgcagcagacacaagagaagaagcaagttcacctgcgcctgccccgaccagttcaagggcaagttctgcgagatcggcagcgacgactgctacgtgggcgacggctacagctacagaggcaagatgaacagaaccgtgaaccagcacgcctgcctgtactggaacagccacctgctgctgcaggagaactacaacatgttcatggaggacgccgagacccacggcatcggcgagcacaacttctgcagaaaccccgacgccgacgagaagccctggtgcttcatcaaggtgaccaacgacaaggtgaagtgggagtactgcgacgtgagcgcctgcagcgcccaggcctag

SEQ ID NO: 143766 - protein, 408 aa, Artificial Sequence
  derived and/or modified sequence
MNTTDNGVNCLCAICGDRATGKHYGASSCDGCKGFFRRSIRKSHVYSCRFSRQCVVDKDKRNQCRYCRLRKCFRAGMKKEAVQNERDRISTRRSTFDGSNIPSINTLAQAEVRSRQISVSSPGSSTDINVKKIASIGDVCESMKQQLLVLVEWAKYIPAFCELPLDDQVALLRAHAGEHLLLGATKRSMMYKDILLLGNNYVIHRNSCEVEISRVANRVLDELVRPFQEIQIDDNEYACLKAIVFFDPDAKGLSDPVKIKNMRFQVQIGLEDYINDRQYDSRGRFGELLLLLPTLQSITWQMIEQIQFVKLFGMVKIDNLLQEMLLGGASNDGSHLHHPMHPHLSQDPLTGQTILLGPMSTLVHADQISTPETPLPSPPQGSGQEQYKIAANQASVISHQHLSKQKQL

SEQ ID NO: 143767 - protein, 445 aa, Artificial Sequence
  derived and/or modified sequence
MDMANYSEVLDPTYTTLEFETMQILYNSSDSSAPETSMNTTDNGVNCLCAICGDRATGKHYGASSCDGCKGFFRRSIRKSHVYSCRFSRQCVVDKDKRNQCRYCRLRKCFRAGMKKEAVQNERDRISTRRSTFDGSNIPSINTLAQAEVRSRQISVSSPGSSTDINVKKIASIGDVCESMKQQLLVLVEWAKYIPAFCELPLDDQVALLRAHAGEHLLLGATKRSMMYKDILLLGNNYVIHRNSCEVEISRVANRVLDELVRPFQEIQIDDNEYACLKAIVFFDPDAKGLSDPVKIKNMRFQVQIGLEDYINDRQYDSRGRFGELLLLLPTLQSITWQMIEQIQFVKLFGMVKIDNLLQEMLLGGASNDGSHLHHPMHPHLSQDPLTGQTILLGPMSTLVHADQISTPETPLPSPPQGSGQEQYKIAANQASVISHQHLSKQKQL

SEQ ID NO: 143768 - DNA, 4101 bp, Artificial Sequence
  derived and/or modified sequence
gagggtatcagaaccaatactggacatggacatggcaaattacagtgaagttttggacccaacttacacaactttggagtttgaaactatgcagattctatataattcaagtgatagttctgccccagagacaagtatgaataccacagacaacggtgtcaactgtctgtgtgctatctgtggggacagagcaacaggaaaacactatggggcatccagctgtgatgggtgcaagggtttcttcagacgcagcattcgtaagagtcacgtttattcttgcaggttcagtcggcaatgtgttgttgacaaggacaaaaggaatcaatgtagatattgtcgattaagaaagtgttttagagcgggaatgaaaaaagaagctgtacaaaatgaacgtgacagaataagcaccagaagaagcacatttgatggcagcaacatcccctccattaacacactggcacaagctgaagttcggtctcgccagatctcagtctcaagccctgggtcaagcactgacataaacgttaagaaaattgcaagtattggtgatgtctgtgaatctatgaaacagcagctcttagtcttggtggaatgggctaaatatattcctgccttctgtgaattaccattggatgatcaggtggcactgttgagagctcacgcaggggagcacttactgcttggagctacaaagagatccatgatgtataaagatattttgcttttgggaaacaactatgttattcaccgcaacagctgtgaagttgagattagccgtgtggccaatcgtgttctagatgagctggttagaccatttcaagaaatccagattgatgacaatgagtatgcttgtttaaaggcaattgtattttttgatccagatgcaaaagggctaagcgatccagtaaaaattaagaacatgaggttccaagtgcagatcggtttggaggactacatcaatgatcggcagtatgactcccgggggaggtttggagagttgcttctgctcctgcccacactgcagagcatcacgtggcaaatgattgagcaaatacagtttgttaaactttttgggatggttaaaattgacaatctacttcaggaaatgctattaggtggggcttccaatgatggcagtcatctccatcatccaatgcatccacatttgtctcaagacccattaactggacaaactatacttttaggtcccatgtcaacactggttcatgcagaccagatctcaactcctgaaaccccactcccttccccaccacaaggctctgggcaagaacagtacaaaatagctgcaaaccaagcatcagtcatttcacaccagcatctctccaaacaaaagcaattgtgaaaatgtgtttacttcagaacggcactacataaatgtgaaaagttgttgatcttgaaatatctcaggatagcacttttggcaaactcttagccaaggcttcttcattggtgctgttataagatggtgtcctattttcttgtttatacgttcattctgtttgttattgctactatgtaaaactttcacatgcaaccaatgtatatctgagtttgaagatgtttatatagggtattttttccaactgcccctgcattgtgcctgaaccaattgaatcttatgtatgagtttcatttgttttattaatgttaatttaaatctgtaaataattgctttattgtgatgtgatacagaacaaagtgttcgtttttgactgaaaatagtagatcagaaatctcagtttaatataaaatgagctaagtttttaaaaataaattataaacttggagattagaaaaataaagcagttgctgtagaataggctgtatctttttcaagaagaatctcttatggacagtctgtggtaaagaagcaactctttgctttagagttaaatattcctatcttaagtttagaaaaatacaaaaaaccattccaaggatgactggatactttttgaaatctgactttctttgaagatgtatgttaagcaaaaacatgttgcttttatcagttaggatacagggtgaactgtaacaaagaaacccctaaaacagtgactaaatcaagagaggaatctatttctttctcctgaaacaatttagaaaatagttatccattgactagaaattagtacatgcccacagctggctcccacggtagccaggagaattatctataggtggaaagtctgtgtcagccaaagccatgtcactctgagagaactgattctgaggacaagttagccatctaccacccatgtcccttatttggtcctcacaataacactttaggagagatatcattatcgctgttttataaataagggaaactttagcttgagggtttaaggaacataaccaaagttcacaaacataacgagtgagagaaacacattcaagcccaggtctagttgactttaatgaatctttggtgtggaatgaaaaatgtgaacttcttactcatagtgtggtttttaaatatatgcagttgagtgatgattggatactattcatcatattgcctataatatatatttaccgataagcagtgagtgtaaaattgttgtagcttgaataagaaaccacttttgtagttttaaccagactttctcttaaaaacattagataaaataaaagattcaccggatggattctgatgaaaacgaaaacaaagtaaaatgactggcttagcagattctttgaaatgtagcagcccagggatgtaccaaatgtcgaattctagactgaggagtagagttcattggagtcttaaactctctgatatcacttaaagctggagtttattttaaaacaaatgaagcatgggccacctcatgatgcagtggctcctctctggttgaggagagggaaaattggaaaaactggtcgagtaattatcaataattttttttaaaaagaggatcccaaactgtaaaagattgaaataatctttctcaggattttttaaatgtctaagattatgatgtcatatctcccacttaccttataagtaaaaaggttaatatcaagtaacttattagctcttaaagtaaaattgaacttattaaaagctatctatgatttaatagatttaataaaattccttcacgacctggtacccttgtgaaactgtaaaatatatcatatggggggagttttttaactcttattttttgaaaatttactgtagcttctatttcgtgaataagaatgttttgattttgatcatacaaataacttttgtagatttttgtttacttttgggggggttcccttagaagacattaaaaaaaaatactgccttggtctgtgcaggctgctgtaatgaaatactatgaacttggcagcttataaacaacagaaatttatttctcgctgttctcaatggtgggaagtccaagattaagggatcaacaaattaggcctctggatcatacatggcattttctagctgtgtccttatacataaaaggaaaaaggtagctctctcgagtctctttaataaagatactaattctcatgactgaatcaccctccaaaggccccacctcctaataccatcactctggggactaggtgtcagcatgtgaattttggaaaacacaaaaattcagaacatagcaaatacctttgaagtataaaagataaaattcatttttagtgaaccctgtaatttattcgtgtatatttactaaacagctgtatctttgaaattgttagtaatgattctgcttcaataactatggtcagggaatttataatattatatttttatatactgaactgccatagatgctggaaaaaaggaactgatgttttcagcatattttcaaaatattgataagggaagttattacttttatatagtattcaacttttttcaggtaatagaagtgaataatttattgtgaaataattcattttataaatgtataattatttttataaattttattgttggaaatcaaaaattagtagattttttaccatgttaaattatagtgagattaaagtattactaaactgtgatgctatgtttgtttcactaaactttctaaataaaaactgagaaaaaaaaaa

SEQ ID NO: 143769 - DNA, 1338 bp, Artificial Sequence
  derived and/or modified sequence
atggacatggccaactacagcgaggtgctagacccaacatatactacactcgagtttgagacaatgcaaatcctttacaactcgtctgactcctcagcccccgagactagcatgaacactactgataacggtgtgaactgcctgtgcgctatttgtggggatagagccaccgggaaacactacggtgcttccagctgcgatgggtgcaaaggctttttcagaagatctatccgtaagagtcacgtttactcgtgccggttcagccggcagtgtgtggtcgacaaggataaaagaaatcagtgccgttattgccgcctccgcaaatgcttccgggccggcatgaaaaaggaagccgtccagaatgagagggaccggatctcgacccggcggtctacctttgacgggtctaacatccccagtataaatacactcgcacaagctgaggtgcgcagtagacagatttctgtgagttccccaggcagctctaccgacattaatgttaaaaagatcgcttcaattggggacgtatgtgagtccatgaagcagcagcttctggtgctggtcgaatgggctaagtatatccctgcattttgcgagctgcccctagatgaccaagtcgccctcctgcgggcacacgcaggagagcacctgctgttgggggcgaccaagaggtcgatgatgtataaggacattctgctcctaggcaacaattatgttattcaccggaacagctgcgaggtcgagatcagccgggtagccaatcgcgttctcgacgaactcgtgcgccctttccaggaaattcagatcgatgataacgagtatgcatgccttaaggcgattgtctttttcgacccagacgccaaggggctgtcagaccctgtaaaaattaagaacatgcgctttcaggtccagattggccttgaagattatatcaatgacagacagtatgattcccgggggagatttggtgagcttctgttgttacttcctactcttcagtccatcacatggcagatgatcgagcagatccagtttgtaaaattgtttgggatggtaaagatcgacaatctgctgcaggagatgctgctgggcggtgcgagcaacgatggatctcacctgcaccaccccatgcatcctcacctcagccaggatccccttacaggtcaaacaatcttgttggggcccatgagcactcttgtgcatgctgaccagatcagcacccctgaaacacccctcccatctcccccgcagggaagcgggcaggagcaatataagatcgccgcgaaccaggctagcgtgatttctcaccagcacctgtccaagcagaaacagctgtag

SEQ ID NO: 143770 - DNA, 1728 bp, Artificial Sequence
  derived and/or modified sequence
ggagcctcggttcccctcgggcggctgaaggaggggctgagcctcaggacccctaggccaggccgtgttgaaagcagataccccgaggcctcgcccagcctgcgctggagggaagaaggcgctggaggagcaccagcgaaagcagccagtctgagatattgacactacagaaaaaactgacagcttactccttgtattgattctactcttctctacaaatatagactccgttccctaccacagccttatagttctgccccagagacaagtatgaataccacagacaacggtgtcaactgtctgtgtgctatctgtggggacagagcaacaggaaaacactatggggcatccagctgtgatgggtgcaagggtttcttcagacgcagcattcgtaagagtcacgtttattcttgcaggttcagtcggcaatgtgttgttgacaaggacaaaaggaatcaatgtagatattgtcgattaagaaagtgttttagagcgggaatgaaaaaagaagctgtacaaaatgaacgtgacagaataagcaccagaagaagcacatttgatggcagcaacatcccctccattaacacactggcacaagctgaagttcggtctcgccagatctcagtctcaagccctgggtcaagcactgacataaacgttaagaaaattgcaagtattggtgatgtctgtgaatctatgaaacagcagctcttagtcttggtggaatgggctaaatatattcctgccttctgtgaattaccattggatgatcaggtggcactgttgagagctcacgcaggggagcacttactgcttggagctacaaagagatccatgatgtataaagatattttgcttttgggaaacaactatgttattcaccgcaacagctgtgaagttgagattagccgtgtggccaatcgtgttctagatgagctggttagaccatttcaagaaatccagattgatgacaatgagtatgcttgtttaaaggcaattgtattttttgatccagatgcaaaagggctaagcgatccagtaaaaattaagaacatgaggttccaagtgcagatcggtttggaggactacatcaatgatcggcagtatgactcccgggggaggtttggagagttgcttctgctcctgcccacactgcagagcatcacgtggcaaatgattgagcaaatacagtttgttaaactttttgggatggttaaaattgacaatctacttcaggaaatgctattaggtggggcttccaatgatggcagtcatctccatcatccaatgcatccacatttgtctcaagacccattaactggacaaactatacttttaggtcccatgtcaacactggttcatgcagaccagatctcaactcctgaaaccccactcccttccccaccacaaggctctgggcaagaacagtacaaaatagctgcaaaccaagcatcagtcatttcacaccagcatctctccaaacaaaagcaattgtgaaaatgtgtttacttcagaacggcactacataaatgtgaaaagttgttgatcttgaaatatctcaggatagcacttttggcaaactcttagccaaggcttcttcattggtgctgttataagatggtgtcctattttcttgtttatacgttcattctgtttgttattgctactatgtaaaactttcacatgcaaccaatgtatatctgagtttgaagatgtttatatagggta

SEQ ID NO: 143771 - DNA, 4209 bp, Artificial Sequence
  derived and/or modified sequence
ggattagcactcacagattgaaagcaaaacacatcaaaacactcatcacgcactctgggcttgtggtgccacttgtatgtgtgtttctaaatcaatgatgagggtatcagaaccaatactggacatggacatggcaaattacagtgaagttttggacccaacttacacaactttggagtttgaaactatgcagattctatataattcaagtgatagttctgccccagagacaagtatgaataccacagacaacggtgtcaactgtctgtgtgctatctgtggggacagagcaacaggaaaacactatggggcatccagctgtgatgggtgcaagggtttcttcagacgcagcattcgtaagagtcacgtttattcttgcaggttcagtcggcaatgtgttgttgacaaggacaaaaggaatcaatgtagatattgtcgattaagaaagtgttttagagcgggaatgaaaaaagaagctgtacaaaatgaacgtgacagaataagcaccagaagaagcacatttgatggcagcaacatcccctccattaacacactggcacaagctgaagttcggtctcgccagatctcagtctcaagccctgggtcaagcactgacataaacgttaagaaaattgcaagtattggtgatgtctgtgaatctatgaaacagcagctcttagtcttggtggaatgggctaaatatattcctgccttctgtgaattaccattggatgatcaggtggcactgttgagagctcacgcaggggagcacttactgcttggagctacaaagagatccatgatgtataaagatattttgcttttgggaaacaactatgttattcaccgcaacagctgtgaagttgagattagccgtgtggccaatcgtgttctagatgagctggttagaccatttcaagaaatccagattgatgacaatgagtatgcttgtttaaaggcaattgtattttttgatccagatgcaaaagggctaagcgatccagtaaaaattaagaacatgaggttccaagtgcagatcggtttggaggactacatcaatgatcggcagtatgactcccgggggaggtttggagagttgcttctgctcctgcccacactgcagagcatcacgtggcaaatgattgagcaaatacagtttgttaaactttttgggatggttaaaattgacaatctacttcaggaaatgctattaggtggggcttccaatgatggcagtcatctccatcatccaatgcatccacatttgtctcaagacccattaactggacaaactatacttttaggtcccatgtcaacactggttcatgcagaccagatctcaactcctgaaaccccactcccttccccaccacaaggctctgggcaagaacagtacaaaatagctgcaaaccaagcatcagtcatttcacaccagcatctctccaaacaaaagcaattgtgaaaatgtgtttacttcagaacggcactacataaatgtgaaaagttgttgatcttgaaatatctcaggatagcacttttggcaaactcttagccaaggcttcttcattggtgctgttataagatggtgtcctattttcttgtttatacgttcattctgtttgttattgctactatgtaaaactttcacatgcaaccaatgtatatctgagtttgaagatgtttatatagggtattttttccaactgcccctgcattgtgcctgaaccaattgaatcttatgtatgagtttcatttgttttattaatgttaatttaaatctgtaaataattgctttattgtgatgtgatacagaacaaagtgttcgtttttgactgaaaatagtagatcagaaatctcagtttaatataaaatgagctaagtttttaaaaataaattataaacttggagattagaaaaataaagcagttgctgtagaataggctgtatctttttcaagaagaatctcttatggacagtctgtggtaaagaagcaactctttgctttagagttaaatattcctatcttaagtttagaaaaatacaaaaaaccattccaaggatgactggatactttttgaaatctgactttctttgaagatgtatgttaagcaaaaacatgttgcttttatcagttaggatacagggtgaactgtaacaaagaaacccctaaaacagtgactaaatcaagagaggaatctatttctttctcctgaaacaatttagaaaatagttatccattgactagaaattagtacatgcccacagctggctcccacggtagccaggagaattatctataggtggaaagtctgtgtcagccaaagccatgtcactctgagagaactgattctgaggacaagttagccatctaccacccatgtcccttatttggtcctcacaataacactttaggagagatatcattatcgctgttttataaataagggaaactttagcttgagggtttaaggaacataaccaaagttcacaaacataacgagtgagagaaacacattcaagcccaggtctagttgactttaatgaatctttggtgtggaatgaaaaatgtgaacttcttactcatagtgtggtttttaaatatatgcagttgagtgatgattggatactattcatcatattgcctataatatatatttaccgataagcagtgagtgtaaaattgttgtagcttgaataagaaaccacttttgtagttttaaccagactttctcttaaaaacattagataaaataaaagattcaccggatggattctgatgaaaacgaaaacaaagtaaaatgactggcttagcagattctttgaaatgtagcagcccagggatgtaccaaatgtcgaattctagactgaggagtagagttcattggagtcttaaactctctgatatcacttaaagctggagtttattttaaaacaaatgaagcatgggccacctcatgatgcagtggctcctctctggttgaggagagggaaaattggaaaaactggtcgagtaattatcaataattttttttaaaaagaggatcccaaactgtaaaagattgaaataatctttctcaggattttttaaatgtctaagattatgatgtcatatctcccacttaccttataagtaaaaaggttaatatcaagtaacttattagctcttaaagtaaaattgaacttattaaaagctatctatgatttaatagatttaataaaattccttcacgacctggtacccttgtgaaactgtaaaatatatcatatggggggagttttttaactcttattttttgaaaatttactgtagcttctatttcgtgaataagaatgttttgattttgatcatacaaataacttttgtagatttttgtttacttttgggggggttcccttagaagacattaaaaaaaaatactgccttggtctgtgcaggctgctgtaatgaaatactatgaacttggcagcttataaacaacagaaatttatttctcgctgttctcaatggtgggaagtccaagattaagggatcaacaaattaggcctctggatcatacatggcattttctagctgtgtccttatacataaaaggaaaaaggtagctctctcgagtctctttaataaagatactaattctcatgactgaatcaccctccaaaggccccacctcctaataccatcactctggggactaggtgtcagcatgtgaattttggaaaacacaaaaattcagaacatagcaaatacctttgaagtataaaagataaaattcatttttagtgaaccctgtaatttattcgtgtatatttactaaacagctgtatctttgaaattgttagtaatgattctgcttcaataactatggtcagggaatttataatattatatttttatatactgaactgccatagatgctggaaaaaaggaactgatgttttcagcatattttcaaaatattgataagggaagttattacttttatatagtattcaacttttttcaggtaatagaagtgaataatttattgtgaaataattcattttataaatgtataattatttttataaattttattgttggaaatcaaaaattagtagattttttaccatgttaaattatagtgagattaaagtattactaaactgtgatgctatgtttgtttcactaaactttctaaataaaaactgagaaaaaaaaaatcactgaaa

SEQ ID NO: 143772 - DNA, 1338 bp, Artificial Sequence
  derived and/or modified sequence
atggacatggccaactacagcgaggtgctggaccccacctacaccaccctggagtttgagaccatgcagatcctgtacaacagcagtgacagcagcgcccctgagacctccatgaacaccacagacaatggagtgaactgcctgtgtgccatctgtggggaccgggccaccgggaagcactatggagccagcagctgtgatggctgcaagggcttcttccgccgcagcatcaggaagagccacgtgtacagctgccgcttcagccggcagtgtgtggtggacaaggacaagaggaaccagtgccgctactgccgcctgaggaagtgcttccgggccggcatgaagaaggaggccgtgcagaatgaaagagaccgcatcagcaccaggaggagcacctttgatggcagcaacatccccagcatcaacaccctggcccaggccgaggtgcgcagccggcagatctctgtgagcagccctggcagcagcacagacatcaacgtgaagaagatcgccagcattggagatgtgtgtgagagcatgaagcagcagctgctggtgctggtggagtgggccaagtacatcccagccttctgtgagctgcccctggatgaccaggtggccctgctgcgggcccatgctggggagcacctgctgctgggcgccaccaagaggtccatgatgtacaaggacatcctgctgctgggcaacaactacgtgatccacaggaacagctgtgaggtggagatcagccgggtggccaacagagtgctggatgagctggtgcggcccttccaggagatccagattgatgacaatgaatatgcctgcctgaaggccatcgtgttctttgatcctgatgccaagggcctgagtgaccctgtgaagatcaagaacatgaggttccaggtgcagatcggcctggaggactacatcaatgaccggcagtatgacagccggggccgctttggagagctgctgctgctgctgcccaccctgcagagcatcacctggcagatgattgagcagatccagtttgtgaagctgtttggcatggtgaagattgacaacctgctgcaggagatgctgctgggcggggccagcaatgatggcagccacctgcaccaccccatgcacccccacctgagccaggaccccctgaccggccagaccatcctgctgggccccatgagcaccctggtgcacgccgaccagatcagcaccccagagacccccctgcccagccccccccagggcagcggccaggagcagtacaagattgctgccaaccaggccagcgtcatcagccaccagcacctgagcaagcagaagcagctgtag

SEQ ID NO: 143773 - DNA, 1338 bp, Artificial Sequence
  derived and/or modified sequence
atggacatggccaactacagcgaggtgctggaccccacctacaccacactcgaattcgagacgatgcagattctctacaacagcagcgattcctccgcacctgagacctccatgaatacgacagataacggcgtgaactgcctgtgtgctatttgcggggatcgggccactgggaagcattacggagcgagcagttgcgatggctgcaagggattcttccgccgctctatccgcaaatctcatgtctactcctgtcgctttagcagacagtgcgtagtagacaaggataagaggaatcaatgccgctactgccgcctccgcaagtgtttccgagccggaatgaagaaggaagcagtacagaatgagagggatcggatttcaacaaggcggagtaccttcgatgggagtaatatcccgtctataaatacgctagcacaggcagaagtccgcagccgtcagataagcgtgagtagcccaggcagcagtacagatataaatgtgaaaaagatcgccagcatcggggatgtatgcgagtctatgaagcagcagctcctggttctcgttgagtgggccaagtatataccagcattttgcgagctccccttggatgatcaggtggcattgcttagggcacacgccggcgagcatctgttgctgggcgctactaagagaagcatgatgtataaggatatcctgctgctggggaataattatgtgatacatcgtaactcttgtgaagttgaaatctccagagtggcaaatagagtgctggatgagctggtgcgtccatttcaggaaatccaaatcgacgacaacgaatacgcttgtctgaaagctatcgtgtttttcgatccagatgccaagggcttgagcgaccctgttaagataaagaacatgaggttccaggtacagatagggctcgaagactacatcaacgaccgccagtacgatagcagaggtcggttcggagaattactgctgctgctgcctacactccaatccattacctggcagatgatcgagcagatccaattcgtgaagctgtttgggatggttaaaatcgataacctacttcaagagatgctgctgggtggagcctcaaacgacggctcccacttgcaccatcccatgcacccacacctatcacaagatcccttgacagggcaaacaatcctgttggggcctatgtcaacgctagtgcacgcagatcaaatcagtacgcctgagacccctctgccctctcccccgcaggggagcggccaggaacagtacaaaatcgcggcaaaccaggcttccgtgataagccatcagcatctcagcaagcagaagcagttgtag

SEQ ID NO: 143774 - DNA, 1338 bp, Artificial Sequence
  derived and/or modified sequence
atggacatggcaaattattccgaagtcttagatccgacctatacgaccctggagttcgagactatgcaaatcctgtacaactctagcgactccagtgcccctgaaaccagtatgaacactaccgataatggagtgaactgtctgtgcgccatctgcggcgaccgtgcaaccggcaagcactacggcgcttccagttgcgatgggtgcaaggggttctttcggagatccatcagaaagagccatgtgtacagctgcaggtttagcagacaatgcgtggttgataaagacaagaggaaccagtgtcggtactgtaggcttcggaaatgttttagggctggcatgaagaaggaggcagttcagaatgaacgcgaccggatttctacccggagaagcaccttcgatggatccaacatcccctctatcaacacactcgctcaggctgaggtacgtagtaggcagatctctgtcagctccccagggtcatcgactgatattaatgtgaagaagatcgcttctataggtgatgtttgtgagtcgatgaaacagcagttgcttgtgctggtggagtgggctaaatatatccctgccttctgcgaattgcctctagatgaccaggttgcactcctgagagctcacgctggcgaacacctgttgttgggcgcaacgaagaggagtatgatgtacaaagacattcttctgttggggaataactatgtgatccatcgcaattcctgtgaggttgagattagcagagtggcaaaccgggtcctggacgaacttgtgaggcccttccaggagatccagatcgatgataacgagtatgcatgcttgaaagccatcgtgttcttcgaccccgatgcaaaagggctcagtgaccccgtgaagatcaaaaacatgaggtttcaagtgcagatcgggttggaagattatatcaacgatcggcagtacgatagccgaggtaggtttggtgaactgttgctgctcttacccaccctgcaatctattacgtggcaaatgatcgagcaaatacagtttgtgaagctgtttgggatggtcaaaatagacaatctgctgcaggaaatgctgctcggcggagcctcgaatgatggctcccatctccatcaccccatgcatcctcatcttagccaggatccgttaactggacaaaccattcttctcggcccaatgagtacactggtgcatgcagaccaaatctccactcccgagacgcccctgccatcgcctcctcaggggagtgggcaggaacagtacaaaatcgctgctaaccaggccagtgtgatttcccaccagcatttaagtaagcagaagcagctgtag

SEQ ID NO: 143775 - DNA, 1338 bp, Artificial Sequence
  derived and/or modified sequence
atggacatggccaactacagcgaggtgctggaccccacctacaccaccctggagttcgagaccatgcagatcctgtacaacagcagcgacagcagcgcccccgagaccagcatgaacaccaccgacaacggcgtgaactgcctgtgcgccatctgcggcgacagagccaccggcaagcactacggcgccagcagctgcgacggctgcaagggcttcttcagaagaagcatcagaaagagccacgtgtacagctgcagattcagcagacagtgcgtggtggacaaggacaagagaaaccagtgcagatactgcagactgagaaagtgcttcagagccggcatgaagaaggaggccgtgcagaacgagagagacagaatcagcaccagaagaagcaccttcgacggcagcaacatccccagcatcaacaccctggcccaggccgaggtgagaagcagacagatcagcgtgagcagccccggcagcagcaccgacatcaacgtgaagaagatcgccagcatcggcgacgtgtgcgagagcatgaagcagcagctgctggtgctggtggagtgggccaagtacatccccgccttctgcgagctgcccctggacgaccaggtggccctgctgagagcccacgccggcgagcacctgctgctgggcgccaccaagagaagcatgatgtacaaggacatcctgctgctgggcaacaactacgtgatccacagaaacagctgcgaggtggagatcagcagagtggccaacagagtgctggacgagctggtgagacccttccaggagatccagatcgacgacaacgagtacgcctgcctgaaggccatcgtgttcttcgaccccgacgccaagggcctgagcgaccccgtgaagatcaagaacatgagattccaggtgcagatcggcctggaggactacatcaacgacagacagtacgacagcagaggcagattcggcgagctgctgctgctgctgcccaccctgcagagcatcacctggcagatgatcgagcagatccagttcgtgaagctgttcggcatggtgaagatcgacaacctgctgcaggagatgctgctgggcggcgccagcaacgacggcagccacctgcaccaccccatgcacccccacctgagccaggaccccctgaccggccagaccatcctgctgggccccatgagcaccctggtgcacgccgaccagatcagcacccccgagacccccctgcccagccccccccagggcagcggccaggagcagtacaagatcgccgccaaccaggccagcgtgatcagccaccagcacctgagcaagcagaagcagctgtag

SEQ ID NO: 143776 - protein, 679 aa, Artificial Sequence
  derived and/or modified sequence
MISASRAAAARLVGAAASRGPTAARHQDSWNGLSHEAFRLVSRRDYASEAIKGAVVGIDLGTTNSCVAVMEGKQAKVLENAEGARTTPSVVAFTADGERLVGMPAKRQAVTNPNNTFYATKRLIGRRYDDPEVQKDIKNVPFKIVRASNGDAWVEAHGKLYSPSQIGAFVLMKMKETAENYLGHTAKNAVITVPAYFNDSQRQATKDAGQISGLNVLRVINEPTAAALAYGLDKSEDKVIAVYDLGGGTFDISILEIQKGVFEVKSTNGDTFLGGEDFDQALLRHIVKEFKRETGVDLTKDNMALQRVREAAEKAKCELSSSVQTDINLPYLTMDSSGPKHLNMKLTRAQFEGIVTDLIRRTIAPCQKAMQDAEVSKSDIGEVILVGGMTRMPKVQQTVQDLFGRAPSKAVNPDEAVAIGAAIQGGVLAGDVTDVLLLDVTPLSLGIETLGGVFTKLINRNTTIPTKKSQVFSTAADGQTQVEIKVCQGEREMAGDNKLLGQFTLIGIPPAPRGVPQIEVTFDIDANGIVHVSAKDKGTGREQQIVIQSSGGLSKDDIENMVKNAEKYAEEDRRKKERVEAVNMAEGIIHDTETKMEEFKDQLPADECNKLKEEISKMRELLARKDSETGENIRQAASSLQQASLKLFEMAYKKMASEREGSGSSGTGEQKEDQKEEKQ

SEQ ID NO: 143777 - protein, 665 aa, Artificial Sequence
  derived and/or modified sequence
MISASRAAAARHQDSWNGLSHEAFRLVSRRDYASEAIKGAVVGIDLGTTNSCVAVMEGKQAKVLENAEGARTTPSVVAFTADGERLVGMPAKRQAVTNPNNTFYATKRLIGRRYDDPEVQKDIKNVPFKIVRASNGDAWVEAHGKLYSPSQIGAFVLMKMKETAENYLGHTAKNAVITVPAYFNDSQRQATKDAGQISGLNVLRVINEPTAAALAYGLDKSEDKVIAVYDLGGGTFDISILEIQKGVFEVKSTNGDTFLGGEDFDQALLRHIVKEFKRETGVDLTKDNMALQRVREAAEKAKCELSSSVQTDINLPYLTMDSSGPKHLNMKLTRAQFEGIVTDLIRRTIAPCQKAMQDAEVSKSDIGEVILVGGMTRMPKVQQTVQDLFGRAPSKAVNPDEAVAIGAAIQGGVLAGDVTDVLLLDVTPLSLGIETLGGVFTKLINRNTTIPTKKSQVFSTAADGQTQVEIKVCQGEREMAGDNKLLGQFTLIGIPPAPRGVPQIEVTFDIDANGIVHVSAKDKGTGREQQIVIQSSGGLSKDDIENMVKNAEKYAEEDRRKKERVEAVNMAEGIIHDTETKMEEFKDQLPADECNKLKEEISKMRELLARKDSETGENIRQAASSLQQASLKLFEMAYKKMASEREGSGSSGTGEQKEDQKEEKQ

SEQ ID NO: 143778 - protein, 632 aa, Artificial Sequence
  derived and/or modified sequence
MALVMRLLDLFQGGIMHQKQSREQLLVLIWVLPTPAWQLWKVNKQRCWRMPKVPEPPLQLWPLQQMVSDLLECRPSDRLSPTQTIHFMLPSVSLAGDMMILKYRKTLKMFPLKLSVPPMVMPVLMKMKETAENYLGHTAKNAVITVPAYFNDSQRQATKDAGQISGLNVLRVINEPTAAALAYGLDKSEDKVIAVYDLGGGTFDISILEIQKGVFEVKSTNGDTFLGGEDFDQALLRHIVKEFKRETGVDLTKDNMALQRVREAAEKAKCELSSSVQTDINLPYLTMDSSGPKHLNMKLTRAQFEGIVTDLIRRTIAPCQKAMQDAEVSKSDIGEVILVGGMTRMPKVQQTVQDLFGRAPSKAVNPDEAVAIGAAIQGGVLAGDVTDVLLLDVTPLSLGIETLGGVFTKLINRNTTIPTKKSQVFSTAADGQTQVEIKVCQGEREMAGDNKLLGQFTLIGIPPAPRGVPQIEVTFDIDANGIVHVSAKDKGTGREQQIVIQSSGGLSKDDIENMVKNAEKYAEEDRRKKERVEAVNMAEGIIHDTETKMEEFKDQLPADECNKLKEEISKMRELLARKDSETGENIRQAASSLQQASLKLFEMAYKKMASEREGSGSSGTGEQKEDQKEEKQ

SEQ ID NO: 143779 - DNA, 2040 bp, Artificial Sequence
  derived and/or modified sequence
atgatctctgccagccgagctgctgcagctaggttagtaggcgctgcggcttctcgcgggccgacagcagcacggcaccaagattcctggaatggcctctctcacgaggctttcaggctggtcagcagacgggattacgcatccgaggccataaagggtgccgtggtaggcatagacttggggaccaccaattcttgcgtcgccgttatggagggcaagcaggccaaggtcttggagaacgctgagggtgcccgaacaacaccttctgtggtggccttcaccgcagatggcgagagactcgtcggaatgcccgctaaaaggcaggccgtcaccaaccctaataacactttctatgcaaccaagcggctgattgggcggagatatgacgatccggaagtacaaaaggatatcaaaaacgttcctttcaaaatcgtacgagcatccaacggagatgcatgggtggaggctcacggtaaattgtacagcccatcgcaaatcggggcgtttgttctcatgaaaatgaaagaaacggcagaaaattatctggggcatacagctaagaatgccgtaatcactgtccccgcatacttcaacgattcccagcgtcaggccactaaggacgccgggcagatcagcgggttgaacgtgctccgcgtcattaatgaaccgacagcagcggccctggcatacggtctggataagtccgaggataaggtgattgctgtctatgatctgggtggaggtacctttgatattagcattctggaaatccagaaaggtgtatttgaagtgaagtccacaaacggggatacattcctcggaggggaggattttgatcaggctctgctgcgccacatcgtcaaggaattcaaacgagagacaggagtggacctgacaaaggataacatggctctgcagagagttcgcgaggctgctgaaaaggccaagtgtgagctgtcttccagtgtgcagacagatatcaatctgccataccttaccatggactcctccggtccaaaacatctgaatatgaagctcaccagggctcagttcgagggcattgtgacggacctcatccgccgcacaatcgctccctgtcagaaagctatgcaagatgccgaggtgagcaagagcgatatcggagaggtgatcttagtgggcgggatgactcgtatgcccaaagtgcagcaaactgtgcaggacctgttcgggagagccccctcaaaggccgtcaatccagatgaggctgtggcaataggggccgccatacaggggggtgtactggccggcgacgttaccgacgtgctgctattggacgtgacaccactgagtctgggcattgagactttgggcggggtgtttaccaaacttatcaatcgaaacacaacaatcccaaccaagaaatcccaagtctttagcaccgccgccgacggtcaaacacaagtggagattaaggtgtgccagggcgaaagggagatggctggggataacaaactcctcggacagtttaccttaattggcataccccctgccccacggggagtaccacaaatagaagtgacatttgatattgatgcgaacggtattgtacatgtcagcgcaaaggacaagggtacagggagggaacaacaaatagttattcagtcatctggcggcctttctaaggacgacatcgagaatatggttaagaatgctgagaagtatgcagaggaagatcggcgcaaaaaggaacgtgttgaggccgtgaacatggcagagggcattatccatgacactgagacaaaaatggaggaatttaaggaccaactccccgccgacgaatgtaataaactcaaggaagaaattagcaaaatgagggagctgctggcccgcaaggattccgagaccggtgaaaatattagacaggccgccagttccttacagcaggcatctttgaaactctttgaaatggcgtataagaagatggcctccgaacgcgagggttcaggcagctctggcacaggtgaacagaaagaagatcagaaggaagaaaagcagtag

SEQ ID NO: 143780 - DNA, 1998 bp, Artificial Sequence
  derived and/or modified sequence
atgatctctgccagccgtgctgcagcagcccgccaccaggactcatggaacggcctgtcgcacgaagcattcagactggtgagtcgcagagactacgcctcagaagctataaagggcgccgtagtaggcattgacttgggcaccacaaactcctgtgtagcagtgatggaaggcaaacaagccaaagtgctggaaaatgccgagggggctaggacaacaccaagtgtggtggcatttacggcggacggcgagcgattagtggggatgcccgccaaacggcaggccgtgacaaatcccaataatacattctacgccaccaagcggttgatcggccgcaggtacgatgatcccgaggtccagaaagatataaaaaacgttcccttcaagatcgtgagggcttccaacggcgacgcgtgggtggaggcccacggtaagctgtattcacctagtcagataggcgcctttgttctgatgaagatgaaggaaaccgcagagaattacctgggacacactgccaagaacgctgtaatcacagtgccggcttatttcaacgatagtcaacggcaggctactaaggacgcaggccagatttctggacttaacgtgctcagggttattaacgagcctacagccgccgccctggcatacgggctggataagtctgaagataaagttatcgctgtgtacgatttggggggcgggaccttcgacatcagcatcttagagatccagaagggcgtgtttgaggttaagtccacaaatggtgacaccttcttaggcggcgaggatttcgaccaggctctgctgaggcatatagtgaaggagtttaagagggagaccggagtcgatttaacaaaggacaacatggcacttcaacgcgtcagagaagccgccgaaaaggcaaagtgtgaactctcatctagcgtacagactgacataaatttgccctatcttacaatggacagctccgggcccaaacatctcaacatgaagctcacgcgggctcagtttgaaggcattgtgaccgacctcatcaggaggacaatcgctccctgccagaaggcaatgcaggatgctgaggtatctaagtccgacatcggcgaggtgattttggttggtgggatgacccgaatgcccaaggtgcagcaaactgtgcaggatctatttggacgtgcccctagcaaagccgtgaacccagacgaggccgttgctattggggcggcaatccaggggggggtcctggccggtgacgtcaccgatgtgctcctgttagacgttacccctcttagcctcggcatcgagactctcggtggggttttcaccaagctaattaataggaacaccactattcctacaaagaaatcccaagttttctccaccgccgcagatggccagacacaggttgagatcaaggtatgtcagggagaaagagagatggctggagacaataaactgctcgggcagtttactctgattggcatacctcccgctcctagaggggttccccagattgaagtgacgtttgacatcgacgcaaacggaattgtccatgtgagcgccaaggacaaaggaacgggtagagaacagcaaatcgttattcagtcctccggcgggctgagcaaggacgacatcgagaacatggtgaagaatgccgagaagtacgccgaagaggacagaagaaaaaaggaacgggtggaagctgttaacatggccgaaggcattatacatgataccgagacgaagatggaggaattcaaggaccaactgccggctgacgaatgcaacaagctaaaggaagagataagcaagatgcgggagctgctggcgcggaaggactcagaaacaggggagaatatccggcaggctgcgagctctttgcagcaggccagcctgaagcttttcgagatggcctataaaaagatggccagcgagcgggagggctccggatcatcaggtacaggagagcagaaagaggatcagaaagaggagaaacagtag

SEQ ID NO: 143781 - DNA, 1899 bp, Artificial Sequence
  derived and/or modified sequence
atggccctcgtgatgagacttttagatttatttcagggcggtatcatgcatcagaaacaatcccgggaacaattactggtcctgatctgggttttacctaccccagcctggcaactgtggaaggtaaacaagcaaagatgctggaggatgcccaaggtgcctgagccccccctgcagctctggcctctacagcagatggtcagcgatctgctagaatgtcgaccttcggatcgtctttccccgacacagaccattcacttcatgctcccttccgtatccctggcaggcgacatgatgattctgaagtaccgcaagactctgaaaatgtttccacttaagctatccgtgccccctatggtgatgcccgtgttgatgaaaatgaaagagaccgccgagaactacctggggcacaccgccaagaacgccgtgattacagttcctgcctactttaacgactcgcagcggcaggccaccaaggacgctgggcagataagcggcctgaacgtgctccgggtcatcaatgaacctacagcagcagctcttgcgtacggactggataagagcgaggacaaagtcattgctgtgtacgatctggggggtgggacttttgatatttcaatcctagagatccagaagggcgttttcgaagtgaagagtaccaacggcgacacatttttgggtggggaggattttgatcaggcactgttgcgtcatattgtcaaggaattcaagcgggagacaggggtggatctgacgaaggataacatggctcttcagagggtgcgcgaagccgctgagaaggcaaagtgtgaactgagctcgtcagtgcagacagatataaatttgccctacctgacgatggatagcagcggccctaagcatcttaatatgaaactgactcgtgctcagtttgaggggatcgtaacggacctaatcaggcggacgatcgcaccctgccaaaaagcaatgcaggatgcagaagtgtccaagtccgatattggtgaagtgatactggtgggcggcatgacacgcatgcctaaagtccaacagaccgttcaggacctgtttggccgggccccttccaaggccgtcaatccagatgaggcggtagccatcggagctgcgatccagggcggtgtgctggccggtgatgtgaccgatgttctccttctggacgtcaccccactgtcgctgggaatcgaaacactcggaggtgtgttcacaaaacttataaaccggaatacaacaatacccaccaaaaagagtcaggtgttctctaccgcagccgatgggcagacccaggtggagattaaggtttgccaaggcgaacgtgagatggccggggacaacaagctgctggggcagttcacactgatcggtatcccccctgctccacgaggggtgccccaaattgaggtcacattcgacatcgacgctaacggtatcgttcatgtgtcagccaaagataaggggaccggccgcgaacagcagatcgtgatccagagttccggaggtctgtcaaaggatgacattgagaacatggtgaaaaatgcagaaaaatacgcagaggaagataggagaaagaaggaacgggtggaggccgtgaatatggctgagggcattattcacgatactgaaaccaagatggaagaattcaaagatcagctgcccgccgatgaatgtaataagttaaaagaggaaatcagcaagatgagagagctgcttgcacgcaaggactccgagaccggcgaaaatatcagacaggccgcctcctcactccagcaagcctctttaaaacttttcgagatggcgtataagaagatggccagcgagcgggaaggatcaggaagtagcggtaccggcgagcaaaaagaggatcagaaggaagagaaacaatag

SEQ ID NO: 143782 - DNA, 3321 bp, Artificial Sequence
  derived and/or modified sequence
gtgaccaacccccgcccctcaccccacgtggttggaggtttccagaagcgctgccgccaccgcatcgcgcagctctttgccgtcggagcgcttgtttgctgcctcgtactcctccatttatccgccatgataagtgccagccgagctgcagcagcccgtctcgtgggcgccgcagcctcccggggccctacggccgcccgccaccaggatagctggaatggccttagtcatgaggcttttagacttgtttcaaggcgggattatgcatcagaagcaatcaagggagcagttgttggtattgatttgggtactaccaactcctgcgtggcagttatggaaggtaaacaagcaaaggtgctggagaatgccgaaggtgccagaaccaccccttcagttgtggcctttacagcagatggtgagcgacttgttggaatgccggccaagcgacaggctgtcaccaacccaaacaatacattttatgctaccaagcgtctcattggccggcgatatgatgatcctgaagtacagaaagacattaaaaatgttccctttaaaattgtccgtgcctccaatggtgatgcctgggttgaggctcatgggaaattgtattctccgagtcagattggagcatttgtgttgatgaagatgaaagagactgcagaaaattacttggggcacacagcaaaaaatgctgtgatcacagtcccagcttatttcaatgactcgcagagacaggccactaaagatgctggccagatatctggactgaatgtgcttcgggtgattaatgagcccacagctgctgctcttgcctatggtctagacaaatcagaagacaaagtcattgctgtatatgatttaggtggtggaacttttgatatttctatcctggaaattcagaaaggagtatttgaggtgaaatccacaaatggggataccttcttaggtggggaagactttgaccaggccttgctacggcacattgtgaaggagttcaagagagagacaggggttgatttgactaaagacaacatggcacttcagagggtacgggaagctgctgaaaaggctaaatgtgaactctcctcatctgtgcagactgacatcaatttgccctatcttacaatggattcttctggacccaagcatttgaatatgaagttgacccgtgctcaatttgaagggattgtcactgatctaatcagaaggactatcgctccatgccaaaaagctatgcaagatgcagaagtcagcaagagtgacataggagaagtgattcttgtgggtggcatgactaggatgcccaaggttcagcagactgtacaggatctttttggcagagccccaagtaaagctgtcaatcctgatgaggctgtggccattggagctgccattcagggaggtgtgttggccggcgatgtcacggatgtgctgctccttgatgtcactcccctgtctctgggtattgaaactctaggaggtgtctttaccaaacttattaataggaataccactattccaaccaagaagagccaggtattctctactgccgctgatggtcaaacgcaagtggaaattaaagtgtgtcagggtgaaagagagatggctggagacaacaaactccttggacagtttactttgattggaattccaccagcccctcgtggagttcctcagattgaagttacatttgacattgatgccaatgggatagtacatgtttctgctaaagataaaggcacaggacgtgagcagcagattgtaatccagtcttctggtggattaagcaaagatgatattgaaaatatggttaaaaatgcagagaaatatgctgaagaagaccggcgaaagaaggaacgagttgaagcagttaatatggctgaaggaatcattcacgacacagaaaccaagatggaagaattcaaggaccaattacctgctgatgagtgcaacaagctgaaagaagagatttccaaaatgagggagctcctggctagaaaagacagcgaaacaggagaaaatattagacaggcagcatcctctcttcagcaggcatcactgaagctgttcgaaatggcatacaaaaagatggcatctgagcgagaaggctctggaagttctggcactggggaacaaaaggaagatcaaaaggaggaaaaacagtaataatagcagaaattttgaagccagaaggacaacatatgaagcttaggagtgaagagacttcctgagcagaaatgggcgaacttcagtctttttactgtgtttttgcagtattctatatataatttccttaatttgtaaatttagtgaccattagctagtgatcatttaatggacagtgattctaacagtataaagttcacaatattctatgtccctagcctgtcatttttcagctgcatgtaaaaggaggtaggatgaattgatcattataaagatttaactattttatgctgaagtgaccatattttcaaggggtgaaaccatctcgcacacagcaatgaaggtagtcatccatagacttgaaatgagaccacatatggggatgagatccttctagttagcctagtactgctgtactggcctgtatgtacatggggtccttcaactgaggccttgcaagtcaagctggctgtgccatgtttgtagatggggcagaggaatctagaacaatgggaaacttagctatttatattaggtacagctattaaaacaaggtaggaatgaggctagacctttaacttccctaaggcatacttttctagctaccttctgccctgtgtctggcacctacatccttgatgattgttctcttacccattctggaatttttttttttttaaataaatacagaaagcatcttgatctcttgtttgtgaggggtgatgccctgagatttagcttcaagaatatgccatggctcatgcttcccatatttcccaaagagggaaatacaggatttgctaacactggttaaaaatgcaaattcaagatttggaagggctgttataatgaaataatgagcagtatcagcatgtgcaaatcttgtttgaaggattttattttctccccttagacctttggtacatttagaatcttgaaagtttctagatctctaacatgaaagtttctagatctctaacatgaaagtttttagatctctaacatgaaaaccaaggtggctattttcaggttgctttcagctccaagtagaaataaccagaattggcttacattaaagaaactgcatctagaaataagtcctaagatactatttctatggctcaaaaataaaaggaacccagatttctttcccta

SEQ ID NO: 143783 - DNA, 2260 bp, Artificial Sequence
  derived and/or modified sequence
ctctttgccgtcggagcgcttgtttgctgcctcgtactcctccatttatccgccatgataagtgccagccgagctgcagccgcccgccaccaggatagctggaatggccttagtcatgaggcttttagacttgtttcaaggcgggattatgcatcagaagcaatcaagggagcagttgttggtattgatttgggtactaccaactcctgcgtggcagttatggaaggtaaacaagcaaaggtgctggagaatgccgaaggtgccagaaccaccccttcagttgtggcctttacagcagatggtgagcgacttgttggaatgccggccaagcgacaggctgtcaccaacccaaacaatacattttatgctaccaagcgtctcattggccggcgatatgatgatcctgaagtacagaaagacattaaaaatgttccctttaaaattgtccgtgcctccaatggtgatgcctgggttgaggctcatgggaaattgtattctccgagtcagattggagcatttgtgttgatgaagatgaaagagactgcagaaaattacttggggcacacagcaaaaaatgctgtgatcacagtcccagcttatttcaatgactcgcagagacaggccactaaagatgctggccagatatctggactgaatgtgcttcgggtgattaatgagcccacagctgctgctcttgcctatggtctagacaaatcagaagacaaagtcattgctgtatatgatttaggtggtggaacttttgatatttctatcctggaaattcagaaaggagtatttgaggtgaaatccacaaatggggataccttcttaggtggggaagactttgaccaggccttgctacggcacattgtgaaggagttcaagagagagacaggggttgatttgactaaagacaacatggcacttcagagggtacgggaagctgctgaaaaggctaaatgtgaactctcctcatctgtgcagactgacatcaatttgccctatcttacaatggattcttctggacccaagcatttgaatatgaagttgacccgtgctcaatttgaagggattgtcactgatctaatcagaaggactatcgctccatgccaaaaagctatgcaagatgcagaagtcagcaagagtgacataggagaagtgattcttgtgggtggcatgactaggatgcccaaggttcagcagactgtacaggatctttttggcagagccccaagtaaagctgtcaatcctgatgaggctgtggccattggagctgccattcagggaggtgtgttggccggcgatgtcacggatgtgctgctccttgatgtcactcccctgtctctgggtattgaaactctaggaggtgtctttaccaaacttattaataggaataccactattccaaccaagaagagccaggtattctctactgccgctgatggtcaaacgcaagtggaaattaaagtgtgtcagggtgaaagagagatggctggagacaacaaactccttggacagtttactttgattggaattccaccagcccctcgtggagttcctcagattgaagttacatttgacattgatgccaatgggatagtacatgtttctgctaaagataaaggcacaggacgtgagcagcagattgtaatccagtcttctggtggattaagcaaagatgatattgaaaatatggttaaaaatgcagagaaatatgctgaagaagaccggcgaaagaaggaacgagttgaagcagttaatatggctgaaggaatcattcacgacacagaaaccaagatggaagaattcaaggaccaattacctgctgatgagtgcaacaagctgaaagaagagatttccaaaatgagggagctcctggctagaaaagacagcgaaacaggagaaaatattagacaggcagcatcctctcttcagcaggcatcactgaagctgttcgaaatggcatacaaaaagatggcatctgagcgagaaggctctggaagttctggcactggggaacaaaaggaagatcaaaaggaggaaaaacagtaataatagcagaaattttgaagccagaaggacaacatatgaagcttaggagtgaagagacttcctgagcagaaatgggcgaacttcagtctttttactgtgtttttgcagtattctatatataatttccttaatttgtaaatttagtgaccattagctagtgatcatttaatggacagtgattctaacagtataaagttcacaatattct

SEQ ID NO: 143784 - DNA, 2733 bp, Artificial Sequence
  derived and/or modified sequence
ggagcgcttgtttgctgcctcgtactcctccatttatccgccatgataagtgccagccgagctgcagcagcccgtctcgtgggcgccgcagcctcccggggccctacggccgcccgccaccaggatagctggaatggccttagtcatgaggcttttagacttgtttcaaggcgggattatgcatcagaagcaatcaagggagcagttgttggtattgatttgggtactaccaactcctgcgtggcagttatggaaggtaaacaagcaaaggtgctggagaatgccgaaggtgccagaaccaccccttcagttgtggcctttacagcagatggtgagcgacttgttggaatgccggccaagcgacaggctgtcaccaacccaaacaatacattttatgctaccaagcgtctcattggccggcgatatgatgatcctgaagtacagaaagacattaaaaatgttccctttaaaattgtccgtgcctccaatggtgatgcctgtgttgatgaagatgaaagagactgcagaaaattacttggggcacacagcaaaaaatgctgtgatcacagtcccagcttatttcaatgactcgcagagacaggccactaaagatgctggccagatatctggactgaatgtgcttcgggtgattaatgagcccacagctgctgctcttgcctatggtctagacaaatcagaagacaaagtcattgctgtatatgatttaggtggtggaacttttgatatttctatcctggaaattcagaaaggagtatttgaggtgaaatccacaaatggggataccttcttaggtggggaagactttgaccaggccttgctacggcacattgtgaaggagttcaagagagagacaggggttgatttgactaaagacaacatggcacttcagagggtacgggaagctgctgaaaaggctaaatgtgaactctcctcatctgtgcagactgacatcaatttgccctatcttacaatggattcttctggacccaagcatttgaatatgaagttgacccgtgctcaatttgaagggattgtcactgatctaatcagaaggactatcgctccatgccaaaaagctatgcaagatgcagaagtcagcaagagtgacataggagaagtgattcttgtgggtggcatgactaggatgcccaaggttcagcagactgtacaggatctttttggcagagccccaagtaaagctgtcaatcctgatgaggctgtggccattggagctgccattcagggaggtgtgttggccggcgatgtcacggatgtgctgctccttgatgtcactcccctgtctctgggtattgaaactctaggaggtgtctttaccaaacttattaataggaataccactattccaaccaagaagagccaggtattctctactgccgctgatggtcaaacgcaagtggaaattaaagtgtgtcagggtgaaagagagatggctggagacaacaaactccttggacagtttactttgattggaattccaccagcccctcgtggagttcctcagattgaagttacatttgacattgatgccaatgggatagtacatgtttctgctaaagataaaggcacaggacgtgagcagcagattgtaatccagtcttctggtggattaagcaaagatgatattgaaaatatggttaaaaatgcagagaaatatgctgaagaagaccggcgaaagaaggaacgagttgaagcagttaatatggctgaaggaatcattcacgacacagaaaccaagatggaagaattcaaggaccaattacctgctgatgagtgcaacaagctgaaagaagagatttccaaaatgagggagctcctggctagaaaagacagcgaaacaggagaaaatattagacaggcagcatcctctcttcagcaggcatcactgaagctgttcgaaatggcatacaaaaagatggcatctgagcgagaaggctctggaagttctggcactggggaacaaaaggaagatcaaaaggaggaaaaacagtaataatagcagaaattttgaagccagaaggacaacatatgaagcttaggagtgaagagacttcctgagcagaaatgggcgaacttcagtctttttactgtgtttttgcagtattctatatataatttccttaatttgtaaatttagtgaccattagctagtgatcatttaatggacagtgattctaacagtataaagttcacaatattctatgtccctagcctgtcatttttcagctgcatgtaaaaggaggtaggatgaattgatcattataaagatttaactattttatgctgaagtgaccatattttcaaggggtgaaaccatctcgcacacagcaatgaaggtagtcatccatagacttgaaatgagaccacatatggggatgagatccttctagttagcctagtactgctgtactggcctgtatgtacatggggtccttcaactgaggccttgcaagtcaagctggctgtgccatgtttgtagatggggcagaggaatctagaacaatgggaaacttagctatttatattaggtacagctattaaaacaaggtaggaatgaggctagacctttaacttccctaaggcatacttttctagctaccttctgccctgtgtctggcacctacatccttgatgattgttctcttacccattctggaatttttttttttttaaataaatacagaaagcatcttg

SEQ ID NO: 143785 - DNA, 2040 bp, Artificial Sequence
  derived and/or modified sequence
atgatcagcgccagcagagctgctgctgcccggctggtgggcgccgccgccagccggggccccacagctgcccggcaccaggacagctggaatggcctgagccatgaggccttccggctggtgtccagaagagattatgccagcgaggccatcaagggagctgtggtgggcatcgacctgggcaccaccaacagctgtgtggccgtgatggagggcaagcaggccaaggtgctggagaatgctgagggcgcccggaccaccccatctgtggtggccttcaccgcagatggagagcggctggtgggcatgcctgccaagaggcaggccgtgaccaaccccaacaacaccttctacgccaccaagaggctcatcggccgccgctatgatgatcctgaggtgcagaaggacatcaagaatgtgcccttcaagatcgtgcgggccagcaatggagatgcctgggtggaggcccacggcaagctgtacagccccagccagatcggggcctttgtgctgatgaagatgaaggagacagctgagaactacctgggccacacagccaagaatgctgtgatcaccgtgcctgcctacttcaatgacagccagaggcaggccaccaaggatgctggccagatcagcggcctgaatgtgctgcgggtcatcaatgagcccacagctgctgccctggcctacggcctggacaagtctgaggacaaggtgattgctgtgtatgacctgggcggcggcacctttgacatcagcatcctggagatccagaagggcgtgtttgaggtgaagagcaccaacggggacaccttcctgggcggggaggactttgaccaggccctgctgcggcacatcgtgaaggagttcaagcgggagaccggggtggacctgaccaaggacaacatggccctgcagagggtgcgggaggccgctgagaaggccaagtgtgagctgagcagctctgtgcagacagacatcaacctgccctacctgaccatggacagcagcggccccaagcacctgaacatgaagctgacccgggcccagtttgagggcatcgtgacagacctgatccggaggaccatcgccccctgccagaaggccatgcaggatgctgaggtgtccaagagtgacatcggggaggtgatcctggtgggcggcatgaccaggatgcccaaggtgcagcagacagtgcaggacctgtttggccgggcccccagcaaggctgtgaacccagatgaggccgtggccatcggggccgccatccagggcggcgtgctggccggagatgtgacagatgtgctgctgctggatgtgacccccctgagcctgggcatcgagaccctgggcggcgtcttcaccaagctgatcaacagaaacaccaccatccccaccaagaagagccaggtgttcagcacagctgctgatggccagacccaggtggagatcaaggtgtgccagggcgagcgggagatggccggggacaacaagctgctgggccagttcaccctcatcggcatccccccagccccccggggcgtgccccagatcgaggtgacctttgatattgatgccaatggaattgtgcacgtgtctgccaaggacaagggcaccggccgggagcagcagatcgtcatccagagcagcggcggcctgagcaaggatgacatcgagaacatggtgaagaatgctgagaagtatgcagaagaagatagaaggaagaaggagcgggtggaggccgtgaacatggccgagggcatcatccatgacacagagaccaagatggaggagttcaaggaccagctgcctgcagatgagtgcaacaagctgaaggaggagatcagcaagatgagggagctgctggccaggaaggacagcgagactggagagaacatccggcaggccgccagcagcctgcagcaggccagcctgaagctgtttgagatggcctacaagaagatggccagcgagcgggagggcagcggcagcagcggcactggagagcagaaggaggaccagaaggaggagaagcagtag

SEQ ID NO: 143786 - DNA, 1998 bp, Artificial Sequence
  derived and/or modified sequence
atgatcagcgccagcagagctgctgctgcccggcaccaggacagctggaatggcctgagccatgaggccttccggctggtgtccagaagagattatgccagcgaggccatcaagggagctgtggtgggcatcgacctgggcaccaccaacagctgtgtggccgtgatggagggcaagcaggccaaggtgctggagaatgctgagggcgcccggaccaccccatctgtggtggccttcaccgcagatggagagcggctggtgggcatgcctgccaagaggcaggccgtgaccaaccccaacaacaccttctacgccaccaagaggctcatcggccgccgctatgatgatcctgaggtgcagaaggacatcaagaatgtgcccttcaagatcgtgcgggccagcaatggagatgcctgggtggaggcccacggcaagctgtacagccccagccagatcggggcctttgtgctgatgaagatgaaggagacagctgagaactacctgggccacacagccaagaatgctgtgatcaccgtgcctgcctacttcaatgacagccagaggcaggccaccaaggatgctggccagatcagcggcctgaatgtgctgcgggtcatcaatgagcccacagctgctgccctggcctacggcctggacaagtctgaggacaaggtgattgctgtgtatgacctgggcggcggcacctttgacatcagcatcctggagatccagaagggcgtgtttgaggtgaagagcaccaacggggacaccttcctgggcggggaggactttgaccaggccctgctgcggcacatcgtgaaggagttcaagcgggagaccggggtggacctgaccaaggacaacatggccctgcagagggtgcgggaggccgctgagaaggccaagtgtgagctgagcagctctgtgcagacagacatcaacctgccctacctgaccatggacagcagcggccccaagcacctgaacatgaagctgacccgggcccagtttgagggcatcgtgacagacctgatccggaggaccatcgccccctgccagaaggccatgcaggatgctgaggtgtccaagagtgacatcggggaggtgatcctggtgggcggcatgaccaggatgcccaaggtgcagcagacagtgcaggacctgtttggccgggcccccagcaaggctgtgaacccagatgaggccgtggccatcggggccgccatccagggcggcgtgctggccggagatgtgacagatgtgctgctgctggatgtgacccccctgagcctgggcatcgagaccctgggcggcgtcttcaccaagctgatcaacagaaacaccaccatccccaccaagaagagccaggtgttcagcacagctgctgatggccagacccaggtggagatcaaggtgtgccagggcgagcgggagatggccggggacaacaagctgctgggccagttcaccctcatcggcatccccccagccccccggggcgtgccccagatcgaggtgacctttgatattgatgccaatggaattgtgcacgtgtctgccaaggacaagggcaccggccgggagcagcagatcgtcatccagagcagcggcggcctgagcaaggatgacatcgagaacatggtgaagaatgctgagaagtatgcagaagaagatagaaggaagaaggagcgggtggaggccgtgaacatggccgagggcatcatccatgacacagagaccaagatggaggagttcaaggaccagctgcctgcagatgagtgcaacaagctgaaggaggagatcagcaagatgagggagctgctggccaggaaggacagcgagactggagagaacatccggcaggccgccagcagcctgcagcaggccagcctgaagctgtttgagatggcctacaagaagatggccagcgagcgggagggcagcggcagcagcggcactggagagcagaaggaggaccagaaggaggagaagcagtag

SEQ ID NO: 143787 - DNA, 1899 bp, Artificial Sequence
  derived and/or modified sequence
atggccctggtgatgaggctgctggacctcttccagggcggcatcatgcaccagaagcagagccgggagcagctgctggtgctgatctgggtgctgcccaccccagcctggcagctgtggaaggtgaacaagcagcgctgctggaggatgcccaaggtgcctgagccccccctgcagctgtggcccctgcagcagatggtgtctgacctgctggagtgccggcccagcgaccggctgagccccacccagaccatccacttcatgctgcccagcgtgtccctggccggggacatgatgatcctgaagtacaggaagaccctgaagatgttccccctgaagctgtctgtgccccccatggtgatgcctgtgctgatgaagatgaaggagacagctgagaactacctgggccacacagccaagaatgctgtgatcaccgtgcctgcctacttcaatgacagccagaggcaggccaccaaggatgctggccagatcagcggcctgaatgtgctgcgggtcatcaatgagcccacagctgctgccctggcctacggcctggacaagtctgaggacaaggtgattgctgtgtatgacctgggcggcggcacctttgacatcagcatcctggagatccagaagggcgtgtttgaggtgaagagcaccaatggagacaccttcctgggcggagaagattttgaccaggccctgctgcggcacatcgtgaaggagttcaagcgggagactggagtggacctgaccaaggacaacatggccctgcagagggtgcgggaggccgctgagaaggccaagtgtgagctgagcagctctgtgcagacagacatcaacctgccctacctgaccatggacagcagcggccccaagcacctgaacatgaagctgacccgggcccagtttgagggcatcgtgacagacctgatccggaggaccatcgccccctgccagaaggccatgcaggatgctgaggtgtccaagagtgacattggagaggtgatcctggtgggcggcatgaccaggatgcccaaggtgcagcagacagtgcaggacctgtttggccgggcccccagcaaggctgtgaacccagatgaagctgtggccatcggggccgccatccagggcggcgtgctggccggagatgtgacagatgtgctgctgctggatgtgacccccctgagcctgggcatcgagaccctgggcggcgtcttcaccaagctgatcaacagaaacaccaccatccccaccaagaagagccaggtgttcagcacagctgctgatggccagacccaggtggagatcaaggtgtgccagggcgagcgggagatggccggggacaacaagctgctgggccagttcaccctgattggcatccccccagccccccggggcgtgccccagatcgaggtgacctttgatattgatgccaacggcatcgtgcacgtgtctgccaaggacaagggcaccggccgggagcagcagatcgtcatccagagcagcggcggcctgagcaaggatgacatcgagaacatggtgaagaatgctgagaagtatgcagaggaggacaggaggaagaaggagcgggtggaggccgtgaacatggccgagggcatcatccatgacacagagaccaagatggaggagttcaaggaccagctgcctgcagatgagtgcaacaagctgaaggaggagatcagcaagatgagggagctgctggccaggaaggacagcgagaccggggagaacatccggcaggccgccagcagcctgcagcaggccagcctgaagctgtttgagatggcctacaagaagatggccagcgagcgggagggcagcggcagcagcggcaccggggagcagaaggaggaccagaaggaggagaagcagtag

SEQ ID NO: 143788 - DNA, 2040 bp, Artificial Sequence
  derived and/or modified sequence
atgatcagcgccagccgggccgccgccgcccggctggtgggcgccgcagcctcccgaggccctacagcagcgaggcatcaagatagttggaacggtttatctcacgaggcctttaggctggtctctagaagggattacgccagcgaggccatcaagggcgccgtggtgggaatcgacctgggtactacaaacagctgcgtcgcagtcatggaaggcaaacaggccaaggtgctcgagaacgccgagggcgcacgaactacaccctccgtggtcgcttttacggcagatggagagcggttagtgggaatgccagctaaacgacaggcagtgacaaatcctaataacaccttttatgcgacaaaaaggctgatagggaggcgctatgatgaccctgaggtgcagaaagatattaagaatgtgcctttcaagattgtgcgagcttctaatggcgatgcttgggtcgaggcacacgggaagctttactcgccttcacagatcggagcatttgtgctaatgaaaatgaaagagacagcagagaattatctgggccacacagctaaaaatgctgtaataactgtccctgcctacttcaatgattcgcaaaggcaagccactaaggacgcgggccagatcagcggactaaatgtactgcgcgttatcaatgagcccactgccgccgctctcgcttacggactagacaaaagcgaggacaaagtgatcgctgtttacgacctaggcggtgggacattcgatatcagtatcctggaaattcaaaagggcgtcttcgaggtcaaatcaactaacggggacaccttccttgggggagaagactttgaccaggcgttgcttcgccatatagtaaaagaattcaagcgtgagaccggagttgaccttaccaaggacaatatggctctacagcgcgtccgcgaagcagccgagaaggccaaatgcgaactctccagctcagtgcaaaccgatattaatctgccctaccttaccatggactcctccgggcccaagcacctgaacatgaaactgacccgagcccagtttgaagggattgtcaccgatctgataagacgcactatcgctccttgtcagaaggccatgcaggacgccgaggtgtcgaagagtgacatcggtgaagtcatcttagtgggaggaatgaccaggatgccaaaagtacaacaaaccgtgcaagacctcttcggcagagccccaagcaaggcggtcaaccctgatgaggccgtcgccatcggagcagccattcaaggaggggtcctcgccggcgatgtcacagatgtcctattgctggacgtgacgccactgtcactgggaatcgaaaccttaggaggggtgtttactaagcttattaatagaaatacaaccattccgactaagaagtcacaggttttcagcaccgccgccgatggacaaactcaggtggaaattaaagtgtgccaaggagaacgagagatggcaggcgataacaagcttctcggtcaattcactcttatcggcattccgccagcccctagaggggtgccacagattgaggttactttcgacattgacgccaatgggatcgtgcatgtgagtgcaaaagataagggaacaggacgggaacagcagatcgttatacagtcttctggcgggctttcgaaggacgacatagagaacatggttaagaacgctgaaaagtacgccgaagaagaccggagaaagaaggagagagtggaggccgtcaacatggcggaaggaatcatacacgatacggagacaaagatggaggagtttaaagaccaacttcccgcggacgagtgcaacaaattgaaagaagaaatttccaaaatgagggaactactcgccaggaaggatagcgagacgggggagaatatccggcaggccgcctccagcctgcaacaggcatcactgaagctgttcgaaatggcctacaagaagatggctagcgagagagaagggtccggaagcagcggtacaggcgaacagaaagaagatcaaaaagaggaaaagcaatag

SEQ ID NO: 143789 - DNA, 1998 bp, Artificial Sequence
  derived and/or modified sequence
atgatcagcgccagccgggccgccgccgcccggcaccaggacagctggaacgggctctctcacgaggccttcagactcgtctcgaggcgcgattatgcctccgaagccataaaaggcgctgtcgtgggcatagacttgggtacaactaatagctgtgtggccgtaatggagggcaaacaggcaaaagtgctggaaaacgccgagggtgcacgaacaacacctagcgtggtcgcctttactgctgatggcgaaagattggttgggatgccagcaaaacgacaagcagttactaaccccaataacacattctatgctacaaaaaggctgatcggcaggcgctatgacgaccctgaggtgcagaaagatattaagaacgtaccattcaaaattgtccgcgcgtccaatggtgatgcctgggtagaggcacacgggaagctatactcgcccagccagataggtgctttcgtactcatgaagatgaaagagaccgcagagaactacctgggacacacagcaaaaaacgctgttatcacagtgccagcctatttcaatgacagccaacgacaggccacgaaggacgccgggcagatatcaggcttgaatgtactgcgggtgatcaatgaaccaacagctgcagcactcgcctacggactggacaaatcagaggataaggtcattgcggtgtacgacctgggtggtgggaccttcgatatttcaattctggaaatccagaaaggcgttttcgaggtaaaatccaccaatggcgatacattcttgggtggagaggattttgatcaggcactgctccgccacatagtgaaggaattcaagagagagacaggagttgatcttacaaaggacaatatggccctccaacgcgttagagaagccgctgagaaggcgaagtgcgaattatcctcatcagtgcagacagatattaaccttccctatctaaccatggacagcagtggccccaagcatctaaacatgaagctaacacgtgcccagttcgagggcatcgttacagatctgatccggagaacaattgcaccttgccaaaaggctatgcaggatgctgaggtgtccaaatccgatattggggaagttattctggtcggaggaatgacaagaatgcctaaggtccaacagacagtacaggacctgtttgggcgagccccgtccaaggccgtgaatccagacgaggcggtcgcaatcggggcagcgattcagggcggagtgcttgctggagacgttaccgacgtcctactgcttgacgttacccctttatctctcggcattgaaacactagggggagtctttactaaactgattaatcggaatactacaatccctaccaagaagtcccaggttttcagtacggctgctgatggccagacccaggttgagattaaagtttgtcagggagaacgggagatggccggcgataataagctcctgggacaattcactctgatcgggattccacccgcccctaggggagtacctcagatcgaggtgactttcgacattgatgcaaatggcattgtacacgtgtcagcgaaagacaaaggaaccggtcgagaacagcaaatcgtgatccaatcatccggcggcctgtccaaagacgacattgagaatatggtgaagaatgctgagaaatacgctgaggaagatagacggaagaaggagagagtggaagcagtgaatatggcggagggcataatacacgacaccgaaaccaagatggaggaattcaaagaccaactgcctgctgacgagtgcaacaaacttaaagaggagatttccaagatgagggagttactcgcaagaaaggacagtgagaccggtgagaatatccgacaagcggcaagtagcctgcagcaggcgagcctgaagctgtttgaaatggcctataagaagatggcttctgagcgggaaggctcaggctcgtcagggacaggcgagcagaaagaggaccagaaagaggagaagcagtag

SEQ ID NO: 143790 - DNA, 1899 bp, Artificial Sequence
  derived and/or modified sequence
atggccctggtgatgcggctgctggacctgttccagggcggcatcatgcaccagaaacaaagtcgggagcagcttctcgtcttaatctgggtgcttcccacccctgcctggcagctgtggaaggtcaacaagcaacggtgttggcgcatgcctaaagtcccagagccccccctgcagctttggcccttacagcagatggtatcagaccttctcgagtgcagacccagcgatcgcttgtcccccacccaaaccattcattttatgttaccatcggtctcccttgccggagatatgatgatcctgaaatacaggaaaactctgaagatgttccctttaaagctcagcgtgccgcccatggtgatgcccgtgctgatgaagatgaaagagacagccgaaaactacttagggcatacagccaaaaacgcggtgatcactgtgcctgcctatttcaacgattcccaacgacaagccaccaaggatgcgggccagattagcgggcttaacgttctcagggtgataaacgagccgacagcagctgctttggcctatgggttggacaagtccgaagataaggtgattgccgtgtacgacctcgggggaggaacttttgatatttcaatcctcgagatccagaaaggagttttcgaggtcaaatccactaatggagacacgtttttgggcggggaggactttgatcaagctctgctcaggcacatcgtgaaggagtttaagcgcgaaacaggcgtggaccttacaaaggacaatatggcactccagagggtccgggaagcagcagagaaggccaaatgtgaactctcatcatcagtccagacggacattaacctgccctatctgactatggatagttcggggccgaaacacctcaatatgaagttaacacgtgctcagttcgagggtatcgtgactgacttgatacggcgcaccattgcgccatgccaaaaggccatgcaggatgcggaggtgtccaaatccgacatcggagaggtcatcctggttggaggaatgacaaggatgccaaaagttcagcagaccgttcaggacctcttcgggagggctcccagcaaagcggttaaccccgacgaagcggtggccattggcgccgcaatccaaggcggggtgcttgctggcgacgttactgacgttcttttgttagatgtcacaccccttagcctaggaatcgagaccctaggcggcgtattcaccaagcttatcaacagaaacacgactatacccaccaagaagagtcaggtttttagcaccgccgcggatggccagactcaggtggagatcaaggtctgccagggcgagcgcgaaatggcaggggataataagctgctaggacagttcacactgataggtataccccccgctccccgtggcgtgccccagatagaggtgactttcgacatcgacgcaaacggcatcgtccatgtctccgcaaaagataaggggaccggccgggagcaacagatcgtgatccaatccagcggcggcttgtctaaggacgatatcgaaaatatggtcaagaacgcagagaagtacgccgaggaagatagacgtaagaaggaacgtgttgaggcggtgaatatggccgagggcattattcacgacacagagaccaagatggaggaatttaaggatcagcttcccgccgacgaatgtaacaagcttaaagaagagatctctaagatgagagagctgttagcacgaaaagactccgaaaccggagaaaatatccggcaagccgctagctctctgcagcaagcttctcttaagctgttcgaaatggcatataaaaagatggctagcgagcgggagggctccggcagcagcggtaccggtgagcagaaagaagatcagaaggaggagaaacagtag

SEQ ID NO: 143791 - DNA, 2040 bp, Artificial Sequence
  derived and/or modified sequence
atgatttctgcaagtcgggcagctgctgcaaggctcgtgggagccgctgcctctcggggacccaccgctgccagacatcaagatagctggaacggcctcagccacgaagcattccgcttggtttctaggcgtgactacgccagcgaagccataaaaggagcggtagtgggtatagaccttggaaccaccaactcgtgtgtggccgtgatggagggcaagcaggccaaggtgcttgaaaatgcagaaggagctcggactactccatccgtggttgcgttcaccgcagacggcgagaggctggtcgggatgcccgctaaacggcaggccgttactaacccaaacaacaccttctacgcgaccaagcgacttattggcagaagatacgacgatcccgaggtccaaaaggacatcaagaacgttcctttcaaaatcgtgcgcgcatctaacggagacgcgtgggtggaagcacacgggaaactgtattccccatcacaaatcggcgcattcgtgctgatgaaaatgaaagaaactgccgagaattatctcggccacactgctaaaaatgccgtgatcaccgttcccgcatatttcaacgattcgcagcggcaggcaacaaaggacgccggacaaatctccggattgaacgtacttcgcgtaatcaacgagcctacagccgcagcactggcttatggattggataagagcgaagacaaagtgattgcagtgtatgatctggggggaggaacctttgatatatctattttggaaattcaaaagggagtgttcgaagtcaagtccactaatggtgatactttcctgggcggtgaagatttcgatcaggccctgcttcgccatatagtcaaggagtttaaaagagaaacgggcgtggatctaaccaaggacaacatggcattacagcgagttagagaggccgcagaaaaagcaaagtgcgaactcagctctagtgtgcagaccgatatcaacctgccatatttaactatggattcatctgggcctaagcacctgaatatgaagctgacacgcgctcaattcgaagggatcgtgacagatcttattcgacggaccatcgcgccatgccagaaagcaatgcaggacgccgaagtgagcaaatcagacattggggaggttatccttgtgggaggcatgacaaggatgcccaaggttcagcagactgttcaggacctgttcggtagagctccctccaaggccgtgaacccagacgaagcggtcgctattggggctgccattcagggaggtgtgctcgccggagatgttaccgacgtgcttctgctagatgtaacccccctaagtctgggtatcgagactttggggggagtctttacaaaattgattaaccgcaacaccacaatacctacgaagaagtcgcaagttttcagtacagccgcagatggacaaactcaagtggagatcaaggtgtgccagggagagagggagatggcaggcgacaataaactgttagggcagttcacgctaattggcattcccccagctcctaggggcgtgccacaaatcgaggtcacttttgacattgacgctaacggaatagtccatgtgtcagctaaagataaaggcaccggtcgcgagcagcagatagtgattcagtccagcggcggtctctccaaagatgatatcgaaaatatggttaagaatgcggaaaagtacgctgaagaagaccgaaggaagaaagaacgtgtggaagccgtaaacatggctgagggaattatccacgataccgagacgaaaatggaggagttcaaagatcagcttccggctgatgaatgcaacaaacttaaagaggagatctcgaagatgcgtgagctgcttgcaagaaaggacagcgagaccggggaaaacattcggcaggctgcctcgtccctgcagcaggcttccctgaaactcttcgaaatggcctataagaagatggcatcagaaagagagggctcagggtccagcggcactggggagcagaaagaagaccagaaggaagagaagcagtag

SEQ ID NO: 143792 - DNA, 1998 bp, Artificial Sequence
  derived and/or modified sequence
atgatctccgctagtcgcgcagcagcagctagacaccaggactcgtggaatggtctgtcccacgaagcattccggcttgtgagccggagagactacgccagcgaagcaattaaaggagccgtggtgggaatcgatttgggcaccaccaatagctgtgttgctgtgatggagggtaaacaggccaaggttttagaaaacgcagagggggcacgtaccaccccaagtgtggtggccttcaccgcagacggagagcgcttggttggaatgcctgctaagaggcaggcagtaacaaaccctaacaacactttctacgctaccaaacgtcttataggccgacgttatgacgatccggaagttcagaaggatataaagaacgttcccttcaaaatagttcgcgcttcaaacggggacgcatgggtggaagcgcacgggaaattatactccccatcacagataggggcattcgttctcatgaagatgaaagagacggccgagaactatttaggccatactgccaaaaatgctgtaatcaccgtgcctgcgtacttcaacgacagccagcgtcaggcgaccaaggatgctgggcagatctctggtctgaacgtgctgagagtgattaatgaacccacggctgccgctctggcctacggtcttgacaagtcagaggacaaagtaatagcagtatacgatctcggcggaggcacatttgacatcagcattctggagatacagaaaggcgtttttgaggtgaagagtacgaatggcgacaccttcctggggggagaagacttcgatcaagcacttctgcggcatatcgtaaaagaatttaagcgggagacgggcgtcgacctgaccaaggataatatggcactacaaagggtccgagaagcagcagaaaaggccaagtgcgagctcagtagctccgtgcagacggacatcaacctgccatatctcaccatggactcaagcggcccaaagcacctaaatatgaagttgacgcgggctcagtttgaggggattgtgactgatctgattaggcggactattgcaccatgtcagaaggcaatgcaggacgcagaagtgtccaagagcgacattggagaggtcattctggttggcggaatgacccgcatgcctaaagtgcaacagaccgtgcaggacctgttcggacgcgctcctagtaaggcagtgaaccccgacgaggctgttgccattggggcagccatccaaggcggagtgctcgccggagacgtaaccgacgtgttgctgcttgacgtgacccccctctccctgggaatcgagacactcggcggagtattcaccaagcttatcaaccgcaacactaccatccctacaaaaaagagtcaggtcttttctactgctgccgacgggcagacacaggtggagattaaggtgtgtcagggcgaaagagagatggccggagataacaagctgctgggccagttcactctcattggaatccccccagctccccgtggggtcccacagattgaggtcacctttgacatcgacgctaacgggattgttcacgtatccgccaaggacaagggcacagggagggagcagcagatcgtgatccagtcttcgggcggtctcagcaaagacgacattgagaacatggtgaaaaatgccgagaaatacgccgaggaggatcgccgtaaaaaagagcgcgtcgaggctgttaacatggctgaaggtatcatccacgatacagaaaccaaaatggaggagtttaaggaccagttgcccgctgacgagtgtaacaaactgaaggaggagatctctaagatgagggagctgctggcccgtaaagattcagagacaggagagaatatcaggcaggctgctagcagccttcagcaagcttcactgaaactgttcgagatggcctataagaagatggccagcgaacgggaaggatccggcagcagcggcaccggagaacaaaaggaggaccaaaaggaagaaaaacagtag

SEQ ID NO: 143793 - DNA, 1899 bp, Artificial Sequence
  derived and/or modified sequence
atggcattggttatgaggcttctggacttgttccaggggggtataatgcaccagaagcagagtagagaacaactgcttgtgttgatctgggtgctgccaacccctgcctggcagctttggaaggtgaacaaacagcgttgctggagaatgcctaaagtacccgagcccccactccagctttggccactgcaacagatggtgtcagatctgttggaatgcaggcctagcgaccggctgtccccgacccaaacgattcacttcatgctgccctctgttagcctggctggggatatgatgattttgaagtataggaagaccctcaagatgtttcccctgaaactatcagtcccaccaatggtaatgccagtccttatgaagatgaaagaaaccgcagagaactacctggggcacaccgctaagaatgccgttatcacagtccctgcctattttaatgattcccaacgccaggcgacgaaagatgcaggacagatatctggcttgaacgtgttacgggtaataaacgagcctactgctgccgcactggcatacggattagataagtctgaagacaaggtcatcgccgtgtacgatctgggaggcggtacattcgacatttccatcctggaaatacagaaaggtgtgtttgaggtcaagtctaccaacggggataccttcctggggggtgaggattttgatcaggcgctccttcgtcatatcgtgaaggaattcaagcgcgagaccggggtggatctgaccaaagacaacatggctctgcagagagttagggaggccgctgagaaggcaaaatgtgagctaagctccagcgtgcaaaccgatatcaatttgccttaccttactatggatagttccggacccaagcacctgaacatgaaattgacacgagcccagtttgaagggatcgtcacggacctaattcggaggactatcgctccctgccagaaagctatgcaggacgcggaagtgagcaaaagcgacatcggggaagtgatcctggtgggcggaatgacaagaatgcctaaagttcagcaaaccgtgcaagatctctttggtcgcgcaccgtccaaagccgtaaacccagatgaggcagtggctattggagccgctattcagggaggcgtgctggccggtgacgtgactgacgtgctgctactagacgtcacaccactcagcctggggattgaaacacttggtggggtctttactaagctcattaatcgaaatacgacgatcccgaccaaaaaatcccaggtattctccacagcagctgacggccagacccaagttgagatcaaggtgtgccagggagaaagggagatggcgggtgataataaactcttggggcagtttactctcatcgggatccccccagcaccaaggggcgttccgcagattgaggtaaccttcgacatcgacgccaatgggattgttcacgtgagcgccaaagataaggggactggccgtgaacaacagatagtgatccagagctcgggaggattgtccaaggatgatatcgagaatatggtaaaaaacgccgagaaatacgctgaagaggatagacggaagaaggaacgagtggaggcagtaaatatggcagaaggtatcatccacgacactgagaccaagatggaggaattcaaagatcagttgccagctgacgaatgcaataaactcaaggaagaaatttctaagatgagggagctcctggcgaggaaagactcagaaaccggcgaaaacatacggcaggccgcaagctcactgcagcaagctagcctgaagctcttcgaaatggcatataagaagatggcgagcgaaagagagggttctggcagctccggcacaggagagcagaaagaggaccagaaagaggaaaagcaatag

SEQ ID NO: 143794 - DNA, 2040 bp, Artificial Sequence
  derived and/or modified sequence
atgatcagcgccagcagagccgccgccgccagactggtgggcgccgccgccagcagaggccccaccgccgccagacaccaggacagctggaacggcctgagccacgaggccttcagactggtgagcagaagagactacgccagcgaggccatcaagggcgccgtggtgggcatcgacctgggcaccaccaacagctgcgtggccgtgatggagggcaagcaggccaaggtgctggagaacgccgagggcgccagaaccacccccagcgtggtggccttcaccgccgacggcgagagactggtgggcatgcccgccaagagacaggccgtgaccaaccccaacaacaccttctacgccaccaagagactgatcggcagaagatacgacgaccccgaggtgcagaaggacatcaagaacgtgcccttcaagatcgtgagagccagcaacggcgacgcctgggtggaggcccacggcaagctgtacagccccagccagatcggcgccttcgtgctgatgaagatgaaggagaccgccgagaactacctgggccacaccgccaagaacgccgtgatcaccgtgcccgcctacttcaacgacagccagagacaggccaccaaggacgccggccagatcagcggcctgaacgtgctgagagtgatcaacgagcccaccgccgccgccctggcctacggcctggacaagagcgaggacaaggtgatcgccgtgtacgacctgggcggcggcaccttcgacatcagcatcctggagatccagaagggcgtgttcgaggtgaagagcaccaacggcgacaccttcctgggcggcgaggacttcgaccaggccctgctgagacacatcgtgaaggagttcaagagagagaccggcgtggacctgaccaaggacaacatggccctgcagagagtgagagaggccgccgagaaggccaagtgcgagctgagcagcagcgtgcagaccgacatcaacctgccctacctgaccatggacagcagcggccccaagcacctgaacatgaagctgaccagagcccagttcgagggcatcgtgaccgacctgatcagaagaaccatcgccccctgccagaaggccatgcaggacgccgaggtgagcaagagcgacatcggcgaggtgatcctggtgggcggcatgaccagaatgcccaaggtgcagcagaccgtgcaggacctgttcggcagagcccccagcaaggccgtgaaccccgacgaggccgtggccatcggcgccgccatccagggcggcgtgctggccggcgacgtgaccgacgtgctgctgctggacgtgacccccctgagcctgggcatcgagaccctgggcggcgtgttcaccaagctgatcaacagaaacaccaccatccccaccaagaagagccaggtgttcagcaccgccgccgacggccagacccaggtggagatcaaggtgtgccagggcgagagagagatggccggcgacaacaagctgctgggccagttcaccctgatcggcatcccccccgcccccagaggcgtgccccagatcgaggtgaccttcgacatcgacgccaacggcatcgtgcacgtgagcgccaaggacaagggcaccggcagagagcagcagatcgtgatccagagcagcggcggcctgagcaaggacgacatcgagaacatggtgaagaacgccgagaagtacgccgaggaggacagaagaaagaaggagagagtggaggccgtgaacatggccgagggcatcatccacgacaccgagaccaagatggaggagttcaaggaccagctgcccgccgacgagtgcaacaagctgaaggaggagatcagcaagatgagagagctgctggccagaaaggacagcgagaccggcgagaacatcagacaggccgccagcagcctgcagcaggccagcctgaagctgttcgagatggcctacaagaagatggccagcgagagagagggcagcggcagcagcggcaccggcgagcagaaggaggaccagaaggaggagaagcagtag

SEQ ID NO: 143795 - DNA, 1998 bp, Artificial Sequence
  derived and/or modified sequence
atgatcagcgccagcagagccgccgccgccagacaccaggacagctggaacggcctgagccacgaggccttcagactggtgagcagaagagactacgccagcgaggccatcaagggcgccgtggtgggcatcgacctgggcaccaccaacagctgcgtggccgtgatggagggcaagcaggccaaggtgctggagaacgccgagggcgccagaaccacccccagcgtggtggccttcaccgccgacggcgagagactggtgggcatgcccgccaagagacaggccgtgaccaaccccaacaacaccttctacgccaccaagagactgatcggcagaagatacgacgaccccgaggtgcagaaggacatcaagaacgtgcccttcaagatcgtgagagccagcaacggcgacgcctgggtggaggcccacggcaagctgtacagccccagccagatcggcgccttcgtgctgatgaagatgaaggagaccgccgagaactacctgggccacaccgccaagaacgccgtgatcaccgtgcccgcctacttcaacgacagccagagacaggccaccaaggacgccggccagatcagcggcctgaacgtgctgagagtgatcaacgagcccaccgccgccgccctggcctacggcctggacaagagcgaggacaaggtgatcgccgtgtacgacctgggcggcggcaccttcgacatcagcatcctggagatccagaagggcgtgttcgaggtgaagagcaccaacggcgacaccttcctgggcggcgaggacttcgaccaggccctgctgagacacatcgtgaaggagttcaagagagagaccggcgtggacctgaccaaggacaacatggccctgcagagagtgagagaggccgccgagaaggccaagtgcgagctgagcagcagcgtgcagaccgacatcaacctgccctacctgaccatggacagcagcggccccaagcacctgaacatgaagctgaccagagcccagttcgagggcatcgtgaccgacctgatcagaagaaccatcgccccctgccagaaggccatgcaggacgccgaggtgagcaagagcgacatcggcgaggtgatcctggtgggcggcatgaccagaatgcccaaggtgcagcagaccgtgcaggacctgttcggcagagcccccagcaaggccgtgaaccccgacgaggccgtggccatcggcgccgccatccagggcggcgtgctggccggcgacgtgaccgacgtgctgctgctggacgtgacccccctgagcctgggcatcgagaccctgggcggcgtgttcaccaagctgatcaacagaaacaccaccatccccaccaagaagagccaggtgttcagcaccgccgccgacggccagacccaggtggagatcaaggtgtgccagggcgagagagagatggccggcgacaacaagctgctgggccagttcaccctgatcggcatcccccccgcccccagaggcgtgccccagatcgaggtgaccttcgacatcgacgccaacggcatcgtgcacgtgagcgccaaggacaagggcaccggcagagagcagcagatcgtgatccagagcagcggcggcctgagcaaggacgacatcgagaacatggtgaagaacgccgagaagtacgccgaggaggacagaagaaagaaggagagagtggaggccgtgaacatggccgagggcatcatccacgacaccgagaccaagatggaggagttcaaggaccagctgcccgccgacgagtgcaacaagctgaaggaggagatcagcaagatgagagagctgctggccagaaaggacagcgagaccggcgagaacatcagacaggccgccagcagcctgcagcaggccagcctgaagctgttcgagatggcctacaagaagatggccagcgagagagagggcagcggcagcagcggcaccggcgagcagaaggaggaccagaaggaggagaagcagtag

SEQ ID NO: 143796 - DNA, 1899 bp, Artificial Sequence
  derived and/or modified sequence
atggccctggtgatgagactgctggacctgttccagggcggcatcatgcaccagaagcagagcagagagcagctgctggtgctgatctgggtgctgcccacccccgcctggcagctgtggaaggtgaacaagcagagatgctggagaatgcccaaggtgcccgagccccccctgcagctgtggcccctgcagcagatggtgagcgacctgctggagtgcagacccagcgacagactgagccccacccagaccatccacttcatgctgcccagcgtgagcctggccggcgacatgatgatcctgaagtacagaaagaccctgaagatgttccccctgaagctgagcgtgccccccatggtgatgcccgtgctgatgaagatgaaggagaccgccgagaactacctgggccacaccgccaagaacgccgtgatcaccgtgcccgcctacttcaacgacagccagagacaggccaccaaggacgccggccagatcagcggcctgaacgtgctgagagtgatcaacgagcccaccgccgccgccctggcctacggcctggacaagagcgaggacaaggtgatcgccgtgtacgacctgggcggcggcaccttcgacatcagcatcctggagatccagaagggcgtgttcgaggtgaagagcaccaacggcgacaccttcctgggcggcgaggacttcgaccaggccctgctgagacacatcgtgaaggagttcaagagagagaccggcgtggacctgaccaaggacaacatggccctgcagagagtgagagaggccgccgagaaggccaagtgcgagctgagcagcagcgtgcagaccgacatcaacctgccctacctgaccatggacagcagcggccccaagcacctgaacatgaagctgaccagagcccagttcgagggcatcgtgaccgacctgatcagaagaaccatcgccccctgccagaaggccatgcaggacgccgaggtgagcaagagcgacatcggcgaggtgatcctggtgggcggcatgaccagaatgcccaaggtgcagcagaccgtgcaggacctgttcggcagagcccccagcaaggccgtgaaccccgacgaggccgtggccatcggcgccgccatccagggcggcgtgctggccggcgacgtgaccgacgtgctgctgctggacgtgacccccctgagcctgggcatcgagaccctgggcggcgtgttcaccaagctgatcaacagaaacaccaccatccccaccaagaagagccaggtgttcagcaccgccgccgacggccagacccaggtggagatcaaggtgtgccagggcgagagagagatggccggcgacaacaagctgctgggccagttcaccctgatcggcatcccccccgcccccagaggcgtgccccagatcgaggtgaccttcgacatcgacgccaacggcatcgtgcacgtgagcgccaaggacaagggcaccggcagagagcagcagatcgtgatccagagcagcggcggcctgagcaaggacgacatcgagaacatggtgaagaacgccgagaagtacgccgaggaggacagaagaaagaaggagagagtggaggccgtgaacatggccgagggcatcatccacgacaccgagaccaagatggaggagttcaaggaccagctgcccgccgacgagtgcaacaagctgaaggaggagatcagcaagatgagagagctgctggccagaaaggacagcgagaccggcgagaacatcagacaggccgccagcagcctgcagcaggccagcctgaagctgttcgagatggcctacaagaagatggccagcgagagagagggcagcggcagcagcggcaccggcgagcagaaggaggaccagaaggaggagaagcagtag

SEQ ID NO: 143797 - protein, 963 aa, Artificial Sequence
  derived and/or modified sequence
MDAPKAGYAFEYLIETLNDSSHKKFFDVSKLGTKYDVLPYSIRVLLEAAVRNCDGFLMKKEDVMNILDWKTKQSNVEVPFFPARVLLQDFTGIPAMVDFAAMREAVKTLGGDPEKVHPACPTDLTVDHSLQIDFSKCAIQNAPNPGGGDLQKAGKLSPVKVQPKKLPCRGQTTCRGSCDSGELGRNSGTFSSQIENTPILCPFHLQPVPEPETVLKNQEVEFGRNRERLQFFKWSSRVFKNVAVIPPGTGMAHQINLEYLSRVVFEEKDLLFPDSVVGTDSHITMVNGLGILGWGVGGIETEAVMLGLPVSLTLPEVVGCELTGSSNPFVTSIDVVLGITKHLRQVGVAGKFVEFFGSGVSQLSIVDRTTIANMCPEYGAILSFFPVDNVTLKHLEHTGFSKAKLESMETYLKAVKLFRNDQNSSGEPEYSQVIQINLNSIVPSVSGPKRPQDRVAVTDMKSDFQACLNEKVGFKGFQIAAEKQKDIVSIHYEGSEYKLSHGSVVIAAVISCTNNCNPSVMLAAGLLAKKAVEAGLRVKPYIRTSLSPGSGMVTHYLSSSGVLPYLSKLGFEIVGYGCSICVGNTAPLSDAVLNAVKQGDLVTCGILSGNKNFEGRLCDCVRANYLASPPLVVAYAIAGTVNIDFQTEPLGTDPTGKNIYLHDIWPSREEVHRVEEEHVILSMFKALKDKIEMGNKRWNSLEAPDSVLFPWDLKSTYIRCPSFFDKLTKEPIALQAIENAHVLLYLGDSVTTDHISPAGSIARNSAAAKYLTNRGLTPREFNSYGARRGNDAVMTRGTFANIKLFNKFIGKPAPKTIHFPSGQTLDVFEAAELYQKEGIPLIILAGKKYGSGNSRDWAAKGPYLLGVKAVLAESYEKIHKDHLIGIGIAPLQFLPGENADSLGLSGRETFSLTFPEELSPGITLNIQTSTGKVFSVIASFEDDVEITLYKHGGLLNFVARKFS

SEQ ID NO: 143798 - DNA, 94 bp, Artificial Sequence
  derived and/or modified sequence
tgagcagggaacaatgcggataaatttcacaaatacaatgttgagcaaaagaaagacacaaaagaatacacacatacacaccatatgggctagg

SEQ ID NO: 143799 - DNA, 2892 bp, Artificial Sequence
  derived and/or modified sequence
atggatgccccgaaggccggttatgcattcgagtatctgatcgaaacgttaaatgactccagtcacaagaagttttttgacgtgtcaaagcttggaacaaagtacgacgtcttgccctatagcatacgcgtcctgcttgaggccgccgtgaggaattgcgatgggtttttgatgaagaaagaggacgtgatgaatatcctggattggaagacaaaacagtccaatgtggaagtgccctttttcccggccagagtccttttacaagatttcaccggtatccctgcaatggtagacttcgcagctatgcgggaggcagtgaagactctggggggtgatccagaaaaagtgcacccagcgtgccccactgatctaacagtggatcactccctccagattgatttctccaagtgtgccattcagaacgctccaaatcccggcggcggggacctccagaaagctggcaagctctcccctgtgaaggtgcagcctaagaaattgccatgccggggacagactacatgcaggggaagctgtgattcaggggagctcgggcgtaactcaggaactttctcctctcaaattgaaaacaccccaatcttatgtccattccacctccagcctgtaccagagccagaaaccgttctgaagaaccaggaagttgaatttggaaggaatcgtgagaggctgcagttcttcaaatggtcatcccgggtgttcaaaaacgtggccgtgattccacccggcacgggcatggcacaccagatcaatctcgagtatctgtcgcgggtggtattcgaggagaaggatctcctgttccccgactctgtggtggggacagactctcacattacaatggtgaatggattaggtatcctgggttggggcgtgggtggcatcgagactgaggcggtgatgctgggcctccccgtctccctcacccttcccgaagttgttggctgtgagctgactggctcatccaacccatttgtgacaagcattgatgtggtgctggggatcactaagcacttaagacaggtgggtgtagcaggtaaatttgtcgaattttttggaagtggtgtgtcccaactgagtatagtggataggaccacgatagccaatatgtgccctgaatacggcgcaatactcagttttttccccgttgataacgtgacgctgaaacacctagaacataccggtttttctaaagccaaactcgaatccatggaaacatacctgaaggctgtaaaactgtttaggaatgatcagaatagtagcggagagccagagtatagccaggtcatccagataaaccttaacagtattgtaccatcagttagcggacccaaaaggcctcaggatagggttgcagtcaccgacatgaagtccgacttccaggcctgcctaaacgaaaaagtcggttttaaaggatttcagattgcagccgaaaagcaaaaagatatcgtgagcatacattatgagggatctgagtacaagctcagtcatggctctgtcgtgatcgccgctgttatttcttgcaccaacaattgtaacccaagcgtgatgcttgccgccggcttacttgctaaaaaggcggtcgaggcagggttacgggtcaaaccctatatccgcactagcctgtctcctggaagtggcatggtgacccactacctttctagcagcggcgtcctcccttatctgtccaagttgggtttcgagattgtgggctatggctgcagtatctgcgtgggaaacaccgccccactttcggatgccgtgctcaacgccgtcaaacagggcgatttggtgacttgcggtatcctatccggtaataaaaattttgaaggccgtttgtgcgactgcgtacgcgctaactacttagcgagtcctccactcgtggtggcttacgcgatcgccggaacggtaaatattgactttcaaactgaacctctggggacggatccaacggggaagaatatctatctgcacgacatctggccttcccgagaggaagtgcatcgtgtcgaggaggagcacgtgattttgagcatgttcaaggctctcaaagataagattgagatgggcaacaaacgatggaattccttagaggccccagactccgttctgtttccttgggatctaaaatccacctatatcaggtgtccaagcttctttgataagctgaccaaggagcctatcgcacttcaagcaattgagaacgcccacgtgctattgtacctcggagattctgtgacgaccgaccatatttcccccgccgggagcattgctcgcaatagtgctgcagcgaaatatctgaccaatagaggactcactccgcgtgagttcaacagttatggcgcacggagggggaatgacgcagtgatgactcgaggtaccttcgccaacataaaattatttaacaaattcatcgggaaaccggcccctaaaaccatccattttccatccggccagacactggatgtttttgaagcagccgaactgtatcagaaagaagggatcccgttaattatcctcgccggcaagaagtacggctctgggaatagcagggattgggcagctaagggcccgtatctgctgggcgtaaaggccgttctagcggagtcttacgagaagatccacaaagaccacctcattggaatcgggattgctccactgcagtttttgcccggcgaaaatgcagattctttggggctcagcggccgggagacttttagcttgacgtttcccgaagaactcagtcctggcatcaccctcaacatccagacttccactggtaaggtctttagcgtgatcgcaagtttcgaggacgatgtggagattaccctgtacaagcacgggggcctcctgaattttgtggcccgcaaatttagttag

SEQ ID NO: 143800 - DNA, 6354 bp, Artificial Sequence
  derived and/or modified sequence
gctctgctgctctcgcgatatttgcgcgagcctgcttccttctttcctcccttgccagtccgcctgtcttcctccccgtcttccctgcccggcctcccccttcttcccccgctggccccctccccggagggataatatggtctccggcgatggacgccccaaaagcaggatacgcctttgagtaccttattgaaacattaaatgacagttcacataagaagttcttcgatgtatctaaacttggcaccaagtatgatgttctgccttactcaatacgggtcttgttggaagctgctgtacgaaattgtgatggctttttaatgaagaaggaagatgttatgaacattttagactggaaaaccaaacaaagcaatgttgaagtgccctttttccctgcccgtgttcttcttcaagattttactggaataccagcaatggtggattttgctgctatgagggaggcagtgaaaactcttggaggtgatcctgagaaagtccatcctgcttgtccgacagatcttacagttgaccattctttacaaattgacttcagtaaatgtgcaatacagaatgcaccaaatcctggaggtggtgacctgcagaaagcaggaaagctctctccagttaaagtgcagcctaagaagcttccctgcagaggccagactacctgccgaggatcttgtgattctggagaactaggccgaaactcaggaacattttcttcgcagattgagaatacacccatcctgtgtccttttcatttgcaaccagtgcctgaacctgaaacagtgttaaaaaatcaagaagtagaattcggcagaaatcgagagaggcttcagttttttaagtggagttcaagagtttttaagaatgtggcagtgatccctcctggaactggaatggctcatcaaataaacttagaatatttgtcaagagtggtttttgaagaaaaagacctcctcttcccagacagtgtagtcggcacagattcacacataacgatggtgaatggtttagggattctggggtggggggttggaggcattgaaacagaagcagttatgcttggtctgccagtttctcttactttaccagaggtggttggatgtgagttaactgggtcatcaaacccttttgttacatccatagatgttgttcttggtattacaaagcacctcaggcaagtaggagtggctggaaagtttgttgagttttttggaagtggagtttcacaattatctatagttgatcgaactacaatagcaaacatgtgtccggaatatggtgctatcctcagctttttccctgttgacaatgtgacattaaaacatttagaacatacaggttttagcaaagccaaactcgaatcaatggaaacataccttaaagctgtgaaattgtttcgaaatgaccagaattcttcaggagaacctgaatactcccaggtgatccagattaatctgaattcaatagttccatctgttagtggtccaaaaagacctcaggatagagttgctgtgacagatatgaaaagcgatttccaggcttgcttaaatgaaaaggttggatttaaaggcttccaaattgcagctgaaaaacaaaaggatattgtctccattcattatgaaggaagtgaatataagctgtctcatggatcagtggtcattgctgcagttatcagttgtaccaataattgcaatccatctgtcatgcttgctgcaggtcttttggctaaaaaggctgttgaagctggtctgcgtgttaaaccttatataagaacaagtttatctccaggcagtgggatggttacacattacctcagttcaagtggagtattaccatatctaagtaagcttggatttgaaatcgttggctatggatgttcaatttgtgtgggaaatacagcacccttatcagacgcagttttaaatgcagtaaaacagggtgatttggttacctgtggaattttatctggaaacaaaaattttgaaggtcgtctttgtgattgtgttcgtgccaattatcttgcctctccacccttagtggtagcttatgccatagcaggcacagtgaatatagatttccagacagaacctttaggtactgaccccaccggcaagaacatttacctgcatgatatttggcctagtcgagaagaagttcatcgagtagaggaagaacatgttatactatccatgtttaaagcattaaaagataaaatagaaatggggaataaacggtggaattccttagaagcaccggattcagttttgtttccatgggacttaaagtctacttatatcagatgcccttcattttttgataaacttaccaaagagccaattgcactccaggctattgaaaatgcccatgtcttattatatttgggagactctgtcacaacagatcatatatcacctgcaggaagtatcgctaggaatagtgctgccgctaagtatttgacaaacagaggccttacccctcgtgaattcaactcttacggagctcgaagaggtaatgatgctgtaatgacaagaggcacttttgcaaatatcaagctttttaataagtttattggaaaaccagctcctaaaacaattcattttccatcaggacagacgctagatgtatttgaggctgcagagctgtaccagaaagaaggtatcccactgattattttagcaggaaagaaatatggttcaggaaactccagagactgggctgccaaaggaccgtatttactgggtgtgaaagctgttttggccgaaagttatgaaaaaatacacaaagatcatttgattggaattggcatagctccacttcagttccttccaggagaaaatgcagattccttgggcctctccggtagagaaacattttctttaacatttcctgaagaactgtctcctggaattacattgaatatacagacaagcactggaaaagtattcagcgtgattgcttcgtttgaagatgatgtggaaataacattatacaaacatggaggattattaaactttgtggcacgaaaattctcatagtatctacttaccatagatacctttcataactggtaactgcaaagccttttgtgctggacccaggaatccttaccatggagcagcagatagtcccagtatactcacttatctcatccatggatgtaaatgatgatgaatcaacatagtaactgaaatgaaatcttcttgattttaaataatatacgaatggtgctattaatattgctaaaatcaacgtgtgaagtgtgttgtggaagagacctgtaagtatggggggggggcgatattttatcagaccattttgtaaataaaggcagaatttgtgttgaagattcttatatgaataaccttcctggatttgtttagttttgcaccaataaaactgtgtactactgtttgttggtttaagagtagcagattgaaatataagaagccagattagactctaaaattgtggccattggaatctcatttataaatggaccttttaagtatattaattcctcttcagaattgagctggacacatttggcattcttagtttgtcatataaccaggtttatccttagtctaactgcaagggatggaacctgccccaggtcacaatcattctgtccaatccagccaaggttccctccacatatgaagatggaccatggcaggatacaactgattgtgtggcaccatgtattagcagtgggaatatgtatcacatatgatgcagcctttcatatttcagcagtttgccactgtgactgtctggcaagcccccagatggcgttatattaattggattagattattttgctcaccttatgtaatactgtaacttcctataacctaatattttcggtatcattaaccaaaatttcacactcatagttgctaaagagaatgttattcaatcattaaactctgaactgatttcttctatacatttaaattatccaccctcaataatacgggtgctcaaccctatgcattttttaagtgttgctatttcttaattaaattgatttcctgtcattttgaatcatttatcacctgcgatgcatgattctattaattttgttatgttactgttttaaccaaagctgaccgtaaggataaaacacttaagttgttgctgagtactatatatcctcaatatgcatgtctgcccatcacatcaaatgttctgtcaacaagatgtttggtaattttttttaaaaaggttggaaaattaattatagaaggttctatactgtttttttaattaagaaactaagtctagcaggctaaaggttaattgtagtgattttttttcacatagatatctttctatgacctagttagttactgcaattcagaattagttcacattgcataaagaattacttgttgtaagcaaaatgctgaaactaccaaaccagtggatgaagaccactaagaactttgcacataatcatacaatcttttgaaaatattttgcaaatatgtgtttagacaataagatggactagagttcgacaaaatgatttctttatttaaattttgtataagtattttcttcgacactttcaaattatattgtgttcttgatatatgctgtatatttatttgttagtgcatgtgtttttaatttacatgaaaacatgagttaggagaaattacaggttgaaagatgaaatgcctgtatgtgctctgaagaaatggtaattccagattgtgcagggggaaacaaatctattttgttttgttttgttttttgagacggagtcttgccctgtggctgggctggagtgcaatggcgcgatcttggctcactgcaacctccgcctcccgggttcaggggattctcctgcctcagcctcctgagtagctgggactacaagcatgcaccaccacgcccagctaatttttgtagttttagtagagatggggtttcaccatgttggccagatgatctgaatctcttgacctcgtgatccgcccgccttggcctccacaagtgctgggattacaggtgtgagccaccacacccggcctatattgttttgaaagcatactctatatatagttatgggcagaggcacaggcatcctcagcagctgattcaggagatgatggtaaagctagctaactatgaattaaacattcacatatccagtctacctggtccagtaataatacaagcaaatcttgtatttcaggaacaaatcaaggttctcttaattttttggcttatatacaatgaagtaaaaacttgataaacatggtttcaaattgaggaggagagtcttggatgtatgttttaatatgtataccttataattctgcctctagccaaatgctatgtttgcaaaatgtggcatctgttagtttttattgtctgtgtcttctttgtttactataccttgggtaattttgtgttaccaaaaaaaaaaaaaaaaaaaggaagtgtaatgtcagacacacaagaaaagcaaatcagtgttgtaagcttaaagtacaatttcaaaggtcactaccaacagcagggttttttttatactttgaaaacattatgctacatatcattgccattttcatattttggggttttgctactcttatacaatggaatcaatggaaatgtcatccagccactgaattgccattattatatctaaaaagtttctaagatgacagttatcactattttgttttatctccatgctgacatttgaaagaaggtactagtatccctctagccagattgcttagtttttcgttggtaatcaaacaacagttgtactaaaggaaagtaaagctaggacctaaatcagaatcatagttgcctgcatatatggtaacaaggtcgtgtgcatttgctttcacagtgatgagtgagaggatgagaagaaattatttgacatttttctgtggttgaatagaagacacctttcttttgtctttaggtttaggaggagatactaagatactggatgtttatcctatcttagtttggttggagtaataagagagaagaagagggtggactttggcttttcagtgttttttcccctaaagagtgatattgctgacgtttctatcaattttacacataatatgtggctatgaaaccatatatctcacttaagtaacaaagtaatcactttgtctatcactaagtaatagacaaaaatcattgtctattatttaaagccaacaaaacagtgtaacagttttaagttcaataatgttaagtattgtatagaaatatattggaggcaaagttcagttgatgacaattgtgtatatgttactgatgctgtaaattatttttaataaagaaaattgtattatcacattt

SEQ ID NO: 143801 - DNA, 2892 bp, Artificial Sequence
  derived and/or modified sequence
atggatgcccccaaggccggctacgcctttgagtacctgattgagaccctgaatgacagcagccacaagaagttctttgatgtgtccaagctgggcaccaagtatgatgtgctgccctacagcatccgggtgctgctggaggccgctgtgaggaactgtgatggcttcctgatgaagaaggaggatgtgatgaacatcctggactggaagaccaagcagagcaatgtggaggtgcccttcttccctgcccgggtgctgctgcaggacttcaccggcatcccagccatggtggactttgctgccatgagggaggccgtgaagaccctgggcggggaccctgagaaggtgcacccagcctgccccacagacctgactgtggaccacagcctgcagattgacttcagcaaatgtgccatccagaatgcccccaaccctgggggcggggacctgcagaaggccggcaagctgagccctgtgaaggtgcagcccaagaagctgccctgccggggccagaccacctgccggggcagctgtgacagcggggagctgggcagaaattctggcaccttcagcagccagatcgagaacacccccatcctgtgccccttccacctgcagcctgtgcctgagcctgagaccgtgctgaagaaccaggaggtggagtttggaagaaaccgggagcggctgcagttcttcaagtggagcagcagggtcttcaagaatgtggccgtcatccccccaggcaccggcatggcccaccagatcaacctggagtacctgagccgggtggtgtttgaggagaaggacctgctcttcccagattctgtggtgggcacagacagccacatcaccatggtgaatggcctgggcatcctgggctggggcgtgggcggcattgaaacagaagctgtgatgctgggcctgcctgtgtccctgaccctgcctgaggtggtgggctgtgagctgaccggcagcagcaacccctttgtgaccagcattgatgtggtgctgggcatcaccaagcacctgcggcaggtgggcgtggccggcaagtttgtggagttcttcggcagcggcgtgtcccagctgagcatcgtggacaggaccaccatcgccaacatgtgcccagaatatggagccatcctgtccttcttccctgtggacaacgtgaccctgaagcacctggagcacacaggcttcagcaaggccaagctggagagcatggagacctacctgaaggctgtgaagctgttcagaaatgaccagaacagcagtggagagcctgagtacagccaggtgatccagatcaacctgaacagcatcgtgcccagcgtgtctggccccaagaggccccaggacagagtggccgtgacagacatgaagagtgacttccaggcctgcctgaatgagaaggtgggcttcaagggcttccagattgctgctgagaagcagaaggacatcgtgtccatccactatgagggcagcgagtacaagctgagccacggctctgtggtgattgctgctgtgatcagctgcaccaacaactgcaaccccagcgtgatgctggccgccggcctgctggccaagaaggctgtggaggccggcctgcgggtgaagccctacatccgcaccagcctgagccctggcagcggcatggtgacccactacctgagcagcagcggcgtgctgccctacctgagcaagctgggctttgaaattgtgggctacggctgcagcatctgtgtgggcaacacagcccccctgagtgatgctgtgctgaatgctgtgaagcagggcgacctggtgacctgtggcatcctgagcggcaacaagaactttgagggccgcctgtgtgactgtgtgcgggccaactacctggccagcccccccctggtggtggcctatgccatcgccggcaccgtgaacatcgacttccagacagagcccctgggcacagaccccaccgggaagaacatctacctgcatgacatctggcccagccgggaggaggtgcaccgggtggaggaggagcacgtgatcctgtccatgttcaaggccctgaaggacaagattgagatgggcaacaagcgctggaacagcctggaggccccagacagcgtgctcttcccctgggacctgaagagcacctacatccgctgccccagcttctttgacaagctgaccaaggagcccatcgccctgcaggccattgaaaatgcccacgtgctgctgtacctgggggacagcgtgaccacagaccacatcagccctgctggcagcatcgccagaaattctgctgctgccaagtacctgaccaacagaggcctgaccccccgggagttcaacagctatggagccaggagaggaaatgatgctgtgatgacccggggcacctttgccaacatcaagctgttcaacaagttcatcggcaagccagcccccaagaccatccacttccccagcggccagaccctggatgtgtttgaggccgctgagctgtaccagaaggagggcatccccctcatcatcctggccggcaagaagtatggcagcggcaacagccgggactgggccgccaagggcccctacctgctgggcgtgaaggctgtgctggccgagagctatgagaagatccacaaggaccacctgattggcatcggcatcgcccccctgcagttcctgcctggagaaaatgctgacagcctgggcctgagcggccgggagaccttcagcctgaccttccctgaggagctgagccctggcatcaccctgaacatccagaccagcacaggcaaggtgttttctgtgattgccagctttgaagatgatgtggagatcaccctgtacaagcatggaggcctgctgaactttgtggccaggaagttctcctag

SEQ ID NO: 143802 - DNA, 2892 bp, Artificial Sequence
  derived and/or modified sequence
atggacgcccccaaggccggctacgccttcgagtacctgatcgagactctcaacgactccagtcacaagaagttcttcgatgtgagcaagctggggactaaatatgacgtgctgccatattcaattcgagtccttctggaggcagctgtgcgcaattgcgatggcttcctgatgaaaaaggaagacgtcatgaatatcctcgactggaaaactaagcagtctaatgttgaggtgccattctttcctgccagagttctgttgcaggacttcacgggcatccctgccatggtagatttcgccgcaatgcgagaggccgtgaaaactcttggaggcgacccagagaaggtgcaccctgcctgccctacagatctgacggtggaccactcgttgcagatcgatttctccaaatgcgctattcagaatgcccctaaccccggcggaggcgatttgcagaaagccggaaagctgtcacctgttaaagtgcagcctaagaaactcccttgtcgtggccagacgacctgccgtggatcatgcgatagtggagagctcgggcggaacagcggcactttctcatcacagatcgagaacactcccatcctgtgccctttccacttgcagccggtacccgagccagagaccgtgctgaaaaatcaggaggttgaattcggtcgtaaccgtgaaaggctacaattctttaagtggagcagcagagttttcaagaacgtagccgttattcctcctggcaccggcatggcgcatcagattaatttagaatacctttctcgcgtggtgttcgaagagaaggacttgttgtttcccgactccgtagtcgggaccgattcccatattacgatggtgaatgggctcggcatccttggctggggagtcggggggatagaaacagaggccgtaatgttgggattgccagtgtcgctgacactacccgaggtggtcggatgtgaacttacgggcagcagcaacccatttgtcacatctatcgatgtggtcctaggaatcactaaacacctccggcaggtgggtgtggcgggaaagttcgtggaattctttggttcgggggtttcccagctcagcattgtggaccgaactactatcgccaatatgtgccccgaatacggagccatcctctccttctttcccgttgacaatgtgacacttaagcatttggaacacaccgggttcagcaaagccaaattagagtctatggaaacctatttgaaggccgtgaagctctttaggaatgaccaaaattcctccggcgaaccagagtatagtcaggtgattcagattaaccttaattcaatcgtgccgtctgtgtcagggccaaagcgtcctcaggaccgagtggcggtgaccgacatgaaaagcgattttcaggcatgcctgaacgagaaggtggggtttaagggctttcagatagcagccgagaaacagaaagacatagtgtcaatacactatgagggaagcgagtataagctatcacatggctcggtggtgattgctgccgtgatttcatgcacaaacaactgcaaccctagtgttatgctggctgcgggtttactcgctaaaaaggcggtggaggcaggccttagagtgaaaccctacatccgcacgagcttatctccggggtccggaatggtcacgcactacctgtcttcttcaggtgttctgccttatctgagtaaactcgggttcgaaattgtcggatatggatgttcgatttgcgtgggcaacacagcacccctgagtgatgctgttctaaacgcggttaagcagggggacttggttacatgcggaatcctgtctggcaataagaactttgaaggccgcctgtgcgattgcgtccgtgcaaactatctggcaagcccacctttggttgtcgcgtacgccatcgctggaacggtgaatattgatttccaaacagaaccattgggaaccgatcccactgggaaaaatatctacctgcacgacatctggccgagccgggaagaagtccatagagtcgaagaggagcacgtgatcctgagcatgttcaaagccctgaaagataagatcgagatgggcaataaacgatggaacagtctggaggctcctgactccgtgctttttccatgggatcttaaatcaacctacattcgctgtccgtcattttttgataaattgaccaaggagccgatcgccctccaggctatcgaaaacgcacatgttctcttgtacctgggtgactccgtcacaacagaccatatctccccagccggctcaatcgccaggaattcagcagccgccaagtatttgaccaacagaggactaactcccagagagttcaacagttacggtgcccggagaggcaatgatgcagtcatgacacgcggaacgttcgcaaatatcaaattgttcaataagttcatcggcaagccggcgcccaagacgatccactttccttccggccagaccttggatgtttttgaagctgctgaattgtaccagaaggagggaatcccactgattatcctggcagggaaaaaatacggtagtggcaacagccgcgactgggccgcgaagggcccctacctgctgggtgtgaaggcagtactcgcggaaagttatgaaaaaatccacaaggatcatctgatagggataggtatcgctcccctacagttcctgcccggagagaatgcagacagcctgggcctttctgggcgcgagactttttcgcttacttttcctgaggagctgagtccagggatcaccctgaacatacaaaccagcactggcaaggttttttcagtgatcgcatccttcgaagatgacgtcgagattactctctataaacatggaggactcctcaatttcgtggcccgcaagttctcctag

SEQ ID NO: 143803 - DNA, 2892 bp, Artificial Sequence
  derived and/or modified sequence
atggacgctccaaaagctggatatgcattcgagtatctgatcgagaccctaaacgacagcagccacaagaaatttttcgacgtctctaaactaggaaccaagtatgacgttcttccttacagcattagagttctgctcgaggcggctgtgcgtaattgcgacggtttcctgatgaagaaggaggacgtgatgaacattctagactggaaaacgaaacagtccaacgtcgaggttccctttttccccgcacgagttctcctgcaagattttacagggatccctgctatggtggattttgccgcaatgagagaagccgtcaaaaccctgggcggtgacccagaaaaggtccaccccgcatgcccaacagacctgacagtggaccactccctgcagatcgatttttccaagtgcgcgatccaaaacgcaccaaacccgggtggcggagatctgcagaaagcaggaaagttgtctccagtcaaagtgcagccaaagaagctaccttgtagaggtcagactacatgtcggggaagttgtgactctggagaactgggcaggaacagtggcacattttcttctcagatcgagaacacaccgatcctgtgtcctttccatctccagcccgttccagaacccgaaaccgtgcttaaaaatcaggaggtagaattcgggcgaaatagagagcgcttacagtttttcaaatggagcagccgtgtctttaaaaacgtcgccgtcatccctcctgggactggtatggctcaccaaataaatctcgagtaccttagcagagtggtgttcgaagagaaagatttattgttcccagactcggtcgtcggcacagatagtcacattaccatggttaacggactgggaattctgggatggggagtgggagggatcgagaccgaagccgtgatgcttggtctgcctgtcagcctgaccttacccgaagttgttgggtgcgaactcaccggctcatcgaatccttttgtgactagcattgatgtggtgctcggtatcacaaagcacttgcgccaggttggcgtggccggaaaattcgtggaattttttggttccggcgtcagtcaactctctattgtggaccgcacaactattgccaatatgtgtcctgagtatggagcgatcctatctttcttcccagtggataacgtcaccctcaaacacctggagcatacgggtttcagcaaggctaagctggagagcatggagacataccttaaggccgtcaaactgttccgcaatgatcaaaattcaagcggcgagccagagtatagccaagttatacagattaacctgaattctatcgtgcctagtgtgagtggaccaaagaggccccaggaccgggtggccgtgaccgatatgaagtccgactttcaggcctgtttgaacgaaaaggtggggtttaaaggctttcaaattgcagccgaaaaacagaaggatatagtaagcattcactatgagggctccgaatacaagctaagccacgggtctgtcgtgatcgcggcagtgatctcatgcacaaataattgcaacccctcagtgatgttagccgcaggactgttggctaagaaagctgttgaggctggactgagagttaagccttatatcagaaccagtctctctccgggatccggcatggtaacccattatttgagcagcagtggcgtcctgccctacctgagtaagttagggtttgaaatcgtgggttatggctgctccatttgtgtgggcaacaccgcgcctctaagtgacgcagttctaaacgccgtcaagcaaggcgacctggtcacatgcggaatcctaagcggcaacaagaattttgagggccgtctctgtgattgcgtgcgagcaaattacctggcaagccctcccctcgtggttgcttatgcaatcgccggtacagtcaacatagactttcagacagagcctctaggaaccgatcccaccggaaagaatatatatctgcacgacatatggccttctagggaagaggttcatagggtggaagaagaacacgttatcctgtccatgttcaaggccctgaaagataaaattgaaatgggaaacaaacgatggaatagtttggaagcacccgactcggtgctgtttccatgggaccttaagagtacatacatccggtgtccttctttcttcgataagcttactaaggaaccgatagcactacaggccatagaaaatgcccacgtcctactgtacctgggcgacagcgtgacaacagaccacatctcacctgctggatcgatcgccaggaacagcgccgcagcgaagtatctgaccaacagaggcctcacacctagagaattcaattcgtacggggcacgcaggggcaatgacgcagtgatgacacgcggtacgttcgccaatatcaagctgtttaataaattcatcggaaagccagccccaaagaccatccactttccctccggtcagacgctagacgtgttcgaagctgccgaactgtatcagaaggagggcattcctctcattattttggcaggaaaaaagtacggctccggtaacagtcgggactgggcagccaagggaccgtacctgctgggcgtgaaggcagtgctggcggagagctatgaaaagattcataaagatcatctcatcgggatcggtattgcccctctgcagttcctgccaggcgagaatgccgactccctgggcctcagcggccgagagacgttcagtctgacgttcccagaggaactttccccagggataacattaaacattcaaaccagtaccggcaaggttttctcggtcattgcatcatttgaagacgatgtggagattactctgtataaacacggcggactgctgaatttcgttgctcgaaagttctcctag

SEQ ID NO: 143804 - DNA, 2892 bp, Artificial Sequence
  derived and/or modified sequence
atggacgcccccaaggccggctacgccttcgagtacctgatcgagaccctgaacgacagcagccacaagaagttcttcgacgtgagcaagctgggcaccaagtacgacgtgctgccctacagcatcagagtgctgctggaggccgccgtgagaaactgcgacggcttcctgatgaagaaggaggacgtgatgaacatcctggactggaagaccaagcagagcaacgtggaggtgcccttcttccccgccagagtgctgctgcaggacttcaccggcatccccgccatggtggacttcgccgccatgagagaggccgtgaagaccctgggcggcgaccccgagaaggtgcaccccgcctgccccaccgacctgaccgtggaccacagcctgcagatcgacttcagcaagtgcgccatccagaacgcccccaaccccggcggcggcgacctgcagaaggccggcaagctgagccccgtgaaggtgcagcccaagaagctgccctgcagaggccagaccacctgcagaggcagctgcgacagcggcgagctgggcagaaacagcggcaccttcagcagccagatcgagaacacccccatcctgtgccccttccacctgcagcccgtgcccgagcccgagaccgtgctgaagaaccaggaggtggagttcggcagaaacagagagagactgcagttcttcaagtggagcagcagagtgttcaagaacgtggccgtgatcccccccggcaccggcatggcccaccagatcaacctggagtacctgagcagagtggtgttcgaggagaaggacctgctgttccccgacagcgtggtgggcaccgacagccacatcaccatggtgaacggcctgggcatcctgggctggggcgtgggcggcatcgagaccgaggccgtgatgctgggcctgcccgtgagcctgaccctgcccgaggtggtgggctgcgagctgaccggcagcagcaaccccttcgtgaccagcatcgacgtggtgctgggcatcaccaagcacctgagacaggtgggcgtggccggcaagttcgtggagttcttcggcagcggcgtgagccagctgagcatcgtggacagaaccaccatcgccaacatgtgccccgagtacggcgccatcctgagcttcttccccgtggacaacgtgaccctgaagcacctggagcacaccggcttcagcaaggccaagctggagagcatggagacctacctgaaggccgtgaagctgttcagaaacgaccagaacagcagcggcgagcccgagtacagccaggtgatccagatcaacctgaacagcatcgtgcccagcgtgagcggccccaagagaccccaggacagagtggccgtgaccgacatgaagagcgacttccaggcctgcctgaacgagaaggtgggcttcaagggcttccagatcgccgccgagaagcagaaggacatcgtgagcatccactacgagggcagcgagtacaagctgagccacggcagcgtggtgatcgccgccgtgatcagctgcaccaacaactgcaaccccagcgtgatgctggccgccggcctgctggccaagaaggccgtggaggccggcctgagagtgaagccctacatcagaaccagcctgagccccggcagcggcatggtgacccactacctgagcagcagcggcgtgctgccctacctgagcaagctgggcttcgagatcgtgggctacggctgcagcatctgcgtgggcaacaccgcccccctgagcgacgccgtgctgaacgccgtgaagcagggcgacctggtgacctgcggcatcctgagcggcaacaagaacttcgagggcagactgtgcgactgcgtgagagccaactacctggccagcccccccctggtggtggcctacgccatcgccggcaccgtgaacatcgacttccagaccgagcccctgggcaccgaccccaccggcaagaacatctacctgcacgacatctggcccagcagagaggaggtgcacagagtggaggaggagcacgtgatcctgagcatgttcaaggccctgaaggacaagatcgagatgggcaacaagagatggaacagcctggaggcccccgacagcgtgctgttcccctgggacctgaagagcacctacatcagatgccccagcttcttcgacaagctgaccaaggagcccatcgccctgcaggccatcgagaacgcccacgtgctgctgtacctgggcgacagcgtgaccaccgaccacatcagccccgccggcagcatcgccagaaacagcgccgccgccaagtacctgaccaacagaggcctgacccccagagagttcaacagctacggcgccagaagaggcaacgacgccgtgatgaccagaggcaccttcgccaacatcaagctgttcaacaagttcatcggcaagcccgcccccaagaccatccacttccccagcggccagaccctggacgtgttcgaggccgccgagctgtaccagaaggagggcatccccctgatcatcctggccggcaagaagtacggcagcggcaacagcagagactgggccgccaagggcccctacctgctgggcgtgaaggccgtgctggccgagagctacgagaagatccacaaggaccacctgatcggcatcggcatcgcccccctgcagttcctgcccggcgagaacgccgacagcctgggcctgagcggcagagagaccttcagcctgaccttccccgaggagctgagccccggcatcaccctgaacatccagaccagcaccggcaaggtgttcagcgtgatcgccagcttcgaggacgacgtggagatcaccctgtacaagcacggcggcctgctgaacttcgtggccagaaagttcagctag

SEQ ID NO: 143805 - protein, 191 aa, Artificial Sequence
  derived and/or modified sequence
MVKKLVMAQKRGETRALCLGVTMVVCAVITYYILVTTVLPLYQKSVWTQESKCHLIETNIRDQEELKGKKVPQYPCLWVNVSAAGRWAVLYHTEDTRDQNQQCSYIPGSVDNYQTARADVEKVRAKFQEQQVFYCFSAPRGNETSVLFQRLYGPQALLFSLFWPTFLLTGGLLIIAMVKSNQYLSILAAQK

SEQ ID NO: 143806 - protein, 130 aa, Artificial Sequence
  derived and/or modified sequence
MVKKLVMAQKRGETRALCLGVTMVVCAVITYYILVTTVLPLYQKSVWTQESKCHLIETNIRDQEELKGKKVPQYPCLWVNVSAAGRWAVLYHTEDTRDQNQQVLNWRDGDTSLYPCQVCEPVPNCPCPRG

SEQ ID NO: 143807 - DNA, 576 bp, Artificial Sequence
  derived and/or modified sequence
atggtgaagaagcttgtgatggcccagaagagaggagaaaccagagctctgtgtctgggggttactatggtcgtttgcgcggtcataacttactacatcctggttactactgtgttgccactataccagaaatctgtatggacgcaagagagtaagtgccacctcatcgagactaatattagagaccaagaagagttgaagggcaagaaagtcccacagtacccgtgtctgtgggtgaatgtatcggccgcgggtcggtgggccgtcttgtatcatacagaagacaccagagatcagaaccagcagtgttcgtatattccagggagtgtggataactaccaaactgctcgggctgatgttgaaaaggtgcgcgccaaattccaggagcagcaggttttttattgctttagcgcccccagaggaaacgagacctcagttctgtttcagcgactctatggaccacaggctctgctcttcagcttattttggcctacgtttttgctgaccggcggactattaatcattgccatggtgaagtccaatcagtatctgtccattcttgccgcccagaaatag

SEQ ID NO: 143808 - DNA, 393 bp, Artificial Sequence
  derived and/or modified sequence
atggtcaagaaactggtgatggcgcagaagagaggcgaaacaagagccttatgcctcggcgtgaccatggtcgtatgcgccgtgataacctattatatcctggtcacgacagtattgcctttgtatcagaaatccgtttggacccaggagagcaagtgccatttgatcgagaccaacatccgggaccaggaggagttgaaagggaaaaaggtgccccaatacccatgcctgtgggtcaacgtgagcgccgctgggcgctgggcagtgctctaccacacagaggacacacgagatcagaatcagcaagtgctgaattggcgtgacggggacacaagcttgtatccttgccaggtttgcgagccggtaccaaattgtccgtgcccgaggggctag

SEQ ID NO: 143809 - DNA, 576 bp, Artificial Sequence
  derived and/or modified sequence
atggtgaagaagctggtgatggcccagaagagaggagagacccgggccctgtgcctgggcgtgaccatggtggtgtgtgctgtgatcacctactacatcctggtgaccaccgtgctgcccctgtaccagaagtctgtgtggacccaggagagcaagtgccacctgattgagaccaacatccgggaccaggaggagctgaagggcaagaaggtgccccagtacccctgcctgtgggtgaatgtgtctgctgctggccgctgggccgtgctgtaccacacagaggacacccgggaccagaaccagcagtgcagctacatccctggctctgtggacaactaccagacagcccgggcagatgtggagaaggtgcgggccaagttccaggagcagcaggtgttctactgcttcagcgcccccagaggaaatgagacctctgtgctcttccagaggctgtatggcccccaggccctgctcttcagcctcttctggcccaccttcctgctgactggaggcctgctgatcatcgccatggtgaagagcaaccagtacctgagcatcctggccgcccagaagtag

SEQ ID NO: 143810 - DNA, 393 bp, Artificial Sequence
  derived and/or modified sequence
atggtgaagaagctggtgatggcccagaagagaggagagacccgggccctgtgcctgggcgtgaccatggtggtgtgtgctgtgatcacctactacatcctggtgaccaccgtgctgcccctgtaccagaagtctgtgtggacccaggagagcaagtgccacctgattgagaccaacatccgggaccaggaggagctgaagggcaagaaggtgccccagtacccctgcctgtgggtgaatgtgtctgctgctggccgctgggccgtgctgtaccacacagaggacacccgggaccagaaccagcaggtgctgaactggagagatggagacaccagcctgtacccctgccaggtgtgtgagcctgtgcccaactgcccctgcccccggggctag

SEQ ID NO: 143811 - DNA, 576 bp, Artificial Sequence
  derived and/or modified sequence
atggtgaagaagctggtgatggcccagaagcggggcgagacccgggcgttatgccttggggttactatggtggtgtgcgccgtgataacatactacatccttgtgaccaccgtgctgcccctttatcaaaagtcagtctggactcaggagtctaaatgtcacctgatcgaaacgaacattcgcgaccaggaagagttgaaagggaagaaggttccgcaatacccgtgtctctgggtgaatgtgagtgcggccggacgctgggcagtgttgtatcatacagaggacactcgtgatcaaaatcagcaatgctcctatatacccggcagtgtggacaactaccaaactgctcgggcagacgtggagaaggttcgcgccaagttccaggagcagcaggtcttttactgttttagtgctcctcgcggtaatgagacatccgtattgttccaaagactgtacggaccgcaagcactcctattttccctgttctggccaactttccttctcactggcggcttactcattattgctatggtgaaatctaaccagtacctgtctatcctcgccgcacaaaagtag

SEQ ID NO: 143812 - DNA, 393 bp, Artificial Sequence
  derived and/or modified sequence
atggtgaagaagctggtgatggcccagaagcggggcgagacccgggctttgtgcctgggtgtgaccatggtggtatgtgcggtgatcacctattacattttagtgactacagtcctgcccctgtaccagaagagcgtttggactcaagaatccaagtgtcacctcatcgagacaaacattcgcgaccaggaggagctgaagggtaagaaggtgccacagtatccgtgcctctgggttaatgttagcgcagccgggcgatgggctgtcctctaccacacagaagatactagagaccaaaatcagcaggttttgaactggagggatggtgatacaagcttgtatccatgccaagtctgtgagccggtgcccaattgtccgtgtcctcgggggtag

SEQ ID NO: 143813 - DNA, 1559 bp, Artificial Sequence
  derived and/or modified sequence
agaatcatttcctatttctggcatctttgccagcccacagagacagagagaagaagaaatatttccaaatataccaggctgatctttcgtagtttctcagtcttgctgtctgttgttgtttgaaatctgtttcccacgagactctgggaagatggaggtgcagggcttgggtaacagctgccttcctcagggctgggtacctgctctccgagtctgtgtctccaggctgtgtgctcagacttgaccatgtttgggcatggaggcttgccccagatggggaccaaaagctgcttccctggagacgggcggggaggccaaacttcctgctgaagctctgtggcctcttttggggtgggggcgggggtccaggcagaaagaaactgtctgctgctcaagacccacaggacgccgggaagactaaatgatcactgcccccagtgaatatggtgaagaagctggtgatggcccagaagcggggagagacacgagccctttgcctgggtgtaaccatggtggtgtgtgccgtcatcacctactacatcctggtcacgactgtgctgcccctctaccagaaaagcgtgtggacccaggaatccaagtgccacctgattgagaccaacatcagggaccaggaggagctgaagggcaagaaggtgccccagtacccatgcctgtgggtcaacgtgtcagctgccggcaggtgggctgtgctgtaccacacggaggacactcgggaccagaaccagcagtgctcctacatcccaggcagcgtggacaattaccagacggcccgggccgacgtggagaaggtcagagccaaattccaagagcagcaggtcttctactgcttctccgcacctcgggggaacgaaaccagcgtcctattccagcgcctctacgggccccaggccctcctcttctccctcttctggcccaccttcctgctgaccggtggcctcctcattatcgccatggtgaagagcaaccagtacctgtccatcctggcggcccagaagtagagccatccatccatgccataccacttgtcagggcacaggggactggctgggcccccagggctgctccccacttgcagcacaatgccttctccacctgccctcccactcttccagtccaatccacgctgtcttctgttgcaggactaacctttgagaaatccttttgtgaagtcattgcctgctcaagaatgtacagtggctccccaatgccttggaggccataaggccagccagttctagctctctattacctgtccccactcaactgactcatacctgtttccggctgcatcactatgtgccccacagagaacgatgatcgtcacctctgtgcctgagttctccctgttgtctcaaagcggtacccatcctcccccagaagctgtccccagcgagcctcccttctttgtttgaattctctaataagagcaacagcagctcccatttctagaacacatttacagtattactattttctaggatataaagtgccatatatatttttaattccaatattaataaatgtatgccaaacaacaa

SEQ ID NO: 143814 - DNA, 1733 bp, Artificial Sequence
  derived and/or modified sequence
cagagagaagaagaaatatttccaaatataccaggctgatctttcgtagtttctcagtcttgctgtctgttgttgtttgaaatctgtttcccacgagactctgggaagatggaggtgcagggcttgggtaacagctgccttcctcagggctgggtacctgctctccgagtctgtgtctccaggctgtgtgctcagacttgaccatgtttgggcatggaggcttgccccagatggggaccaaaagctgcttccctggagacgggcggggaggccaaacttcctgctgaagctctgtggcctcttttggggtgggggcgggggtccaggcagaaagaaactgtctgctgctcaagacccacaggacgccgggaagactaaatgatcactgcccccagtgaatatggtgaagaagctggtgatggcccagaagcggggagagacacgagccctttgcctgggtgtaaccatggtggtgtgtgccgtcatcacctactacatcctggtcacgactgtgctgcccctctaccagaaaagcgtgtggacccaggaatccaagtgccacctgattgagaccaacatcagggaccaggaggagctgaagggcaagaaggtgccccagtacccatgcctgtgggtcaacgtgtcagctgccggcaggtgggctgtgctgtaccacacggaggacactcgggaccagaaccagcaggtactgaactggagggatggggacacatccctttatccctgtcaggtgtgtgagcctgttcctaactgtccctgtccccgaggctgagaaagatcaacccacttgaccaggtctcacagctggaatgagactgagccagccctagctcttctgtgttggagtcacacagacctgggtttgaatctgccgctaactggctgtgtaaacataggcaggccacttagcctctcacctcctcagtttccacccttgtaaagtggaatgctaatgctgcaccttgaagagctgttatcaagtcagagacgctgtatataaagtgccacgcttgatgctgagtggatagtgggcactcaaacaaaagcagtgattagtgttagtactttcattctacaacctcagtcaaatgagggaccaggcccagggccagatcctcaaagtggaatcccggtgactccccaggaaaccagggactcagggctggagtaacctccataaacaaacatttagatggtttttccatccttgcatcccaacatcccaccctccccctccaaaacacaaaactcaccaccatatcctttcctaaagcgatcagttggcccatattctgtctctcttccttccttctttctttccttcttttttccctttcttccctccttctttcttttcttttttttcccctccctccttccctccctctctccctcccttccttccttccttccttccttccttgtttccttctttcctcctctcatttatttattcaacagccattgagcacctcctgtgtcaagcctgtaggactcaagaggagagagctcatgcatgaacagtgcctagcagggaagaattggcaccggggagaagaacagaggaagttacaggggttagaggagggggatgttttccagctgacaatgatgggggtatcagaaaggctcttggtgagattgcaccattgcactccagcctggcaacaagagtgaaactccatctcaaaaaaaaaaaaaaaaaaaagaaa

SEQ ID NO: 143815 - DNA, 576 bp, Artificial Sequence
  derived and/or modified sequence
atggtgaagaagctggtcatggcgcagaaacgcggagaaacacgagcattgtgtcttggagtgacaatggtagtgtgcgctgttataacctattatatattagtcactacagtgcttcccctgtatcagaagtctgtgtggacgcaggagtcaaagtgccacttaatcgaaactaatattcgcgaccaggaggaactgaagggcaaaaaggtgcctcagtacccgtgcctttgggtgaacgtgagcgctgctggcagatgggctgtgctgtaccatacagaggatactcgcgatcagaaccagcagtgttcttatatacctggtagcgtggataattaccagacagcgagggccgacgttgaaaaagtaagagcaaagttccaggaacaacaagtcttctactgtttctccgccccaagaggaaatgagacctccgttttgttccagagattatacgggccacaggccctcctatttagccttttctggcccactttcttgctgaccggcggtctgctaataatcgccatggtgaagtctaaccaatatctaagcattttagcagcacagaaatag

SEQ ID NO: 143816 - DNA, 393 bp, Artificial Sequence
  derived and/or modified sequence
atggtgaaaaagctcgtgatggcccaaaagcgtggcgagactcgggctctgtgtttgggcgtcactatggtcgtgtgcgccgtcataacctactatatcttggtaaccaccgtgctgccattgtatcagaagtccgtctggacccaagagagtaaatgtcatctcatagagactaacatacgcgaccaggaagagctgaaagggaaaaaggtcccacagtacccatgcctgtgggtgaatgtttcagccgcaggccgatgggcagtgctttatcataccgaggatactagagatcagaaccagcaagtcttaaactggagagacggcgacaccagcttatatccctgtcaagtgtgcgagcctgtgccaaactgcccttgcccccgtggatag

SEQ ID NO: 143817 - DNA, 576 bp, Artificial Sequence
  derived and/or modified sequence
atggtgaagaagctggtgatggcccagaagagaggcgagaccagagccctgtgcctgggcgtgaccatggtggtgtgcgccgtgatcacctactacatcctggtgaccaccgtgctgcccctgtaccagaagagcgtgtggacccaggagagcaagtgccacctgatcgagaccaacatcagagaccaggaggagctgaagggcaagaaggtgccccagtacccctgcctgtgggtgaacgtgagcgccgccggcagatgggccgtgctgtaccacaccgaggacaccagagaccagaaccagcagtgcagctacatccccggcagcgtggacaactaccagaccgccagagccgacgtggagaaggtgagagccaagttccaggagcagcaggtgttctactgcttcagcgcccccagaggcaacgagaccagcgtgctgttccagagactgtacggcccccaggccctgctgttcagcctgttctggcccaccttcctgctgaccggcggcctgctgatcatcgccatggtgaagagcaaccagtacctgagcatcctggccgcccagaagtag

SEQ ID NO: 143818 - DNA, 393 bp, Artificial Sequence
  derived and/or modified sequence
atggtgaagaagctggtgatggcccagaagagaggcgagaccagagccctgtgcctgggcgtgaccatggtggtgtgcgccgtgatcacctactacatcctggtgaccaccgtgctgcccctgtaccagaagagcgtgtggacccaggagagcaagtgccacctgatcgagaccaacatcagagaccaggaggagctgaagggcaagaaggtgccccagtacccctgcctgtgggtgaacgtgagcgccgccggcagatgggccgtgctgtaccacaccgaggacaccagagaccagaaccagcaggtgctgaactggagagacggcgacaccagcctgtacccctgccaggtgtgcgagcccgtgcccaactgcccctgccccagaggctag

SEQ ID NO: 143819 - protein, 481 aa, Artificial Sequence
  derived and/or modified sequence
MGALARALPSILLALLLTSTPEALGANPGLVARITDKGLQYAAQEGLLALQSELLRITLPDFTGDLRIPHVGRGRYEFHSLNIHSCELLHSALRPVPGQGLSLSISDSSIRVQGRWKVRKSFFKLQGSFDVSVKGISISVNLLLGSESSGRPTVTASSCSSDIADVEVDMSGDLGWLLNLFHNQIESKFQKVLESRICEMIQKSVSSDLQPYLQTLPVTTEIDSFADIDYSLVEAPRATAQMLEVMFKGEIFHRNHRSPVTLLAAVMSLPEEHNKMVYFAISDYVFNTASLVYHEEGYLNFSITDDMIPPDSNIRLTTKSFRPFVPRLARLYPNMNLELQGSVPSAPLLNFSPGNLSVDPYMEIDAFVLLPSSSKEPVFRLSVATNVSATLTFNTSKITGFLKPGKVKVELKESKVGLFNAELLEALLNYYILNTFYPKFNDKLAEGFPLPLLKRVQLYDLGLQIHKDFLFLGANVQYMRV

SEQ ID NO: 143820 - protein, 477 aa, Artificial Sequence [sequence omitted]

SEQ ID NO: 143821 - DNA, 1446 bp, Artificial Sequence
  derived and/or modified sequence
atgggcgccctggccagagccctgcccagcatcctgctggccctgctgctgaccagcacccccgaggccctgggcgccaaccccggcctggtggccagaatcaccgacaagggcctgcagtacgccgcccaggagggcctgctggccctgcagagcgagctgctgagaatcaccctgcccgacttcaccggcgacctgagaatcccccacgtgggcagaggcagatacgagttccacagcctgaacatccacagctgcgagctgctgcacagcgccctgagacccgtgcccggccagggcctgagcctgagcatcagcgacagcagcatcagagtgcagggcagatggaaggtgagaaagagcttcttcaagctgcagggcagcttcgacgtgagcgtgaagggcatcagcatcagcgtgaacctgctgctgggcagcgagagcagcggcagacccaccgtgaccgccagcagctgcagcagcgacatcgccgacgtggaggtggacatgagcggcgacctgggctggctgctgaacctgttccacaaccagatcgagagcaagttccagaaggtgctggagagcagaatctgcgagatgatccagaagagcgtgagcagcgacctgcagccctacctgcagaccctgcccgtgaccaccgagatcgacagcttcgccgacatcgactacagcctggtggaggcccccagagccaccgcccagatgctggaggtgatgttcaagggcgagatcttccacagaaaccacagaagccccgtgaccctgctggccgccgtgatgagcctgcccgaggagcacaacaagatggtgtacttcgccatcagcgactacgtgttcaacaccgccagcctggtgtaccacgaggagggctacctgaacttcagcatcaccgacgacatgatcccccccgacagcaacatcagactgaccaccaagagcttcagacccttcgtgcccagactggccagactgtaccccaacatgaacctggagctgcagggcagcgtgcccagcgcccccctgctgaacttcagccccggcaacctgagcgtggacccctacatggagatcgacgccttcgtgctgctgcccagcagcagcaaggagcccgtgttcagactgagcgtggccaccaacgtgagcgccaccctgaccttcaacaccagcaagatcaccggcttcctgaagcccggcaaggtgaaggtggagctgaaggagagcaaggtgggcctgttcaacgccgagctgctggaggccctgctgaactactacatcctgaacaccttctaccccaagttcaacgacaagctggccgagggcttccccctgcccctgctgaagagagtgcagctgtacgacctgggcctgcagatccacaaggacttcctgttcctgggcgccaacgtgcagtacatgagagtgtag
